United States Patent Application Publication US 2014/0057251 A1 - sequence listing, part 45

SEQ ID NO: 51621 - DNA, 2451 bp, Cannabis sativa
  modified_base (2423)..(2425): a, c, t, g, unknown or other
aaattaaaagtcacccataaatttctcaaaaaccaagaattttagttatataggcacactttatatagaatagatatatatgtgtggtagttcctctaaataaaaaagtctctacaaatgttattttttgaaagttgttctctcacggatgtctatctcggaagaaatctaatggaatgatagttatgcccggatgggagttcccggatgactatcatgcccactccaggtccagtcttctaggtagctagccaactccaggatggagttctagttagctagttatctctcctggaatagtagatttggatagtcagatgatgatatcttattcgatagcattatcagcgcgtgtccttggcccgtgagtccataagcttatatatgttcctggaggctctcatacttaagctgacgtggagacttcactcaaaaaggaattggttaagtagttagttattgctaactaacttaacaacctcatttcttgcagccgccgactttaggatcttgatcctaaggctatcaataccaccttgacttgttatttcgagataggagatgaagaacttagttcagatgttattgagagtttgagagagaaagattgagaggtacagagaaaagagagagattgggtttgggtgttgtaagaagaatcttgtgtagataaagaagattcttggatgtaagtgtgagagttgaaacacttagtgagaactcaatagagaatcacgtctcgactgcattgtacctattcttgcttaatcaataaagaagaattacgatggtgtttcacaactagagtagagtcatcgatcacatctatctatcggacttgaaccagtatatagtttggtgctaattttattttctgcatttactatttttgactttacgtactttgtttgctcctgttttacttctgattgttattctccatttgttaatcttgtcatttctaatcatttgattgtttaaaatttagttgatttgactttgcactattagtcgtaattttttcacaaatcagagcttggtaatcgatcaagattccagaatcaagattctttccgctacaatttttgaagaaactttgaatgtcatcaatgacaagattcaaattggagaaatttgatggcattggggattttgcgctgtcgagagaaactctaaaaggaatcctagtgtaccagaaagtctccaaggttcttagagacgagaagttattggcaaaaaaaccaactggaaaaccataaatggaggagatgacatactacatgatgatcatgtagaatctataaaacagtgtttgaagaaaactcatcgtagagaagacgacgaaagtcaggccatcattttgttgagattgctcccaatagcatatcaaaaagtaaaggctcctatcaaatatggtagaaatgtgattgtaatgaaggacatacttgctgcacaaaaatcaaaagattttgaattacatgttggaaaaagaatccaagaaacaagaagtgtatttggcaagaggaagatcacccaagacagtaagttcgaagagtaaacactatcactctcaatcatgatcgaagtccagagagaaggaaacaaggaagtgttacttctgtggaaggtcgggatacttgcagatcttggaagaagtacaaggagcaacaagacttcaacaaatctcacaatggagataggaagaacttgcggtaccatcaccacggaaaggattctattgcaatcgcggaagatagtgatgactgctctacacatggagagttgttctctatcttacttagttaaatgcatttcattgtatttaataattgacttaacaatttcttgtttaaaaataatcagattaacataattttgtttattaatctaatacgtaaaataatttaacatagttttagttgctaattcaaattaacatttaatatctatcttgtaatatcaatagatgtttactttatgtgttgtgaaaactaaaacttcatgctctattcaaattgttaaaatcaaaattaatatttgattttaacatcattttcaaagatcaaaatatgcatgcttcctcaattcaatatgatattcaaatgaaatatacattaaaagtatacatcttaaaaatatcaaaagttgcacatcttttcatattcacatgtacaatatttttattaaaaattcatattcataaaatcattttaaattaatatgcaaataatgtcaatatttacactcttaatattatcaacaattagtactcacgacaatttcgtataaatttattttaaattaaagtgatgtataaattaataataccaatatttacaatcttaatattattcataattactagtgacatgggttatcatataaatttagggattattttacaaaaacataaaaacaacaannnaattacaaaaatacgatttcacggaa

SEQ ID NO: 51622 - DNA, 1182 bp, Cannabis sativa
cattgtgtaagtcatctcatataatattatttcttaataataattaaaataatttaccacgtaaatatatatctaagcaacttctaaccgataaatagttaagttttatttttattgtaataatattaaagttatattttttaaatttctgtaagtattcagaaattaagtgtcaagtcaatatctacgtgttgtttttctattgatatatttaaataaaaaaaataaaaaatttgataatctatatctattatggactgccatgtgaccattaacttatcttttaacagctagaaacttacggaaatttcagaaacataatttaggtattattaccataaaagattagatttagtattatttatctgtaaccaggagttaaacttaggtatatttacgccgtaaactctaataattaatattattaccgtaaaaaactataattaagtatttaactaagagttaaagttaagtatatttacactgtaaactctaataattcatttaataatacattgatgaatcaatagtttcattcgagtgggagcagaataaaacattaaaatgataaaatatacaaaaaataatgtgaatatatattttatgtattttcagtgagcattttaaagagtatgcagaactttgctttaaagaatttggggacagagtgaaacattggataacattaaacgagccatggtcatacgctgttgggggttatgcaactgggtatgcagccccaggtcgatgctctgtctggcaaaagctcaattgcacgggcggagactcgggaactgagccatatttggtgattcattatcaacttatatctcatgctatcgcagtaaaattatatcgagataaatatcaagtaagtcttttctattttcttaattactcattttttagattttattttttcaaatgataagattattaactataacctataactaattttattataggctaattaggatttttgctcctaaactttgacatgtaccaaatcatactccctcaacttttaaggccattgaaaacgccccttgaactattgagatttttggatttaaggacttttgtctaattttattcaattttaatatttcaatgattgtttacgtactaaactatattctccagactttgatatctaccaaatcatgcccttcgaacttt

SEQ ID NO: 51623 - DNA, 1338 bp, Cannabis sativa
ggtcctgtgagttccttttagcgtttttcaataaaataatagtatgccacctcacaagtgtgttctctaacattttctcataattatataaccaaaactaataagttagtgtattttttttccaaccaaatgtgatgaattgattagtttttgatttggtaacaaaaatattatcacaaaggtgaaagaggtgaatacccaaatacaacagttggatttgtgcacatagatgatgtggttggtgctcatattttggctatggagaatagcaaggcatcaggaaggcttatctgctcaactgatgtagctcattggtctcagattattgagatgcttagagcaaaatacccatcttacccttttgaaaacaagtaagaaatcaattatataataatgttattaacaaaagtaaacatagtgtattaagtgttaatcatgaattaattaatgtgcaggtgtagtagccaagaaggagatagtaatccacatagcatggacacaagaaaaatcagtgaattgggttttcctggttttaaaacacttgaacaaatgtttgatgattgcatcaaaagctttcaagacaagggttttctttgaattaataatatatactactagttatggctatctatccttaattaataattaataatgttacttttttttttatttaccaaattgttctatgctattttgtacggcttatatgcttgccttggtggtgttgaactgagattgtttttatgttggtaatttcaataaagtttaaatatttagagtaaaaaataattaattatagtgaaagaattaagagcatttattcattcttagccaaatttttattatatgatgcatgttagaattgtgagatttacgtgggtctctttcaaaactaattaggaatcagaaaaattcatttaaatagagaaaccctacatcattaagggtgggtcccacgagggtcattccctacaaaaaatgtgcatctgtagtgcttttttgtaacttcaaaaaatattttgttcttatcaagaaaaattagttgctgccgaagtgacatattccaactatggctcgtatttttcaatggtgttcaaaaataacttgtttgcattctgcgagatgttagttgagacatttatcattgttattgccttttacgacaattataagactagtctttaagaattccgagagtggtcgctcctaacttactttctttaatttttcatactcacaagtatgtgggtcaatgagttgtaagctcttaaagaattcgttatctactctttccagcaatataatatcagtttattgtatttttttttagttatccta

SEQ ID NO: 51624 - DNA, 1883 bp, Cannabis sativa
cggaggcatattggaggtggacgccattgtagcgcgtacaggattcatcggttttcctctttcgatttttcttgattgtgctcctactgcgcttacgttgtttctccatttttggaccgatgttgaagcacttcagttggccttggccttggacttggtaatgtagcgtattaagtttggaagtaattttgatatgggacacactacactgaacaaaagaacaacacaacactacattgcactagattgttattttaggatgtgactcaattgaattggattatcgataatggaggagtgctaagtatacttttttttgttgtactctattttacactctttgtataaattagtgataattaagattaacgtatttgtacttaataattacacataacattattacattatgacgtctatgttattataatcaaacaaaattatgacaccatttaaaaaaataataagaaaaaaaacaaaattgttaagtatgattaatttatttaacaatttaaataattatataaatagtaattaaagctattttatttatatgctttttaacgaaatttttttattattattattagtttaattcaaaacacatatatcacttatgttttgtttcaagtaaaaaaaaaaaagttaatataactatatattggacactaaataaattaagaaaataaaaaaaaaaacaaaaatagaagaatatgaatggtttgtatttaaatttataataattagtttgacgaaaaaattgtttaattaaataaagtaaatagatataaatagaaaaatataattattagataaactaaaaaaaattgacgaactaaacggataaaaataaaaaatatatatataataataatattatgataattgtagaggtcaaaattgggcccatgttcaatatcacatgcgatgtttccaaataatgctcaaataaaattgggttggactatttgactaattatgatggtacggtcacaacactaaacccaacaggcccaaaacaaaacagtcaagtcagacattaaattacccatgacccgtcattgagctcacaatgatccgacccaaatacgagaccgagtcttatcactcatctaacaacctttgaagtggtcagtcaaactaaccccgcaaataacgatctccctaatcaagtggggaagagcgcttctaaaggagggtgagcggtcatgagtaacgtccttccaaggacgcctataagagtcactctcagttactgagagaggcacatcaaatttcagtcatctcaatacttcttacttatcgttcaatctcattctctctaaataaaaaaaatactacatacatacttatttctttctgcagtcaagataggtggtaacttagttcgatcatttattctcatcttttttattacattgttaacaatcttgctgacttgactgtcgcagtcccttcggtcggaaccatcccggtgtcccaaggtttttcggttactctcttctttgttctacaggttgtcgatgcccacgtacgatcatcttcgattggttgtggattttagcatctataatttggcacccaccttgaggccctgacaagctgcaatcgagcaaagtatttcgacctttatcattcagtcaacccacaccagagcaatggtggaacacatggaggaaggagagatcaatgaggaacagactagctttcgtcaacaactctcgccattctcacggctcaaatgaaagaaaacttggagcgcactcaagcagtggaagagaaaaatgcatcgttcaagaaggagaatgtcgcactaaaggtccagtttgagtcgttgactgctttgatggcaacaactgacaatagttgaagaagattccaag

SEQ ID NO: 51625 - DNA, 1319 bp, Cannabis sativa
cttttgtggaatattcaagcaggcgttacttcggtggctaaactacaatctgggtttgaatgcaaagtgtgggatccggatgaggctctcttttggtctctgttcgcaatttacggtactccttatgatgatgagaaacttgtgttttgggagaatttgtctagtaggattaatcaatgcctggatcctttggctcttgttggtgatctgaatgtgattgctgcgaaggaagataaatcgggggggagagtcttttctcccagggatggttctattttgcacagatttatgtttgatacgggtggagtagaccttgggttttatggttgcaaattcacttggaagaataagagaagctctgggggtctcatcaaggaatgattggatagagctattgttcaatctgattggctgaattcctttcctaaagggggtgtgcgaaatttgcctatcctctcctctgaccatggccatatcctattcgactctatcatggaaaggtctcgtggatgttcaccttttaaattttatgaagcctggctaaaagaaagtagctgtatcgaaaccattcttcaagcctagaattcctctgcctcttctttgctcaatgggaatctgcctaggagatttgaggcaatccgaattgctcttcaaaggtggaaaagggaagtttttggtgattgtgacaagaaattaaaggctttggagtctaaactattagacttacaatccagggaggtggattctggttgttcaaaagatgaagataaagtcgaaaaggaaattgccgatttatgggagaaacgggagcttgtttggagacaaagatctagagagatttggctatcccatggcgatcgtaattcaaagttttttcaatcgtctactctagttagacgaaaacgtaacttcatttggtctcttaaagatgatcatggctctttagtcttcagagagcgggaaaaaggtgatatacttattaaatattttaagtcaattttcacctcgtctgatccgtgtattcctcatgatctccaagggctgatttcgggtgaaattactgattctgaaaacgggatcctcatgtcaatccctacacatgaagagattactcaccatgttttccaaatgcatcccctgaaatctcctggcccggacgaattctctggatgttttttccgtaagtgctggaattcgattggtcctgaaatcacaagctgtattcatacgatcttcaggtctggttgccttcctcccttgcttaatcataccttcatatgtttgattccaaagtgtgagaacccagactctgttgagaa

SEQ ID NO: 51626 - DNA, 1211 bp, Cannabis sativa
tgtcaaaattcagggaaaaaaaatcctaattaaccttaattttttaaggccaattataccaatttatgtaaaaggaacaaagacagatataccaaacttagagaacttatacgacacaaactattaaagaaaccaattatgtatttcagagggatctaaatgatcaactataacttgttgattttttattcctctatggtaaaactgctgaccagtacttattacaactataacaaataaatgttccagaattatacggaaaatgaataattataatgctacatatggatggtggtaagatttatgaactgaagcattgaaatttgaatcacataaaggtttagaattaaccagtacaattgtgtagtgaaaatgctaattgtaaatggcctatattattagatactcaaaagacccttttccttgaggctttcaacagtgtctctcaagctcatttccaagggaattgattgggatattcccaaacttttagctctcaaatctgatacttggtactcttccattagaggctcatcattttcacatctgccaaacaattacaaacaaaattaacaacaacttacacattaattttcaaattaattcatgaaaagtagatattaaaagcaaaataatcttcttgacacactcaaaaatatgttgtataaatctctacaaactatcaactaaatggccattttataaataacatgtaagtataaaataaaattacctttgaggaatggtgagagaagggtaaagttgttgtaaaatctttaaaaggtcagaaatgtgtgcaatatatccacttagaagatatcttccactagctgatccactttcaaatgcttgaatatgtgctttagcaacatctctaacatcatgatatgaataaactctattgggaaatgtctcagctcctgcttataaaaataagttacacttaaattttaacttaagacacaactaaagtaaaataaaaacagatcaactgtattagctgcaaaactacatgatgtgtaccatttgttagattcataatgagactgacactgtcattcataatgggctgcaagagagggccaagtgttactcctggatgaatggtgatcaattcaatcccattctcttttgcaaatttccaaccagctttctcagctctagcttttgaagctgcataccatatctaaaaaagaaaataaaatgtaaga

SEQ ID NO: 51627 - DNA, 900 bp, Cannabis sativa
taatggctttgaatgggatagagattttattaccaggatgttctcttgtcttcttttggaagaggataaacttatttaacaatcttctgctaatgggattatctcttagaaacaagcttaccgggatttgaacaagaagcatttcatccttatgactacaaatgctaagatatggaagtcaatctttcatgatcatcgctcttcttatggaaggtgtatgaggattgtctctccattggctctcttctttcggccatcttcaatagctattgtggagattattctttatgtgaccttgaggggagtcacaatgcttctgattaagtacttatggtttactggtggtagattggggtattcaaattaatgaaatctctctccattccaacgaggaggttgtaaattgatttttttaatccatttcactcttaaggagttcacatcaatgtagagaagaaataatttatccggtttacaaaaattcttcatcacaacttataattttgtatgatttatatgtggaacaacttatatcaactgtttaataaagtttaggtaattctatagtattatcttctaaaaaggttgttatggtaccatttttatttattccagtgtctatgaggccacgggtggggccaggggtattgagggagggctaaaatccaccaccgcctttaccatcgccttacatttgaaatacaggatattgttagagatattttttgaaggaatcccgtatcgacaaattacatgagtccttataaaatcagcgacatcttctacatgtacttcttttagtggtacgactttggcccatttggagaaatattctgtgatggccaaaatatatttatgggctttggaagaaggtggcgtaaaaggaccaatgacgtccat

SEQ ID NO: 51628 - DNA, 1292 bp, Cannabis sativa
gaattggcacaaaataattgaattaaaatactataaatggcaaaaaatcacaccatcccaagttttatgcccaaaaagcaacaaagacttgaaaataaaaaaaaaataaaaataaaaaaaggaatatatttatttagtacattgtgttttcatgaaaaatatatttagtatcctgtatttttagtaatacttaattagaatctcatattttcaaattatatatatttagtactctaaagtaaaatttaatcaatatttaaccaaacaattctcagttatatgtaatcaaataattaaatttaaattcaaaatttataaaattttagatgtgataaaattttattaaaaaaatttaaatttaagatattaaatatgcatgattataatacaaaataccatgtggtgcgtaatgatggtggtaatgttgagtttgcctcgagtagatggtgctctttgaagacttcactgttagtagctgaactaactgctattcgtgatggtctacgggtggaattgcagagaaggttgcttgtgtttggggtggagtcgaactgcagggaggctgttctgctggtgcacagtagggaggatcaaagttgtcacaagtttgatggtttattgctgcagatacgtgagttgttgtcatgttctactgtttcggggcttacgtttgtgtatcggaagctaatagagcagcccatatgttagctaattatgctttagaatgtaaaactagtgctatgttgattggggtggtacccattgtgctagccatgctattatgcatgacttgtcaaatccttgtactgttcaatgtttattaatgcattatatttcaaaaaaaaaaaaaatactagatactaaatttatatttagatatagcacaatgcactaaatatataacccaataaagaatgtttaactaaacttgatagaggccgcgcgtacgcaggcctccgctaacacaaattatgacataggttccaccaacttgggtagaccttagctcaacaccctttctaagtgcaatgaaagtcaccaagctaggccatgggccttcttgatcgcccattgaccctgtccaggtaagtatgtatcattgtagaccacgtgttcaatttatagacctctctcaccatagttccttttactcttcaatgtgggattagtgacactaaagtcactttgtcagcgatacttattccaaagagataattaggaggagaaaggtctacaaaattgaatcatggtcgaaatgaagctgaatatacatgtaaaccacatatttttgt

SEQ ID NO: 51629 - DNA, 1818 bp, Cannabis sativa
ttgccacgtgtacaagtgtgtatacgtggacagtccatcgtggcacttaactgtgatttttgaacggaggtgtgcaaagcaaaataaaactaaggtttaggtagtttagccaccaaaaattcagtttttgtggttaagtgttacaaaccgtaaagttcaagtggtttagccgccaatatctcttattttatagtttatttatagttgtcatgggattgattttttcttaattattttcttattttttattgagaaaaatatatttttgtaattttaatttttttattaatagaataattaagtcgtaaaattataaataaaatataaaaaaatatttttgaaaaccctataatatatataaaaattgtaagagcatcaattttattaatactcaattttttttatatgatagtatacattatagttatactaggtattttgtctatttttagaaaattctaaataatttacgatattgatgataggattcaaatagtcagtcgcacgtgtgcttgctttatatattttacacgagtgcaatagactattttgaactttgttttcagtaacgtaaagtattcaaaatttctcaaaaacagatcagatgcctattattactatgattaatatacaatgtcatactaaagaatgaggatattgttggaagttattttatcaggatctagagttactaacatgtatgttgattataattctataatctatcaccttaaatataaatttcctaatacgataaaataaacacataagagactaagaaatctttatattgatagcagcggaataataatgactcatttcattcagatctctagctcttgattctgttctgtagcagagtattatcaagatctgaacttggatctccttcaggtgttggatttttcacaatcttccgcactatgattgagtacttgaattgatatgagtgggcatgtactgttcactatggttcaaattgaatgacgaagaagaaggaatgaattttgagatagctattgaaggaagcccttaatttctagttgtctgacaaaaaatgaaagttgggttattagagttggatgagaatgagagccatcttattccttttatagtatttcaactatgatttaggatttaaattatatggaataaaaaagacaaaataatggctaaaaacagcttaggtagtcgaccatacctagtggctcccactagtttttgctattttattcaacaatttatcttttatttcactaatgctatatttttttaatttcaatcatataatctcaaaactatttatttaataattataattaattatcaaaaaaaaattctcatttaacttatttattaattagatcatacaaagtctctcaattaataaataagctctaaaaactcttttattcacaattaatctcttgcttaataaaaattcataaataagatatagtctaatttagaattataattaattaattaaaactaattaactgaatttacaaccagtattatctcaactagtgtggggactatggacctatataatcaaatttccaataagcaattatagaatttactaagtaaactctttaacttattcattcctcctaactctactatggatttagaattgcactcttaattatatagaacactctatatgttctaagatatagatacactattaattattatattgttataatctaaataattaaatatcctttataaataatctacatcgagtagggataaatttactgttctaccctttaatgtattttatcattaacaacaacaacaacaaca

SEQ ID NO: 51630 - DNA, 1534 bp, Cannabis sativa
ctgttagcaaattgaaagtgtcgttcggttaactgtcattatagacttatgtgtatagtcttgtacatgtgacatgtttatattggtacatataatatttttatttcaaaatttattttaaaataaaataaaattataaaaataaaaaataaaaaataaaaaaaatcataaatttttaaataattttttataatttttaaataataatattaggtgtactaaaataaacgtgtcatatgtataagagcgtacacataaataatttatattggcaattaattaactttaaaataaataacaacttaaattttgtaacatttcattagtttggagagtttaatttactactaaaatttcagcttgaagttaagtgggagtagattaatagtttagcccaaaaaaactcataaatatatatacttaaattaatttcagttacgaatatagtaatgttacgatacttggttttttttttttttttataatctaaaaatattctgacattttcttgttgaagattgtcaataaagtttataataaatgtaatatatatattttgtcccatttgcatttcctaaattagtatgtgatggatacaaaatatttgttacatataaattcattgtgtgacatttatttttaatagtattattattaattattctatcaaaaaaaattaattattatttaacttaattgaatttatatactatatagaaataataaattaagggataattacataatacactatttttttgtaaatttttatatttttacatttaaggatttctttttatatttttacagtagtttataaaaacaataagaaaattacataaagtaacaggaaaataacactaaaacaatatcaaaataacaacaaattaacaagagtacaatataaaaatacattaaaaaattatattttctgtaaataaaatcataaaaatctaaaaaaatttaaaattccgtataatcgtatttttataatttttttttttaatatttatgtgtattcgtaaaataaacctataaattatttgttatatagtcaacattttggccctaaataatcaagatacacatggtgtttataattaaatacattatgtacgtgtttgtatttatgcctgagtgatgagtagctaaacctataacattaattttaactattttatgaaatcaatacacatgtaatttattattaatttgtatatagtcaaatgcatgccaactacatatattatataagaggctatatataatatttaagagtattgttattgggcactagtggtatctagtacttttagacatgtcaccttacgattggttagtgatattctttaaaaactattacttacattaaattatataagacctgatacttaattgcactaataacaatattaacacgtaaaaacatcactgatatcttttaatatttctctaatatttaatattcatttgtttcttcattaactttatatgcctatatgtagctaattaaaagctattgtatacgttcaca

SEQ ID NO: 51631 - DNA, 1517 bp, Cannabis sativa
ctacatacctcttttaacatgttgtctttaatttttactctttctttcaaaatttattatgtttacttctttttttcatttattctaccaattttactcttattatttcactataatttttatttttctctaattaaaattttgtctaaatttttttacaaacctatacatctatctacaaagaatataaatctattatgtttgaaattggatataatactcattgaaaatggtatatttaaattaaattttatttgaaagtaaatttttgttaatgtataaaaaaaatgtattcttcaacttctctcttaataaattgcatcaactattatagtgcttttaatacaataagaatatctaagcccccaaactgtatttagagatattgataaaataaacttagcaagagtattaacaataatgttaacaatttggctttcataccagaaaggactaacttcaaagacgaatttaaaatggtattaagcttatcaaccaaacatttgcaatcatatttaaaatgaatattgtgaaaataaaaaaaagattgcagtgagtgaaagcatggctgttaagcaaaaaatttcacatttaaagtattaaaataaatgcaaaacataattttacctatgctaaatttatagtataagagtttattaatttaagttcgacccatccaagattataagaataatctcttaattacaatccttttatttaaaggaaataccttttgattctaactacgatgatattaaatgatttaaaataatatagggaaattggggataaatttggaattgcaactgaactcaatcaatttaattaaccgagttggctacataccttctttgtgaaggataaagccacttgtagctcagaatatgatatttttgaatttgaatataagaatttcggtatatgaccactttcaagaattctctgctatttgaatatttagaaaaattcctaggtggatgattttttatgaaattttgagatttatattttatacaattttgcggtaccggagactgcacttactcttagcatctaagttgcttacgtgtctttttgtaggaatcaagtcaaacgtagttcaaaatatggtgtttcgataattatgaggtgaatgacctcttttagaatgctatttaatttattatgacttaaaattttagtgtatttttgaattttttaggtaaaattactatttcttaaaggtttttataaggtaatgacctctttgaaattttatgaggtgaatgacgtctttaattattcaagattaattttgatagctcatttgaaattttgtgctattttttatgactatagaattttatcatttttgtgataattgttttgagattttttttttttatttttttataaataaaaaaattatttagttgacattttaattatttattttaaaatttaaagtaataatttatcttttaagttggtcaattaaaatttaagataacatctaaatatttgttttataattcaaa

SEQ ID NO: 51632 - DNA, 903 bp, Cannabis sativa
acataccctagctacccaataaataaatattctaatatgaaaatataaatgggcatgcaactaaaattaaatatataaattggtccatattatattggtcctccctaagaactagcttaaccactttttatttttctctctattgctttctccttgcaattagggtttttccaacctagtgcacctttatgtctaagtcctctttattgaaccacttgaggctaactcaagtagttataagaaagcatgggccagaagaatgtgtgtgtgggtctgagttcagcttctaaattatgcaatatttgtatatataaataaaatgctttaatgaaataaaactctttattggggccgagttggtctgaccttagactttgtactgtaaaaaaaattacttttagtaataattttttagtcacaatataaatttcttttgactaaatataacattcaatcacaacgaaaagttattagtgactaaacatagtattttgatataagttgctactaatttagtttttagtcacaataagtacttattgttactaaaaatacatttagtcacaataaattatgatttttgtatctaatacctttagacacgaatatttttagtcactgaataagaataataatttataattaatcacgagttttgctgttactaaaagtaaaaatattgtagtgttggcaagagtcatttggctagcatttaccctctgtgacttttattgtaattgagataatgaatttaaatatagttcgcagttaaaataaagtttgaaaatatttagattaattattgtgttgatttaatactgtttactagtattataatcaattcatgtaacctaaatctgaaatttaaattagtttgaattatatattagtttcttaaatatt

SEQ ID NO: 51633 - DNA, 1357 bp, Cannabis sativa
aaaaatagaagaatgctctaacaaatgatgattatacaccattgtagagtggtgtggcacatgatggtgctaaggtaaagcctcatgagattcaaatcaaaatgtcgatgatgcattgtttgctgctattcatagctcgcgatcattagggcttagtggtgatgtggttttagagatggttgaagttatgggtatttaggaggctctcagttggatcaagggaaaaaattggttaacaatggttcttgagatagattgattagtggcagtagaggctattcacaattaattagtgatgaactctttttttagtttagttgttaatgactatagacatttgattaattatatgagcggggtctctttattatttgtgtatcgttctgctaatagagtagctaatagttttgttagaacttcgtttccaaattgaattttcaagtgttatttctactatacttaagtctatgttgatagacaatttaacttcttaataaaattctaattctatcaaaaaaaaattatataaaaaattagtttttaagatgaatataatttattaataaataatagatagatatatgagttggttaatgatatttaatatatttttataggaaaaataaaatttatatatctatcgatatctactacgttgatgttacgtgcaatgtatgtataattagttttttttcaatttttttaattaggtaatatatttttattttttaatttttgaaatagtatttgaaattttgatctttgagaatttttttagctattgtggctacactggtgtgctctttagatgtgattatatataaaagaatgaatttaattgttatacataaaatatatgtattttatatttctctttatatataaagaatattagaaaatattttgacaaaatttaagtttgattagagaattaattactttcaaaatacattttatatataatgtctaaacatatattttataaaaataatgatattgatgaatataatatttttaatttatagttaggagagtctgattataataaaatgtacaaattattagaagcatatacatatcattacttatttttaaaacaaaaagttgtcgtgaaattaaggtttaaatgtatatatttttatatatagatgtaaattttatttttaaatatttaaataaatataataatattataaaattaataaagaatattttgttaagtaattagaatatgctgttaaagttaacgtagaaaatcaaaaaattctattaaattaaaaattctgttacatacttacattttatatagaaaagatataaataaatattttattttctctaatttgtggtttttttt

SEQ ID NO: 51634 - DNA, 1053 bp, Cannabis sativa
ttgttatttgatttttcaattcgagcacaataattttcaacatttatatgtgtagatttattgtttactttttgctgaataggtgtgtaagtatatatatatattggagtgaaaggtggcagagttagaggtgaagcatatgaaggaaaataatgcgtaagaatgatgtatagagaagctatacaaacacatacaaaacagataagtaaataagtatttaacaatcaattaattattaatgtagtgcgatcgaggccgaggcgcagagcttggaattgagagtagtaagaccttgaaattagggtttgaacatgcgagggtcacgtggccccacgtggacctagctcctatgctcctcctttcaaccaaatacctttctctatctacatttctctctctgctttccaaggtgactcgcctttttacgttattataattactattattcttgttaactccttcctttttgttcgtttaattcactaattaattataaattatcatatactatatctaattagcttcttttgttttctatcatttttgtcactttaagatattgtacacaaagtggtgagttttctaacacagaaattagtagggatcacgtgtttgtgtttgtgtttgtgtcatgtttatgttttttttatatatttatttaatagtttcataaggattgtgtctaaatttgtcttgtaattatgagtcatacgctagacaaattggtcatagcaatacttaaaagctgggatcttagagtgtgtaagtgtgtgccactgtttttatatattagaaaaatgtgcacttggtttaatttatggtaaagaataggaaaacgtatacacataaaatgtttcactaaaacacaaaaagtttcaaatatttaatcaaatatgtataaactaattatatatatcgtctatacataatcgacatgattatacacactaagctgtataataaatttaaagaagagtgtcaattggtgaagttttttttttatcatataaaaatattagaatatttatcttaattattatataacaaaaaaca

SEQ ID NO: 51635 - DNA, 2176 bp, Cannabis sativa
ggatgccctatgtcactcacaatcacacacacaaaacaggtaaacaacttgctaaaatatttttgaggacctaaacccaaaactagaaatttccctatcgataaatagcttggcaataccctaaatatctagaaaacataaaaaatgagactatggaaaaactgcctaagaaatggtaggtcgtttctataaaaatggtagaccgtttttctggcttcctgccagcaaaaatgatagattgtttcctcaaaaattgtctgccattttctgctgcgaaaaaacaagtcctactttgagcacaaaacaaccctaaacttcaagataacctttagaacatctatttacacatcaataaacaaaacctaagcaataacaactaggaaaacgcacaaataaaaaaatgacattgttgagccaagtttgagtttctcaaccactaaactagccaccaaaactagctcaaataacaccaatcaaattaaaattaacccagaaaaaaattcttaatagcttagggttcaaacaaaaccattacaccagaattgcatgcttcaacttaaagaatacttcaaaaaaaagaaaaaccttaaggaaaaagactaggatcttacatttaattaacactcttgaatttaagttagaaatcatgacgaattgccagaaaaataagaaggaacactctaattttgcctaagttctttttggccaagcaagaagagagagaaactagaaatttactttaatttttctaaagtttatctattttttaaaaatattgaattaattgataaaaaaaaaatcagaattaatcccttggaaaattctactaagtccactaaagagaaattttaaaacctttgggtaaaattacatttttgccctcactttacctttaagaaaccttaaaacttagaggtaaaatagtccaatagcatattctatatatatgtcacatataatacacttagagtttattaaaatctccaaaattaaaaaattataatcctagtgcctatttttgaaaataggacccacaatataaaatattcacatataatcttaaaatataaataattaatgctaattgtctttcaaattcataatctaagtgtccaattgctatatttaattttacatagccgaagtatagtgagggccacgtcagcaactaaaggaaatatcaaagaaatatcgcgtgtttggttggaaccttcacgaaggagcgtcgcgggcgtcttccgtttggttcagtcagctggcgtccatgcgagttgactcccggagcatcgtcgtcgccggcgacttccattctgcgttaacaggttgacgggaccattctcacggctggggtgacattgtttcttaattttcaggcagttgtcttccgagtctttaacggtttggttagggatttagtgtttttattttctgtgtttttactatatttagatagcatttgttttggttgattacagagacaatgtgactttgtttctgctattattatttttactattattagttaattttatttgttagccacattgtttctctgttttactttttttagttttgtttagttcttttctttaaattactggttttagtttgttcctttattttttattgttattaggttaattcctatgagttggtggtcttgttgtatgacatggtttctttgtttctttggttctatgttgttttgttagtgtttaggtgttaaggttgtgtggtaatagtttggaggtttcttagttatcgggtgtctttgttgttgggtttcttggtttataggttgcttggttgacaggttcttgattgtcgggtttcttggttgacgggttttggttgtcgggtttcgaggttgttggttctttgtggtggctcggtgattcggatttctttcttgatagttatggcttcgacaagttggcacaatggggatactgaggatgaaatattgtggtttcaaattgaggaggaggatcttgaggaagttgcagttatcacagggtaaggtgatgatggaattgatgatagatagtgtttagttggaagattcttgtctaatagggtgattgatttttagaaaatgcaaaatattttggattcattatggcagccaggtatggccatgtttgtcaaacaattggataataatatatttcttttc

SEQ ID NO: 51636 - DNA, 1440 bp, Cannabis sativa
tattattattatttttgataaaaatgaactattttattggcaattacattactcatataattacattctatgaggatacaagtacaaatttttttaagaaaaaatagtctaattgccaaactaagcaaagaccttcacttacaagatttttttcctcttttctttttttcttttttaggtatgttatatgagacaactacatacttatcaattgtgaaatacaatagtaaaaataagtttgagataagaataatcataaataaaaaatggtccaaaaaattgaaaatgaaaaggcaaagagtgaaaatcaaatgggctaagattggacttataatattatttattttttattccaattatgtccccacaattgttttgagcttcctcttttgtggggcaaaattcaagcacaacctatgttttacaatttgttctcattcttcaaaaaacaatcaaatggttctaataatcttagaagtcaatctcacctttaaaatttaatggctttcttatttctcaaattcttcaaatctcaaattcttcaaaaaaaaaaaaaaaaataaataaataatcatacatatgttttatatttagggtttatacaactttgtgtccctttgatttcttttaataattaatttggatcattgatttcgaaaaataggaaaaaaaaaatagttattagtacgtggggtttttacattacatactgaatttttttaattttttttaatttttattgtgaggcaaatttttttaaaaaaatactgtattttttttaaaatactttgtaagttttatactgtgtattaagttaagttttcactgttgttccacagttttttttagttgttctactgttgtttttaattgttttattttgttattttacggtttatttataaaaagaccgtatttttgtaaaaaaaaaatttgtgtaacaataaaattataaacttttacccaaaatctagtatttttgtaaaaaccccttaatccattacaagagactaacaacgaaatgttttaccattttctaactttattatcgacaaaattaacctcaagatatatatgttttttttttattttcttaaaaatttaccaaacataagaatccgatttacaattcttaccattttcaagcatagtcctcaatctatcacaagtaactagcaaccaaaattcgtaccattttcaagtttattatcgacaaaattatcaacactttttttctctttttacaaatttaccaaacgaacgattccgatttataattttaccattttcaaacaaaagttgaaactaatactaaaagaaaaatctcaaactataataaacccttatatataataataaattacaatgtcatacatcattttttttggaccatgaatggatggggtttttcaggcctacctgtttttttttttttttttt

SEQ ID NO: 51637 - DNA, 642 bp, Cannabis sativa
tgaatagtcacccatattatatatgtttaatatttaaacaagcccataatattaaatgaacattctaataatatagtaaatttgctaaataaacgtttcaataatttaaaagtataatgtataataatttgtattcttacaataaacatccataacagtagaaattatacacgaactattcatatacaccaacaaatatatattcgaacttgccgccatatagcgcaatagcgagatgtgaataataactattagcatgtgagattagcaagacaacaagttcatctcaggatgataaatagaatataatgaaagttgttcaggatgagtaaacaaagagcttgcaactcattgatccacatactcgtgagtaagagcttgcagctcattgatccacatactcgtgagtatgcttaagaagtggaaacaactacttcaacgtttactcacctcgcttttgacgtatggaggtaactgcctcgctaatacctttcaaacaacaaaggagaaccgcgagtcgcattgtattttaacaacttaatatttttcctacaaagacggttaaaaaagacaacatgtaatcggcgagaactatctaatacagtcagcataattgtatatggataaagacaaagagcggtt

SEQ ID NO: 51638 - DNA, 1928 bp, Cannabis sativa
  modified_base (74)..(75): a, c, t, g, unknown or other
atgctcgttatactttatataaacgtattttctagattttccttttaagttcattatatatataaatatatatnntttttttaaaaaaaatagtaatattattttattttaaatattaattgggcatataaaattgtctcatgtgaacaataaatacagtgtgtacataaacagcaaaaaacagatagaaatagtaaattgctaacaaaatacgaatttaaagagttttaccgtcaaaaaataaatttagagagttaattgctaacgaggtaaaactttcagaagttttgcttcctacaacatctctcatttggagagattataatgagctagattatttgtgattataataagctagattataacattaccagaatcttaacaactcataacactttaaaatttataatttactaaacactgagctaattttttttttcgcagtcctgttacagttgttttttcttacagtacagttgtgccaaactgacctcccgatttcttttttcaatctttattatatttttgtaattatttttctttgacaatctattaaatggtccccttcattttttttttttttttgcagtttggtctcaactaggggtgtacatcggtcgatttggtcgggttatagtgtatttttatcaacccaatataaatgtcgggttgcaaatatataattgtaacccgtccaattaaaaaaataaaaaaagtgtaacccgcctaatgatttttgtcggtttggtcgggttaactcatttaaatcgatctttaatttttattttttcattgttgtatttagtgtttaaataattgattgggaaaaataaatgtatagtatatgcctttcaagattaaaatagttataatttaaattaatgttaaaaaaataaatatgaattgaataatcattaaagtattaaacatttttcaaaaaatagaataaaaaaatatactcatgtaaattttaaatttcaactttaatattcaaatacaattaaaattatcaactataaattttaaattttaaattaaacactataaaatataaactttaaatgtaaaatagtttaactattaaacataacttttatattatgttataaataattttagtaaaaaatatgtaaatcggtttattcgggttatttgagcgggttagaataatattcaacccgcccaatatagggagaagttgaaaaataccattttatttaattaattaaccaaatctgcctctgctttggatttaattgaaacttaactctttttatgggtatggtacccaaaatacccttgccacaatcaagattaacttcatgaacagaagtgactcagtagccattgtggctaataaaggaagaagtccaaatatctcaaacgtataaatgacatgaaaatcaaacacataaaattttattgagagatttaatcaaatacatcaagatcatgaaatgcaactcaaataattcatcaaaccaaactattactgaatctgttaaaacaaacaagatgatatataccaaagtggacatatgccacgacaaaataaaataaagctaatataagtaaaaacagaaaaatcatttgaacaaacttgtctaaaaatcagactagagattagaaaacataatcagagaacactagagattagcacttggactcagttgcaggcttatgtcaaattctgaagtctcaaacaccatcaaacttacattccctgtaatcattcactaactcttaatgctacaggtttaatgaaatgtacctgctcacattagttaatctagaccatttacgccctgaaatttttgagatacttgcagtgtcggactccgatagaacgagaattgctagtgggtattatcctttatcaatattggaatgggaaaagtattgtcttaataggtttgaaacaggggcat

SEQ ID NO: 51639 - DNA, 994 bp, Cannabis sativa
  modified_base (641)..(663): a, c, t, g, unknown or other
  modified_base (724)..(728): a, c, t, g, unknown or other
gaaaacctcaacaagttcattcaacagaagataaaatgttaagagtcattgttcacccttgtttagccaaaaaatgaagtgcattattgaaagatgtaggaacccattcgatactgttagtctgttattaagaatagagcgacaacttgcaattttgagaagagagaaatagtatttctaatgaggggagattgaactcttcaccgcccttgacatctgttggcaattcgtgaagatacaagctttcttcacattcatctttcaaaggattctatttttttgttaatttttttaatattattttaataaaaaatactattacttttttcattatttcaacaaattaatttatatttaataaatttaaattaaaatatgttactaaaataatcaaatattattaataataaaaagggtccaaaatggccttaaatctaacaattattcagaaaaaaaaattaataaatgtccatttttataaaaaattaacaaaatgtccattgtattaaaagtttgtgaaattttatttacaccccaaaaattgttaagtacaccctattttaataatttttattttctataaaatttatatatttaattgtattgagtattttttattttttttctttcaatttatattnnnnnnnnnnnnnnnnnnnnnnnaaaattaaattatattttaaaaattatgacaaaaatattaaaataaaaaattatatgaaannnnnttagaaaaaaataaaaaaatatatacatgagttagaaaaaataatgaaaatggaatcaaaataagtattaaaattaacataaaataatgtgaggaaatttttttaaaaaagtactaagagtaaattttaaaaattatttaagtttatatttttttaataatggggtgtatttctaattttatggggtgcaaatataactcccctaaaagtttgatgtagaaattacaattataaccttgaataattaagtgtttggtatagttatt

SEQ ID NO: 51640 - DNA, 1656 bp, Cannabis sativa
tttaatttgttaaaatggcttgttaagtatataagggtcatttagtatttttatcctttacttttcttatttgttttagtggctgctgtaataaggggggcaggggtcaaattcaattattggcgaaatcttataataggaagctgagaatctaactggggatagctaagatttagatgagttatgactcaattgggagagaaaatcctctcgaatggttgaattggagagactagcctctcgaaagctaggtgtaatattggccactaatatcaataaagtaatcattgtaagggattaattttttggtgtgttgaattgtagatagaaacattcaggtctaaagaaagttctatcaattcggtgcggtgactgcggacacgatgcctaagaaaccaacacaatcatggtgtttgaagaggatttgaggccttaaagtcagaggttttaggactcaaggattgtctcaatgattcgcttaagggtttagctctgtgaattcaactacaacttcaagaattgcttcaagaaatgattcaacaatagttcaaagccctattggaagttcaagaaagatcaagaacagtctaacaaaccagagaagaaggactagcaactgctaggagcaagcaaaaagatgagacagaaaggtcagtgaacaaattggaactttcaaaaaatactagtctccatgaaccttgccgcacaaccatgggaacacctttgacatcagaattctgtttgcaacaaggtgttaccaagatttctttagagaaggatcataacgatacttgatatcatcatgagaattgactgaaaaaacttaaaatgcctattttgatggagaaaacccagatggatggatactacaggctgaaagattcttcgcctgccatgggtatgaagatgatgagaaaatagaagcagtgttcatctccttttcaggtgatgcccttctttggtaccaatatgaaagtaacaagcgaacgattcatagctggaaggaaatgaagagattactactccatcatttttgagattctcacgaggggtcattatttgaccagttcttgactgtttgacaagaagggacaattttagagtacaagaaacaatttatcaagtaactggcaccaataagagttgtggatccagctgtgcaactaagtacattcataaatggcctacttccatcgttgaaagccgaattacgaatcaattggcctcgaaatgtgaatgaagccatggaaattgtccaagatattgaggataagaataggaaaacatggtagcgctaccccatctcaagccgcctgaatattcctgacactgcaacaagggctgaaagaccctcaacccaaatttcactcgccaattctacaccaaaaatttgcaaacttactgattttgagatttaattgtagcgacaaaaagggttgtgtttccactgcgatgataattggtctctaggacattgttgcaagaagaaagaacaccacatgattatgatacccaaagacatcgaagaaaatgagtcaacacaagactccgagaaggaagaggaagggactgtggggctggaatccaccaaagtgcaaaaaaaaaaaaaaaaaaaattgaagtctctttctaattcgtggctggcctatatataaa

SEQ ID NO: 51641 - DNA, 1746 bp, Cannabis sativa
atgagaataatatattgtgtatttttagaactactatttatatatttaatgtcaataatttaaattttagattggttaaagctatcaaatatgcccttagactgcaattatatatgtaactcatagttacacaagtaaattgttttaaaaaacttaaaagaatataactcagaggagaatattttcaacaatttatatactttgggggcaatattcataacaaagaaaagttcatgggtaaaattttacagggatcataatccaaaagtaaaaaatcctattttatctttaacatgaaggtaaaaatcctatttgtgtatgtttttcattgaagttggtcttggaatcctttttgtacaatgaattatatttttattaggcaaattttcaaaaacacaaaagtttgtaaaagaaaaaaacaaaatctaacaaaaatacgaaataatataaagtttatttttgtaaacaatactcagttaacaactattatagatttgtaaattgtttttaccataaacattcattatatatttgcaaataatatttacgaaaatcaagtattctatatttgtaattagttatttttacctttttttttttaacaaaaaccgaaatgtaattatttttcttttcattaagaaactattttaagaagatagtgtatttaaaaaacatacaaactattttatcaattaaaaaaataattctttgctttttcaaggaattttatttctattattaactaaagattatacactaaagatgaggtttaatttataaacttatattttttacagagaactaattttataaatgataattcgttataaaatactaacattactttatatttatcattatttgagtcacaaattaattcaccttttaatattttaatagtataaaatcttcaaattttgactaaatttattttaataattttagctcaaaaactttgttttaactaaatttaaaaaacaaatatataaatattatttaaattaaataataaatttattaaagagtaagataaaaactctaaactgtttatatataatgagattaaattaaaatattagttttatataataaaaataaattgaaaaaaacttaaataaaataatattgatatttatttatatatttataaatactaacaatttctattgaatttaatggaatatctttcatttcttccattaaattaataaaaactattagatagctataaagataaaaatatcattttttttgttcttcaaaaattaacgaacaaaaaaaaaaagaaaagtgtaaaacacgtgtttaacttaatataaaatattgattaaaaggcttaaaaaaatacttattaaaacaaaataaaaagtaaaacgattgatacctaccctattaataacgtgaaaagcatgtgttttaatatagaagtagaattttaagcaccacaaccatattattcttttgccattattcctgtcacttgaatattttggttttatttgtaggtactattttctcttttattaacataacatataagttttatgttgttttatggtcacactcttttagttagtaccaaattccaataggatcaattctaaatgttatttattttcattctttgattatctatttgtgaaattgttagaatttgagataagataaatgatgttccattttaaaatcaattagcaataggttagcaataggaggagtagcccactcttgttatatattctatta

SEQ ID NO: 51642 - DNA, 2627 bp, Cannabis sativa
aatccctcctttcatgcaacaacataattgtttagaaaccatttagttctttttcacaggtcccatacaagaggtgagttagcttcttaccgcaagaagccctccagagcctggaaaagactctgttagtggaagttcctcactcgatgggagcaaaccctgcttttcaacccaatggcgagctgcatcaacaagatttccactgcttcctcttgtaccctcttttgcagcaatgtcggctttattaccaataacaatgtatggaacaggaaggccgccaggtcctccagatcctaaaggtgctgaaaatgttcctgctgtagaaatctcagttgcccacttctgcaaactagtttttgttctcctttgagaaaggtcatgaacaaaaataacacctgcaaataggtgcaatccaagaattaagaataaatacgaactgtggcctgtgccttcaaattttaatatttcaattgttttgatactttgcggaaaaaaaaagaattgttttgatagggagcaaaattaagaaacgatatctaaatatcatctgatgtgaagtccataagaactattactatcatggcaatgcacctaacttgttactaattgtttaatggaatctttaatggaaggaatccccctgtagttgtcttcaacatgcacttgcaaggattttacaccaatggagtatagatatatcagatgctgcctaagaacgaatataatatctaagagaagagcattccacaagtatattgttctcaataaaaaaaatacagtttaaatgaatgtatgtcatgtcaaataaggaaacttgtaatgggtcaaacacagcttcagctatggttctaaactcatttacaccattacaaacactataatatttaagcataagaatatgcaataaacaacgccaatcacgaagaaaaacatatcagtctcgtaattaaaagggataggatagtagagtattagagtccagactaggtacttgccattaatttggctgtagaaaagagatcgacaatctttatatctttcatgccctgaaacatcccaaagttcaacaaaaaaatctctttcactatcgcctttgatgctgtttgaagagctaccagcatttccatacgtagtgtgctgaataaatggaacagtgaatgcattagcaaaaacatgaattccataagagctccacataatccttttaaatgaaaatgaaaatgaaattagtcattctcacctttacatcaacattacacccaactgtttgaggagggcgagcaattgaagaacctttgacaatcaaatgtacaagagaagttttcccaacacctacagcagattatgaatcatagttatggccaatcaaggtatgcactcaaccggtaagtcatgtcccttgccacattcaaagatcagaatcaactattaagcaattataattctacagccattatctatctccttcagtctaccatcttaagcaaactaaatgccatacacaagaccaattgaaaacttagtcaataacagcctcatacacatctcctcacattctcattgttcaaaaacgtgtaagaaaatgcaacttcaaattcccaaaaaccttcaagcaatcgatcaaagcaagcaacaatcattccactaacttgaaactatacctattcatatccaagattctaggaatatcataaaatcaagacattaacaaccatagtcaaaaacatctatgcagcaccaaaactataataaccaattcacatttgcatggagagggaaaagcaacatagtatgctccagcgattgccacatacctgaatcaccaacgacaagtactcgaacttgcccacatggcggaccaccgtttagctctttgttatccctctctcgttccttccagaacatgttgtcctccaaaacccttcaaacccaaaatcttcaccacaacccagaaagtaaaaacaacacaacgtactcttattcaactcacaaatcaagtgccatcaaacacactcaagctccacgagaaacgacaatatctcaaactgggcggtaccttcactgtcagcctaaaatccatgtcttgtcgaaatcaagccaagatccgagcttattaacgagaacccatttccagacatctcccaaagaacatcccgaagataccagaccctcttgtaaagtgatcaataagggaaactatgaaaaaacccagttgcagattcagatccaagatgacaagttaaactgggtcttgttcaaaatctcaaaacggaaactaaagaattgggttaggctgaaaagtggcggttgagtatgaatgaatgaatgaatagtaatactaaacaagatctgaaataggggattttaatttataattggttgatcagattaactcagtgatttccttttgatctttactgtaaaaagcaacaaagatggagaagagaggattgggaaatatgagtaatttttaggttggacaccggtcggtttgtttgtgccacattttaatcaacccaagagcagcttacataaatttgagttcaaattgtccaaaaataaattctgaacccgtccaatttggtttggtccgtttatgtgaacccgcccaaatccatatttggttt

SEQ ID NO: 51643 - DNA, 922 bp, Cannabis sativa
  modified_base (29)..(36): a, c, t, g, unknown or other
aaattaaagtatttaaaaatacaattttnnnnnnnngcatgttaaaataaaaaataaatgtctgaagcaggctcttccacttagtcaggtggcgcctagtcgtaaactttggcatgccttttttaaattgttgttgttttttgtttttttttgtatatatgtgtcccttttgctacacttgtcaggacgtagcaacaatatttatttgcccttgctacgggggatgttttcaatagtaaataaggtatttagtcacttccttctaaaaatttattttgatagacttttaggggctgattgcgtcattaaaacatctggttccaacaactagtgttttaacttttcccactagtcttaatcgtctctcaatcaatccaagaattgtttatcgactttaccctttcattcccaaagctatgatacttcttggctcaccactcaaactcttatttggaaagaactacccgattagagttagcctggagtcagttttcttttgcaaaaaagaagtcttcgctacttcacgcatcttctccaggcttaaactcttctacaaggtttgttctgggatccatgcccatggcttctttaaacttttaggcattcttctcgtcttgatccttgccagcctaaagttttagctgacgatgcaaatcaatgggctaaacttatagaaaatccctagagatttataagaaggaatttgggcgtcttttttctttttaagaattttcgccaaatatgcatcttatctctggatttgtgcttgagtttagcctttgaggaaagaattaaagcgatttcctctcggagacatttagttaaaaatgtttcctccttttgagtgcatgcatacacttgagctaatcaactttggcaaacaaacgtaagacactgttgaagttgtcagtaatcgggcgta

SEQ ID NO: 51644 - DNA, 1701 bp, Cannabis sativa
  modified_base (49)..(57): a, c, t, g, unknown or other
  modified_base (449)..(467): a, c, t, g, unknown or other
tttattaagttttaaaatataattgtattatatgtattagacttttaannnnnnnnnttctttacattaaaatattatttggatatataatttttttaattatttttataaatgtatgttaattacgtacattggatcagttacttttacatgtcaatcaacattcgatccgcacaagtacgaattttgaattttctaatccaatccaatccaatccgcacaagtgcaaatatctgcactttgcggattggattgaattagatcgtgcagattggattggatcagttattttatgaacacccttagtagtgattgtggtgacacacccagtgataatggagaagaataagaagaaagagaagcaagatagattagggtttcaagaaaaaaagaaaacagaagaaaagaaaaaaaaatagaaatgtatattttttataatttatttattnnnnnnnnnnnnnnnnnnntttttataatattttaataaataatattatgtgggctaataaaattttgccatgtgtatacttgtgtacacatgagtactctactgtgacacttaattgagatttttgaacaagaaagtaaaaagcaaaatagaaatattggagtttaatatattttgttgttaaaattttaatttatatagttaagtattaaaaaatataaaatttaaataattttactgttaatatccttttattaaatctaaaaggtacaatcctatctattatgaaatcatatagagatagagcaaataatttttgggtgaaatataataagatagagtaatgatttaaactatacatcttttttaatgtaattaattattactataattaaaattgatattaaacaaaatgaaatatatttcttgtgtgcgaaaaagggtgtaatttgagtatgtttataagatatagcccttctattattgcattatttgttgcatgtggtagcaatttcttaatgcgtttgcgtgtttgaaaattaaaagtgggtttggttataatgttttaattaattttttatttttaaaattagaaaagtaaaaatatttttaaaattatgttttataaagttattatcaatttttgatttttttaattgagaattaaaattttaaaaattttaaaataataaaaaaaaaatcacgttctaattttttttaaaaaagaattcttaattaatattttagactctgacttcaacctaaattttacaatctaaacgaaccttaatcccgaccctgatctcgacctaaatctaacttaaattaaattaacaaataaaaattaaatttacagaacacacttttattttctgtttttaaaattaaaagacaaaaatgattataaaacgtatttttatttttcaaaattaaaattttaaaaataagtgattaaaaaatttaaaaacaaaaatattaccgaaagacatctaaaataaaaatggtatagcactattgtagagaggataaaaagtggtgaatttttgactaaatatgaaggcaggtccaatccatgaatgaacaagacaaagtcaactggttttttcaacttagtattctctatttttctccaagttagggagaagataactccaattaattaaccaagagattagacgatgaccacctacgcaactttttctagctattgtgggtgggatggataactactctaaggtgtttggtgtgtttgt

SEQ ID NO: 51645 - DNA, 913 bp, Cannabis sativa
agagccgtctcgtagctagttccattaagcttaaaagtcaacaagggttgaccacactatcaattgattttggtatgtatattatttttcttaatcttttcccccttgggagcaagtgagaaaaatataaacacggatgatattgagttgagtgtagcaaccattttcaggaggagctagccattctaaatccacaaaaagtgcataacactcttcacgatgtataaaaatattaatattataaatatatagatttctgttcttaagtacatttgatttagacgtacaatattaaaaccgtctcgctcggaggtgacaaaatcttaattaagaaacaaatgtttaagtagggagctagagccctagctaaagagacaaatataattacgagagaaattaatgaagttattattatcatcatcaatatatatatatatgtaaatataattaagcttttccaaaaaggtgattacgatatagaaactaggggtcttatgtgtattatgtcgggattatgaaggacaatcctaatgaaataggattaaatttttaattacataatattaaggttttattaacaaagataaaaacgtgtcttttatgttgttcccactcaaaagttaaaaaagtatatatatattttttttattttatatattatatattattgctggggtacgtttaagaagaatggtgctcaagtgttcaacttcaacattgtatgtgcactttaattaatcataatcatatatgtttttgataagacagctaataaacgaggggtggttgaaacgttttccttgcttatatataagtttcgaaacgttgtcatctattcattttattagaatgtataattgagttgctgcaagaattaaagagcaagggcaacaaagctaacctaaaaaaatat

SEQ ID NO: 51646 - DNA, 1753 bp, Cannabis sativa
cacaaatccaattacattgtggctttccaaacacaccctaaatgtatggtatataaagtataataagtaaacgaaaagaaaatgttagtacttcatagaccaaaaaaaggtaaatttttggattgaaagacttaaaagtctggtctaggggagttgaagggtggaaatagccaagattcatttcagaaatagtctaaataaaatttcatttacttatgaatttcaatctcttgataaaatagatagtatttatgtacaagtaatatagcatgttatcatttttgagataaaaatgatattaaaggataaaaataatagataattaaagtaaagtttgaacttgcaattttaatcaaaaaaatttcaatacatttttatactgagagctcgcttattttgttgcctatataagcatttgtattttcttttgcattgtagatgcaatatgtttttttctctgttcttgaaggctctccatcaattaaatttaatcattcttttatcttcataatgcttcaaatttgatctacacacttttcacttcttcatatatctttttatcatgttgaacgcgaagaatattcaattttcattggttttattgccttaataattcaaaaataataagtttgccttgttaatgggttttgaaaagagttattttgaaactaatattttgcactttttaaattcttgaatagttagtaattctttattaaaaataaatgtgggaattgcttttggattttggatttgtttatgtgtggtgtggacccatttatattagtattaaaaaactaaaaattgtatttgaattggaatgaaaccaaccttaacaaataaaagaaaatggttacatgaatcaagaatgatagtctctataaatctttgtattaacttctactgctattgtgtgtgattgaaatttatctgaaaaaaaaacttttactactaatatagtttcagcaaaacaggactacaatatattattctatataccatcctaaattatatcctcatttgttgaaaatactaaaaactatttacataagctatgttctatctggaaatggctaagaataaggttgaaagtttattattgtggaaaacgaatctagagtagtgatcaatactgtcaacgacaaagattcttgatgggaagttatgaactactcttcattttgtaaaaagacttcttattttgttagttatctattttctagtacggttagaacttgtaactttatagcctataatgtggtaaagtgtatttttacccacaatcagtatggtggtttatttgtctccttcattccaacaaacatcttttataatgactgcgagatctaattttcatctatcaatgcacattttttttttaaagttatactgactacttagtttaggaaagaaaaatgctaaaatgtgatatcgttattactgcaattaaatattgaatttcttataatttaatgtaataacttttataaattatcactaaccaatcataagataccacttctaagtgatgcaagacacctaatagcaatgcttacaccctattttctttttgacactaataaaaaaaataagggcaatatgatagagttaagttatacttttttctatttgtgttacttttatgcttacttaagttgacaaataaaaaataaaataaaaattgtgtcgtttgtcacatattgttcctataaaaaaaaggattatttcacaaatactcaaaaacaacaaaaaa

SEQ ID NO: 51647 - DNA, 1056 bp, Cannabis sativa
gtttggttttggagtggggctggttaagtatctccttctttctagattgcaaagtggcgatacagggtttgattgcaaggaaagctctagtttggaagtctcatttggtttttctggtctctttgatgctcacttctgctggattctaaggggattcaatggcgctgctcgtgacttagcagcctgggttgctttcaattcgtgttttaagtctttttttagttggagaagtaacaccctttgttgccactctaaactttgggttctgagatgtttcctctttaataaaagtttattttaataaaaaaaaaagtctaaggtagagacaagaggctccaactcattgttagcccaaaattgaaggatagtatctcaaaacaaataaataaattattttggaccttgtcttttgtaaaatatattaattggactctccgttttgttaaatgataaattagaccttctatctttcaaaatggtaccgtgaaccaatttgttgttaaaataaaatttgataataatctaatctagagatgctatgaaaaaaactagttacaattttttatatctgtttgtgctaggaataatttttaagtcgattatattaaactttgaccttattgtttagatttgttctattttattatttggggaaaaagttgattatttaattgtttatttatgtacccgaactaattttttgttaaaataaaacttaataataactcaatttaaaagtgtttacgacaaaactggttatattttttgcatctgttcgtgctaagaattatcttcaagtcagttatattaaaaaaaattattaaaaattaagttaaaaagatgctatactattctaaaaaatacaagatctattttataatttaacaaaataaataatctaattgataatttttacaaaatataaattcaaaatattatttttatttttgaaagaaaggatgtatcatattaaattaaatcagctgttacaggagtactaataaatctaggacaagcatctgtccacaaatcgaccccaacagaactagtaacaga

SEQ ID NO: 51648 - DNA, 2016 bp, Cannabis sativa
aattacagtgtaattacatggtcagacaaacatgtcaaattgtgtaattacctccaattacacacaaatctaattacattgtggctttccaaacagacccttaataatgcaatttaattattatattctttgagctaattcatattccttttatagtacacgtgtcacttctggtgaatagctaaagtttgagtataacatgtatatatcaccatcaaacagtaataaagtgcatatggtaaaccacttaaaaatgggagaggcttgagcagttgccggtactgagacacaacgacagtttaaccgagattgacaccatcggaaaaaaggcaagagaaaatctagagtgccaagaatttttgctggtttgaagttttaagaagcgtgaaattgaaaatctaaaaaaggaagagatgaaagatatttatagacccacaggggttgagtcgtcgctcatccaacggtctcacttcaaacttggataaaaccccatgatccagtggctagggaaaaattgttagaggcatgagtgtaacagaagattacactactcaagccccaatttgacaccctgcaattaatgggagcatcaaaatcaaaggaaaaattgaatcggcttaactaaaattgaggaaaatattgaaaagcattaaaaagattgtcacacgtgttgtctacagaagagtgatgtcagcactttgggagataagttgcaagccccatttcacaaaattgtgaattgagacttgggggtaaatgttgtttatgatttttctctaaatacgtggcactttaagaataagccaggtggcaatgggagccttagtacgggatgtgttgtattaaatcgccttcaaagcttaataattgcaagagcttcaagagattagtcacctctggaaggaccaccaggaggatgatagttttgtctcttcctctccgtgagcaaaactcaacctagagaggagatagagggatgtacgaatcttggcgagttgcttgaggctaagttactatacacacatttaatgtagcatagggaggaacttcctactccttactctaaaaaaacttgctcaaggatttaaacccataattccctaatttcacgatgccccatacatcatttatacattatttgacggctacattatgagctatcaagtcatcggtagaagacaagtctagtcttaccaaacacctacattaagcccaggtacatcatgaagaataggcgatcatgccctataatcaagtctggaaaattgtgcaaagcatggttcatagaaacacgataatggtgatttttttaccaccattatgaacctataaataccccaacaatgtatagaagggagacttttttttttggattcacagtaaaagaaaatactcagaaataaggtggcgtttggttggaaggaatgtaaacataggaataatattgagaataggaataagaatagaaatggaatggaataaaatttaaaatgcataaaaaattgataaaaaaatcattaaattttttctaatgttacaatggaatggtctttccttccatttcaatatggaatagtccttctaccaaaatgatggaaagggcattctattagaattacactccaatactttaaaatacaaccaaataaaggaatagaatgaaaattatttcttttatattctattccattttattacctccaatcaaatgtcatctaaaagtgactcgtggattaaaactcattaatgccctaaccacgtaaaaattctcttcttcaattcacattaattgttccccacaatcaaaattaattgttgccaaaaatattggtcaatatacaccaattttcatttttagatacatgctatttttttattatatatttttttaatgaataatagtaattagtattaataattattttatatttaaatattttatgtcagttacaatctttcatatccggtatgttaatcattttttttttttatcattatgccataatatgttttatt

SEQ ID NO: 51649 - DNA, 744 bp, Cannabis sativa
  modified_base (670)..(674): a, c, t, g, unknown or other
tcccaacagcaatgtcaatctaaacattaattatatggcaattaatattaattaagaacaaaattgttcttgtaactatatatataaaattaattataatagcacgaaatacaaattgaaatttacaaaccaaccttcctggttttatggctccactaacatcatcaagtatggtcacatgtttctttttgctttttaatattggcagaaagcttaccaacatcttcaacaaaaataatttattagaacaaatttaagataatcataatatatatataattaagtttatattaattatatatattacctcgagtatattaacgcagaagttaatgaatgaaggtaaagctctacttcccacatgaacatctgcctccaccttaatattctcatatctcacttcaatagtgggaaggtcaattccaacccttaacaaaacaaaaattaaatgtattaattattattgtaattctttaattagatataaaattaagttctaatttggacccgttataaataagaataaattgtaattagttatacattttttaagtcccgtattaataaagtacacatttgtataagaataattacattttaataaaatatatacatataatttatttatgtagaattaatatttttattctaaattgtaatacatgtatannnnntatatttactcaaaaataattttaaattgttatattgatatttttaggtattttgattttttattctagt

SEQ ID NO: 51650 - DNA, 909 bp, Cannabis sativa
gacagattggccaagttttcttctaataaagtggccactaaagttgcacgaaaagccaagttcattaaaggcttggcaaaacacatttctagggatgttatcgtggtagccaaactactaggggtttggatgtcttatatgctcagattgtagagttacctttagctactgagggggctgaatatctgatttacaaaaggagcaatctgagaagggatgcgtggagggcacaatccggtattggaatgagtaagggccataatcccaatgatcggaaaacgaagccaaatgaaccactagttgcatctgaactaaaggtttcaaggtaactagggtttttgttgggacaaaaatgagtattggcaatcatatcctgaatgtccaaaacgtaagagacaccacttgggtgagtgtcaggttaaaatccgcttccagtgcggagtagtaggccatttgaagagaagttgcccacaattacaaaaggctgatgcgaagaaagaagattctatggttccgtcttgcgcgtttaccttaaccgaagtagatgcagaggctagtccttcgattgttacaggtgagatctctattagtggtattatgtttgttattctaattgattctggtgctacgcactcatacatttcaagtatagtcattaagaatttgagtagaccatgtgatgttatgtctagtgcattcggtactttgttgcctacagaagaaatagtgatctctaggaggtgggtttaatctcttctagtgttggtataaagaagagattttttagtggaattgattgaacttgacttagaagatttgatataattatagggacggactgattggccaaatataatgccaccatagattgtagaagaaagatggtgacatttgagccagatggtgaaa

SEQ ID NO: 51651 - DNA, 3018 bp, Cannabis sativa
tgtataatatactcaaattaataatttcaggttattacaattggaagagaaagatatactgttggtgaggctttattccaaccatctatattaggtctagaggcacatggaattgttgagcagcttgttcgtactatttcaactgtatcatccgataatcatcgtcagctattggagaacactgtactttgtggcggtacaacctcaatgcctggtaagcttacatttgttgatgttagcttgttagttacttaccatgtcgcaactcaaggatattctattctatgctgagcattgccattgatgcttgttgttttataaaaacaaagggaactatcaattaggaattattgtttgttttatcctggctatgtatttatctccagtgctgtttggttttgttaagggagtgattaaataatagatatggatcatcagtaatttaaaaagttaagtttttgatgcataagttagctcaagttttggcatagcatcacatattattgtaataagtacttaataatggataagtaagtagtgtaggcaatttattgtgttatatcgactaatgggttttgggtggttttgtggaacataacgttagcaaatatcttcttgttgagactattgagaggacaataatgttgccttggcttcatatttagctctcttgttatatcaaaacatcaactttacaacctgaactcacagaaaattatgcaggttttgaagaaaggtttcagaaagaagctggtctgtgctcatctgctgttcgccctgctctagtcaaggtactttgtttttatcatgaaaatgcattttgctttagattccatacgaagcatggattgacagtaaagttcctacacgaaataagtgtggttttctgttgttcttatatcaaatggtattggattgatggtttgggtttcatggtgtgtttggttgatctacaaaatctatgtttgatttgcaatttgcattctacacttttttttttcacttgtgcagtttctttgagaagatttaacttctttcttcatttttggggttataaaaagataatttggaaattgtgcagtaattattcttgtagtttggttgggaagaaattgcaggatttgtcaagataaacaatgctcattgaattattctgtgataggagtaaattatgtgttgctgattggcttaaaagtgatatttattttaaatcattttcattttatgtttttttttgagataatggcatgttttggctgagtttgtttttgtctttgcttctgtacctgttcatattgatttttctagtggttatcagaatgcaatgcttacgttttttagttctgccatttataatgctatgatttttatctgtattaatattctaaaattgtgtggattgtcatgtttgctcgcgacttgacagcctccagaatacatgcccgagaatttgacaatgtattcagcatgggtaggaggagccattcttgcgaaagttgtgttcccgcagaaccagcatgtaaccaaggcagactatgatgaaactggaccttcagttgtgcataggaaatgcttctaacttctgacagtgtatttggttggcttaaagagtacttcactttctattttttttttctggtgttcatttaatatatacaattgtgtttactaattttagttgggatcaattgattgaattaggctctacctccacaaagatagcatctgatcgtgtattgttaatttattatgaaatatatatttatgtgatttgtggaaggtttgagaaaatgatgatagaaaaagtgatgatgagattgtgaatttgtgatgagctagaaaataataggaaaaaaaaagtatgagaaaaatgatgtaagatatgattatagagaaagtgatggagagagaggtggtgaaggaagaaaaaaaaaaacagtttttgaaataggagatatatatatttatattttatttcttaattgcatttggtaaaaattttgtttttaattctttcaaacataaaaagttgaaggtgtatttttttagttttttttttttatttgtttataataagtaactatttttgtttgttttccaaaaatagagaatagagtagaaaatagaccattattaaaataatttatctacgtaaatgttctattcagctttttaattcaacaagtataactacttaagaaaaagttaaaaaaaaaaaatcaacaagtgtatttagtaaaataatcgaacttcttggtgtggaagtctcaggttgtctctatcgtccttggacatgatttagataaaatcttgtttattgaatcacacctccttctaagcttgttaaaggcgatcccaaccttatgtttctccgctccttctaagcttgttaatggcgatcccaatcttatgtttctccggtggctgtgcaaagaccaacttctctcatagcttcgttcatcgatgatcgaaggtgttgttggtacaattattaatttattctagctcttattttgtctagaaagctttggagtagaagttcttgagtcaatcgaaagctcgattgttacagcccaaaggacaactttcaactcttcaaaaatgtactcttagtatctctaattatgttgacaaggttaaatctttgagtgattctttaggtgttgctggccatgccgtatctgattttgatttaattcttcatcttcttagtggtcttggctctaagttcgatcatgtagtgtctaggataacatctcgaagtgattctctgtctcttgaagaagtgcatgctcttctcatgtcacatgagattcgtcttgaatgccacacgaaggttatggagctctctacaaagatgtttgtgaatctcacttttggatcaagaactggatcgaataggcgtcattctggatctggaaggggtattatctctgaactgttgggaatattctaccaggatctagatttactaacaagtatgttgaattaacatcataaatatgaatatctctaaaa

SEQ ID NO: 51652 - DNA, 1481 bp, Cannabis sativa
tacaaaagtaatgaaattgggctggggcagtaaaaatgttgtttttgccgtgtcccagtataattgtaaagttttggtccaaaagcagtatttttgtaaaattccctagtaatttatgatgtttaaagaacttctaaaccttaaacctatgataatattttggtaatattggacaaatgctatgtttagtgtgatttttataatatgtatatatatttatatataatattgttacatgtagtttgagaaataaaaaaaaaaagtttttttatttttatttttagactttaaagtagtttttttttttttttttctttttatacttttacgaaaattcacataacaaccaacgaaacaaccaaaatccacatagcaacacacatagaaattatcgaaataattcaaattgtaatttttttaaaaaaaaaagttgaaaaataacatatgagataattcctcgagaaaatattagataggcgcctccttagagacttttgaagagttgaaaatttcaacaaggtgatttctaccgacaactccaacataaatcttaccattttcaaggttgagcgttgtgtcataataactactaaatcttaatttcattatagaattttagtaaataaattaatattacgtgtgtgactaaaatttatattgaaaaatattaataaagttacatttgtattaacttaacaagcattgtttaagaaaataaggtatcggattgtaacaaggccgatgattacttgtgtgacaaaatgtcccaaacagtagaatcaaacttaataacattgttcacgaaggagacgactgaactagtcatgggttgaaacttgggacaagtactcttgagctggttggagacttttaattgtcatttcaccagccatgtatgtacttaattatcattatgcattgcttaattttcattaaatgtatttaggaaatgttattttaaaagttactctctcatcaaattaaataagttttgtaaagatttttgtatataactaaactaggaggaaccgattttttttaaatctggttagttgtactattgaacacattaattagaatcataatgaatatgaaggtaaaaataatatatagttgactttcataattttgaatatatttatcaatctacaactactcttctatttgataagagggacagttattttgctttatacatttaatctttagatagctagctattttttaaggatgttggcagtaaaattacttgaattatacaatttgtgatacttaatcataaaaattgattttttgacagcaaaatctatcaaactcatattctgttttgctctttacactttcgtccacaagactctcttaagtgccaagtaagacatgtcacagtgtacaaaatttacacatgacaaatttatacatgaaactcgatagtgcaattgagtgggagcgttaatcatatatatgaaatttatagcttctat

SEQ ID NO: 51653 - DNA, 6484 bp, Cannabis sativa
tctttatttgctttacaatatttcaatcgtattaaactacttatcgcttacaaaattagactcactctcgttagctaaaagcgaggtcaacactttttttaatttatcttatttaattgctttatttttgacacactatcgttggctagaagtgaggtgaatgatatggatcgtgattgcattcttactgaacttacaggtgaaaaagttgaatggcctgctagtcaaagtgttcgcatcactcatctctcttatgtccatgcttcactcatgttgtttgctcttagcaattagcttccaaatgccaacaagacaatggtgtcttaagacatcttcttttttgaatcactacaggggcaaacatcaatttggcttctgttcatcatgggacaaattgcttccttccttagaggtaaaaaacatagccacaagcttattttttctaacttaatctataaagttctttccttttagaagaatgtggcctattcgaatgagtttctcgagcctcctctcactggaataattttcaaccatcagagtactttgatggagctttccccaagcatcgtaaggtttatgttagtgcaactccatttgatgctgctgtaagttccatttctgcttctgcagatgtgcagaaagtcaagcaggaagtcatcttggtgaacaatcgcttggctaccatcgaggaggttcaacaagaaatatcaaaaaaattgtccgccgtgatcaaactttatggggcataatttttgttctctctttcctttattttaacttattttgtatttggttgttggactttttttaacttttatttgtctttggctcttctagataaacaaaaagggggagtaatgttttattttattgatttgtatactcaactcttgatcctttttccaggggcagttgaggttgatgtttttgttaaaccttggtttaaagttagcattctatttcagtgtaatgttgtgtttctagagggagttcaattgtatgttttttgttaactttgtttttgcaggtgcatattagttaaaaatattttaattatctaaagtgccaaagggggagactgtaaagtccttttctggcaatttaagtgtcaaaatattttttatttaatatgtgattttcttgtgcaattaaactgatttgattacatgatttcctacctttgttgctcattttcttctaaacactactacaaaatacactttttgtgtcaattttaaactgatacttatacttatagtgtctgttcatagaactgactcctattccacagtgacaaaaagctagagtttaggtgccagttataaactgagactaatgagttttagtatcgttttaaaaccgacacttaaagtgttttcctatcgtctcagtttataaccgagactaattagtataaatatcgattttaaacttaaacgaattttttttagaagttttaataatgaaatttgaattttattttgttcattttataatttatttagcatcatcataatttattctgatattacctaattttagaacccataaaactcattatagtaccattaacattttaaaaaatttcaacatagtaacaactgtaatatagatgtttcccattttaaaaacgtgttaatacacataaaaaaatatcccaataatccattacaattttcacaacaatcaaatcagttaaataaactcacggagaagctctggtgactgacagcggcggagccactacctcatggtggtttttagggtattcgagctattggttttaaagctcacgacaagtggagaaagagtatggaagtcatttttgttgaagggatctgaagtttctcaaatctaagccgagaaatctcggctccggtgagttattccataatgaagaagggtgagggaagctcgaggacattgggacttggggtttttggggctcgcagagttcagtcgtggccgccgtatacccctatggtgaacgacgacggccaacgagaaagagagagaggtttaggggttctcgggctcatagaattctggtgatggctcgtcgggatggctgagaagaaccacctggttctatgttctccttgctccagcgccgcgtgaggattgagcaagagggagagggtatcagagagagagtgagaagagaagactttatgttagggttttttgtttagggtatactattctttttatacccttttttgttttattttttattttttttttaattactgaaaattttattatttatttattttttttttgtcataccctaaagtctcagtttataacggagaccaaagacttttttttatgtattttttttattaaatataaatttattttactaaacaaaaataatatacatattattttttgttataccctttaaatctgaagctttttttatgtattttttttattaaataaaaatttattttattaaacaaaaaaaatacatatttcttttttttttttttttgttatgccctttaagtactgtcggtttataactgagaccaaagcatcttttagtctcggttatgaaccgacacttatactcaatttgtatatttattgtttttttaattttttttttgtctcggttatacttttagtgtcagtctactaactgacacttaaagtcattataggtgtcaattataaaccgagatcaaagagttgtggtagtttttagtgtcagtttttttttttaaaaaaaaaaatgtccctcaaaccgacaccaaaagtctattttgtagtaataaaagaaatattctttttcaactgtctattttattgtttagaaaacttcttgtaacagaaggaattctcttatgaaaagttatttttatttggaacctttgactttgctctttctctttaatgattccagttgtgtcttattaagatcagatcaaacacaatgtattttgtaggtttgaagtccatattcatgatcgtgctccattttggcaagtttcctttctagtcctgatctgttgctgtagagtccgattgtgatgctgcaaatcatgaaatttttagggaagtgttgtatagctgtgacatcaattttgtggctatctccaaggttgatatgttctataaatagaacttagagagcagccaatcgatttatttcttctagctttcatgtttgcatattttcttatttgtgaggagagagttctttatgggtgaaccttgttgttcagctagattttagtgcttatgtattttttcttatactagtcttaggatcggttttaataacttgattgaataagagaaaggcttttgggagaatacttgttcaagccttacttcgggaggaagtaagcattcacacatcaaagacgaagggagtttgttgtttgattgtggcttagaaattagattcgtgaagagaattacaaaggattgcgacaaaaatttagagggagtgtaaacttgtttaagttaattatcattgtaactttttgagactttatttatttatttcattctctaagcatggccccgtggactacgagtgttcgaaagaatacttatatcacgtataattctcttgtgtcaagtaattttattttttgctgttattttattactggttcttgtttgttttctgcgaaattatatttttcaaagaaagaattacattttgctgctgaagattattacaattgtgtttttactgttattttgtaaaaatttattggcttttgtaaaaatataattttttactttacaatatttcacaaagatgtactaaattatgtacgaaattgatatggatcaaattttacaccattagttaccacacattagttatatgttgagtttttaatctacatgaacttggtggtttctttacattcaaaataacaaaaaagtaataattaatttaaatcattattatatttaaaattataaaataaaaataacaatattaatattaactaaaataaaaatagaataatactaaattctaaaattaaattattctatgattctatatctttattactagtagccatgtatatattatttaatttgtgataaatatttaattatatcataaattagttattataaattattagtgttagaatttttaaataaaatatatttattttatgttgtttttagtgtgaattattaaaattattgtaccaaaaataaaaaatttatcaccaaattgatgtaaccagtagaccaaaccaaaatgttataagtattaaacatggtctttttcttagggaagggatgcccttaagtgaaaaggagagactcaagattgcagggatcatcacccatccaaaaagcagctttttctatccttagcactaactttgtcaatttgtgagcaaacgtgtttgttgtgtggttaacatgatcgattgtggcattggggagatgagagaaagctgactgaatttgcttgataatatctccgaagagggagatatcctcttttctggaactggcagctaaggcgctcgtgattcttttgcagtctatctctatttgatgaatgggaaaagttttttcaatgcaccagagtagcactttgaagatggatttgctttgagagttgcagcttctcctcctcctctataagggaaggcgactgttgcaacaactccaccttcattgttatggattacactgccaaagcctgttgagtgagttgactacaaaaaggccacgtcagtgttgagcttgagaagtcctggtgggggaggagtccaagtgggtggagtagcctatgaattcactactataataatatgagtgtcacttgcttctaactttaccattttatatttttgttttcttttgaaggaaagaatgttgtaacgattttttcatattattaaatcataatttaaaaaatttgataccaaattgcattaataaaggtattagcaattctcttgttttattttgatggaatagtgttagaattgtttgataaatgtgattttatctcaaaattaattaattatggtaagaataatttatgtattatatatattctatttttttaacacattagtaatgtaagactctctaatagctccttaagatggtagttttttttttgcttactatcttggacaacttaatcactggcggctcttttttggttcactattcctaaattacaagtgactcttttggctatactttttggattttcggtggaactttttggctcagtatttctaaattacaagtgatttttttgactttcgactctacttttttagatcggtctttcaatttggtggctctttgttttagctctacttttttctcgatcaattttttttattggattggatcgttagagatttttgtttttgctttgatatctggttagaatttagaattgtaaggttgaggaagtagaaatatgtgagtgtataataatatgcattgggttctatcccaaaatcaattagacatgagagtaactcaggaatcatatatatattctattttttttcaacacattaataatgtgagaacctttaacaaagagaaataataaacgagtgtatctacaacttttgaaggttatagaatatcactaattaattatacgacgcctcctttaagcaatgttatgaagaaagtgccaccaaataatgatattatcactaagcaattctacgacacatctttaagagatgctaagagcatctttaatgggggttgcccatggagctatttttgccacatatgcaatgtgattgttatttttaatgctactttatcaatactattatctatatatagcaacagccatgtgtcattactttatctttttctttttttttttcaaaaagtatactttattgtattattttataatttatagtatttgataaaattattgatttagatgatggcaagtgggtactttttggagttgtcaactattaaatagatttttgtatgaaaagttgtcaaatcttacgtgcatgagaaagaaaataaaacaaaaatattttagaatgatgtatgcacttttgataattataagtgttgcccccattagagattctctaagaaggaagccccacctagttgggccacgtaagagcatctccaatagttaaattttagaggatgcttggttatgcaaattgcttatttggcaaaatacaaagatactatactattaaagttaaataagtgctatcataaaaaattatgttgatactactatattgtaagtctcaaaatgatattagaaaataaataaaataaaatattatatttttcattgataatttttagcaaccttacaaaatgcaacattggagatgctcaatacattgcatagactgttaggattaataaaacactcaagaaatatatatatatatcatagatctaatcatattcctaaaagttctttaatatagaaaatcctaaatcataaatctat

SEQ ID NO: 51654 - DNA, 927 bp, Cannabis sativa
tttattcacttaaagcccaatggatttaaaaatataatatcttttttttttttattttaatatattcaaataaactttaatattaaaatactaattttaattgaataattattaaataaaaacacaattcaaatattattgttaattacagaaagcaaattaataattaaatttttattttctctttcttataagtttcattagcttagtgaaaattctcaaaattgacaacatcaattatgtgatttttaattaattattataatatactattaaacattagttttatatgaaaattagcagataattagtatttaatttagaatgagagttttaattattatttatacaattgtggaaatctatttaaattctaagtgtgttgattatattatatttgaaatattataatttatatattttatgtttcctaaatgtggaatgcgacgtatggcctatagagttacttagacatgatttggtaccttaaaaatagtggggtaatttagttagacatttaaaatattgagagttatcgtgtttataggtagatttgtacattttagttactttatgtttaagttagggtagatttgtcatttaccctagtttgtctcttgtgattagtggattattactaatcttttatttcaattttatgctaaagaaagcagagttatcttgtcgataacacttagaaaacaaaataaaaactcacaaaaatcaaacaaactcttgtcatttctctctctttggttcggtcacaagaacaccaagaaagaccaagtctttctctactattttctgatcgagagttagggatttcaatagaatttctagtagctaagggttagaatcagctcaaggtaagtttttactcctctctctttgttgctataatttataaacactacgcaagtatacgca

SEQ ID NO: 51655 - DNA, 1198 bp, Cannabis sativa
cattagaactattattttaataataattaaactatataagtcttgaaatttaatttttccttaaaactcatatattttaggaccggctatgcacctagtgtgtaggtgttgtcacctagtctgtaggcgacttcttacatgagagagatccttgtcactttcattcatcgtacacaccctaatttcttttcaatagtatttatagagtatttatgatagtgtatttgtcactctccctatcttaaatactattgggttttttttccatgtcatacaccctaatttctcactcctttcttccccacacctatttatacacactaacactacaaagatattatctctctctttaacaaccaaaaaaatgagaaactttacattaaaaaggagacatggcagtgacaagaatctcagatttcgaaactatgatgggaatgaagcaaaacccagatggaaaaaaggcatggccaaagactgagctgcaaaactactacaccaatcccaacaagaagaaaaagttccaaccaaaagctaataacagtgttattaatcatggcatctttctcccaaagaaaaggttggtaaaaacgatgatgtttaaatatatagttaagaaattctctgttatctttcagggccgtgagtccaaaactaccaacgacaaatttatgtagcgaagaagaagaagaagaaaacatatgttcctggcattttcatggtgttgtgtcttaattttatattgaaaacaataatgattgtgaagtttggttgaaataattatttcatatgtgtgtctgtgtatttatgttttgtaattttcttttatggattgacacagagaagtgattcctctgttttgtttctgttttagtaacggcctacatcgaaaattagtacaaaacagatatatttttatgacaaagcaaatatgtaactgttaaagctagattctcttgaaaacagagctttaaaagacacaaacgaaatcgaaaacccaattgaattttaatagagaattgggtaacattgatttttgattgtaagaatatgaaggaaaaaaaaaagaaaagggtgaaagaaaaagatggattttttcactgtttttgggccaattgctgattttgtagtttaacatgttatgaaagaaatgattggatctttttatacttctttacacatctaacctaaccgacttcac

SEQ ID NO: 51656 - DNA, 1119 bp, Cannabis sativa
tgtcttcctgagtgattcggtggaagcagtcaactcgatttgctgcacgaaattgcagggccgtttaacctctttgcaccacaatgtccaggacctggtcagcttatttctggactcagccaatcaacttggtctctgggaggcctattggatccctcgaaggaacaatggtgtggcgcacgcggtagccaagtgggcactcgatacaaaccagtttgggcatatcgaactgtccaattttgacagttccctgctttgttcttgagcagatggttgtatgtttgctttcgtttattttagttgtcttgtgtttaggcctgttttctttaattttgttagattgttttctttcctgctagctgttagtttgtttagctggtcctttgggagctagcctttgttctttgccggactcgttcggttggactttgttgctctgttttgttttagtgttttggtgcttttgcaaagcccagtaatcaaaaacaaaaaaaaaacaagtataaacagaatgttcttcgcatgcggttatttataataattttaaattttatatataaattttaattgaataataaaatttaaatttatttttatataatttttcaataaatatatttattaataaaaatatgaatttatagaaaactctaaagaaattttttaaaaaaaatcatcatagaagaaagtacatacaaaaatatattcaaatatacgccgtagtgataaaaatgtaatttagcttttgcaagatgtcgatcaattagaaagaacaatggcaatccttcaagcaggttgttcaacagttttttctgtccactgaccatttgaaaaggccttatgacccatcttgttgttcgtaaaagaatcattgtcttgtaatggactcatcatgtaacacttactaaatttataatgttgcattcaaaaaacatatttatgttactaaattggttatagtgctttctattaaattatatttgtgcaatgaagaatggattgcaatctccaatccacattatccctttattatgcatcaagccactttgcttgggctctctccactccttccttactcttgtgcgattgagtttcaatagaaataatattttatcataa

SEQ ID NO: 51657 - DNA, 1252 bp, Cannabis sativa
gaagaacagtaaggtggaggaaactacttaggagctagagtctggcatgagggcttaatatccagagttgttcaggttagatttcgtgaacaaaatccttttaacaggaggataattgtaatgaccgcatgattaaaatatagattagtagggcaattagcattacttatctttatttataactatatatgaataattatgttgtgggccccatttttagaaataggcattaaggttattatttctcaattttggagattttattaaagtctaagtgtattattcttgctatgtatgaaatttacaatttttatgatttttgttcgataacgataaaaaatgtgatggatggccattagagtcacatggatgagtttagagcccttagtgggataaacatatcactgtgtagagtatcgagtttaggcagggtggtgatgtatgaccattttaccgctaagccttaagtttgcttgggtgtgaagtgaagagcaaaataggaattctatttaaggttcttattttgtttttagtgttttaagtgaggattgttaagtataatttgattttgtttttattaattaggaatagtaatattttaggggataaacatgaaaattaaattctctttgccttagtctctctcattttttcttgaaccttaaggagacaaggtctcgtttcaaatttttaatcatccttaggtggaaaatcaagggaaaatcaagtgattaaacaaaacctagtgtaaagagaagaaccatctcttgctttctctttaaccattcggccacaagaggcccagctggaattcagcccaatttcttccaattttcaaagtaatctagctgaattcaataagtttaatccaatgtataaccttattctagttctctcaaagttttgttaagttcatttaaaggtttcctttggttttgagtatgcaagttggggattagggtctgtttggattatttgaatttaggattggatttctggggttaaactaagttgattaaggttaatttcatctggtttttgctagtttgttaagtggttgagcaagtttgagtttaaaaactcaaacttagttcaataatagtattttgagtttctgtgcatttttgcgattgtttttgcttgaaaactgttgttggctgacattacaggtatactgaaaaagtttggttgagtttgagaatgttatgagagataatggagtttttaggattttctgcaaggaaccagttaa

SEQ ID NO: 51658 - DNA, 1461 bp, Cannabis sativa
aaaatatctagaattgagaaattataactctaatgtccgtttctaaaaatgaggcccacaacaaaataaaattatgcataattgtaaaatattaataattaacgccttaattgcctttgttaatccataatctaacacgtggtcattacaaaaatatgccttaattaggaaaatattttcttaattacaaaaatgtatttgaattgtagagataatatattacatatgaaacttcatgtttttcatgttttatgcccaggaatagtggaatgcgataatttgacaattagagtcacttggatatggttaagtatcttagaattagcaaggcaagatgagtagacatttagtatgttgggaattattagggcagtgatttttgatcgaaatacccctaggatgataagtttacttcatgaggaggaaaaggggaaatttgtcattttactataagttgtaatagttgtctttagtggaatttctagcttatctctaaggtctaatgctgaatattatatttaattacaaataaattggcattatctgaaaggttagaaaattagaaacaaactttcatctttctctctctcccttaggaaacccaaaagagataaactcttctctcctaattcagaccaaattttagagtgattgtagcaaggattcaagtgttattgaagggataacctaaggtaagctaattcttctcttgttctctttgaagttgtaaggtttaattatggttttcatagtgttttttggttttaggttctgttgaattttgttattgttagaattgagttttggggattaaattaggtttgtttaagttggtgttgggcatgttgtttgttgttggtaaggtttgagctaggtttgagttttgagctcaaacttagctcaacaatggtagttttttattcaagattttatagttggaattgtttcatggaatatgtttgttttagcattatttgaagttctggacattttgagatggattagttttagtttggaggagttatgaggttttggaccagtttttctgtaaaaattgcaaactatttttgagaaaactatctgccattattccaagtagaaaaccccaaaaaatagtttttttagggggacttttcccaaaatatcatttttgatgttttctcaataattaggattttgccatgctacttatcaatagtgaaacttttagttttgagttcaaattcttaaaagtagcgaatcacttatcagttttatataaattgtgacttaaggccttaaatcgttgagcagctttttctactcaagattactggcatactccctgtaacgctcgtacttgaaaatttactaatttaaaatctaatcatattttatttatatttataaaacttcgtagtcgggatctcgagtttaaagccattgttgaataaatacatatatcataatatagatacatat

SEQ ID NO: 51659 - DNA, 2296 bp, Cannabis sativa
ctcttaggaggaagaggaggaggggtgctcctcaaaggaagatctttaaccatgggctggctggctggtggaggaccaggaggaggaggaggcaagtcagactgggtcacattaacagacccgacagtcctggccaccttggcctgagccgaccaaaagaagagctgcctgaagatcccctcgccaagtttttcatcctggagcccgtatcaataaaaaggaaaataacaaagttagattacaagttatgcaagtgaaagtaaaaaagttactattgtttggaaggctgtttgggagcctatcatcctctaaataggaatcattagagttgtcctcagaagtagtagccttgtctttgtctttagacgtaggcggtggttggataggcttgatagactcttatccttcaggcctgatcaacacaagggcgtccttaatcgtgcctccccatgccaaacactgttgaaggtcccatgccctcttggatactattctaacaatcttggccagggggacgtcctcatcagactcacccttttcctgcttagtcgtaggcctttccttttggctaaccaccttcattgtaggagtatcatctggatcttcagaagggtttccaacacccttggtatcttgtataagaggttacagaccatacttcctaaaattctcctcataatccagcaagtagatgttgtgcctttctatagggagagacaggatacggttggctctatccctctacctaagagtcaggattgagtgaatgtatgtcagaaccttctagaagtgatgatggacatatctgacatcccaagcgatgaagtagctccaagagtacttcccaattttaggcatggctttgtcgttagtacctccaagtcactgatgacctaactggctaaagtagaagtatccacacctaccctgctttggagttgattttagctcaaagtagtaattcacctcataaggtgagggttatggccagcctaactctgtatataaaatgaagagcgctaaaaggtacataaggccttttaggtaatctgagtcgaacacagcctgaagaagtcagctatgtccctaaaatatcgatgcaagggaaatgctgcccccttcttgacatgaggacatgaccatgccatccagttggatagtagataatgttccaactgagctctagtgggcctatcacattggactcttcccatgagtcccctttccttgattttatcaagcttgctaatcgataagaaggatagagaagatatccagtgctgttgatctacgtactcgaggacccatggctcgggagcctcttcctcaaaatggtctaccccaacctttgaaggttgaatcctagaatttaaaggtcatccaacctcatcataagtacctagggtattgcactggatcaccctacaagtcttatactacctcctagtagtactaggtcggatagcaaattcaacctgctcagccttagaatcaccatcttacctggtcgagggttcctcaccctcgccagccataggttgcctggccaaaggctcctaaacctggttgtccttggcctattcaacttgaggttgatcagcctcctcaacttgttagacgacacattgttgcactaagcagatttgtgtctaaatccacagataaatgtgtacccttctttattattctcagaggaaacaaaaaattcgagtggacagaataatgtgaaaatgcattctaggagctaaagaagcaattagcccaaccataggtgttgtctaaacccctcgacaatgaagagctaggtgtgtacctagcagtcacagagcacgctgtaagtgttgtcctcagaagagaagaaggcggtgtacaacatcttgtgtactacatcaacaaagggctattcaacgcagagtcgatacccactcatggagaaggtgacctacaacttgctttggcctccaaaaaagctgaggccctacttccaagcacaccccataaaggtgtacaccgattaaccactatgacaggttttgtagaaacctaaagcatcagactgactactcaaatgggccatagagcttggccaattcgagatcacatactagccaagaacagccataaagggtcaagccctcgcagacttcatggctaaatgcaccaactcaactcttaaggtctctcaagactcaggagaacagtaagagctagagaagaagtgagagcaagagcagcaacaaaattctgaagatctaacatggaaactccatgttgatggaagttgcactgaccaact

SEQ ID NO: 51660 - DNA, 1270 bp, Cannabis sativa
atgttttcctaagcaacaagcatggcataaatctgagaaaccaacgtttattttattactaattttgatattacaagaagataaacacatgttgtacaatcctagctatggggtgtcctaatctgttatgccaaagtgaatattcaacattaatagtagggacaacatgtgtattacattgaggatttgaacttattaagctagggtacatagtatttgaggacgtcttaggatgctttgtttgagtgagagagtggggttgaatggcaccaaacttgtatagaccttgatcaagcctcccaaccaacaagattttcattgtatctaaattcttgacaagacagtaagagggataaaaatcaaaatagacattgttatcattagtaatttgagaggcactcaacaaattcttagtgatagaatgtacatgcaataaattgttaagaaccagattttttgagtgaaatggagaaagaaatgatgtttttcctactgtgtgaatgagcaaacctaaaccatcacctatttgaatttgttgatgacattggtattcatgtgtgtaggaaagattatatgcattggtagttaagtggtgagtagcacctgtatctggatactaactgatgtccccaatggtttctagtgaagcatacaattgagatgcttcagcaatgttggcatttccagcaaatgcttgtaaggtttttggtccttgaagtgatttaccaaatcgataaaagtatttggccactatatgaccaagtttatggcacagttgacattgaactgtttgaccccagggtgagtattggcctcatgtaaaggcacctcttgaaggtgggtgtgagccacaagattaacctcttcgagttgtggattgagtaggttactggccaaagctaggaggaggataatgagttgagtattgctcattgttgttctgcatctgatgacctcaagacacagaatgggagccaagattagtcaaattaggaaagtaaggagaagaaaaggtacctctgccaccagtgaatggtttcgtgtgagtaagattttctttaggctttgagatatccaattcttaagtcaacttttctaaacgaacttcctgagccatgagtaaggcttcaattttagggacaatatactatttagttcgtgtattcatggaggtgatgaacacattgtagtcactagtgacaccattgaagatcccttcaatgtgttcagctggggagatctcatgaccaatggaagcaagtagatcgac

SEQ ID NO: 51661 - DNA, 1235 bp, Cannabis sativa
ttggaagaatgctagagatggggaattctctgtaaaaagggcgtattgggaatgtttaaagctctctttggagggagactccaaaatttggcacatcatttggcacaacaacttgcactgccgaatatcgacaatgatctggagagtagctgctggatgcctccctacaagggatagactggtttttgttcaaaacaagggctgtacgttctgtgaggaggaagtggaaacgcaggagcatctattttgggaatgcccctttgcaaaagctctgtggttcagtggtccgtttgctcttagaacttcctcttttagtgggatggacagcaaagatatcatttcggaagccattcttcttacccctcctggggtgagaaaggaattcttgacttacatgggggttctgttcgaagaaatttggagatcgagaaatgaatctatgatcagttccatagcagttaacattgcgacagttagaaacagaatttcacagagatatcatgaattcacttcgattttagacccagtgtcagtggctagcaagtttggtgggaagtatacttacctggaaaagaagatccaagactctattcggactgtttgcgtcacggatgcctcctggaaaaacggtctcactggtatcgcagttggaactttggacagggcatcgggaaagtggtgctgggacgcgagaaggattgaatctgcatccccggaggaaggtgaactgcgcgctgttaaatgggcactacaaatgggcattgagaacaatctggactctttggccatcttaactgatgctctcattttggtacaatcactggaaaaacgcaagtgccccccgtactgggaattgcgacctctggctttagaggttttgaagcttatggagagttttcaatcttgtcagttgctgtatgttaatcgtaaggataattactttgcagattggttggcgaaggaagtaagaattaatggccatttggctggttgttatcaaagggaggggtccccttatgtgattcccaactactttttttaatgaacacttagtgttctttcaaaaaaaaaaaaaaaattgaaactttttattagtacaaaatgtattaatataaatagtaccaattaatttatttaaattctattcaattgtgtagttttatatctatattctatcagaattatcacacttaattttctccagatgtgggattacacaatctaatattttaaaa

SEQ ID NO: 51662 - DNA, 1441 bp, Cannabis sativa
ggataatagctgaatcatatccctgtaaaaagacatataatgccaatgtagaactctaggaaaaaacagagagaatcaaaaagtcaaacaaccagagaaagtatctttcatcatcaggttttttcaaccctcattagcaagtacctatgagtgaagtaattacttatccggccaaggagtgaagcgcagtgggaaacggaattcctccactccgattaggttagttaaagaggttgataatagtagatttctagggttctattctagtagggttgttcatttgatcacatccaatatttttagacacatcagatccaatccaattttacattggatgttggatttctccaaccgatccaatccactactgtaggctcaaccaaaccaattcaataaatcattggattggatcggttccatccaatggatgaattgctgcattggatcggatctatccaatacttttgctctaatatttttttagaccggattggatctatccaatattaattggattgattggatccatccaatccaatccaagagtaaaagctgatttttcacctaaacagctaatatattagttcaaaatattataacccaatataaatccaacttaattgttacataaatccaacctaaattttaacataagtacaacacaaaaactaattagaatagaaaggaatatgataaaaaaaaaaaagtgattatcatataattaaagaaacccacttagaagctaattagaatagaaaggcatatgatacatttacatatatttataatacaaaaaactaaagaaaacactttgacactaattcattccaatttaatgtatgatgtatcctgattttagcaagttcattccaacatacaatttaaaatctgaaaaacacaaaaacatatatataacaatcaaatatgtatcctgatttttcaactcatcaaattaacaattattggttacatcttaaaaatgaagtaattaagtgactggtttctgggtttaactatgaaaaatgaaaaataagagaaagttaaaagacctgagttgctgccgtttgcgaggaagaagaggtgtcttcgttggagagggaggagctgtgtgtggcttccgtcgttggtgaagatgccgtcggcgacttagggaggagatgggcgtcgtcgtcagcgagtaggggagaagatgctgtcttctccgtatttaaaggcaagtaaattttgtgaatgacatgagtagacagtaaggcaaaaagtaagaaccaattaaggttaattaggttagttaacccaagaagattattaatatataaaagaaatactttcttatgtgcttcccaaaacaaaaacatatgttaccaaatgagtcaaaagaaacgtgtataccaactaaaggatgattggaaaaaaaaaatttcttccagcaaaaagtgatgct

SEQ ID NO: 51663 - DNA, 937 bp, Cannabis sativa
gatcttatgaattcaggagtcaagacctaagaaatttaggttgcagagttttgagctaaagctaataagctcgccaccgatggaaaaataccctcatgataagctttattccttgccttccacagctcaaagcacagacatcctacgaaatactaaattacaccttgagatcaaggggaatgccaagatgaagatcaggatttatgatccagttcaataagacaaaagaattatcaaaaaataaatcatcagttctcaatccccattgactaaaaaatcaagctcctttagccacagggcagctaaaaaagagatgttggaagaatcctcacccacatgacagatggagcaagtcattctattgccaaaaacccattggagacggctaccaaaaggaagaatatctcttccaagcttccacaagaccagatgaagtttttcatggaccttaagcttctaaagttcttcccacagagggtcctgatggccccactgatgcttaatcagagctctacaagccagtttggtagagaaacaaccatcatgagcatctttccaaatgagttcattagggtgtgtaggtggcaacctcttcaaagaaagaattgactcatccaagctaggcacaaaccattagcgaagcttgttcgagtcccaatcaccatttcccttatccaaacaatgggtaacaaaagatggggagacctcaataatatgattaaaagcagcttgataattatcccaggctatccaaggaatccagggggacttccaaatgtcaatagcaaaaccagggcctactaggagacaagtttcttttctaagaacctctcttgtagccatcaccccacgagctccaaaagacaacggaccatgttcatttttaacgaccagaaagaagaggaattatgaaaatacttggccaaaaaggaacgac

SEQ ID NO: 51664 - DNA, 1705 bp, Cannabis sativa
aagatatactttgattaataatattgttttgtatgtaggaataattaatgataaaaaagaattaatcaaagagagaattaatcgaaggatatttttttttttttgggaaaatcatggccattatgaaagccagtgaagagagaatacactataatcattctaatatgtatatgtaattaaggaaataattaatatcaaataacagaaaactaatgagacaaatatttgtatgttattataattaaaagcagaagtactaatttcattcaaaaaaaaaaaaaaagcagaagtacttaaaataataataataataataataataataataataagtacttatcttgaaaacgcggtattaattaataagaaactttcaaagaggttacatattaaattttataatgcatcctcctctaaaagatacacgagcagctattaagcacgatgcttaacattttttagacatgtcgttttgcgattagctaacaatacttctacaaaattattacatttaaatatataagactcaatacttagttagaccaataatgatattgacaagtagaaatgtgctaaacactactagtgccctttaacatttcttgagatacactaatgtatctttatttatttcagtatttgagaaaaacttttagtacaattttttatagtcatatttgttatgagaaatactaaaagacactagtggtctctaacacatttctatgtgtcaatattgttattggtctaattaggtatcaggtcccatataatttaatataataacttttggggagtatcactagtcaatcgcaaggcgacatgtctagaggtgctaggcaccactggtgcctaataacaatgctcatttgttatagttatttaaagatgttataaaattttgagaaatttgaaaaaataattaccacgttaaaaacaaggttcattcaaataacctgttacagcgtgactttttttattttatatgcgtgtgaaatagattgtttgaacattggtttttatattataaattattctgaacttattaaaattttacagaatgtcttaaataactataacgtatataactatgaaaaaaaaacaaattaaaaaattattctaaatattaaaataaataaacttacatcgattacaattttttaaagaagtgtattatagcaacctatatttatgttgtcaccataaaataataacaaaagggatatgaatctttgtccctttgacaaaattgtatatagtttacaagtaacttgttaaatataaaaccaaaagcaaagaattactgtatattagaatatttttcaattatggaataaaatattaaaattaattttgagataatgaaaatttcatatttattgaatttagacaaaattaattagatgatatactatgatcatattgtgatattcattactcgatttaattttctaattaattgtcaaaatattctgacaattaatgtagtgtagatactgatgtagtatctcacctataaatatagggtcttagtccccgagctcttcactcattctgtgtaaatagcaaattctatctaaagagagttgagaaagctcggaagtctgatttcccatatgtgacagtcagtagtcccgtgatctgtaaggggaaacaccgggtaagttgtgcaatcccacaccgcctggggaaggtcaagtgggat

SEQ ID NO: 51665 - DNA, 943 bp, Cannabis sativa
aattgttagttaatttatctaacaatatatataatcttattcaatataatacaatacctaatacggcaaaaaaaccacaaaagaaccagtgaaccatgctgcatccgattactaccccttcatcgttctcccaaaaaaaccactcttaaactaagtcaaacactatgtgttttttttaaactgatccgtataaacaattgatggatactcttctccttctaatcatatataagtataaattaatattaaatgatcattaatataattaattattgatcatctcaaaacttcaagcacagtcctcttgcatctgtacggttcatctccttctccaccgtagtctatacagccggtatcatctccttctccaccgcagctaatatatgtgttggatttttttttttttttttttaacagtaaatatgttttttttttttttttaaacagtaaatatacgtataaaattataaacaatagatcatttaaagattataaatttcaagtgatagtatacaatgctttttcttttcattgtcttgccaaatggtgtaatttgaaatatgtgattttatttgttgatctcataatttttgcacgctcattcataaatttttaatattattttttttattaaatctcttaattttggttgagttttcaataatttttttttacttatagcaattaacaattattttgttatatatgattatatggtgaatttttttgtagattttttctttttaatcttttctttttaattagtttgatcataagtggggttgatctcttaatttttgtaaattttccataattttttttttctaataaagatttattcattgaaattaaaaattaaaaatcatactaaaaatttattctacacattctacgttactttatatctattctatataaagtgtgcctatataacagatttctt

SEQ ID NO: 51666 - DNA, 896 bp, Cannabis sativa
aaaaaactaaataataattatttaattataaaaataaaataaataaatatataataacatattattattgttcttttttcgatattgcaacttctattgttatttattttaaaaattatttaatgattctttagaaaataaaaatgagttcgaacgctaatatattaacatgtgccattttacttaactaaattaacacttagcggaatttattgtaaaaactgtaacgtcagtcgaaaaaaaatattacttattaagtgtgatgtgtgtcgtaagtcgtatcaaatttattaaattattttatttctatattacaattactttagtataatagtaaatacaggtcagtctcacgaggactataatcaatttttattcaaaaattagtaataagaatgaaaagtagaaatttttataattataaagattaaacaatgaactagaatacaaataaatatagatattacactattaggaaatatttaagaatctcataaatcattcaagatcaataataataaatattattcaaatttctcatataaatacttttgtccaatatctattttactataatataatcaataatcacctctcaaattttgtattgaaataataaacaaataattggtaatcaagcacctataagcattaaaaagaaataaaatagatgcacataagaaattgaagaataattaaaattgtattaaaaccatagaaaaatatcaaacaatatccattaacaccctaattaaaaatttagttactcatcgtcattgtgaacaattaaattaaactaaataggaaagtgaaattaaaagaagaagaaaagaactcgttgataaacaatgatggtagtctcttcggtggctctctgccaccaatttcatacacca

SEQ ID NO: 51667 - DNA, 614 bp, Cannabis sativa
ttaaaagttgaattttaattatcaaaatttaattacccacactttttagtataattacatattatatgaatatcagtattttattaattgcacacacgtggcctcccagttggacagggcgttacactgatatctgtcaaagaaaaagtcaaacaaatagctgacatacgacagtttgcaaatgaaaaatataagatttcacgaggatataagttgttgtgcctatccaaaacagaatacgatggagccaagaagtgtggggaagacttagtgtgcctaaacacagcttttttttttttgtggatagccatacaaaactgattcagaaccaaggagaggttgctgaaatatcacataatttttgatgcaaaatgtgtattttgcaatattagaaatgaaattgtggatcatttatttatcgattgtcctttgccactaaactatttgctgcaggtgaaagaatggctctcttggcagcattggtcgcaacaccttggaaacttgatcaggtgtatagaaaatgtaaaatgcaacaagttttgcaagctcatttattttgttgcaatggcaccactggtttaccatgtgttgcatgccaaaaatgatacaatgta

SEQ ID NO: 51668 - DNA, 1614 bp, Cannabis sativa
tttgtaaatatgttttcaaatgtgtacatttttaaaattgtgtttttttgcacattttttgtaattatttaagaaaatgtatacatttatgtaaaatgcccttttacatacccgattcagaggcgggtcggggaaagtactatccaccccgatatatccccgtttatatatattaatacatataataattaattattcaaaaaaatatataataattaactattaactgttatggaaatactttggcccgtttcctcctctcaatatatcaaatttaaaaaaaaaaaaattaatgatatattagacttttaagtttcactttcacactataatattgataatttaatattggtatgataatatattgatgtatataattacattaaatgtaatgactggcgtgtgtgatgtattgattgattgtaatattaataggctaataagtgcctaggtgaaatgtgaagattcgcgggctttgtggctgattgtatttgtattgattggtaatatatgaggctgattgtattgattggcaatatatgatatattgatgctttgatatcagtatcacattcacacgccactcacctttgacctcaccaataagcagcaccaagactccaagaatctactcgacagatgattaaactacagtaattgtctaattgatatcaaatctcaaaaaaatattttatttattaacttaaaaatattttagtattattatatattagttaattagtaatagtaattgtattgttgtattgtatatgcatacaacatatactatatattagttatagtagttcttttttctcacacatatatgcatatagttttatagtgccatagaaactatatgtgagagtgaaatttttttggactggcactccaaaaagagttgaaaagtttgaagaggctaagaaaggattatcgtgttccagtaacaaaaagttagtgcttgattgtaagactaggtggaattctacttatttgatgcttactagtgccattgtttataaagatgtcttcagtcgcctaatacatactgagaaaaattacaaaaaagaacctagtgagcgagattggcttttggcaaaagttatgtgtgagaaattgaagttgttttacaagtcactgagatgttttatggaactaaatatcctactactaatcaattcttctctagaatttgtgaaatttggttgttgcttaaggagtgtcttaaatctttgtatgatgagattaggataatgacatcaaatatgatggataaatttgagcagtattggacttccattcatggcatattagccatagcaactgttttggatacaaggtttaagatgacattgattgagtattactttcctaaaatttatgttggtgaatatcaaaataaagttgagcgaattagaatgttgtgctatgatttagtgaaagaatacaaaccgaatgatggagaaaatcttcttgatcccttatttaatgcttctagaattggtgaaagtaatgatggatgtgtggatgatttagctggttttgacttgtatgttagtagtacttcaaatgtggatacttacaagtctaagttagacttatacttggaggaag

SEQ ID NO: 51669 - DNA, 815 bp, Cannabis sativa
gtgtaatttcctcccatcacattatttttccaaataatacattacatataccaaattattttacagttaagtaacaactgtgttgacttcttaaaatctatattaaaactagaaatagtgttgtagcttaggatataggacattgattgtaagtgaattataaataaacatagaaataatcacggagaaaagtgaagttgtgaatataattgtataattaattgaaatattataaataatgtattttgatttaatacaaattacacccatcaataacttcaaattaaattaatactacagaccaaattaaaattcaaaattaactttagttctgaaattaagaaaaagtataaataaaattatgaattctaccgatgtaattggaaacaaaagacacaaattacgtgattcgaactcaattgagtctccacgaggaataagtactagggtttttttattattgttttcaagaatagaattaccataaccaagattatacaaagagttctcaaaactcaactcataacagtacatcaaaatcctctcatctccctaagaaacccagaacacatatggagagcacacacaaattctcttcgagaaactcacatagagaaataatgaactctcttggagaggcacacatgaataaatactcaaattttcttagagaaaacactcaacttatatggagatcacaaagtactcaatcactcaaaatttggttcttctctcatctcttcacactcaattttatttcctcatctcatattttcctttgttccttcttaggtatcttaggtatggcaaaaaaa

SEQ ID NO: 51670 - DNA, 1150 bp, Cannabis sativa
catggtataggcgacagtttcaaaacgtgccttatactataggcgacggtttaaaaccgtcaggaagtccacattagtgacggtttttaaccatcgcctattttgtctgtttggcgacggtcgtataggcgacggttatagagaccgacaaaaatattttaaacgactgtttaaaaatggaaaagctatttttgtagtagtgatataattgttaattttttttgaactataattggtaggtagtttaaatcccaacaataatatgataggtttttttaaaaaataaaagtgtagagtgtaaatttgtgacctccttaaattataaaagaaatatttaccaccacaataaataattttacttgatattgtttgagcagaaaactatttatatgaaaagtttatttggcctaaactctatatatagtttaagaccagttttaataatttcagttgagaccattgccctatctaatctacacctaacttcgctccagcatcaaagttcatacaatgaagtttttttatgtacaaagtataattttatatatcatataacatcaatagaatgatagattcccacaaaatgacaaaaaaaaaattgtttttgtcgttttataattttttttttttatctttttatatttttcttcacaattttttcacaattattttgtataagttttttcttttataattttttttgtacaacaacttatgtggggttttttttttttttagaagttgaataatatctcttttttctatacattaattaaatttacctctaaataaaatttaatttaaatatatctttttttataattattgtacccaaattatcctcacacactcaagacataatttcaaacataatagatttgtattctttgtagatagatgtgtaagttcgtgggaaagtttggccaaaattttaattaaagaataatgaaaattatcgtagagacgtaagaataaaattagtaaaataattgaaaaaataggtaaaaataatagatttttttttaaaaaaataatataaaaattaaagtattaagttaaaagagatatagagtgtaattttttttttttttttttttttactacgttttatggtacttgacgttaataaatgtatgccaccacttattgg

SEQ ID NO: 51671 - DNA, 875 bp, Cannabis sativa
  modified_base (53)..(59): a, c, t, g, unknown or other
aaactcttattgcaattagcgctgcaaccaatttagaaactcaaaccgtaaannnnnnnaaaaaaaaattaaaaaaataatgtatagtaattcttttttcttattattttacttttatagcacatttaatagtggacctcttgttacaaggttataaaaatttcaaaacgaaaaaatgaaaccaatcaaagaaaagaaaaggtaattaattatacataaagctaagctaaaacagttgaatctttaaattatagaaaaaaaataatgacaaaattaagtttaaacctgttattttatttattttttaccacaataaatagtgtttaatgtagagatattttaattgatgagctcaaaatattttattattttttgtaattttttaatgtgtgtagtattatttattttattttaataaaattaatgaacatatttaaattacaatatttaaataatgtaaaaaaataaaataatttatagtgtaatgtaaagaatcaggataaaataaataaattaaaatttgggcatgcattttaaagaattgtgaagaagatgttgagaatgctcttatttttgttctaactaaaaattatttagacttatgtgatgatcgtttcctcactctcaataaataaacaaatagctagataaataatgtgatgtattaattatttgttgtgtattagcattcaacatatatacattcgcaattttgttttgataaatagtgtaaagattcttctgtatagctcctgattgtttttgtattttagataacttttttgtcaagatatttttgttgtgattacgtaagatgttataaaaaaaaatatttaaatttatttttacccgagtaaatatttatttgggtctta

SEQ ID NO: 51672 - DNA, 798 bp, Cannabis sativa
caatgttgagcttaattgattttgttatttttattgtgagagtgagtttatgtgtatagaaatgaatatttgtttttttttgacgttacgagtcatttaaatattaattatactattttctaagaatatttttatagctttacaattaattatactcattcaaaaaaaattaaatactatttacgttataaagtaatctttagcaattagcatgtgcatgtatgacacttgtttttcattcattgaagtaacattgaaatattaaaatattcactaaaataacacatttggagaaatttatagtacaataaacttatagtattttggtatactttctattttttctaaatctaaaaactaactttttagtgcatttcttttcattatcctgtacgctataaatatttaaaattacatgtaaatagggtcggcttgagaatatatgtttctaatgcgaataaaattttagaaccctcacattcgaagtactcatgacattgtataatatattatacatcctaactaattaattaagctatgaatatttattgtttacaatacaatataaattaattttacttaaataaaagtctaataaaactaataaaattttataaaattttttattttttttttattttttattttagacccccaaaaaatataaatcctaagcacggatctagcccgcctatgtcgagagtcggccctgcttttaaagttttaaaaatattctcaatatgtttagtaccaaaaataagattcaaatacgtgcttttattgcatgtgtaactgttt

SEQ ID NO: 51673 - DNA, 783 bp, Cannabis sativa
tgtgacaatatttttataaaatgaatctaaatttagtatttttataaatttcccaataatttttttgagttattttttataataatgaatagtacttttaaaaattattaaaaaaatatatttattaaattttgttttatttggactcctaattgaagtgggctttaagtcgaccttaacataaaacctgtcttaattatacatacaacaactctaataattaaaaaaaaaaaaagtaacaaaagtattttattttatcattttacagggttaataatacattttattaattttaatttttacaggtggcaataatttccggtgtggataagaactgtgtggagaaattaagggaagttcagttgaatatgaaggtggaaaatgttgtgtgcgttgatgcaaagggattggagctcaaatttgataatctccacctaacaacagaggcccaggttgaattgggccaaaaattggcccaagcttatctctccaactttgggccaactcagtatcaatcccaacctgaggcaacaacaacgtagtccatgtatacacattttacacttttacttttgggatttgttggtttttcctatttgtttctttattacccgtttttataattagaaactccaaattaccattaacacatagaacaagaatatgattttatatgacttagaggttataagataaaaactttatctcggggatttcattgattttaatgcaatttagtatttgtattctttttgttatatttattttgaggttaagataaaa

SEQ ID NO: 51674 - DNA, 793 bp, Cannabis sativa
catgttattattctcacggttaggaggaacagtttgggtcccatgagtttcatgaccacctccatgtaatggtacaagggttttttgtacatgtattgcatgcactccaacacttggtaaaggttggtggtgccccctccttgttggattattgataggtgcatcttctctccttgggcacccccttcttctcctaggtggagaaggatttcttagtacagaggattggtccccatgcctttggttttgctcttggagctctctgttgtggcgtaagctctctgccaattggatgcacaaagtgtcattttcttggaacacttcatggacaggtatagactggtgggcgctccttagatggagatgaggaactctcacaatcttggacttgtcccacattttctggcataggtgccatgggacgcgtctcttggtgcctaaaggttccctctctatatggttgtggagggacaaaggtacttcactttgtggtcgattaatttctcttgggacttcagtatcctcctcataattgttcattctcgtaccaaactccattgttgtagaaaaaagtaaatggatgagttttctaatgggaaaataatcagattttcatcgtggtactctcaatgaaagcatcaaactgttgacgcggttttttgtcaactgacctaagaagattgtaaaataaaagaggaggacggtgaattaatttgactaataaaattgtaataaattaaatggacaccaaaaatttatagtagctcaccccccatgtcacgatggtaatggg

SEQ ID NO: 51675 - DNA, 758 bp, Cannabis sativa
gcactaagaattgaaccttaaaatcaaagttacacaagaaatagagaacaatggtgttacacgagtactgacacttcccaaggggcagtactcacataacacacgagcactgatacttaagaatggttagtgcttgcccaaggtgaagaccaaggagaatggtggctaaatggttttctcaagctcaatgatcgctaaacaaatgagagaagcccttaaagggggaactaatgtgccacacaagtactgaccatccctttgtggcaatactcgtagtttaggaaaaaggagatttattgttgttttggagatcgaaccctaggaagtgtctacctgttaatttttagggttcatatcaaagtcgcaacgaaagatcagaatcgtatttagttaaaaaaaattgttgaatttgatatgaaccttaaatcctatatcttaacacaataatacataatatacaaacctaattaattagtatatagatttacctcttcttgctaatcaggatttcctcactacttttcatataaacaaaatgaacattcaatccagtataagaactcatcgaagacttcataccagtcttctagatcagcatcaacactcaggaaaagagtgggcttttagatttaacgagatgaaataattttttgatcacagtatattctcaacttatgggacactgtgattgaaatttggaaaacacccaatacactaatgtgtgtatgtgtgttaagtggagagagagagagagagag

SEQ ID NO: 51676 - DNA, 1027 bp, Cannabis sativa
catgtgctcttttggccccaactgtgttcaatctcgggagatggccaaagcctcttagttgtcaagatcgctccccgaatacttgcgtcataacaggaaagtctcaggcatgtgggatctacaaaagtcttatcaggctgatccttagtgggcgctggttgacttgcagccaatttaactatttactcctaaaacaaataaattaaataaataattagtttaaatacgaaacaaattgaaagaaatttttagaaatcaatattaaggtaaacttacataagcttgttgctcgtattcgttgcgctaattgttatctttatggtagaacttctgaaaagtttttacacaagttgaaagttctcatgtctcgggattagcctatatttaaggaaaagggtgttattattgtaattttacaaaaaaaaataaaataaaataagacttatcaatgacaatgtattatacaaagttaccccagtgacaacatgtaagacaataggctttgatccctagccttcttgaagtttcatcttaccccgactttttttattttttactgttcttgcctgaaattaatattttttcttacaattaattatttattatttactatataacgtaaagtattactaaaattaataattttattaagtaccttttgtttgtttgtgttccagtaagcaatgcaatcactccacacctcctgagttactccatcaggaggtaacatgtctattctctcctgtccaagctccttagtatttttgatccattttttcttacaattggaccattagtcacgtaaaccctttgacatctcgtactcaccatagtctatgaacgcaggattatctcgtaggaacacaaactttgtcagcaaaaaagttaatgcctcattaaccacaaaagattcagcaatagagccttccagacgggcacgattcctgacatattgcttgtacatagaattgaccgctcgatgggatacatccccctgtactgtattggtccacctagtatggcttct

SEQ ID NO: 51677 - DNA, 817 bp, Cannabis sativa
  modified_base (644)..(644): a, c, t, g, unknown or other
ttgggattgtacccctgcaaaacgataagttgggtgggaaacagacaactggggggaccctctgctttgtacttctaagtccaaggctatctgtgggccaagttctgagccaagtgtagacccaaaggataactccattccttactcctgttacattcttggcacccaggcccatttgatggattggccctcaactcaatgttggactgagcctcaagcccgcgagcttctcatgggctccctcactgtggataaattctttagagaaccaactttgttcaacccggttttagacattgaagactttagagttgaggagcatcttcatgggcggcgaaaacaaaaagccttggatggtttggccttttgcccttcttttaaggcccgtaactcatgtcccaacttaacggtcctcaagaaagaattgaacaagtttcttttgagtcgtcaactctcatcctcccaacatcgccatccccgacccttcctgaagaaattgagcccctcccttgcagagttgatctctcctcaggcaagttgggcacacctcgttcgtcaaaacgatggggaagaccgtgcagtgaacagtgattttatcctcatgctcgtacgaatacgctcgggccacaatgttgtcgatattntaagagcagagatatacttgctgatcaagggccctctggtctttgaaattctttaaggcaaactctaaaaatgcatcgaaccctacttgaaatcgcagtgtgtctctctcctcacgcatccatgatttatccataacaaaaatcctatccaaaaaaattcagtatttagtaac

SEQ ID NO: 51678 - DNA, 1122 bp, Cannabis sativa
atttcatgacctggatgaaatattctactcttggtgaactgtgcagagagatctaacactcaaagtaagaaggagctgaacacccgactagctccatcatgaaggcagctcgcattagttgaccacagggtgcgagttgaacattttaagaggagatatcttgcatatctccgtgactgaaagacacgagaagatccctattctcatgggatatatacgcaatatcaaagaagaaaggcaacctgcctagttcctcatttttctcattgtaattatagaaagtaatagttttctcgctttatttctactaatttcgggaaactaattgatgtaattaatttttataaatagtggaatcatctcactattcagggacataaaattctttcagagaaaacacatgagaaaaagttaaattcaagagtgaactactcagggatcattgtaagagctttcgagggagatcaagtttcttgcttctctactcttcagtcaataaaactaaagcggagtgggctattaccatcatcaaggggatgaacttctataaatttggtattttctttactttacattattcatatttgttattttaattattcttaaatcgctttaatttgacttattgtcgttggctaaaagcgagatcaatattttggtactttcatttagagcaaaaaaatacaagtctttgttttaagtcttttttcaaaacacaagatggttgtacaaacacggaggggaaattagattgacactactaacccaatgactacagatcctaatgtctagatacctacaaatcccagagatccagtaaagacggatctcgatccgactaattctcagccaccaacaggccaatagacagtagggtaaggagtaaccacccctctagctgggttcactataggtgtgcaagaaactggaatcactagtactcagaccgagtagactgcccccaataatggaattccatctactacaaatacataaaggccactcgatgatgacaccgaactacagaatttgcgagctacattagggcaaatgcaaggccacaataacaatcttcattacgatcaaaaagatacttaagcagctataaatcttgcctattat

SEQ ID NO: 51679 - DNA, 1996 bp, Cannabis sativa
agagagagagagagagataaagtgcacgagacacaagattaaagagaggagagagaaagtagtaaagacggtgtcgttttattcgtatctagttttgggaaacccaaccaatcaaattcaactgcaccaaagaccatggcacaacactcaacaagccttctcgatgacctcacccagtcaatcattccatgcattgacatactaacgtgtcaatttctaattggacaagataaacactacttttacctcaaattgcagaagccaattttttgctccagctccaaatcctctgtgcaaatgatacgccggtaaactcccatccaagcaaactaaaattaacactcaccccaaaaaatatttgttaatataatcaacaaaatcgtatattatatatatatatttcttgttgatgagagaaagaaacttacgagctccgagagccgaagcgtttcgaaccagagtcatacccactgaaaggtgagttttctgagaaaaagcctgccacggggaacaggttagcatagccaacgcagataaaacgacgacgttcagctgcaataattccattgaagcttctcagttttttttttctgagaagtacttcttcttactattacaggacttgtaaagagaataatacagagatccgtgaaatctcgagataataaatcaccatcaatggaagagtgacataaatggagaaaaagttaattctgaaaaaaaaaagtgaaaatcggaccagaccgacgacactgatgtatgtgcaaatatatagaaaaatccaaaaacggaaacgtgattaatatgcctttccgattttggaatcaatggggaaaaaaataaaaagaaaaatggaaatatagaagagttttagatgagagggaaggaagataagatgtgtggctggaaacgacgacgttttctggcaaaaggtgaagagtggcagtagagagagagagagagagttatgcttgtcgtgtaggaatgaatagagctatacttttatatagagaagggaagagaggagagggtggtgatattaaacaggacttcaccagtgaaattatgttgggcatcgggcccactatcctaactgactcttctctaattagtaatatgtaaattttaagtattatctcttaattctcaatattttagttactattattattaacagagtcggtaaaaataaagaacaaccagctagattttatgaaaaatagcttattctgttatagtaatagtttgttgtttatctataaatagtcaattacccttttttttatgaacaaaatagtcaatttattttgaagggattatatatatagtcaattatttttgactagcattcttcctcttttaggtgaaaggtttgaatctcaccataatttcttattgggagagattatgtttgacattttatgaggttagattgctgtactgataatctaattaagacaacataatgtataaaactcagtcctgagattgtcaaagttaccaaaataaaaagggaagaatctgcaatacctgatccctttttctttcagaaaaaacaacacttatgttttggttttgggtaggtttagtggccacttaataatgagtcaatagtattaggttaatcttttgcgttgaaattagtagccaaatggtcagtttttagtgaagggttttcactttcagtacctatatctatctatattctatgcaacttccatggtaataatacacaacccttgtgtgtgttacattttcatttgattatttttacagcactataaaactacacgatattattttatatattagctaccatagctagtgggggagtgtgggacttttatgcccatttgcgagtgtcatatcattgaagaaagaaatcggcccaaaagaaatatggtaatttgattctttgaagactatatatatacaattaagaaaatgcttcgtacaaaaaatgaaacaaaagatatatattgtaaagtcttttttt

SEQ ID NO: 51680 - DNA, 750 bp, Cannabis sativa
tttcatccggctcttgccgtatcgaacatcaaaaatcatgttcccattgttcttgaaatggaaaacgttcaatattcgacatgagcagaactcttcaagattcacgcacgatcaaccaaggtgattgatcatatcattcctccggccaacggcaaggagacggttccttctactgaggaagagaaggagctatggtcaactttggatgccacggttctttcgtggatttatgctaccatttctaatgacttaatgcaccccattattgagcccgactcaacggctatggaggcttgggatagattgcgtgcatatattccaagataatcaacattctcgtgccgttgccttggaacgagaattctcgaccactactatggagaatttcccaaatgtttcatcttattgtcaacgtctcaaatctctagcggatcaattgaagaacgttggggctccggtgtccgctagtagactggtattgcaattggttgggggtcttacacaaccgtaccatggagtgggtacgttgatccgtcaaagcaacccccttcctcctttttacaaggctcgctccatgctcactcttgaggaggccgggatggctaaggatgcagccactgagtctgctatgataacttcttcgattgatgatggttccaaccaatcgaagggaaaaaatggtgcggaaaattctggtggtggacggcgcaaaaccggaggtggtcagaagaatgcaggttccggtggtgg

SEQ ID NO: 51681 - DNA, 868 bp, Cannabis sativa
aatctatggtacatattttgctaattgtgaaagatttgttcatattttttttggacatttccttatgagaattgaatatgaaaagctaaaaaaaattgaaaataaaggctttgctttagctttggtttctctgaaggattttgataactaggaataagaattttgataactaggaatttatacctttacattgctcttccaaactttaatttattacatagtgctttaacttatatttattaatgtatcaatttattagtattttttgtgtattttttggtaggttattttggatccttatagttgtttgttttgtgtatgtctctctttccctcaaaaaaggaagacatgagagaagttggaattcgctaactgcatttagagaagattgttatctttatctctatttgtttattttttttctcgttttgataatgtaagctgatatttttccaagatgtttgaacagataaatttgtcacaatatcaacaaaattattgtttttaatttacattggtagatgatcttctgcatgtcttgggtttttattatgttcttattttagtgtttttactaaattgtagttttgtgtttggtgatattcttgaaattcacatttgtattgtgatttgtgattgagattacttttctttttcaaaaaatgatcactaaaaagaaatttgtagttgcgattattaagccacacatgtaaattattgccaagtttcattgtaatttgtcaatgttgtatctgaactgaatagataaaataaattatgttaatcaaccttttctttctgaattgtttcatttatatgttaatatcttctgatgaatttcacaacataacatgaaaatgacatatat

SEQ ID NO: 51682 - DNA, 631 bp, Cannabis sativa
ccaatatgctgtaattaatacggcgtgtattgtttctgtccttccttatcgtcgatttatagacactcaataagcattgtattggattaaggactgcatctgcatatattatatttttctggatttaaacgtttatatatattataatgtataatttgagattcaaactgagaactttcaatacacacttataaagccatttagcctgaagtagttatatattgtataattcaactataactagtgatcaattggtaaaaaaaagccatgtatataaatttattatgtgaaaaaatatggatttttgtctttatatatatgcacaaaacaacaaaagccccatcatcaacagcttcatatataattactgtacatagtactatcatcattgtgcctaattcccacgctttgtaattatttggtttttctttcgcttgacaaacattgatcagcaaaagatatatattttttttaaaaaatgtttgtttatggtacagtatgaacaggcatatatgtccctttagaaaaatcaaacccattactagtagcatcgagtatatataattagcaaaggatttatacatcgaaatatataataccctttaattttcaaaatgtaatgaaataaata

SEQ ID NO: 51683 - DNA, 1977 bp, Cannabis sativa
  modified_base (45)..(46): a, c, t, g, unknown or other
gaaatattaattttttaatatttaattaatgactataaatatcanncattagatatttgatccaatggtcaagaataaaatacccatataaataatacccattaaaattaagcatacccaaatataaatatactagaatgacattaagtatctaggactagatatctgatctaattcaatgtttttctcctcatccgatccaatccaattagtaattggatttagaaattcatcatccgatctagtccaattagacctcaaaattcaatataatcttatctaattactaatttaatttggataggttttgaaattggatattcaattacaccaaatttttcatataaacttgaaaatatgaaagaaaaaaataatacaaaaccttattaatattgaaaacctaatgaattttgagattaacatctaatagccgatccaatcatataagacatccaatatttgacatccaagccaaaccaattgtaattggatatcaaattttttgtaattagattagttcggttcaattaaatcggattaaatcttgtccaaccctataaatattgacaactttatgtagatgattgtatacatacattgatttttattgtatgatgtactatcttattaaagtttcaataaaataaataatgtcattttaaaaaaaaaaatatagttaaaataaagtattggtgggttagtaatgcatttcaaacctttttcgcattgtgcaaaatcaagacaacaaatagttttgatattaacattttcttaccgtgccttaacgccgtcacattcctccaccactacatgcttatccttacgtcattgaccaccctaaagaggcaaccctaaagaggcaacatgtaaggtcttgtagagaaacaagatagagtatagttgaaacgaagcgttcctagaaagaacaattttgattacagtgagaataaagtatattcatttcattaataaaaatctcaacatttagtgagaagcatatacccctctgaattgatggtggtgtgagcttaaaaactttaagctcttccgtttgtctgttgtcataaaaccgaacgaatatgtcaactaatgtgatcatttaagagttggatatttgcaagtgattaatagaagaaagaacaaggtaaacaccaatatcaaaagggtttttcgacaattgaaatcataataacatctttcattatatgctatgaagaaacatacaaaactttaaatttgcatgctacctgagattttcttttatcagtataccaaactagtcatagtccatgtcgtactcctttgggaagaagaagaagaaaaaattaaacaaataggtaagtgggcaaaaggaaactcaattaataaaatactttatttattaagatctaaacaatgtgccatctctttgaagttaagaccaaatgtctcgtttatcttagcagcaaggtttctcaatggtggaaagtcaactctcctgcaagtaaattaagaaacatttcatttcaaaaaaacaaaaaattaagaaacatcctatattaagatgccctaacagaaaatgcatatggaaaaagactttttcccaatacatattaagctgtcttagatgttctacttattgagtgtacatacacatagaaataatcttattgggtgtgaacaagaattttgcaaagaaaatttccaacttaatatatttgcaacaatgtatttaaattacgaaatgcaacctcgagatccttggagaaaaaattcattgaactccattgccaggagagcatgtagagaggtcaaaaaaaaattaaacaatctatctcttctttttcaatgtgtagcttcaatgaaagaactacaattcgttatttaatcaaaattattaaggcataaacagatttataaataagtaaaagttggaaataacagaagaagattatacctaacattaacggtgttcatacttaaaacaaaaacatatag

SEQ ID NO: 51684 - DNA, 1221 bp, Cannabis sativa
  modified_base (707)..(707): a, c, t, g, unknown or other
ttattattttctctcaaataaaaatatcaatcctatgcactatttgattgttttaatttcttttaaaattgtttactcagatttgaatagtgattgctctattcttatacaattccaagagaactactctctattcgttgccaacaattcctcattaactttgatttcatttctagtgttgttaattaataatttagagtaatttgcgggataaatacatctctctcacactatttcttcttcttcttctttttttttttttaataaatattctccatctatctctaatcattttttttcttttattttttttaaatttaagtaactattaatttttgatctatgcatgacacctcgacagtatcatcaataaatagcatcaagacctcaattttcaatatttctccataatttgaagacatacaaacttctttttttttatgtcgataattttaccgtcatcgatgtcttcaaattattcataatttattcattagtatgaataatttgatatgaaaaagttatttttaataataaattcatgaaaagaaatgaaaaggctattgtaactttttcttcctcattctcatgtgatactctctattctttattatatttctattgctttttatataattatttttagtattttttttaatttatatacttaccgattattgtttaatttattttatgtacaaagcaancttattagaaagaatattaatgatgattataaatgagatacggtgatgacatcaactttaaatatagtggtgactataaatgagatacggtgatgatagttgttttaaaattatatgatgaattttatatagatttattatcttctttctgttttagatctctattttgtgtaagatatatttagtttctaattttcttttactataatgtatattttaaaaaaaattgcttgatttttatttatataagaagttgtatgataatttttttaattctttagagttttctatatagatttattatttttttaataagcatatatattttttaaaaaaaatatatacataaaaataaattaaaaattatttgatactaattttattatttaattaatatttatataattatttaaccgccgcatgcgaaacgcgcggtctgtttcctagttaaattataaataaaaaatgaaaaatatgcataattaattacgcataatttaaataaaaaattatg

SEQ ID NO: 51685 - DNA, 1086 bp, Cannabis sativa
atatatatatatatatatttcagtatatttatatttattaactagggttgtaaagtatagtttcctaacttgtatttttttttttttcattacagaaaattaagttataaattaattattagtagttttaattaatgttaatatatatgatcaatttcatcatgcatgctatatacattttctgtacttttttttcttggtatattatctcctgaattatggtcaataatgatgaccatgacattattatgtgtgcgtacccaaataactatttactataatatactataattaaaatcgatatgtataatttaatcaaatacctcacgtaataatggaagaaaagtttattcatgataatttacctgatatatatagctgtattatatataaaataaaataaatgcttgaccccacagtgttcacaattacgtacgtgtcgaatgggacttgggttgggatatagttaatgataaaattaagctaaatatataaatattaataacttaattatgatgatcatgaagggactgatatatatataatccatttaattgattattgtgagcttattgattattgtattaaattcaaataaaaaaatagtttaattaaacaattactaaaatattttttaaaataattagatgtgaaaattaaagcactagttttgcacgttgtttaaactctgtattttaaaaataaaatcaatttagttatagaattaatttttgtacgctatattaccttataagaaaaattcgtcgacacaaaatattttggttatatctctaaaattaattatttgataaaaattatatctaaaatattttaaaaatataaaattctaccgtgcactcctttaaaaaggatgcaccaataaactcctatcaattttagtatccgaaataattttctagtcaaattttttttttctcatatacgttatagttatttaaaacatcttacaaaattttaaaaaattcaaaaatatttaacacgctaaaaacaaggttaaaatatatagtatgttgcacgcgtgattattttattttatacgcgtgtaaaataaactatttgaacatt

SEQ ID NO: 51686 - DNA, 1296 bp, Cannabis sativa
caataggcccagtgtcaggtgtcaactttggcagtaggtcaaatttctagccaccagttgactctattttattcttaggaacacttatatcttaatgtttaaaggataatggagaatatgcctaaacaacttctctataaaacttcttggattgtgacacccaaatagctctgtttatttctcgaaagtactcaaatcttaattattgatgaaaacgtataatatgcatagaagacttcccctgaactactgatgaaagtggccaaggctcattaattgtcaactaaagagctagcatagtgccgaggtcaaccttggtgctggttccccattttggcctacatgtcgctccatttcttccttgaaagcacttttttttgtcattttggatacatatgaagaatacttttgggatagttcttctctattgttgttaaaagtgccctaagttaacattatgtcagcatgggcgtgggtgcttagggcacctgaggctccgggtgctcaaagctaaaagtatttcaattcttattctgtcgactcaaatatgttcgtgataggtctaattcattttccagtacaaagtttgttcaattttcattaagaagtgccaagaaattaaaatcattgggcacccaggttgttattttatttattttcatcttctagaccttcaagttggattcttcatgtcttcatggtatagaatactaaaatatagtgagttggaaataacttagcaggatccaaatgttagttttatggtactaaatcaaatatgcaatggaagggtttcgtattgtaaattatcattgtacaatatcccaatcgatatccacatgtgtttacattaaatcaaaacacaaaattaatagtttagaataaatacctcatgatgactataagggtatcctcaaaacttctagtatgttatatcccttaatcctttaatccagctgaggacgatgatgcaattggattcagaatagtgtcttcaaaatcgttccaccacacacaaggaatagtgtgagctattaggataaagtgtatagggttgttcttattgagttctcaacacatgagcaacaacaaatgagagaaaaaataatttcttttttttttttcttaatctcaaaaattatatgtcaaagtgtaagtctgatttctcaaatcaggctcctatttatggtagttaaattttttttaattaaatcatatttaattgtttaaataaataaggaacacttcttaatgggtattacccatgaatggttactatacaaatttaactataaa

SEQ ID NO: 51687 - DNA, 1916 bp, Cannabis sativa
agctcaaatggtcaggctgcttctgaggtgcataaaatatggccaggccttactaacttgcccaacttaactcatttttaatagggtatcttataaaaatacttaatttttttttgttatttttatatttttactgtcacattttttttcttcatatttttactatattaaattttaaaaaatactatgttatagttttaaaattaaaaaaaaatattgtgtttcagtaaaattaaaaaacacaactttaaaacaataaaaacagttaaaaaataactctaaaacaacttaataaataacatgaaaacaactataaaataacaaaatgacatacaaaacaacaaaaaagtaacaaaatattgacttaattgtaatatgcgaaacaatgtcaaatcttcaacatgtttttgtattaggaaaatttttatttttacttagtttagacaactttttatcttgttgtattactatactatttttttcaggaaatttgttgttgcaacttcatactttcaacatatttttctctctttctttttgagttaatgacacctaaaatgacaatttatttttttagaagtggaataaatagttacattaataatataaataataaaatctgatgattttaaaaagaggtatataatataataagtaatatataattaatatgtcaatatctactactgcacattatgtcaattaaaaagcgaaaaaatttatcattgtgttgacctctgaaaattacaaagtgtaatttttagagtcattaattattgctatgcccaaaagttcaccaaagtgtaaattccaaaatgcacccaaggggatgtgttggtacggggaggagcaatggcactcgcccagctccccagcctgctacgcctaactcctaagcctgcagcacccagcacccagctccccaacctccaagctgcagcgcccagctccccaccctccatgttgtagcgcctagctccctagcttgcacgcctgcaacgcccaactccccagcctgcagggcccaactcccgagcctatagcgcccaactccccatcgtccacgctacactgcccagctccccagcctgcaacgcccaactccttagcctccatgctgcagcgcccaactccccagccttcacacctgcaatgcctagctccccaatctccacacaccagcgcccagctcacttccgggtgcgcgtccagccgcgcactcggctcttacgtatccagtctcctcatacaaatagaagtaaggaaaaaatattgaggctatggtagtttaagataggagatcaaagacaagatagtgactacacaatgagtatggataatggagataaagtttatctcatccgaggtacaagtaaaatagggagttttggtgcaactaaggatgtcggagagaacaggctacctgaagtactaggttacctagtgtgaagttcaaaattgtagagaactcactataaattgttcctttaaggtcattgtaaggggacttcttttgaaaaaagatcaatgaaacaataatttttctgagaaaagtttaagagtctaaagtttttctttgaatgttcttctattatgatcatagaatatcacttttagttcttaatattttgttgacgagttcttaccgtcaacaatttggtgtcatttgtgggaacgacaagttctagctacgttagttcttaaatcattcactataatcttcaagatgtcaagaaattcccatcgtcttcgaaaaaatagggttcactcaagtgtaaaccagccgaccaccatagtaagagaacattaacctccagttgccgaagagagccaaaggaagagtaaccaaagtgtggaccaccactcaaatactcaaaagggccaaaaacaatacatgactctgtaatgacattggt

SEQ ID NO: 51688 - DNA, 964 bp, Cannabis sativa
atagatgggaatggtttccttggattagagaggatagatataatttggaataaatctttttattagaataatgtatgtcacgaatatagatttaaactaaatctttaataggagagccagaacatgaataggaaaagcaaataaacaaagttcccgtaacgccacaaagactatttgaaacaatcaaaaacttcacacatataataaccattgagaaaatgcatagtaatactggaaatggaaccctaaccctatagattctaaaccgggattaagactttcagctaaaatgaaacaaacaagagttgcaataataataataataatagtgtatttatgcataacaaaataacaaaattaaatactgaagggaaaaaaaactacatcatttaaaaaatagagagaaagagagaggggctgaccagtgaccaagagcaacccagaggaaagctgcttgagaaagacaactctcttccccttgaaccttccagccaagatgatcaagactgtccctggagtgatacttgctctgccattaacaaagataaattagtaaaaccaaaaaaaaacacaaaaacctataattgaaaactgaaaatgaaaataaacctcagcttggtcggcttaggcttgtgcttgttaacaaggggctttttcacgtcctcagctggataaaacttaggagctttctggacgggagcctctgcagcgactttgggatcgtggtgtgggaagacaccgccatttttggccttaatggcccagagacctctcttgtggtacatcttggatctagagaactttccgacacccctgatcagatcggggttcctggtcttttgaggatttctagccttggccgccattggagctaaatctttttcttcctttcggcttcttcagttggagaggtgaggaatagtgaagagttaagagtagactcaggctgcgcacatgaaaccct

SEQ ID NO: 51689 - DNA, 1450 bp, Cannabis sativa
ggagaaccattattagtaattcttgtttattaatactgttttagtatttatttttattagttaaatttaccaactccttccctctttctccttgtgattttcacgcaaaacactcctctgtgatagcgattcttattttctcttacaaacccaaactactgtgattggcttatattcaaattctacgagaaaatagcttattgtcattcttcaacctcaaacacaaacctatattgctattgaactgtatttgaattatcgactcgagtttgagcgagctcaggttgtataattcctcttaggtttgtaatctacgagcaatttcatatctgatttttttttaaattgtatcttcttgtctcttgattcgtaactgtgttgttattgttttagattttggttcagattttccagtggaaacgagagaataatggcggtgaagaaaaggaggaggggggatctggtgcggtgcggtgaagaataatggttcgtttttcatttattgaacttatattgatcgactctcctatgatgatctctttttcctcggtttgtaaggttttcgttgctattgtacatgcatgtatgtgtaatatgtatattatagcgtttttatttgctatgtcagttgtatattttgcgattgatagatccatgaactttgcaagcatgggtttattgagcagaccactcatttcataaactcaagtagccaaactattgtgtcactgtcaatttataatgtacggtacttattgttacttattgttaccagtttatgtacggtacttattgtttgtaattatttggattcacaattcaaaaataaagagacctgaggaagatttttcgatttggaatgtatatgaatatcatatattatatataatatttattatattataatattatatttaatatttgtaaatattaaatattattatatttaatataaaaattaagattttaaattgtaaaatataaaaatattataaaaatttttaaaagtaatttatttttttcatgtagtttgaaaataatttttagtttatttttagattattttaagaatatatcaaagttaaattattaaggtttaattacttttaattgccaaaattataaattacattagttagatatacataataataatctcacataataactaataatattttttcttcaattattaattgtatcattttaaaatattttaaaaaatacctagcataaaatttaatatacgtgcctcgcacgtaattttttactagtagaatatatatatatataaaatttcagattttcctatgccataagtttcaactacagcacatatatttatttaatataaaatcaaaaaaacttcaatcgcatgctatatatatatatcgattgaattagggacaaatttccaccactttcaaagtaaggaaacatatatatacga

SEQ ID NO: 51690 - DNA, 874 bp, Cannabis sativa
acacacagcataccctaaaaacagctcaaacaattttattgttggttaattattaggtgggaagttgcataaataggttaaatttaattaatactattctagaactactactcattcaaagtatacatattgatttatcatgtgtttcatatcaaataagaaactataaaaaagtgtcataaaaggattttgctggacacgagatccatatagaaatggcaagtgtgttgtgtgaagatttttcaattaaaacataaatccattaatatgttaatttatacacaaatcatgttctttataaatatatatatatatactttttcaccagtaaaatataatataaagttagtaatcatagttatagtgcgttaatgaaattactttttcatcagtttacttattatacttatcaatatcccttcaatctagtaacagaaaattagttacgttaattaatggatttctttagtaaggtgcgcagccattaattaataattcattaatgtattatcttgtatatgttggattgtattttttgagtgatatttgtgaatcttattataagttattcattaatctttctattcgaaagcacatgttggaatattattttctaatttgttttcgtagtattatttgttatgcttacaacattaattatttctgtaaatttttaaaaaatttcgtttacagttctaaaaatatatttaaaattttttgaacacgcgtgataaactagaatatcatgaactctatttttgttattgcaaaatagtcgaaattttttaaaaaatcacagcgataatactaaaattataatgaatactgctatgaaaaaaaattgaaaaaaaaatatttcaacatataattttaa

SEQ ID NO: 51691 - DNA, 1476 bp, Cannabis sativa
ttgtttatgtactaaactatgttgcccagactttgatatctaccaaatcatgtccctcaaactttgatatgtactaaatcatgtccttcgaattttcatccatattagcattttttttactaaaattagacaaaattccttaaatctaacaatctctatagttcagggagaagttttaacggtcaaaaaagttcaggaaatataatttagtacatgtcaaagttcggccaaaaaaattactaattaacctaaaaaagaaggatgaggtatgaccgagccagtctaatcataactcaatagagaatacccaccatcgaatataatttttcatttctctgtagaaagtgtgactgaaaattaattaaataaataaaaaaaagaagtctttaagcacaaaataaagattggcccattaaagaaaaatgaagtcaaaacccatcactctttatgtgaaaaggtagctcagaaagtggtgcaatgatcccaggaagtcttcaacgtcatagtgaaaggaacgttgaatttgaatatcgcacaataattttatctattttttttaaaagaattatttattaacttttgttttaaattattaagatgaggttgttttaataaagttacttaaaaaaaaattaatgagagagagaggcttccatgttaagcatatgaatccacagttattggaaaaatataaatgaagattccaaacgcaagcttatagagatcttcaaatcccacccagatgctcactttttcttctctccctttcaaatttactattttttttttttgtaatacataatatttatgtcactattttggtgggacaaagaatgtatgtctctttggcggttgggagagcaacaataacagtgtgtattgtgaaaatgacacatctttgtcacgcatcatagcaagaaattaataagatttttttttaatatatgtgtataaaaagttatttataaaaaatgctactttacagtattactaattttctcaaactaaattttttttattatgtatcttttcaatttatagtgtctaaaatggttcatactttagctaagcatgccattgttgcatctacaaactctgtttgctaacccaaattttctgtgttatcgggatcttgattgagacagagtactataattgatgaatctcttgatcctctcatcaaggcacatttccttcaaaaacaaaaataaaataattatcaaattattattttaaaatataaataatattgtaatgattaagtttcaaattttacgagcttaattacgttagcaaatatgaatatagtcgtaagtttatcttggtgatattatattttttctcgcagaaaaaaaaagagctagatctaaaattttatgtgaacaaattatggcatatttgttaacatataaacatatagaaatctgaaaattatacatttgaaatttaaatagaaaatcttagaaatattaacaa

SEQ ID NO: 51692 - DNA, 947 bp, Cannabis sativa
tcatttatggatttttgagaatgtctgctctttggtttttttttttttttggatgtgactatatatattatgggtttttgttgttcaagaacaaaaattgttcatgtatttctcatgaatttaactttttatgttttcaaaatatttatttgttgttatcttcttccttggagaagaattgtttctcttctcttaaatgaaattaatgaggcatggagcaagaagatctgtatttaattttattgattaatatttatattaatcaataaaataataattctacaatatgtttatacatatatgaatgaaaatatgttataaaaataaaatggctgctctagtactagtacatgctccccttcttatattacaactaattaataattaagcataataataaaaagaaaatgaaagatgatgattaaagtgatccagttagatcagctggagaatattattattgaaacaaatgtattattaattaatttataattaggagaatgtttgctggatttgttgtgctagctcctccgcacttagttgacattcaatcccaatctaataataacaacaatgaaaaataccaagtcattagtctcattaattaatcaataatatatgtaatactaattaagataaatatatatatacttcaaagaattataataaaataatgatttaacgtatatatatgacacacgtgtaccaacattattaacagttaatatttacagttacagactcggtaaatatacatgagaaatttctttttactctgtttggtaggaaataagtgcttaaaaaaaatgcaaataataagtgctcaattaaagaaaaacaaaaaaattaataattaaaaaaaactaaatataccttaatggtgaaggaataattaagcatggtgtcatcaagggtgttgatactgattttaagaatttgtagtgaaa

SEQ ID NO: 51693 - DNA, 907 bp, Cannabis sativa
tttttttaaattttaattatgtaattttttttatttcattaaaaatttatttaatggcgccccttacaaatattttctgtgatatcaaaatgcttgccattattaatagtattctttaattgaaattaactagaggaattattgagccaagaaaacggaatagaccactaagcttacatataaaaagcaggcgacaatattaccaaaattatgctaatagatacatcatcaatcacaaattgaaaatactaattttatattgggcttctctttccatccttttctttaataatttactaattttctcatagccaatcaataatattattaaaataaaataaaaaattatatatcatttatttacctaaataaatcaatatgatcataaacttcaaaattcacattgtatttttttcatctcgtaaatatgaaatatgtaaaaaataataataatttcctaatctgaataagtgcaagtatattatgctaagtaatggtatgtaaatataataatttgtaataatttatgtaaatgttataataacttataataatttatagagttaatattattttggagtttgtattttaaaaaaattactaattagatcttatgttttgttaaatgacaaaagaaatcatgtactttataaaaattttacaaataggatcatttagcttaatttgtgaccattttttttttatataaccaacttgaaagataatttctagcagaaacaaatataaaatatgtaacaatttttgtcataatacttttatattagattattattaaattttattttgataaaaaatcagtttagaatactatttatagaatttaatttattattttacaaaccagataatccaattccaatcagtaattttgaaaaaaaaaaaaaaa

SEQ ID NO: 51694 - DNA, 855 bp, Cannabis sativa
aaagagaaatggatagaaataggcccacgtaatcatataggataagtggaggcgtaaaggaatagcaaaaaggtctatggaggcgccgacatatgacccacctactgcaactgcaagagagagagagagaacatgtaataaaaaggatggagaaaaggagccataaaatgtaatgatggaatcacacaattcatgtataaatacaataacgataatatatatatatagttgttattgttgttgttggtcatgatgatgatgatattataatactagagagagcacatgatgagaaagctcattaatgtatatttatatataatgtaagggtaagcctataattttgttagttccatatctatttcagtatttaaaataatatttttatctaatttttcagtatatgttataattatttaaaattatttgtaagtttttaaaaaattttaaataatttacaatatcgaaaataaaatttatatatttaattacatgcgcaactttttttcaatcataaaaaattttaaactaaaaaagtattttatatgtgaaaacatatatgtggtctaatcctattatgagggtctactacaaaaattttcaataatataattaagcatatatatacacatggggtctagaagtacatgtacatttcttctttacaacctaataagccatcattcttttctttctttttttctttctatcttaattttcatgcatgggatgagtatgtatgagttgtatatatcctacttttcatacatatatataaagaattcccactacttttcccttttcatggggaaagcaaaccccaaactaaaccaaaccaaacaaatctcatctcat

SEQ ID NO: 51695 - DNA, 1468 bp, Cannabis sativa
ttttatgctctctaaaaatgtgtggtttttgtgctacttggctttgtgtttgcgtcttcttttgatgagatgctattcgttggcgaatagatgagatcaatctctcgctcagttctctctaatcatttctagaaagtgataagttttaattgctgatctgaaataccatccccggtctcatattgttttaatctgttatgctttttgccagaagaaattgaaaaaacaagaggtgggttttatcgtgattggagcgttattgccttcttggcttggttcagccctagcatggtcacattgccccgtggctgtgcgttgaaaaataactaatggagaaaataactaatggagaaaatggaaagctcatctcatttgaacatgaggctggccaattgtatttatagaccaatgattacaacagaatacaatgtacaatcattacaaattaatcaagtcttttacacaacaaaaggaacatcctaacggtacaaaaaaggacaaagtttgttaaccaatttggggaccaccaaaggttggtatgccacctcatgatatctaaccaaatacagagggaaaatcatttcttcacagctagctgccattcgttcaaccaatctgagctagtttgttggtgtggtgtgcaccttatttgggtacccacttttgtagaagagggaggaatcatacaaaagctcacctgacacctcgcggtcatccgttcgaccgatctgagctagttttctccaaagggtacccacttctatagaagagagatgagtcacataaaaactcacctaaacaccacatgcgcacgccgctgtcatccgttcaaccaatatgagctagtttgttggtgtggtgtgcaccttatttatttaatttattaatactgttttaaacgtgtttaactaaatgataaacaagagacattttctcctcaactttttgagtcatgatccaatgctctctcccacgttcagaaaaaaaaaaagactttcttactgtttgatttctctgattgttccctatatagcgcatcagaaccaacgggagaaagacatccctttttacaaatagttttcccatttgatataattttttagcagtaatatatttagatggtgcattcgacaatatgctacaatgcagtgatgttccgataaagtgcatgacatggctattttatccaaagaacgatcgatattttttcgactacttacacattcttggggaataccgtgaacgtgttaaagagagtgacctagtccacgactcaacccaaaaatttcattcagtaatatcgttccttttctttttccagtaactatgtttataacacaatctagtagtgtaaaaaatccagtgggtaaaattactatttattcttttttaaatataacctatttttgactttttttcccttaaatttttgggagtacaaagtatttttctttcttttttttaaaaa

SEQ ID NO: 51696 - DNA, 1890 bp, Cannabis sativa
  modified_base (68)..(68): a, c, t, g, unknown or other
  modified_base (1608)..(1619): a, c, t, g, unknown or other
  modified_base (1682)..(1690): a, c, t, g, unknown or other
atacgcgacccatttagtcgcatgcattccatgaattaagaaccccgagaggttcatacatgaatgcncgatacgcgacccgtttagtcgcaagcattctatgaattaagaaccttgagagattcatgattttttatcaaaccccgagaggttcatacatgaatgcctgatacacgacccgtttagtcccaggcattccataaattaagaaccctgagaggttcatacatgaatgtcggatacacgaccctttttgtcgcaggcattccatgaattaagaaccccgagaggttcatacatgaatgcccgatacgcgacccgtttagtcacaggcattctatgaattaagaaccccgagcggttcatattttttatcaaaccctgagaggttcaaacatgaatgctcgatacgcgactcgtttagtcataggcattccatgattaagaaccccaagaggttcatgctttatatcgaaccccaaggttcatacaataaaacaaaccctgagaggtttgtgcatttattcgaaccccgcaaggttcatacatcattgaaaacgctgagaagttcatgcatcagttagaacctcgcaagtttcataagacccctgacaggttcatgcaccaatgaaaactctgtgaggtccatgcatcaatatgaaccacgagcggttcactcatccaaaagaatctcgcgaggttcacatttttattgtgcaattgtcttataagaagcctacgagtttagataatcgataaaaaatatgatgcccaaggcatgatgataatcaacaaacgcgggctcggactattttaagttctccagcacagagcgagcaatactaaagaactaagggcatgtgttatcggcataaatttaccctccccgcgagaatgacttgtctatagagagctcgcgttattaaagggggctcgcaatattatagtactcgcagtaccaaaagaaaggatctcgcaatattaactgaaagagacctcgctagattgagaaaggcacacctcgcatatttaataaagtcgcagtatcaactggaaaaggtacgaacacgcaccaatcaatagaagtcaacagtcaagcattcaaggagcattcatgacaaacgttacacacattttttataaccgttgtaattaattcgattaataagcctattattattatcattattattattttgtaacggtctcattatgaccattatttgtaactgatgcctactacctataagtaggggcttccccctccattcaaaggggggctgatctaaataaagaaacatagcgagagtactcttttcaacagttgattaggcaggccaagctcgaagctcctgctgaaccactatatttttctgtatctattttatactatttacaatactcgcatacattatacactatattctttgagtagtcgctattctaagtgagtacttgcatatctattttttttgtattcaagcagtccttgaatactcgcacaaaattggtgttgtctaaattcctccaacaacagtctcgattagattctcccctacgatgactacttagagataaatttacgaagtatgaaacaatggtggaagnnnnnnnnnnnngaataaccttgactctcgcttactaacaacgttggattcttattttgattgaataaaaggttnnnnnnnnngtgtccattttagatgagctgacagctctattcaatgaataatatctttgactctcgcctactaggcactgtatcagtttgttggaaacattaaaaattatttaagatatgatagtatggtatttttacatgtctttgttacttgctaaatgcttagtaatttctgaattgtgtgtgaatttatattgaatcatgttatt

SEQ ID NO: 51697 - DNA, 1857 bp, Cannabis sativa
aaaaaaaaaaaattatttgataagctcttgataaagaacaaatgtttacttgatgagctgataaattatcattaataatttatcattaattgtttgatgagctgtggaggaataggagtcccctgcaaactcaattaatcaaagtcagaacttataatgtaaggatatattgggcagatcaattataaaatagggtatatttcaattaaatttattttacagctacttttggtgaatgtgtaataaaaagaggtaattatcaattttccccttttttttaattaatattagggtcggctttaggcataaataggctaggtatgtgcttagagtccacaccttttgtaggctcaaaataaaaaataaaaaatttcatcatgtttttatttaagtaaaattaaatgtattataaacaataaatatacatagcttagttggtttatgtgtataatatattatccaatgttatgggttcaaaatttgaaatatgacactcaatttttaattttttatgtatatatttttaagagtgaaggtccaaaaatttaattcgccttagactcatatattctcaaggtcggccttggttaacattcacgtcttaaattatatgtttgaatattttttttcataacgttattcgttatagtgataatatcattcctaaatttttgaaaaattatgaatagtttacagtattggaaacagagttcttgatattccaatttaccacgcgtgttcaaaaactttcaaatctatttttggcactttattcgaaacgaaattttttaaaaatttatatgaaatgaatggtgctatgagtataacaaacaccgctatgaaaaagattaaaaaaatatttcagtatgtgttttctggcacagagattgactaaaaaattgtaatagaaagttgacggtagcacttcaaatttgaaatgcaaaagagaaaagttaagaggtgacacattgatatttatgtaatttaatatggaattctatatattttaagaaattgctaaaaccatggtattaaactgttgggcttgggcatcttaaggtgcctaataacaacactcaacaatggatgtgaccaattacactagcggcaaagcttcaaaaaagtgtgaagaatgctagatttctaatctaaattaacatgtgacaaattatacctattaatgtctagccaaagacctcctaattaaaattaggtaataacaatccattattcatattagaataaaagaaaatagcaacacgaccaaccatatttcgaaatgtattcgtgaaagaacgatccaaaaaatataaggtcaataaaaatctaaaaatccccaaaattaggatacaaagagagataggcatgtcaaaaaaaatattttgagccattcgagaacacaataatgacccaaacaggaacaaagttattactcatctccatacacataattattcctgctacaataccaatagtaggatggtggcacaacaccattattcaaaataaaaacaaaattaaaagataaaacatcgcaaataaaaacaacccataaataaaagcttcacaaaccaaacaccaccctaaccccatgagaaattcaaatccctaataccagtagtcgaggccagtccttaaatttagtggatcatagaaaaaaaaaaacatttgagcccttaaatttagaaaaaaaaaatgtgttatttttaaaattagtaaaaatatatatttttaaaaggagaaaaaaaaaattgggcccctgggataggtgggtcctaggcaaagacctagcccgcctatgcctaaggccgggcctgccagtagtaaaccttaaccacacagttgcctcttcaccat

SEQ ID NO: 51698 - DNA, 675 bp, Cannabis sativa
tggcgttcacgtgaggcgtcctgtcttgctcttgcagatatcatccaaggacggaaattcgatcaggtgatttaccaataaattcttaattattatttttcaaactaacttatttggcataagtacttgagtttattacgacttataaaacactaagacttgtggtggctgtagaacatctaacccacatatttaaatttggcttataatttccgagaagctttcactaataaatttattaagtgtgagtcatcttaactccttaaaaaagtgtaaacatctatttctttttgtcagacgcttcacaattgattgtatattatacgtctacgatgtagatgtttttgagtttccattttatatgtcaggctaaatgaaattctcctttgaatactaaaattgacaacctttttatgtactgtatttttttaaggttgcacgtttactgcaccctaatgcagttttcgtattattttcacttacattaaataatttaagcaacaattttttgtaatttcttaaaagaaaaaagaaacaaagaccagaaatttacttggaaaacctgccaaaatttaaaagagcactccccttaaattttgaaattttgatttaataaaaagaaatttgtttgcatttttaaaacaaatcattagttttctcctctagaaaaatgtt

SEQ ID NO: 51699 - DNA, 1230 bp, Cannabis sativa
aatattatataaaataaatttttatatatttgtgattataataaactagattacaacattatcattatcattataataaatcttaacaactcattgaactcacagtacttcgaaatttataatttaccaaacactcagctcagcttttttctacagttcttctgcagctactttttctcacaggatagctacaactgcttttttttacagcacgaatgtgccaaaccggcccttagtcttttggttgtgtttttttggctatttttttttgaatatatatatatatatatatatatagagatttttacaccacatattgaaatttattaattttttttctttgttaatatagggcagaatttttttaaaaaatattgtgtactatgttaaattttatctgttattccactgttatttttaattgtttagtttagtattttaggattgtcttataaaaaaataatatttttaaaaaaaattcgtgtagcagtgaaattataaatttttatccaaaatctagtatttttggaaaagccccgtatgtacatataatggcttccgttttgggaaaattacacacaccactgactttttccattttcttacttttatactgttaggcggtataatatacatttatactgtataattttataacttttatacggttggcttcaggatgtgttttcttgtcactttaaaatgtgttttttttttcttttttaaattataaaagttgctgggaaaattagtttggtccaacatcaaaatttaaatctttttgttttattagagatattgattggaggtgagatgtgacaaaagtgacatcttttttttttttttttttttaaatttaattctttattattttttaatatttaataaaccagtaacttcttttcatttataaacaaacaagtgaattgaagagttagctttcttgagaaaccaacgacacctcaccatgtaatagtaattgctcctcttctgttcttcttcttcttcttcttcacgggtctctttcttttgttttttttttcaaaatccatacacttatcatcttttttctcactatcttcccccttaagttcacttactctcttcattaacatatacattttttattttatttcttgttcagttcttcttcttcatcttcttctcatttttttagtttttctaatttttagtcacacttttggggggaaataaaagagtagttttttt

SEQ ID NO: 51700 - DNA, 981 bp, Cannabis sativa
ggtgcaaggaggaattaataagttggagaatttacttgttaaattgtagatctgcttattgggagctcgattatatagtttagatagtttagcggccgattaccttttactttataataaataattaagcaattaactattttaactactctattgtgtgtgctcttaggggagattgtctttctcccttatgttgtgggtagctaatagcccacgatagcccccttaattgtgagttcggtcagacggtgacagtgattcatgcgtgtgtagttctcaagtacctattctcacaaactaggtacattttgggtcctcaatagaaatgtcaaagctgcatctttaaaaaaagtgttattatcccacacgggactctctccagtatcacacattgcacttaggggtatttatggtgcaggtggtgtggattatgacctatattttaacccaagccacatatgtagtttttgtaatttctcaaatcgcaactgaatcgtaagatcttaaaactgcaaaagtcacactacgaaaaatacagtacaatttaagcggttacacaattcattatcaaatattataaatatttactaagatttttagaaactgattaattagagcttaaggaatatatagagcaataaatagtagacaaatagactttttacgtggttcagacgttaataatccctagtctatgagtaccttatattagccttgctggcgagtgtttaagtattagaagtgtttacaatgataactctgtattcttattgtttctctcaaagaagaaagctttctagaaattttagcagaggttttgtaagtaaaatttgttcaccctctacatataaaaaatagaggcatttatcggcacacatgtgggtaagggcataccctttacctgttgggttttgtgccctaaataaaaactcatttcaatataatcagatttactagtaaataaagatcagaaataacatt

SEQ ID NO: 51701 - DNA, 5254 bp, Cannabis sativa
actttaaaataaagctacaaacttcagtaatcaatgtaaccttattaggaaaaaaaccagagaatttcgaaatcaaatcatttcatgttacagacttgtacctacaaagaaccttacacctcaaaacccgatcttgaacataaaacccgggcataaccatgatcttaacacgactcgggccattcaatctctgcctttccatcaacatatcatccatgtaatgtgaatcaaagttggtgttctcttccaccctcagtattcccaatggaggattaaacgaaaaggcgagcaaatgaagcaaccaaatgcatttcgaagccacaaaaaacgcttgaagaagctgttcagaccaaggcctagtccaattcagtgttgttatgatatgactcattttctgatcacaaaacttactgaactcttcactgtaatacttagtacctttcctcaacacttcattccaactcaagtttcttagcgcgacaaatgatgcgaattgagcttgtctatcttgataagggtcaagaatctttggtgagccattcttctgaaacacacagttctcaaaatcttggtagagtgattggtttataatggcttctaaatggtaaagaactgcttttgagtactttgaattgagggaaagtttatatggttgaagaagtaagttgagattatcaacaagcattgtatcagtctcttcaatctgaatcacaagtgttttacagaattgttttactgataatcttgcttctgatacaatctgtaagaaaccttctaccattacttcttcactaacaggcatcaagttttcagattttcctcttttcggaaagtttctgaggttttcaggagcaggggagttcttaccttgtgttgcttgtctcaaagctttcttcaactcttcacagtaagtttccaaacactcaagcttctccctcaactccccaagagaagatttcatatcagaaacttccattaaggctgcatctcgattctcatgagcttcaatgagctctttcctaagtgcctcaattgacaaaatcccagactctctaaacacttgagatgacacatcttcagactccgttcgattaggagagttttcgtatttgttgttgttcttcttcttcttaaaccgagggaacaaccaagacatcacaccaccaccaccgcgattcttaggctgcgaatgcatcgaggaatgagagtctgtcaagggaacaacaatgttggaagtcctcctgttcttaattccacctccactatcagattccgaagttatagttgcaggcctgcatctattacacgacgaaacagcgttgaaatctcccaaactgtttctccttcttgacttgaacatgtcattttggagaggtgaggtttgcagcactgtgatatggttagcacaagaagttcctgtcatagatttatgatcctcagctacacatgtatgagactctaagttggttgttgttgtgtcacaattaaccaacccttttcttgaacaagaattctcttttttgtagtctgataaaactgtttcatcaccagttccacttcctaatccatactcatcccaaatttcggataatgttctacttcttggttcattttgttgatacccagatactgtttcatcttcataactctacaaaaaacaaaaagtttcttactttacttttaaaatctaactaacaaaatataacattagcctctacatccgaaaagctaatcatagattcttctccccatcgtaacaataaggccgttatgcatattactagacttcttgaagagacaaaagataaccaatgtatatctttttgatcagagattaaatcgatcatcaaaagaagaattaagccataaataggatacgttctcgtaaaataaaacttccattgaaaatagtcattatgaaaaattttataagcaaaacaattttataaaaaattagaaacgactataattacactatccgatcataaaaaatggttattttgctcatttaacatttttatactgttagtttggcaaatttctctcattttgttgatacccagatagtgattcatcttcttaactctacaaaacaagaaaaagtttctttctttactttagaatctaactataaataaaggaattaaacataaatgctctacatgacaagaatttcagataatgtgtagcaaaggatttgatgagagaaaagtgggcaattgtgatatattctcatatatgaaaaaagggtgcatacaatgacaatatatagctcttacaagtggacaggtttccaaaggagaaaaggtctaaaatataatacagctaatctgacaacaacaatgcataatactaattagacaaaactaattcctttgttttatcaatacccagatactgtttcatcttcataaatctacaaaacaaaaaaagtttctttctttactttaataatctaactataaagaaaaagaaaaaactctatatgaccagaatttcagataatgttctactttttggtccattttgttgatacaaagataatactggttcatcttcacaactctaaaaacaaaataaaaaaactctacatgaaagggaaattttccaaactaacaatttatggaagcaaaacagtcatttttatgatggcatagtgtaatttttagttgtttgtgcaagcaaacataattatttagctaataaaaatttttaaaaagttattttgctaataatttttcttacaaaacactccattttgttaatacccagatactggttcatcttcataactctacaaaaaaaaaggtaaaagaaaaagaaaagcctatacatgaccagaatttcagataatgtgctacttttttgggtcattttattgatacccagatactgtttcatcttcataactaaaaaaacaaaaataaagtttcaatctttactttagaaactaactaaaaagtaaaacaaaaagtttctatcttaactttcagaatttgtttaaaaacaaagttaataacaaaaaagagagattagtagtacttacaggtgtaaaaacaggataatcttgagcagagaactgaggattaggaggaggaggagaagaagaagaagaaggaagcttgagattattagaagggctgttgttgttagtgttattattattagtggtctgcatcagagcagcatgaagagctctaagctccacagctttagcaatggcagcttgaatctcttgtctgttaacttcttcttcattattactggtttgttggttttggataaatctggtgatggtgtcagtagccattgacaaaatctctcaaaatttggacacaatacagaataagcatttgggtttttttgggtgtattattattgttattactttgcagagaaaaaagaagatgatattatcttgtttgtagaatagaatcttgtgagaaccagaaaaaaacataaatggggttagagagagagagagagaaatgaagaaggtgtggaggttactcaaaatctaagccaatgagagtgagaaagctttttcttttggttttttctttgtttaaagattgaatttttatcttgttcaaaaaaagaaaagattgaatttttatcaaaggaaagcatgtgaaggagatagtaatagctttttgctctatgtaatgtaggtagacaaaggcatggttttagagtatggacctgtaattctataaagacatcttattttattatttttattttgtattaaatatatatatattaatctatcaaatataaatagtaaaattgagtattcttattcgacattccctaatatgattggttagcgatattttttaaaattattttcttaagttacataaaaatcgatacttaattacaccaataacgatatgacaccgacaaaggtgctacggacttttatcatttctcattaaaattattcttcctttttacattctaaaaaatacatgtttaaaataaaaataaaatataggaagactataatgaacatggtaaaaggagtgtattgatgcatcgttatttgttttggtatttaaaaaaaaaaattgtagtctaattctttttatatatagttgtgttgttgtagttatttaaaatattttgtaaaatttttgaaaaatttagaaaaatttagcacgctaaaaataagatttaaacagtctgtttctgttgcatgtgtgatttttttattgtatacacctgtgaattacattaattgagctttgttttctatattgtaaattatttctcaaaattttgtacaatgtcttaaataattataatttacacgactataaaaaattaaattattttttttttcaatatattcaaataaatagaagttgtatcagtctattctttttaagtagtgtcctgtaaaaatgttctagaatattatttaatattttgaaaaaagaatacatgaaattatactaaggtaaaattagaaatatatacactatttttaaaaaaatatatgaaaacaaaattaaaaataatacaaaatacttgtgaaagaacttcttttaaaaaaaaaataagtgtttatctttttatttttagtataggggtgcttattcaatttttttaggtgcaaatataatgttcatttagcataagtaggaatgagagttgatgttactaaaatgccctttttcttcaactaaacaatctatgcaaatgcatgggagtggtatggtggtgccactattggctatgattgcaaaaaacataatagatattatcataagatgttccactactatactagcagttttcaaatgtgacattattacctcaatagtaagaacaatcaacacttcaagaagtaatcataacaattaataatataactaaagttattgattttatgttttgaattagaagaagtaataataaaatgtcatatatcttaaattggatattatgggtagttaaagattgtatttttatgtgaatattgattagtaaatgttgttactttttttttctacttgttacaattcaactttgaaagtgcaaaagattaggcttttatgtcttgaatttattgtaaagtaattgttcttttccacacacacccccaaaaaaaaagtaacttgaaaaagttatgagtggaaaagtttagtaaaactaactattatattgtttgtaccatgtaccaatgttctttgggtcataaaatatgcccatgatgtaacacaaaggtgctccaaaaagtccttca

SEQ ID NO: 51702 - DNA, 902 bp, Cannabis sativa
ttcgaatactcgttgttttagattaagtagtcgctgcttttagttaaatattaactgttctaatttggtgttgtccaaattcctccgacaacatttggcgccgtttgtgggaaactttttcttttgattttggaggaaaatcaacatggttgtgaaccagacaaatggatacaacaatactggacctttcaatgtcggaacgatgaatgtcccactcccaagtaatggaactaatctgactgactcaatcaacgggggtgtgtggggcaaaccaatgtcacacccctctcaatttgttcccagaaattggtctcgtaggggagacatcgacgccgacagccactgtgggccacttccagcctatcacaccggtcgtagcctttgaaggaattatccagttgacaacaacacaatacacgaccatgtagaaatagatgcgagcattgcaggctgaagttgatggaagagtcaggacccaacgtccacctcgagttccaaatatgcattcaggcaatcctcaagtaaccaccgcaaatagacgacaaaatgagcgtcctaacaataatcgtatttgcagggaacgtgtgaacgaacaagaaagtctcgatctgaatcagcctacacataactccacgtgaagcagggagccggctgcacccaatgctagtcgtggaagagaagacaaaccacaagaggaagaccctgagcggtaaaatttgtagagtcagcctcaactgcgagtagaggtaaatgaagtcgaatctcattcttcatctactaacagtcgctcccctagcatttataccaggtcgggattcgttgagacttgacgaggaggtaggtactatgttcatagaggcgatctttgcgaccttcgcaatgaaattttcagggcgcgatcc

SEQ ID NO: 51703 - DNA, 1610 bp, Cannabis sativa
gtaaattaaagaaggtaacacacttgtctattaacttggagacgaacttgctaagtgatgaaagtctccctgtgaggctttgcacatcttttatcgacgacgatgatttcatgtcttgcaaggccttaatcttttatggactcacttcaatacctcttgagttgacaataaatctgagaagctttattgattggatgccgaaggcacattttagagggttgagctttatttgatattcccgcaggatgttgaagcactcctctagatctttgatatggtcttcagatttttttgacttaactagcatatcattaatgtagacttccatattgttccaaattttgttgtggaacatgcagtcgaccaatcttcgataagttgcacctacattcttgagtctgaagggcattactttgtagtagtaaagcctgatgttagtttggaaactcgtatgctcttggtctggtgcgtacatactaatctagttgtagccggaataggcatccatgaatgtcaagagttcatggttggttgttgcgtccaccagttgatcaattcctggcagtgggaaataatctttagggcatgctttgttgaggtcagtgaagtcgacagaggtcgtccactttccattttgtttaggcaacagaacatggttggatacccaaattgagtagaaagcttccctgatgaagttgttctcctgtagtctttcaacttcttccttgagagctttggcatgctctttgtcaaggagcttgtgtttctgttattaaggcttggagttaactttgtctatgttgaaggcatgacagatgaccttggggtcggtctcgatcatgtcctcatgtgaccaagtgaagatgtcttgatttctcctgaggcaagccatgagcatctcactcaagacctccattaggtttgttccaatcttgataatcttggtcaggtctaatgtgtttaggggaagttcttttagttcctcggttggaccaactccccagtcgagttccccaaaatgggggtcaatgtcctccccatccttggcgcacttttaagtggctttagctgccatctctatcttctccgtagtttgactttcggaggtcttcatcgtctctctggcttttgcgagagaggccttgctcatcccccctagtgaaatgacaacagaggaggtcttgtttgtcccctctgaatttgtaacagcagaggatgtcttcttcacaagtgatagcaatgtattgtagcactctctcccagttccttgattgtgaaggagacaaacgatactagccgttgttggcaacttgatggaaaaatggtacattaaggagattgctcgaaggtcgtaaaaggaaggccttcccagtatcatgttgtacaaagacttcacgtccaccactatgaatgtcgccataatggttgtctgcctcaaggaagtgcctactatgagtagcagcttgatcttgccacatggaggaataccgactccactaaaaccacacataagttgctcgcatggttccaagtctaataaagttaaacccatcttgagcagggctttttcgaataggatgtttgatgaccctccatcgtcgatcattacc

SEQ ID NO: 51704 - DNA, 816 bp, Cannabis sativa
  modified_base (264)..(266): a, c, t, g, unknown or other
taatatttataatttttaaatatttaggtagtttatataatacattctaacaacttttatatatttaagcattgataagattttgttagtttattattattattattatttttaaaatatatattgttgatctcaaaatttactaagaattttaaggtaacaatgaaaaaaaggaagttaagacacacaaggggattctcaatacatatacaaaacttttctagactcttcattcgtcttgctccttctctctctctctctctnnntctctctctctctctctcaagcatgcagataaacaaggctccttcaaaaattttcttttcacacataaacccagttcgtttccacacgctgaaacccattccaagccccagatctcgagatcttggtggctccgtcttcccatccatcgtcgatcaacccagctctgagagctccaaccgtccttgtcgcatcaagaagctcagatccaaccgccccaatcgcatcaacattaacttcgggcttcatccctccacatatgcgatttccagaaccccttcccctctcaaaatttatgaagctccttcagataatcaattttttctcatgagttttcttctccctgtcaaatcgtctctgctagaaatagtattaatcaaattttttggatataaattcaaattttacaataaatttccccctgaccgatctggttcttttgatcttctaagtaatgtgaacactctttacaccctaaataatcatgattatacctatttttgtgaaacagattgtaagtttttatttaatgcaatttggttttcatgtatt

SEQ ID NO: 51705 - DNA, 1597 bp, Cannabis sativa
ggattgctttctccttgcagcaatgtcccaatctggttcagaagtttatcgtctagaagaattagaaatagagtgtcctactgaactttccatcccatacaaccccagagcttcagagcccaaatccaaattaaagataaatgatgcaagaattagagagcacttagtgaaaattcacaaagaagattttgctagtcgccatagacgcttcttgcaagaaattacaaaaggcagatgccatttcttgcgagacgctgtttggcctgaaccccccagttcgtcttctattcctttgcctaagcctctgtttttaaccaagatcacaattgcgtttgaaccaggtgacttggattttgaaattatgtcttccaagccacgtaaatcaaagactccctaggaccctaacatcactttcgaggtagagctaatagagtcgaaggtgcgagccatctgaggttatgtaggtgatactctaaggactgctggtatttaatataaacgagactgctgggttagatcggtggttgttggcgagtttagttgttatgcaccagtgcgtcttactcgcgaaacatttgagggggccagtggcgagaccagtacaagtggctcaacaaggataggcgcttagagcgttgaacacatcagggctggagaaataatccacctacaagactatttcaaggtcttcctaaaccatctcgagcttgccccgtttcaaccaaatcccatttcatacagaatcatcacaagcttgaaggttctgtacaaaattttaagatgggagtgccccactcccttggaaatagagtatctctactctgtcaaggcagttccagcgagaaagaatgcagtagagggtttttactatcttgggactcatataggtgatcgtaagatcattgtggatttgcccaacaaaactccctttaaagatgacttcttttggacggccggtctctccccgattggcacaaccactttccatataattcataagttattatttgcacaagacttggttaaactaatccatgtcttttattctggtttatttgactgaaattttgctttgtttttgacagctgtctcgaaaacacctgcccctactcctgaaatggctgagcgacgcaggcttctgatgggtctcccatacggccttcgatcatctgactttcttttaaacgaggtcaacctgaggtcagcaggtctccttactgacaaggagtttacttgcgattataaatatcccaagtattcttcttggcagcaggttcctgtcctaatgaggaagaagctcaggatcgtgtggctcgggcacaatacctcaagaataatgtccctcgggaagccaaagaaggagcatcccaaggtaatcaatgtggttggtcaccaacaatgctgagggtcgagtgtaacactctagtttcatttcaagatagcctctataacttttatacttggcatcccatcctcgtagatcgtattaagcatagatttgataattagtatcccagattccatgtccaaattagttgtactgcgtcgtagtacgggatagccgagcagtacgggactatgatggatagggcgagtc

SEQ ID NO: 51706 - DNA, 969 bp, Cannabis sativa
ttactctaaacagttcacacaaattcaataaccccttacataagactccaagattccttaatagccaaccaatagcaatctaaacaatcatctcagccactaaggacttagacaatccaaaatcctaatcaattatactattgagactagtatgaaggtgtaacaagttattatgaactttcaacctggttagttcagataaaagatgacaaaacaaaactatgatcgaatttttcgagtagttgaatttcgatctaagtcatgtttgttggttcaaaatagcataaataataagcagaatttggacttggattttactggccagatattttatcagaagctttatggtaggtacaaagagtagtagtagaacacagtgttattccacttgaagtaaataggattaggtgatgatttttggtttgttcatgaaaaagtgagcttgaatgtgacaaggtctaccaaagataatgacctccataataatactaaaagttcaagtattttcttcagctctgatgtaaaacacatggttgaagaacaatatcagtttctttctttagtttatcatttgaaataaaataatgagtttatacaattttgaatctctgtgtttatttaatactagtttggaaactccattgcaaataattttaaacaaaaccctttagaggcgtttggttggaggtaatgaaatggaatggaatgaaaagaaaataattttaattccattcatttgtttagttgcattttaaagtattgaaatgttagtccaatggaatgatttttccattatttttgtggaatgactattctattttgaaattgaaggaatgactattcaatttttctttcatgaattttaagtttgattccattccattcatattcctattctcattcttattcttatgtttttatttcttccaaccgaacgccaatttattttgactcccatgaattcatccg

SEQ ID NO: 51707 - DNA, 1909 bp, Cannabis sativa
  modified_base (471)..(480): a, c, t, g, unknown or other
acttgagtttagggagttttaccgcaaaaaatttagaattgggggttagttgtaaaaacctccctacttcagggagttttgccgcaaataacccttaattatatagtatttatgtaatatagataatatatacaattttttatttttgaaattaaagttgttctacattttatacaaagttttaggtaataaatattagcatattatttttatttttttaaaaataatatttttattatatattttaaattatttattattaaaaccaaaattataattatttaaaacttatacaatttttttttatattttaataaaataaaataataggttcaaacaaaaaatcgagaaaattatattgtatacctactttattttatttattttaattttggtctctatttttatattctttaaggatacttttataaatgatgtccctattaatccttaggttaatgtaaattatannnnnnnnnnaagtagagagtgagggtatattgagcaacccactcacaaaagtaagtatgtttcaataaaatataacatgagggtattttcgattaatagatacaaaaaaaaacgtatttttgaacttatccctaaaaaattgggtataaaacggtattaaaaagttaaaaaaaataataatataaaaaatggtatatatgtaaatgaattgactatcaatctattgggctttcatttctaaattgttccttaagagcccatttggtgccgaaagggttttgcccatatcctctgctgtccaagaaagacaccctataaaacacaaggctcatcgtttcacccaaaaaccctacgtctcggccgttgctgcaggtgcctccattaacatcccttctctctttcgtatgctctctcgataaagatcgactggatctgcacctaatatcatacataactataatttctttttatcttttgcgattgttttattgatttcactcttcacttgattttgttaggttgaaattttaaaggcggagttttgagcaatggcgcctaaaggtactcatttttctctcctcatttctaattcgaaacgggtcttgtgatttttatcaattttacgagctaatatttatacatgtgcttttttactgagtgtctgttgttgtaggagttggtttttctttattgagtttactatctgtctgttttattagtttttattacctaatggttcgatttgatgctcctacatactgatgttaacaactaggattatagggattggacttgatttgggtttatatttggacgtattatttttattaattggtgaagatatatgagctgggttatattttatgccttctttctattggaaatttggaacatatattatttaatgagcttttatctgagtttagatttaaaaaaattacttaatatacttctttaagcgtgataatagtgttctaaactttagtgaagtaattttcctcgttgtagagttaaataattgtctgtggatatggtgttcctctcaattggtgtattgtttcgtggctttcttagtattaattaccattgatgattattttatgattgtggttaggcatttgggctttctatgttggtgcatggtagacataggtttgaatatcttataaaaactacgacaacccccacattaaaatcatgttgtgatttcctttatgcttttccttagtatctcatatttccattttctacaggtgatgtcacgaagaagtctgaccctaaggctcaggccgctaagactgctaaggcagtgaagtcaggtccagcattcaagaagaaggcaaagaagatccggacgtccgtcacattccatcgcccaaggacatttaagaaggaaaggaacccaaagtacccccgtatcagtgcaacaccaagaaac

SEQ ID NO: 51708 - DNA, 1277 bp, Cannabis sativa
aacaagttttctattttaacaagagatggttggcttggccaaccttgtattgcagcaataaaagttctaaattctagccttaattcatgaataataaatctactaattctaatatctaacataccaatagtagagtccaatgcaaagatttcacgacaaagagattttatcttgatgaagtattagttaatttttgtgtcgcactacctatttgagagaagctcgttctccagaagctgcaatcttgtatcattcttcttggtgaataatgatgcaaaagtatcccacacttccttcagtgttttcgccgacctgatgtactctaacatttcatctttgattgtggtccaaattgctaacatggctttgtccgctttaatcttctatttcttcaaagcggttgcctcctctggttgtgtgacttcattgccgccaacgatatgccacaagtcttggccttgtagatatgcccccatgtgcatcaaccacatgttgtaatttagttgttaagtttcctaattttgccaaccacttgaaggtcatccatcgtgcaaactctgtagtactaaaccacacacgatcactctaagaaacgcaacgaaagactctttcggaacaaactcaattcggctctgataccacttgttggacaatacgggaaaattgtaattactttattattgagaaaataattacaccatgacttcaacactttatcttgacaacaacacaccaagcactcacttttatttactactacacacctttataatgcacttgtatataactcacactttgggacactttgtttacactttaacttttttaggcacactttgaaacactcttgttggatgcacaatttgaggacccaaggtccctatttataccactaaaaaaccaactataatattctaaaaaattctacttaattgtgttactaaaatattcttaaagcttccacaggacataactatttttaattaatttaataataataaacttgacccaaaatgatagatttatctagttaacctctaaaaaattctagagagttggtgatgattcttcagtgagttctatattgcattggttgagttttcaagcttgtccttggaaaatctagattaatagcacaagattaggtcatttggcttctgtagtaaatgcaaccattgcaagttaagtgcctagtatttagctcaaccgaaataaatgctaccataaagattcttcttatacagttgagtacttagtgaaagaaataaagtgtatga

SEQ ID NO: 51709 - DNA, 946 bp, Cannabis sativa
aatatgtaaaggaccagttgctgtaaagcatctattgaactcttcatcatgttaacacccataatgacagggactcaattaacaaaaaaaccgttactacttgacatcatttggtaatagggttttggttgtcaaggttatttttttatatatatttttatggttatttttatatatatatagatatatttgttttttttttatttttttttcatatttttatattattttttatatgaaatatgtttatttctttatattaggtagaaaaacaaaagatattaaatttacaaatactaaatgtattgaggattgactattagtgcattttgtgctaaaatattcgagtaattctctctctttctaaaattgaatgcataaatttaaccatcaatttttttcagtattgtttgaattcttcactaatgtatttattttaacattatatttgcctctaacaaaataccattttctttatttatgttcatcctgcgagctatcaagtaaaattatctaattcatttatataattttctgtttctcactcttttcactttcaatttttactcacacatgtatttaattatttttataaaatttttagctccaacaaattaccatctttgtttctactcctccttcctaccattgcctttaaagcaactaaagataaaagttggtcatctaacttggatataacttttgttaatctatatctgtttatttatttatctatatctataaagtaatttataaaaaagagtgaggccgcagtatataagaactttttttctttttttattattatttttcatttacataatttctaattatcaatattatattttatttatccaaaactaatataattaccaaaggcttcttttttgatgtttcatttcaccttttaataattcattgaaacaaaaatatgcaactgttatta

SEQ ID NO: 51710 - DNA, 751 bp, Cannabis sativa
tttttactaattttaaaaaataccatattttttctaacataagggccaaaaaattttttttttgcctgtagcccactttgttttagggccggccctgtccacaatgctatgctctataataacttgttaccaaataagtatactaactaggattttgtccatagagtgtgatactattaacatttacccttaaaacacataatcaatattatatgtggccttaattatttaagttgtttttttttaaaaaaaaatatatatatattttcatatttttttaagagagaaaaaaaaaatctaaattagaaaaaattatttaaatatcttttctttaaatttatttaaatatctttacaagtgatctcattttggacacatacatatatagagaattacaactcaaaaaaaaaaaaaaacagacgaagctctagttaattattatttttataccatatagaactttctttaataaccatataaaacaaagtcaagatttttctttttatattacataatattgtacggaaaaaatgttatatcgaatcgacatatatatatactccaaaatcaattttttctatggagagtttcaactgagatcatatcaaagaaactttattttcaccactcataggttcaatcgtacttggtgaaaatatcgatcatttgtacttaaaatttaacttcttttcacataaaaaaaattgtgcttttctttttcgaaataaaacctaaaaagaacaaaaaaaaa

SEQ ID NO: 51711 - DNA, 722 bp, Cannabis sativa
ctaattagcctttttttgtgatcgaatccattttagccaatcttgaaagtggagaggccaaagaatgtattcaagccaatattgtacaccgcagcactttttgagaaaaactacatgcaacgaataaataagaatgactctaaaaaacttgttcacaaacaagacataacgtcgaattcaattggatgttgcatatcgcaagtttatctctagttagttaatgttcattcagagcttgccacagaataaacttatgtttaggtacattgagtctacaccaaataaactttatgtaattcacctgctcataaatgaagctttgataaagcttgaagcttgttagccttgagcttgccactaatcccagcattgaagatatagtcagctgaaaagatcttcttaagattaacttctttcctcgcaccaactcacatcaaccttcaaagaataaaactaaaattcatgatcatttaagtaaatatcgcgcatcaatttcacccaaagaagatcttatttcataaaaaggtcccaaataaatttagctaagatatcattttctatttagtactctctctaaagcttttgataaacaaacctccctcccaaaaagtaaaatggagcttgttgtgattctctttaacccccaaaaaaaataacaaagttcatcaacttctttcacaatactttgaggaagcaagaaaatactcatttagtagcttcgt

SEQ ID NO: 51712 - DNA, 845 bp, Cannabis sativa
aattattaaaaggtgtgtttataaatttggaatgcaaataaaaaataaatataattttgggaggtgggttggtgggacccgtaaaactgggaataagtggaagtgaagcgtaggaaagcaacgctacctggctaagacacgtcccacttttttttttttttggataaatacacgtcacacttagtccaagcggttctattattattaaatcacgatttacgagcccctctactgtaactgcatgcttcacacgtgtcactaaaatccctcttcttactccttattactcgttgctcctttaactgtaaactcctaaaacgacgtcgtaacaccaaccttcctccacttgtcattatttataattaattaccctatacacaactggataaatttacttttatctggacttaaattcgatcaattttttccttcaataatttaaatacgtttatatttttcaaacatgatattatatagtttgatctattaatatttacgtagatatttccattaaaaaatatatatttacgtagatattttcttttttgaaatgatatatttatgttgatatacaaaaaaaacattataaactattgaatatataaatatgtagaaacgtattttgcatttatctgtaactttcaatttaaacataataatgtcgttatcacaaattataattaatttatatttgattttttttatatgaattttatatttattaatatttgagtagcccgtaatatgataataaataataccgacataacgcaaattttgagatgactcttttaatgggcaatttggtaaatacgtagatgaattaaattaattaattaattaat

SEQ ID NO: 51713 - DNA, 1213 bp, Cannabis sativa
tttttattaactcaatataatgttgagatataaatatttaattataactgtcaaataaaataataataaaaaaaaaatgtaaggtcaagttaactcgtttaaataagattaattaaaatttttgctctatgacatgtaataaatcatgtatctaaatttttaggattattaaaaatgctttttaaattattaaaattgttaaatttaaaattttttatctaattttaataaaaaaaattaaacatgcatgaaaattcatgaaaattcaaaaagtatgatgtagtacaaattaaagttcgacatatgatttagtgaatattaaagtctaaggaatataattcagaaatagaatgaaattaataaaaatttgaaaatttttaacggtcaaaaaatttcagtaatataatttaatacaagaataaaaatcctaattaacctttaaataataataagaattaaaaaaatccatgaacataagttgattttgtaagtataaaagtatatatttataaatataaaataacctcataagcatgagaatgccaaagcttttgttcctgtggaggtaaagtctcaaacaccttatccgaaacgatatattccactcctgttaattaattattattattattatcaaaacgacaatcttaaacaacaaaacgacatcaatcaaaaaaacacaaaacgaaaacgacaccgttttactaatattaattaccaattaggtgagcggagatatggtcagaatcgtaaacggcgcactggagaaaatcctggttgagtcgggtgacgtaatgatgagtcatcagctgacgtgtcatgtcgtgactgtaaagagcgaagctgcacacgtgttgattcatcttcttcactggtttcaacgactgcatcatctctgctcctgcgtccaacacgtgttgttccaccgtcatagcctttcccggcggtatcttcttcttctccggcaccggcatcggagacggtgacttatcactcgaagccatttatagcttttattatgtatgagagtttcatttggttatatatatagtggggtttgagatgacgtggagggttgtgagggctccacgtaagtagagtagtcatgcatgaggtgatgacgtggctcatagttatcaacttttggtttacacttggaatgcatgtatgtgttcgccttttattagattttgtcgttttatcaaaattttgt

SEQ ID NO: 51714 - DNA, 3522 bp, Cannabis sativa
  modified_base (1213)..(1219): a, c, t, g, unknown or other
  modified_base (1302)..(1303): a, c, t, g, unknown or other
atataaaaaataaataaatattttcttttctttttctctttttttttttccttttcttttttttttcttcttctaaatagaacaaaactctaatatctcttcacacacactctcctgatttctatctctcttgtgtgcagcgccggccacccaccccaagagttcttcgaccaccccaagccggctagacgagccacgaaatcaaattcaacgaccaagaaatctcaaacccctatcccccctctcacactctttctctctctggatttctatctctctctttcttgtgtacagcgccagccaccaccctaggggttcttcgaccaccctggccacacaggccacggaaccaaaccccaagacctagaaaacccaaccacaatccatcctcttctctctctcctttgatctgtctctctcgcccttttaagtgttttactattttttgtgaagaagaaggagaaggagaaagagaaaatgaaagggaaggggaagagtaagagacctcagggtctcggattcccataatgagaatggccactaggccaccggtggtccccgttctatccccgttcaaaccatttataaccaaaatagaaccggttatataacataatgaatgtgtattttaggggtagatatgggatatgtgtaattatttggtgggttagagcaagttgaatgaatgtttttgtttgagttattttatttaattagtttgtgtgtgtgagtttttatcttagttgctttacaaaactagtttttttgtcttaaatttttaactagttgataaatataactgatttctttatattatttttagttattgtatgttattatttgtatttatttattttgttatggaagcagttctttttatatttatgtctcaataatttttagaattgatccccacttttttttaaaaaataaaataaaattataaccagttttatgaggtattatgtgttatgatcatgtattttattgtggaactagatttgtttttaatttatgtttcagtgttttagaaactgattttctctttattttttaattgtaatcggtttgaattattgcgtgttacttgtttgtattcattatgttatataaccagttttattttatttataatcggattgagttaattcgtattatttgtttttattcattataacactgatatagaataagttctattttaattataacnnnnnnnagttattttgtgttatttgtttgtggtttattcatttttacacataaaaatagtttttttacatttttacgaaattctacatnnaaacccctattgcaactagcgccgcaacctaaattgtaacaaaaaatcgtacagaaactcctattgcaactagcggtacaaccactttagaaacccaacccgtaaatttgaagaaaaagttaaaaaaaaaaacagtatatatggtaatttccctatttgttttttattcattattttacagaattggttatatattttaattttatcgatttgagttatttgtttttatttattacgttatagaaccggttctgtttttatttatatctgaaacatctacttctggtgactttttcgtggcaccgacaactttttcgatgcctgtgactttttcggcgaaacatattattacaagttttattaaatttatttattattttttttcatattttaaactttaattattttttaatttcatatttttttttacattatttatttatacgggaattatctcatatactattttttttattttttttttcaaatttacgttttgggtttctaaagtggttgcaacgctagttgcaataggatttttattgcaatttaagttacaactctagttgcaataagaatttatgtgtaaaatttcgtaaaaatatataaaaaaaaattattttaaagtataaaaatgaaaaagacactaaaaataaactctctaatttatcatcttaatatatacatcaaaaagcctttttttaagagttttaaaaaaaaaaaaaattgcttagatgaatctcgaaccatctttcaacctcccataaaatcgttaataataaccgccttactacttgtgatcttcttcttcatttattaaatataaaacagagtaagaaaagaaacttcgagaaaatcagaaatcccagctaagaaaaatgttcttcttcttcgttggaggagtagagcaacaagtgagacaggtactaaaatacggtgcaggcagatgcatttcgtgcggttccacagctgatctggttcactacgacaaagttctcaagctcttcttcgttcccacatggcgctggcctggaaaagaccctcttatgcactgtaacagctgcaatctcttttacccccaatcattctctctcccacctctctcttcctccgatgattcctccgtctctccgcgttgccgctcctgtgatcggattcttcagtccgactttagattctgccccttctgcggttcttctctctgaactttctttctatcatttgggtttgttgcgaatgagatcttctagggtttttctttgttcatgtattttgagtggggtttttgacaattcccaatttctcttgcttaaatttcactcaattgatagttactagtattatacatataatttttcaatccctgttgaattgaaaaactggaaaaaaaaatattcaaaagaacatgaagaagaagaagaaaaaacatgaaaacatgattagtttttacattagctgctcaaattagtttgttagatttttcaaagctttgtaattttctcatgtaatatataaataaaatatgtgtgttagatgagagtaagttttggttagcatttgttctgtgtgatattctctccaactctcctaactagaaattgctttaattttccaatttcctaacttaatattattcatattttataatttgttattgatgatgagtctcttaagtatttctggccaaagaaccaaacttagattgatgatcaaagaaaaatgttaaaaggtaatcttcagagtattacattgttataacattgttatcaggagtattttttttgttttttttttgtttttttttgagataattgttattaggagtattgctattgggtatagcacttttttataggtactacttataaaattatttttttaaaattatataaaattctatatttaattatacatataagagtatgataccgtattagagaccagtagtattttgtttaattctctttttattagtttttatgaagtatcactaactagcaatgttcataatgaaagattagtggagcaatgttgtatgttagtgataactgaagttagtggaaatgcagaagttgaagacaaactctcttataatccacatatttttaaatctgaggcttgatcttttcctcttatttttcagactacttgaattataataaattagagctttgtatgtgataaaaaaattaaatacagtttcacggaattttaaatat

SEQ ID NO: 51715 - DNA, 1740 bp, Cannabis sativa
  modified_base (1693)..(1696): a, c, t, g, unknown or other
caagaagagtgtggagacttacacgatccacatctttcaagttttgaagcaagttcatcctgatatcagaatctctagcaaagatagagatgcacaagcattggcaagaccctaggcgaactactagctggccggccaagggtgacaactcacataccgggcagtctccgaatgtggctagctggccaatgcacatactacgctctagcagttgtgtttttcccataagccttccaaaatattctaaatcgtccacaacacacctacaacttcggaactacttgaactgcccacaaaagtaggaaagcctcgtcagagtgtaactgccctattttctagggatatcttccatctgttatgtatttttgaataacaacttgtaaaaccctaacgcttgataaaaggtcttaaccgtacgtgaaagggacctgaattcatccattcaacacatgcacttaagagctcaaaagcactaagtgattaaactctctcttttcttgtcatcacttcacaagtattcacgtacacattctcatcatcgtaatactgaagagagccatagctagaaatataaatatttcagcctgtaatctgcttagtattatctcaagagtgaattaaaaaaaaagggagtaggtcattacatgatcaaatgggtcgaatctctataaatatttgtgtcttttacatttattatcatttcgcatgtgactgttataaacaaaattagatcctaatcaaactcctcgttaatcagctaaattcacaatcaacaactttaatgtattcaattaatatttaacttattaagtttttaacattatttatactatggtgctttcaacttttaaatatatattatacatttatttattttttttaaatgtaattatttgaaaacaaaaatctaacaattaaaaaaaaagatcaatttggataggttaagttgtccaaaatctgtatgaactgatgaaatcattgagcatgttaattttttttactaatttttaattgggtgggttagtatttgatatttacaacacaacattaagttgttaaaaatatattataatctgatcaaatcaagcgatgtgtacccttagtaagtattatcttaactttttatatttggtatcatatgtgtatactacagttatggaagttatcttgtcatgtttttttttcactaaattatagtgtgtttgtttttggaaaaatatatagtacactttctcaaaaaatgttttgatatacacctcctatttgtatttaggaaagttttatggtctatttttttttaataattatgtacgtgttagttatttaagaaaacttataaatgttagaaaattcttaatagtttatagttgaaaataaaattcacatagtttattactatgtcgcaaagaaaaacaatcacacatgtaacaaaatatttgaatcttatttccagcattgtaaactattcagcatattttgaaaatagattatgtaagaaactctcttagtaagaaactctcttgaatatcgaaaaaatatagggtgtactgaaacataccactatatacttacctttaatttttttaaggtaattttatcactataaaatattagaatatatatttttaaataaacaaaaaaaaaaatgagatatttagtgcatgtttggcatcataactaaaaaattgttttnnnnttttaaaaacagaaaattgtttttaaaaacaatttagcttgttt

SEQ ID NO: 51716 - DNA, 1451 bp, Cannabis sativa
agcaggcaggccaagtaccactcagtaagtacccaaagtgcatatataaataacataacatttcaacttaattgttgtgaattaattcattaatattacataattatggcctcgtttaaggaaatagtgtatgttggtgtcacaactattatgttgttggttgcttcaacttcagccgttgattacgttgttggtgatgattcaggctggactattaacttcgattaccaagcttgggctcaggataagtcttttcgtgttggtgacagactaggtaattaaccactaagggcgatcctgagttaaaatgagtaggcaaaaaaatatttggtctttcactctaaagataaatggtatttttaaaatattattaagaaaatatatgtatatttttttaaaagttatttttttagataattagaccataaaatttctaatttttttacttttatactgtgggcggaatttttttcaaaattactgtgtagattttatactgtgtactgtgttaagttttgactgttattttacggttgtttttcagttgttcgactgttgtttttaattgttcggttttgtgttccactattgttttctaaatatacgatatttttgaaaagattttcgtgtgatagtatttttgtataaattaacccaaattttagtatttttgtaagtttccctttttttggacccttaaaataattgggtccaagcgcaggcctaacccacttatccttagagcgggccctaactatttttaaaaaaaatatacttattaataataatatgaatacttaatgatacattatgtacactatatgcatcaaaaatattaaagatgacaattcacgacacaacacaatgatacaattcgaaatatgttcactgtcaaaattgacataaacgttttttgttttcctttttcctttgcagtatttaagtatccagcaggggttcataatgtgttcaaagtaaatggggcagacttcagacaatgcacagcaccagttggagcagtgccgttaacgagcggaaacgacgtcgtggcattagaaagtccagggaaaaaatggtacttgtgtggtgttgctaaacactgtgcagtaggaaaccaaaagcttgtcattgttgtggctcccaatccatggtctcccttaccttccccatctccagctccttcaccacttcttagtgatgatgtatctgatcaaaaccaagactaattaatttactacacacctaattaaaccaagcgatttaattataattaattagttaatatgttttctccaataaattaatcattttcatgattataattatttgttactgttttaagtattttgattagttttagtcccgttataagcacaaccctcatgtttatttagttgtaatctgctgagtttggacacctatgtgtgtatgtgtgtgcaagttataagaat

SEQ ID NO: 51717 - DNA, 971 bp, Cannabis sativa
ctaaagtcctaacaagttatttgtcgagaaaagcatcaaggaaagagttgcttcatcatgttgagaattatggtatagttctgattgaaaattatgagtttatatcttaaaattaattaatgataagtggagtagtctatatttttatatatagctaaatactttactatttattccatatgagataatatccacattacactgcaaccaaaattctatctctaatcttttcctgtacacgtcacccaaaacttcaataccaaatttgtttttggagctaaaattttttgtagcgtgttgtagttcctcatgagtgaagcttttgagattttcaatattggtgagcccctcttctaggttgtctacaataaatgtgttaggtttatttttatgtatttttatagtctaatttaaggtgtgttttaatatttttattattttattgtgtaaatttgtatttggttttagtttttatttattttttaggagaaatatttggagatctttaattttagtaattttagtgttctgcaagtctttttaagcaaaaatgaaaaaaagaaacttcttttaacttggatggattttctattgcttaaaatgagtcaaagattgcattttttagctcttaattttgtgttcaagagtcaaagatgggaacttttaaagtttaaggtgaaaaatcaaagaaaaaggaaacctaacctgtaaggtcgtggccttacccttgttcactggaagaaaaattgaaatgggaaactactaaaatcagtgaagagtgtggaaattcgtttgtaaggtcgcgaccttcgtataaaatgagaatcttcaatatttggctctatttaaagtgggttgagtcaaagctttgacatcattttaaaattgagaggaattctgagtgtagaagaagagtaaggagcagaaggcactggtggaggattctaaatagtgttatttctcctctatct

SEQ ID NO: 51718 - DNA, 1387 bp, Cannabis sativa
  modified_base (525)..(534): a, c, t, g, unknown or other
  modified_base (1351)..(1354): a, c, t, g, unknown or other
actagccctacccagcacctagccttgctttttatgcccaggtagggtttggcccccaacatggtaaatctcagctcccatatgagatttttacactagtttgacctcaaacgagatcactctgtcatgacagttacagaacaagactttctagagggcaagtcattacgaaggacaagtcatgattctcaacaacatgattcttataatgataggaaaagtcaccacgtgactccattaacatcaaggctctgataccaaagctctgatacattatcaaagatcaatgcatcagactccaagatcaatggctaacattcacttctagattaaacatattaattgttcgataaatttaatatacaagtatgtgtaatagaatcaagtaatataataataaagtagagtatcgttcccatgatgattgattattaattaccaatcaattaattctttgtttctatttgattaattaaaaagttttagaaaaataaataaagcaaaacaaataataataataataannnnnnnnnnaataataataataataataacttgagaaataaaaaaataagaattattatgattcccaactattctttcttttacttctaaatgcaattacccaatttaccttcttcatattcaattgacaacttaaattaagtagttcagcatttggttaagctttacaaacccaatctatatgaaaactccctatattcttagtaaagtttaatcacaaagaaatactaaacaaagcaacccataaaattacaatctaaatactttcgtcctaaattaatttgtatccataacaagaaaaccatattcaaatctcacttttcagaattttgatttgaattcatagatagaaaattatagatggtcaataaataattacaaaattaaatgaaattgcatgaaattaaaataagagaagaagaagaaattaaataactacattaattcataaaagaaattaagcgattcacataataatccttaaaagaaattagctcatataaataacaaaaatctaattacaaacataaaagataaaaatataagagaaagaacactattagtatttggagtcttgtaatgatgtcttctgctccagtcatccttatatgctcaaaattggtctctaagttagaatggtgcctaaaccctagctctaactcattttatagaaaaaaattggaaagtttctagttcttttgcaaatgtcgtggcatagggtgcaatgctgcatcattcactgagtctttctaaatttctaaaattctactgcgacgcctaatggtattttggtcataactctcttaatattgttgggttttatgcnnnnaataaaactcatttcaatatactcagatttact

SEQ ID NO: 51719 - DNA, 1226 bp, Cannabis sativa
atttgttataatttgaacttcttaatggggcatttggtatggtgttagatatggtgggaatgagaatgtcaactcaactcatatttaataaattaaaagttaatgacccaagaatttatgtttccaagtagattttattttttatgtttatttgatggcagtgttaattaccttctgacaaacacacaaatttgtgtaattaccttcaagtaaactcaattccaattttctcttaacatttgaaacacatccttaacctatgttgcctctaacttaagctaccatctctaaatcaagtcacctatcaaacacacaataatagatttataaagaacttacttggaaaaattctagaccagcttatcgaaaatctataagcatccattcccatctccttaaggtattgtatatcttcctgttcaaagttattgaaaattgatatttttttattttatagtaattaattatataaggatatgtacttgattataatttatattaattattttaaaaaaaaaatatgtgtacttacattataacggtggtactgatccacagcaacatcagcattagtacgatcacttatcataccttaaattggaacaaaagaataagtcattgtgaagaattatataaaagtaataaaatctatatctaaagattgtacgcaaaatgattgatataaagtgtagaaataatttaggaatagtggatatgtaaatatagacaatcaaataataaattatttctacttatgtatggttgagtcacttgagtgtatagtataaaaatttatttattccacaaaataaaagtatgagattttatttaaaaaacttaatttgtagttattgaactttttaaatatttttaaagagaaacaaattaaaagagaagaaaccaaaggataatttcttattgaatgagtggcatcaaaggatgctatatattacactttgaatagagaaaaacaactctaactactaactgaaagttacagctagcaatcacagcttagccaacaatcataacagaaaattggcagtaactcactaattgtctcaacaagcccctcaaactcaagattgtagcatcttcaatttttattttatctctaaatacattcaactttacactagaaattgcatttttttagtctacctgcaatttgaccaattaaaagttttaagtttgtaagcagaataaatctaatatttatttttagc

SEQ ID NO: 51720 - DNA, 1733 bp, Cannabis sativa
  modified_base (67)..(80): a, c, t, g, unknown or other
  modified_base (578)..(587): a, c, t, g, unknown or other
tcaaagttcagggggaaaaatcctagccttatctaaaagagatgttaaaagagagagagagagagannnnnnnnnnnnnngagagagagagagagagatgtttgtttaatataatctatattattttttattattttttttaaataaaattttaatacttgttagaaagaaaattttaataaatttataaagagaaatattaaaaatttattataaataatgagatgaagtaacatgataaaataaggagagagtatgtgataacaaagataataatgatatagaaagtaatgtgtaataaagtaaaaaaaatatatattaaaacaacagtaagaaaaataaaataaatttcaatgcatatataatattaaattcgtgttaaattccgtttcagaaaaaaaaaaaaaaaaaaatgttaaattttgaattataatttattaatttttcttttcgaatttagaaaatgtgtaagagtaacaagttacaaattttctcatttagttgttatttgtatcagttataagcatgcaacaacaacaaccaacaacaacaaccacagcaacaacaacaacaacaannnnnnnnnnaataataataataatagaaaatattaactttagaatggatcattgtaacctttttttttagcttttatagattactagttacctagtattcaattacttgtctgctacttactatatattgtcttaaaatataaactttggtgactaaatagtacaactgcctatgttaaattaaaaagtaaatatgacattaccatgttactataccagaaaaaaaatacatatatgatgagagtcaagaacaaacttttactgagtatgcttcaaattatgactaagcacttagaaaattaaaatgaacaagaggaagatgatgactaagaaaagagaagaacaatatgttagaaagagggaaataataaaatgtatatatataaatataaataaattaaacttaaaaatatatatcttcactaaactttcaaaaatatgaatttctttcataaaattaccatgaatgagcagacaaaatcccttatgtactttaattaaaattttcaattcatgaaatatagcaaagctaaaactatgtaataatttatataaataatttgtttgtgcaaaatatatattgcatacctacttagagtattatataaatttaccagtatctttatttatttatttatttattcttttgattaaatcatcaaatatttttattattaacattttaccattttttttctattttatatttgcacaataaaatattcagaaacttttaaaatatgctacaatatgttttttttttaagaaacattttaatttcgaagaaaaaaaaatagagaaagttgtatttaaatgttagggaatttttcatttataattttttttagcaaatatacaaaaatatgggttttcttttctgaaaaaaattattttatgagaaaaattcaagaaaaaaatttaaaaattacaggaaaatagtttaaggtaaccaattaccgttactttcaaagagtaattggttacatacttttttggaaaaaaaaaattatatttttatacaaatgtataattttcactaaatttagaccagaggaaattacattgtatactcacttcactttatttgttttcatttttacctccattttcatattttttttagatatacccacttttatggatgatatctccatt

SEQ ID NO: 51721 - DNA, 1412 bp, Cannabis sativa
taatatatacgactgtaaaaaaaatagacaaaatcttggatgtcgacacggttggggcatcaatgtaactttcgatgatgtattgttccttatatattattattattttatatgtatatatatattaaattttgtttaaaatataatataataataatatatatttttacaaattttggttgttatgattagaatgaaaatattaaataatattatatttagtgttggtgcaacactatatttagtaattaatatggttggagacctttattattgtaagtattaaactacacctatcactataatatgaattgttgtttgtctatgcttaataatttttttgaaaggtaatgtttagcttttctaaaaaaaattccaataggaaggtcttctcaatgctctaactctcacaccggatataggtcgaactgtcttacggacattctgaacccaactcattgctttaatgggtgaacatgcccaattctagaacatactacaacccaggtggcaaagagctgacatcaaggtgccaaaccttcactacaagaaatattactttaatgtgctggcaaaagtttggtattacgctggtaaaatggaatttacttctgatgtgttggcaaaaagggttggcaaatatcaacgttggtattagaacttttgctagcacaaaataaaaagcgctggcaaattaaaatgatttttcccagtgcgcgaatatactggtaaaagttagattttagtcactgcaaacgtgtgctgataaaactttgacctttttgccagcacagattgcaaaatgcgcgggtaaagttttaccagcgcaataacgaactgtattagtaaagtgacatttcttgtaatgctttctgtcgatgtgagctcctggaaaagatctttattttggcaaattgattcctactctttagctttcttgcatcttcagtagtggtccaagttaattaaagggcacgtaatgaacttctaccttgaaggctcggtcctagatgaatatgggtcggacttgtgtatggtacccctttttttttaaaaaaaaaaaaaaactatttcagatttatcccaaattataaaacatttatgtttttacagaattttaaattttttttatatttttaccaatttttttcttacaaaccattgtttatacgttgttataaaaatataaatattttcacatggcagaaatgtaatacaacgttgtgacaatatgaaaatatcattgaaagaacacaaaataataaaaaatataaataaaaaaaaaaaaaaaataataataatatttttgggtgtattatatatgtaaatttttccttaattttcagaaaggaagaattttatctttatgtttttttctcaaagtttacaaaaatataatttttcaaacacta

SEQ ID NO: 51722 - DNA, 1082 bp, Cannabis sativa
cctatttcatacccatagagtgcacccaccactgaaagaagatcacctttttgtccaatgacatattctacgacattctcggtacgaacatggctgcaccagacacctgccatcctcaaatagtccccactcgcacggacgatcgctaccacgtgaattgggcctcactaaattggcccaaaattaatatatattgtattttatcctatcaatcgacatatttgacacctaaagaccctattgggtctagatatgctcatacccagttctagcctataaatagaacatgatcgcttcatgcgaagagatcagtcgattggtggaagattgatttatgagatcaagaattgagaattaaggttcttcgtctagagcaaaagtgcttgtataaaaataccttgaagcttttctagctcaataatattgactcgtagactagagttcatagccactcagaccacataaaattcttgtttcttcttctcaaaaatctcggtaaacgtatgtaaatactcataagacacatacatatatacttttatatacatacatacaatattattatatatacaatcatatatgtacatacacgtatatattaatatacatacacattcacacatacagttatttatatacatatatacataatacatacacatatttatatacatatatacataaaaaatacacaaaatatacatataaatacatatttaaaataaaaaattataaaaactaaaacaatataaatatacatcactactacaaaattaactttttgtgtcggtcaacatgtcaatcaacactaaaagacgacacaaaagtttggttctaaattttacgctagttgctatttgatgctacttttcgtcggttaaaaataaatattatttttagatattgcgctggttagaaactgacgtcaaatagcgtcagatgaaaactgacgtaaacaaaacttaaaaaaaaatctatattatactgattaatgggccagcgcattacacctacctaaccctagtactatatatcataaaaccttaactaaaatagccgcccccttcagctctctctctctc

SEQ ID NO: 51723 - DNA, 1037 bp, Cannabis sativa
  modified_base (838)..(846): a, c, t, g, unknown or other
  modified_base (920)..(922): a, c, t, g, unknown or other
  modified_base (989)..(1004): a, c, t, g, unknown or other
tcgattccgataaaaattgacaaagttatgatgttttgaaaatcggggtccattgatgcacacggtcgagcaatcgcacacacagagcactcagacaaggtgcatttgcgcgcgcggacaagggacaatttcctgtctgaagcccggatgtcccccctactcgcccacgtgatggcacgcatgtgaggctgcatctgttgaggtttctcggccaaggatcatacagatccttctctccgcacgcggacagggcattttgcagcctgtctaggctgcacgtgcagcctgtctcgtgggagccccaaattttttatttttgtgggattttgccccaaattttgaatttttgcaattttcaaaccttaaaattaaattaaaatattggaacttaaatatcaattttaaattaataatatttaatttttaatagaatattattattttttgatattttgaggtttaaatttaaaaattaattattttattttttaaattatggttagatttaattttttttttagtttctttaatatttatatattatttaattataagaatagatattttaatattaggcatattttaaattaaaagataaatttatctttttaatttgaaatattatattaaaattaccttatatgataaattaaataattaataaatttaaaattaacctagatatttttttaattgatataccaaccataatattttcaaattcaaaagttggttattttataaatatttaattgtttataaattataagttagaaaaatgatatttatgttatttttatatcattttacttattagaaatttataaattgtattttnnnnnnnnnaataacctagatatttttgtagatttttgaataatgcttaatttgagaaattttgacatataattaggataatnnntatttatttattattttattattaaaataataattgtctaaatacatctattttaaaattggtttannnnnnnnnnnnnnnnttattaaattataagatttgaaaagatcggaag

SEQ ID NO: 51724 - DNA, 1362 bp, Cannabis sativa
taatgatagtcattggtggatttcaatcttcatttgcttcggaccaaaccaatccgtgaacactcctactattaacataataacttctgtcatatataaattttttcatatatatttttatttttattaaatatattttaattaaatattaattaaatataactaaaaattaaattaataatttaaatataaatgtacatatttacattactctaaataaatatattacacaaatattttaaaattactctaagtggttaatagttatctaaacataaaaaaagaaaaaaaaatattcttatacaagtgttccactcatcgtgaatcaccgtaagcaattttgttaactactctcgatgtaacggtaacaaatcaatttttacgtcacatcgagattgtccctcaaacagtaaaaagaacaagtaaatatttttattagtatatatattatattgtttgttaatataataaataagataattaattaaaaatatttttttttcggttatgaatctgccaacatttgaagatttgacgatgtcattgatgtatctcaagacataagaactacattcattatttttagttgttttgggcaaactgcttctgctatttttggatacggtccaaggatcgcagtccgatcttctcatatgccttgcttaaaaaattatattagtatttcaattaattaacataacttagctaaaaaagtttttatacagagagtaattaaatattgcctcctcaacatataattaatttattttgagaggtttgtggccatctataaggtctaaatgtatactcttctctgacaatctcgagtatctaatgtgcactaatatatatatatatatatatataagatagtttaaaaataatttcaagaaataatataaaaaataattttaaaatatctcttaagttgtaggctttacttgatattctaaggaatgaaaaatacttggtattgacttctcattgctcccaaccaactatccaatctagtatagccgcattttgaaactgctggtctatattttttttttcaccgtagagtgtaaaaagctttgggtcatgaaaacctgtgtcatttcagataagccttcccaaatacaccggcattaaattattaagtgctaaattttttgaaaaattttagtagaaattctcctataaataggatgttgggacgttggataaattagtatgatattttccattttgggcctaagccctcatggttttgttcttgggcatcttcccaaaagatctcataccaatggagactgtgtccatccttatatacctaagatcctttccatttctagccgcgggactttggttgcacactcaata

SEQ ID NO: 51725 - DNA, 1058 bp, Cannabis sativa
aaatagtagcaagtaaattgatagttaaggatttcgccgcaaattactctatatacatatatacttgtaattaattttgtggttttttttttttgaataaaagcttatatagataaaaaaaaaaaaacaataattagatctctcgatcattatataagatgtaatttggtatagaagaaaattttactataagcccaccccgctacattgagggctataaaattacaaagtttagaaataaacgaacaattacaactaaatagaagattagagtgatgttttacaatatagttatcaatacaccaaataaaacagtttcttttcagagtcttgataaccgtctcaaaattactctcaatcataaattacttgaatataattaattttatagttcgatctataaattatttaaattaataaataattcatgatattttataataatattttgtaatttaagtaatgttacttaataatactaattaagtaagtaatattacttaattacattaatagctatggtgctcaacaaatgttaccttaaaagcacacttggttaaattgtaaaaaaaattagaaacattgacaaattacattccaaaaaagagttattaaggcttttttatagtacactacataattctcaatttcccatatccagtttaacctcacaactttaataactatgtagaacatattctataatcacaaattacaagtctttctttgtagaaagttccaactaccgtaccaacccaaagtatattcctaagatgatctcgtgccattcattacatttttcctaaccgtcatgttgcacttagtcaatataataatgtatgctatacatatagttattgagtattttgttatttctcactcaccaatattcacatttctcacatttaaaccttaaaagaatttgacacaatcccacaaactagttcttgattcctaaatcgaaatgagaatcgaagcagaagctctcctcaaatgagaagccatgttacaatgaaaagaaagatgttttataattttttttttctcttcccaaaaat

SEQ ID NO: 51726 - DNA, 695 bp, Cannabis sativa
gttgagaataatccatttaatatacggctcaatattttactcattatttcatgtggaacaatgtctaggataaaaaatacaatacaaattatttttactttctctgtgataattaaaaggaggtgcataagtgttggagagactaagagtgttcatcaaaccgtgcacactacacaaattatttgtaccgcaccacaccataaattttttgcagtacggttgtggtttgttattttagcaaactgcacggtacggtacggtttacacttttaaatttaataattgcagtttaaaccgtatcgtactgtatattataaagttactaatttttacaatatgtttttatttttttttttataaaagaacaaatatatgtaatatatgtatagattatattattttttagagacagttcaagataatgacttagtgattagtatatatgttatgatgttaaaactttaataagatattttttttgtattattaaaattattagattgatttttaaattttcattataatatttgattataatgatagtgtaaaccgtttaaaccgcaccgcaccacactgtatctttcgcggttttaaagtctcgcagtgctgtttgagaaattacaaaaactgcatatgcaatttgattaaaaaaaaatacaacctgcaccgcaaacattttaagagagaccgaacat

SEQ ID NO: 51727 - DNA, 863 bp, Cannabis sativa
tatttatttgtttatttcattttaattttagtctaatgatatttttgtttttatttacaattaacagtgtactccttttaatgtctccaaccaaatgaagaagagtttttgaagaacgtcactggagctgatgcacctctaattgtggtaaataattaaggattattatcctaattaagaaaataccaggttttgaagatgatacctcctagttttgccttagccgaaagagaaagagagagagttctctattttgttttttttttttcttaatttttgattttccttcattatccaacatactgcatttcacaacactaaactcagccaaatagaaagggcagctgtcacacccacacagaaccacctaatcccctaattaaaatgaataaaatgccctttggtgcttaatcttaagctatttcaagcctaggggtaaaattgtcaaaacctataaccccgctcaatctcggtattctattttctccaatatacatagcactaagaaataaggttctagacctacccatgtgatcaaactagcgatccatcacatttttccgttgtcgccgagcaaaaattgtaaaaatagcataattcacatataattcaaataatacacctagattttaataaaatctctggaattgaaaaattataactctaatgctcatttctaacaatgggacccacaaataatttaaattcacaaataatataaaattaccaatagttagtgttgattgccctttctaatccatattatgaaatacggtcattacaaatgtacatagagttacatatgataccgatggatatatgctaggcttttttgtatgaacgctccaaacttagtatgcatt

SEQ ID NO: 51728 - DNA, 1171 bp, Cannabis sativa
aatgaaatggaaacaaatttctaaacaaatgaccattctttccacatcaacatattacttattgttaatctttctaaacaaatgaatagaggataactgctgtgatgcatctcattatcacctattgacaataatctgtcacatccttcaattttgagatcttttagagaaggtagtcgtccgagtggtggaaaaaaccaacagtttttacaattttccaaccagatcgatgctaaattagaaaacgcataattggtaatccagttggagaatgttgtacctctataactttcaatcaaaagatgcttcaagtttgtatgtggtcaaagtgcatcgagtacatctaattctttttgcgaactatcagctccaacatcattgttccacctcaaacttagttttgtaaggcccttcttaccctttaaataagcctttgaagcctcctttgcttgcatcattaatattttccagaccagaaatctcaagccctccacgtagatgttcaacatctgctaactctctcattttaaacccatcaggcttatgattgtcactcaatactacctttggtaagatttgcaagtatttcatctcactgattccttttttggcaattgagaaagattgagacaacatgacaacagtaaagtttgtaaattgtacaaactacaaattgaggcaggtaactcttcaatttgagtacgagacaaatccaaataccttaaatgtatcagactggcaattgaagcagacaacttcttaaaagaaacccaacttaaagaaagcactcttaacaagcgcttttgttcccagtcgactaagatcctttactttggagggtgatccccaatttccaacacaggataatcctttatctgaatgtaatgaagaaagggtggggctgtgacagtgtgttgaataattctcgaaagcaaaacctccatttattcacaatcccatatacagactaagtttttaagaagagggaataaaattcattactaaatgaccattctttcaacatcaacatatcgtcaattgctaaacgttctaaacaaatgaattgaccacactatcacaaccttcaattgtgagatctttcaaagaaggtagtcgaccgagtggtggcttaaaccagcagctttagaatctttcaaactaacaatcccta

SEQ ID NO: 51729 - DNA, 2078 bp, Cannabis sativa
gtcatgatgagggcagagccaactgagtgcttaagggagcaaactgtagtatcaacctagcttctagaaggctagccgaccatgaccttaacaggttagccggccatagaatcattaatttggccagccaccacctccacaagttggtcggccatagagtcaacaacttgtccatccatagcctcctccaaatggccacataatgcttcaatgtggctggccacctagtcttactctggctagcccgatccaccaatactctactctcatacttctaatctacaatgaccaagaggtaaacaccatcttgctagcaggatcccttgatcagaaagaagaagagcccaagccaactcaaagtagcatggctacccacaaagagttaccaggcccttcaacaaacagattgaggaaagaaattcttcgtaagagatttactccctgaagaatattccttgacaacaaagatcctggaacaagcatgtttggaccaaattgaaaaggtccgcaccatgttacaagataacaataaaggtgcatacaagtctagtgagtacaacatgaacttggagttggtacttctacccaaacacagaaatagggaacatctcgataagtactctcaccagccaacttgtcaattagttcctctaatgtttcaccatgtagggacccataaaagagctagtacccattgtttttcagcatggctcccatcactcttcagtgattgtcgttgcgtggtaagccgcataggggtagccactacgtgatttcaaaaatagacactaagttgtaagtttttgttacatgtaagaccaactgtgtctaaaccacttactaacaaagataacttcttaaagttactctttgccagtttcacatgcgtacaccaggtagcaccccccaaaaaaaatcccaagtaaggttaatgaaacttggtgaatttcaagtgaccaagagaccgtatgtctgcccgctcacttggggggcacctacaccgtataatgcatcgaactagcacatagaacttatgtagagaaattttaacgcttagaataagctactaaacctgtctctaagtgaagtgtaggcatactctggcttgacataaagaagtaaatgtggatacttacatgtcaaggccataaaaagatagtcaggaagatcatatgtccatgataaaaggttttacggctaaatgatagtattgttcaaaaatagagggcatataggccaaaagcaaggacatgaaaaccttgagatcgaatatgaataaaaaatcagctcacatgcataaggccaaggcccaggccgactagggttcccaagccttaaaagggtcggtcagggtcccatgactcagtcgagaatgggccagggtcaccaaacttaaggcataaacaggctagctttatagggtgaaaccctagagctgcccaactcccatgattaagtcctagggctggcaaggtctcaaacaagatctcccaagccatccaaggttaattttgaatccaaatttgtgttttttcaaaacccaaatatgtgcctcatgttctttttgactaaatgagtcaggaatcacaatgaaggccaaaattgaatctcttccaccaagaagtaaaatattatacattccaaagctgtcatgaggatcaatataccaaagatattacaaactaatatgagaatcaaaaagtttctaaaagcttaaaatgcttgaaacttattaatggaaggtacaaaaaagagatatcaaagaagagaagatgagacatatatatagagggaagatcaaagatctacaagcatgccatgcaaaaagccaatgattagctagacaaggcttctcgatggagactaccacaaacaagacgagagctagaaagtccctatccaaccagatgtttgaacaggaacttaggggcaaatgttaccctaaattttgtccacctgacgtggcatgtccacgtaagccaagatagagtacatgtgaaatacagccttgccaattacaagataaggtctctatacaaggtatggcaaaaccatcaagtagcaactgaaaggagtga

SEQ ID NO: 51730 - DNA, 954 bp, Cannabis sativa
  modified_base (886)..(900): a, c, t, g, unknown or other
gtaatgggttttatttagggcacaaaacccaacactaacctccccttatctcttctatgcaagtgatatcgagtaacagttaggggaggtgacaaccgcgtcgacaaagatttagttggttttccctttgtggactagtatccggtccattcctccagcagcttctcgagtgatcttaaggcttgtagtggtccattatggaaaggataaaatagacttgttgcaaggcaccaccttttgaccttcacattgctaggctagaaactaggggtagattcggtgtagttgaagaggctacacaacctctggatggcagagagccagaggttggccaagcgaggtgcctgtgggcgaccaggatgtgaagagcttggaaaagtttaaggttgaggaggttgtacctattaggaggaaacaatacaggacatgttatattttcctcaatagccctctaggctcatacgatgaggctgggcagcccttgaataggctatgtcagccttcagtggtcagtgtagaccatattctaaggaaggccgagcctcaggttcttgattagggggagcaatgggactaatgggtctctcctccatccattatcaacaccaagaaacttgataggattagggagagtggagtggtacgagatgtctagtgtgagcagatgtcgagggaccaacgagcacatcggttggccctcaactagatggcatggtcagagcaccacattaagtaaggagcagtattgccccttgtgagataaggtacttctttgacttgaattttggctataagtggtttggtgataccaacagcacacccttttcgaaggtgggaggatatgccaagaactatttgttggaaatatattttaccaggaacttannnnnnnnnnnnnnnatgttgatttaacaacctaaaattgaacttctaaaacgatgaattaaacacata

SEQ ID NO: 51731 - DNA, 1759 bp, Cannabis sativa
atatatataaaaaaaaaaaactttaaacgtaaaaatataatttttttacaaaaattaataccttatgtaattatccctaaaaaaaatagtttatacttagtaaaaggcaaggagagtaagatggataaaagttgagaaatgatgagaacagtggcagaaccaatcgacggaataaaaaggggcaaataaaatgtatttttacttaattttttcagtatatagtattatataaattaatataaaaagttaaataactttatccaacgcatataaaataatgtaacatatacaaaagaaaatataaaaacaggtataaatatagattatacaaaataatacattgtctaaaattgtaacctacattcttttaaagaaacaaaatcatcaagtattgaatttaaatcaaatttctcagctatctctcttttaatataggcaattaaattgtttgctagaaaatcattttcaattttatgtcggagccttgttttagtaatctccatagttgaaaatgcttgttcactaaccgctgtagatactgaaagagttaaaacaaggtaaattagtttatcaataagatagtatatctttgatttctctgtctctattaatcttcaacataattttgcgatcaatgacaaatttcgaaactttggattagtaagcacatcaagttcaaaatgcttcaattgaaaccttatattaattttctcattctcaaaaaaatcaagaggataatactctttgcaagacaacatatatcatcaatactgtaagatttaaaagcatcttttagatccaaagttaaggtaagagttaaaagctttgttgctccttcactaaaaattttatcacgcttgtgtatataaaagtcaatggtagcattaaatatatcaaaatgataatgatgatctgaacgttgacggcgaccacgtccttggacgtaacgagagctcaaatttggaatgtcaatgtcaaatttctcggagaaagagaaaatatttttaagaaaatttttccaacaattatttcttagctcttggataagaatttttttagtagataccatatttatgatattcaatcagtctaattttttttttgctgcaaaacttgacaaagaatatcatttttttgctgtaatataaatataaattcaaatgatgttatcattttataagcagcatttgcatctctgcgttaatggtaatcagattcttcctttattatatttttaagcaccgagtaagtggctccaaacatattttgtagactacaaataaaaaatgagagccccaatgagtatgacttgctcgtttgactgtaccaatttaatttgctcatcttccattttcatgttcattaatagctatcatatgtgcaatttgtgttgcttgagcagcttgttcatcatgacatttacatgaagcccccacaacaatgataacaaataaaattcaaatttgaaaaggattcatgcacataaagtatctctctggatgtaacaactaatgttaattgtaatcggtgagcaaagtaatgaacatagtatgcatatgggcaatcttcaagaaataatgcttacaaacatttccattcagcatgcatattactagcaccgtcatattcttatccatgaatattttgatatcaacacaatggtgagaaagaactctagttatttcattctttaaagtcaatgcagctgtatctctaacatgtaaaagataaaaaatcgttcttgtataaaaccatcatc

SEQ ID NO: 51732 - DNA, 585 bp, Cannabis sativa
cccagaagactaggctatgagggtgccaaatggttataaacccatcaactaatcccatacttagttagagtgggatcctaacactcttgatagttcataagctatgctgcacagtcataaaaattaatcatcttatgacactggttatcattaaagtgttaaatattaacttttttattttgttgatattgttggattccaaatgctcgggtcgaatggaaaacaaaacatttcaagaattttatggatatagttaatttgagttgtctgtaccaagatggttgctttattaggtcgaaataccagagttttatcgatttcagaatggtaccttttggcgaattttgaaactgtaattgtagttctaatttttgggctgaagagcaattcctgggtcatggataataatattgtttctctactctaccatgcttctgtgtgtaaatgcattacatattcaagtaggtaaagtgggcatctagtcaatctccatttgcattagcaagatgttgcttataaatttcgcattcctttattatatatttctacatttggtgatgcgagttcatatttcttgtagccttg

SEQ ID NO: 51733 - DNA, 1399 bp, Cannabis sativa
atttcaaagcaaaggcatataaataaataaatttatatatatgaggagctttttagggggagcatcacttttttttactcctaccgtagggcctttcctatttttcgtacttaaagaaattatatgccaattttgtaatacaacgttgtatattaatgttataataggcctcatgtctgttttcgagaaattctgaatattttacggcgtcgaaaataaagttcaaaaaaatttgttgcacgtgtgtataaaataaaagaggcatgtctggaactgaatgtttgaatcttatttttagcaccataaattattcagaatttccccaaaaccgacaggatgcctagtgtaactataatgtacaccataatataaaaaaattagtttataatttctctatataccaaaaacaagaaatgcccctatggtaggagcaaaaagatgctctcaccaaagaattttcctatatacaaaatgattggcacttgcccttttctcgactttcctccttggccttttgtcctgcagaaacaacaacttcaaatggaagaggagctaatgaagaccaatgttcatactttgtcacagctatatctgcacatatccctgcaaatcatagaacaaattatgtctagatggttaatcaaatgccatctgacttccataaataataaacaaaattaaatagacaaaatgtaggaagctgcagcaatttgtaaacataagtcaggatcactttgatatgaacttgaaaagctgtgcaaccactcaagtatgaagatgttttaaacacctcttattggattcaaaataacaaacaagagtaagccctaatgaagacaaatgtcaggaaaataattactaatggttatgttaccataactattcatgaaccatgtactaaataacaaaatgttacgaaaagaaaaataagattcaatcaccaatacaagttatagaaaaacgtatcattagcttaccatattttgaagctaagccccagtagcgagcaagccaacacctcttgagaactacttcttcctgatttttttataaaataaattaagtaatcaatttgtacataaatttaaggctctaagaagttatgttaatacacaccatctctttctgagtcaatatcattctttgtgtcattgatcgaagagcttttacttcagattcagctccactaagctgttgtacaactgcttccttcgcatcttttgcattctgacccataaaagaaatggacgaccagtattagtaaataatgatcgacccatttaaacccatacttttctcaaattatgaaaatcccctttgacaagctgtttaatgagtaactgtaaaagttaacgtatctgttcacttctagtaagagactattattctcattaaatat

SEQ ID NO: 51734 - DNA, 661 bp, Cannabis sativa
ttctaagaatgaatgaaaaaagttctaaacaacaaattagttataaaagaaaagaagttataatctggcgtattctcttaaaattttcttttgtaggataactcttcaattgagtagttatatatatctacagaaaataatgaaaatttacttaccatgtaagttggcatatgaaaatatggatacaataaagagctgaaatcattaaatattatttgttatgcaacaatcaatattcaaaagtaaaagaaaaaaaaaagtcattgatgaagtggtactttaaatagtagatagctcctcctgaataaatgagatttgcaacctcattgcaattgagtaaaagtaatctatcaaatcaatccaaatctatgtttgtaaagcaacaaaatcaatccaaatctatgtttgtaaatcaacaaaatcaatcctaatatatgtttgtaaagcaacaaaatcaaaatcaaatctatgtttgtaaatcatcaaataatattcatataaatatctaccataaatgatgtgcaattttgcttaatcaagcaataatcaagtttttctagttttccaaatttctgcaagtctttttgttatgtccaggttgattacatttttcgcatttgatttgctttgttcattttttgtttttctgccataaaggttt

SEQ ID NO: 51735 - DNA, 1242 bp, Cannabis sativa
cttttaaaatcccatactaagtgtaatttcctctttaatcatctaagcttaaattttgacgataaaatcctcaaaactactgaaatagtagtaaatttaaggtatcattcggttaactgtcattatgagttgtttatgtgtacactcttgtacacatgacacgtttatattagtacaactaatattattattttaaaaattatttttaaaattcattttaaaattataaatgataaaaaaaaattaaaaataaaatattataaattttgaaataatttttatatttttaaaataataatattaggtataataatataaatttgacacagatacaaaagtgtccacataaacaatctatattgacagtttactgtaaaaattagatagacactttaaatttgcaagcacttcaataatttggaagattttactgtcaaaatttgagcttagagagttaagggcaagatgaataatagttaagaagatttagccgcaaaaaactctattgaaatgctctaaatataatgatatgattttgggtaatttcatgaacattataattgttattgtttgaatttattttgtgattttataatgctcattgtattcaaaattaacatatagaagatgagtccaagattgagtgagagagagctttacagagaagagagaatattgagaaacctagggatcaccatgtttaagcttacaaaattttcagctagatttgagagtggatggagggttgcaaatagagattgttcactcttgaagtgacttctctcattgtgagctgagtttgtaatcttgtgttttgtgtattggtgatcccatgttgtatctcttctcctcttgaatttcattactgttatgattttaaagattcattcatcttaattcaattcatttttcattgatttcttgttctgttttgtttataagattgttgtcattgtgtttattgtccttgaatccatggtgatcttgatcaggttatgatttgcaacaatgttaattaaagaaattagttttactatatcttgtgccaattatagagctagtttttgaaaacattatagtactattctgcagatcaataataagaagacaaagattctagatcttaacataaggagattaacacacagataaaacaattcattgaggaaaagctttagtattttcatttgtatcattctcaaggacattttcatttcagtccccaaggaaaaatatttacat

SEQ ID NO: 51736 - DNA, 2544 bp, Cannabis sativa
tgcaccagctgtcataatcctcactatcttcttttggtttggaagcttgccattaacaaatttcactttgtttcgagcaacaagtgctataagcataaatctcctccaggttatataattctcgcttcctgtgagaattttaggcactaatacagctcctggattgtctccattagaaagaaaatacggattagacagatcattgaaattcgtcgatctcgaattctcaccaagaactgagaatcgatttgaaccattcgaattatccttaggaacacgattactttgagttcgcattcctcctcccctagccatgaacacagaacagaagcgtaagcaaaacgaagaagaaaacacgaagaagagagctcactcgaagacaagctctgataccatattatctggtataaaccagtaaacagagaaaatagagaagaagaagaagaaaggaagaaatcctttattgctgagattgaaaatgaatacaacagttatgaaaatacaagggaaacaatctttatatagctgcaataacagaactgttacagtcataacaaccataaccaattctaactaatttgacagctaagaccaactaactaactactaacaacttcttgataggacgaattcgcttaggaacttcccttggtattcgaagtgaagttcttatgtttgttctataatgatgagttcagaagactagtgtatttattttgtgcattgcaatagtttcagttgaactaataaatctttattatgatatttttatggttgaggttcaaaataaggcatagatcataaaggattaaattttggatgaatgtatgatcgccattgtttattttgatgtgataattgtattaactgtgaatgttcgtaagcacaataaatttaagataatcatgggttaatgcatgtgtattcaatatcacatcgttgttgctagtaaatttaagaatagtcaagtgatatttaggaaataattttagattgattcaagtttgaacaaaacttttagtatagtgaatttgataactcagttacaatcttagatgaaaaacagaaaaaataaatgatattggattttgacttattctatctcagtacacatgtttattgctaatgactatcataattattaataatagttttacaatccaattgtccacaagcattaatttattatgcatgcaagtttggagagacattatttattattcttttgttaatatatatgatacatataaaatatagaatgagatgatcacatgggtaatgtggaataaataaattgaatggattaattttagcaaataataattattagggtattataaaaaaaaaaaaaaaacactaaaatattgaacaattacattttgaaattaaagcaatgaatattcaattatatatttgactaaacgtcactacccatacaacaagttaccaacaaattgcctattttttatgtattattatatcaaaaaattatttattatatttagtatttttattcaaagacaaaaataaactaatcgttataaaataatagtagttattagttttatcaataccgagggatccatacaatatatgataacaaaataaacactatgttgataaattaaattggcattgagatttgtgtaaataaaattcaattgttgtgatttcaaaaaaaaaaaaaaatcatttgttgtgtttcaatagttaatagttatcgcttcaattttatgctggaaagaaaccaatcatctttttcaaggcagataccataacattcgctcaaccgtcgtcgtgttattttttgctctgtaatggaatggtacttacgaaagtccctactctgtcccttaaacatcctttacacgtctgagtattttatctacaaatagcaagtggaaataaaaaaagaaaaaaaaaaagaaaaaaaaaagagaacaattctatagcggttctgcaaataaagaaccagagttaaccctttgccagtagctatcaagtgtttgtaaattttcaaagccacaatatgcacacccgtattgttatcttccactgtggatgttcctttgcagagatttattattttttacctctctggtttcataccgatccttgatgtaatggttctgcttccatggactgaacacgattactatgctgattgtccaatggcatgtattgtgacatgatagccattatctccgagtccatgtacgactgcaaacaatgttaaaagagtttcaacaactctaattgacttacaagattaacccaggtgtgaaatgaagcttttagattatttagacatacccgaagcctgtatctgtaaaatacataaccagcaagaccaactccaaccacagctgcaagaaccacaaaagtgacaaaccatgccaatcgcgatccatgtctctctgatcgtatttgagcagaattaataagtttatttttctacaagaacttctactagaaaaatcagcaaaagctaatacttaatacgactgtgatgtaaagtctagagtccattgtcaccaagttttt

SEQ ID NO: 51737 - DNA, 793 bp, Cannabis sativa
tttttttttttttttaaaggggcctctcgttctcaattcccatatatagtttatgtaatgtaataataactaataagggcttaataatttcagtgttttataattaatgtgtgtgtgtgagagagatgatgattctcgtcggttacaaatgcatgccaataatgaagagagaggtggagagaaagagagtaagtggaaatggcggctgatgaggcttttactcgtaagtactttctttttctctcccattaatttataagtggaatatactgtaatatatatacatatatttgtgtagaggaaagatggtaagcaatcatattctaggaggaaattacattatataatttttatttatattttcatattttttttttagatatacccacttttatggatgatgtcctcgttaaaccccttaggttatgtaaattatatgttagactcaagtggaaaatgaaagtatattaagtaatctactaaaaaaatgtgtatattttaataaaaaataatataaaaatatttttaattaatggatacaaaaaagaaatatttttcaacttattccttccaagttcgaatcaatgcctccaactccaacaattgctttgctcattcgtattcactaattttttttttctacattttccacttttatttattgtaagacccaaaaaaaaaagaacgatgtatattgcccatgagaaatgctaaagggcaccactggtgcctagcaccttcctacgtgtcaatatcgctattcgtgcaattaagtatcgggtctcatatagtt

SEQ ID NO: 51738 - DNA, 828 bp, Cannabis sativa
ctgtttctactattgttgtttcgttacttattattattttttcagagggctatcccaacagaaagtagtaaaaaaaagaaagtcttatttttatatattaaaagaaagaaaaagaaaaatatcattagttgggcttggcttgtagaatatcattcagctccaaaccatatttaaaaactttggtggaaaatctttgattttatctcatcattctaaatacaataaatatatgtattactattgctattgtattactttgctacactctattctttccttaattaatttatcaattattctccttaaaatacattatacgattttattatgctaatttatttattcagtgtttcattagccatttatgcttatatgcatttcatttttatttatttgttatctttttttaagaagttttgttcaagcaagagatatttgagagtttttacttcaaatgtttatccatgatcttgaggaccttgagggtttgtggagcagtcaaattttttatctttatgatcttggtttcattattttagattcatatgcctttttaataatcacaactttcacacttcttataagattgataatttatgattaactatatattttattgggtcctcttgagaaatatgtctgatagtaacacttaattgtaatacttgattaagaataactcttgttgtgtgatagttaattttgctaatataattatgtttcttaacctccttctaggatgcactactacaaaccaagcttttagaggcactttttttttttttcagcaaatattaaagaaccgacgtcatagggttggaatttttt

SEQ ID NO: 51739 - DNA, 3936 bp, Cannabis sativa
ggaacctatgcaaattgcagtgatatataagtagaattctctcagcaaattcaaactgcctgagaaggaaactagaaaaaaaaaatctctacactaacatgtcatagtgcctcatatttgagcttgacttttggttgataattttagcaaaactattgtctctcgtgtaaaccatttagcaaagtaggtttgataagccctttactaataatactaagtagtgtgtaaactattttagttttgcaatgttgcagcaattcagtgaatatatatgttggcattggtgttccatggctgattgacactgcatacaacttcatagcatatggagaacctttgcacattgagaatgctgctggactgagcttctcactacttgtatttttctctacttctgtcggatgtattgctgttctagtatttaggcgtctcacgttaggtgctgagctcggagggccaaagctttgggcatggcttacctctgcctacttcatgttactttggcttatttttgttgtgctatcttctctcagggtttctggaatcatatgatacgagcaatttttctgctcatttcttttctattggatatagttttttttgtttcctttccctgttatagtaatatatcagaattatgtaattgagtgtatgaataggttcaaagttcttttccttttatgttaaaaatactcattcatttttgtaaccgtttgaaaataatttaagttgtatgaaatgttgaatactgatgattctttttgtgccaactaccaatgggatgttaataatgttattgacccagaaaaacaaaatatcatacataaacagaagtccttaaacaaaatttgaccattttatttagagaacccggaacagaaaaatgtttcgcacgcctactccatctctaatagctacattgtggggcgcataatgaagaaacgaaatcagcaatccaaagtaaattttctcttcacatagaatatgcattctaacttaagcaaaggcgccggtacatgctgttgctggagcattgtctagctgtttctttgctgaactgtatttcttggtaatgaatctgcattttcaacaacaaaacattattaatcagtttctttttggagaataaagaattatgtcaataattgtcatcaatgccagcccaattgacccagtgatgatgttttcattcaccacccagtgatgatgttttcattcaccaaaaagaagatattgatttttctagcattagctaaagaaagcctccaaaaatataagtttacctgaagaaatccctccacaataactcgaacagtaaccagttcattccactgccatcatcattcttattagaggaagcagaaattgtcctgctaaccatagagtttcaattttaatgtcagaacctatgttgaaaagtttccaaatattatacgatgaagtagaagtttaaattagacctggaagttgttttctttagctcatcaaacatcgaacgcggagaaaggcatcccatagccagccatggagagattttgcaggaaaagtttgctccatatatgctgtcatgactgccatccttgccccctttgggaggctgtgcttggcactcagctgcaaactttttaagcctttctagtgcttctgtttctcctccaaccaaggaagcattggcagctggctttccatcctacaatacaacagattagtaagtaaatacaacatgagagagagagagagagagagatgaagaaaagtttgtttataaattgatctgtaaataaatataacattcagatatatcaaccaatgttaattcagtgtcttcagttaaacattccaaaagctcgtggaaatagtagagattcttagattcagtaaaactgactagctatatcagtcctaaaaaggaagaacactagttcagctaatgtctatggtacctttgagaagagaaatttcagtggaaaagaaatgcatagatagatggcagtagtaacatgtccacataaaattctactattgtctacctgattcagatgaaattagtagatactcttatcactcccactagagttctagcacaacagtcacacaacaatgctaattaatgtcctcaatcagatcaaaagtatttagtttgcaactcattaaacttattgagtttcatgaccaactatccaagtactaatgcctcagaaaattcaatacccttcttttgtttgttttgattcctcagctatgaacagatttttctttaccaataaagcactggatcctcgttttcttgtgatacataaaagggtcatattataacacattcgaaaccatacaactatagtcattatcttgaagcaaactatacttgttcattttgaatacttaaacaatgtaattacctgagtcaatgttgcagattggttaacacccaaatccatcaatgaaggaatatctccaggctcaacatcaccacgagaaggcaagcccttcatttgttcaagagcctcaatggtttgcctcacctccaagccttgaactttctctctaaatccaccataattggaaggcatatcttccaacttaaacggcaaatcatcagcatgatacaatgtacttccccaaaagtacttcacctcaaaattttcatctttcatggctgcttcaatccgctcttcggtcttgacctcatcatgagaaacctctctgtgcgcataaattgcgtccgcaccaatagccttagccaactccaccagaacagtctcaggctttccgattctgaccacaagatcggaccctcgagcttggaggttcttcctgagatccttaacggactcaaccagaaacgtggctctgtaaggaccagttttgtcgaacccagatgaagatttgccataatctctaggatcgaagcagtagacaggcaaaactgacatggactcgttgtgagccgagttgaggcactcgttgtcgtggaccctcaaatcgttgcgaaaccaaacgatggaagctcggcgaactgcggccccattggagggatccatgggacggcggggacccaaagagagagggttctgaagagggttagctgaaatggtggacttgaatgaaagcttcggctgctgagacgcagaggcggcagagagagaaagatgggtaagagaagaagcttgtgtggggactttagccttgttgggttgagaaaacaaggtggaaattttggattgttggaagaaatgagttgggagaattgttgagagagaaagagaaagtgaagcagtggcaaaagggggtagcctggtttctccagaagacgacggcacaacaacagccattgaattttgctcctctgaagattgggtttctgggttctccatttttgaatctgggtccattttcttttcactttgggagattggttctaaagattagcgacgaaacttgatactaagaaggcaatgaaagaagataagctcttcctggtttctctacctctgctttgttctctcacaaagcttttttctttttaactattgaatttagttagtaaaaagtttctggggtttctattaaatgccttttatattttaaatttttcaaattttgttctaaattaaatcagcccttccatatacccacacctaacatttcccactaactttcaagtttcaatatatattttgttttgagaaaaatacagtacaccattattgggggttggtagaaatataattcaatttaagtctttattattatttcatttttcttttcttttaaaaagattaagtagttttaattaaaaactaacaaaaattgtagtttagtgagctaaaagttatttttgttttatatatttatgagattaattataatttacagttttttttttacaaaattgtattttataggttgagtacttctaatttttttttttttttt

SEQ ID NO: 51740 - DNA, 859 bp, Cannabis sativa
gtaggttacatgcctttgattacagctccattctttttgtcattctgagtaatttccattttaacataaagttgctattattggtttctaccatggattttataacataacttttattagggagtctgaaccgaattcttgggaagacacgatgaaagatgaattagatcgtagaaaatatccccgcatgccttggcatgatgtccattgtgccttgtggggaccaccttgccgtgacatagctaggcactttgttcaacgctggaactatgcaaaggtgaggccttttccaattgttgcttaattttcatttatgatggtataaatgaaggtgtatgatctttacaaaatgtggatgttttcagagaaataaagctctgtatgaagaagcaattccgctactcatgcctcagcatcacatggtcattccacactacatgggaagaagccaagggatggagattgaggttacaaattccgacaatcacaagggaatcaaaagacatgaatctttctcatccatgtcatcttatcaagacattccactacttttgcctcaagaagctgatggtttggactctccaagtggagagccaaaacaaaatgggttgaattcttcttcaaatggtatccctttcccattccgtaaatcaagaatcaaatcagcaagtcctggaatctcattgagggactttgtcgatgactttgatgggaaattggtttcagatgggaagaaaacacaacctggcatgaagcatccagactcggagtggtgggaaactcaagaacgaggcagtcaaggtggcttcatggatgattctggacaagttggtcctcgtacttcatgtcgatgtcaggt

SEQ ID NO: 51741 - DNA, 782 bp, Cannabis sativa
tttgtgtgagaaattacttgtggtgatttaaaaaaaaattaaaatcacaggaactgatcatcccattcctcatttgtacgacattaacactttccagtgttacctctctgctaatgtaccagagattggtgttggtggagcaataaatcaggtataatcaattcaaatttcatattgaaaatgtgtcatccactgtttagattattcaatatcctgttagtcatcaggtcaggtattcagctacaggcggcatgtatgttactgcttctaaagatggtgcaatacgtatatgggatggtataaatgcgagttgtgtacgttccatagttggtgcacacgggacatcggaggccaccagtgctatttttaccaaggaccaaaggttcaagatcacttgttactgtaatttgttattatattagtatttagacttgcatctttgaaccaaaagatctcttaaatcactaggtgtcaaggttttaaaaagtggaatcgggtagtgaggcattttcctttagtcccgtgaggcgtgcacctcaacaataagaagaaaaacttcataaaatatcgtaaaattcataacaaacaactcataattcataacaaagtcataaaattcatgaaaagtactaattaggtcttcaaatggcaatttatattcataaaaaggtttgattacttatgaaaatagtaaatgttctaaacatatatagaaacatattccacattccaactcaaaatgtcagagaagtcataatgatcattatcgctttcatgatcat

SEQ ID NO: 51742 - DNA, 1949 bp, Cannabis sativa
gtatcaacgttaacttatgacctaaggaaatttgatgatgaacttatgctaaactcttttatattatttagtatgtgtgaaaaactttttgattgtgtacttaacctgttatgcttgctttcgatattgtaatatgagttacgtgatgttctacttgttctatatattgtgattttatgtgcttatgtagagttagtttgatttggttgatattgagatatctagaacttgtgtaattaatttattgaggcgaaatcctaaatctttgttgtgtagagatgattaaggaaattttctttgaatcagtttgagccaaaaagctaatcttaatatattatccttttttgtcctattttgagcctaactttccaatttttattctctttaaaaacaaaatgcatatttatccttgattatgagccatgaacctaaataaattattcttaccctattttgcaccatgaacataggttgttgtatgctgaatgaaaaatatgacgtaagtgggatgagatattttttttctgagaattatgttggaaagggtgtatgtgcgtagagagttatgatccaagtacattatgttgaaaagtgctcttattaaaaaaaattcataatacgaaaaaaaatagcaagagataaatttgataggattataacccgaattatgtgaacaaaggggtatcaaatgagaaaaaatattatcgggagaaaaggaaatttacaatgaaggttttcaattttgattagatttgtaagttttggtgtgaaactagcctaaatgacgttctcatctaccatttacctaagccaacgttacatgcctataaagtcgttttgatctacatgacttcggtttacattagtggagataaattggttatacatgcctatagttttcttgaatattttgtggtaaggaaagtctttatgcacatgaattacatgtttatagagttagtagaattgacatacacacattttaataaaaagaatacaatattggaagttaagtttaaatgggttgatattctagtcctttgtttgaagagcatattgaataatggaaaaaaagtttgtattttgagataaattaccttcggtctaagtttcttgatttgtcatccaataattgacttattagttttattttttcattgcttgaggacaagtaatagtttaagtttggggatgtgatgagtgcacattttatacactcattcttagtcaattattaaatggattagtatttattttcgtatacatttgatgtgttttctccaagtgtgtaagtttgtgctgaaaagatttttgtgatggactgagatctttgagcccattttcgacaatgatttcttcattttctcgtagagcttatacgacccaaaatgatagagctcgttcccatctttccaaaacatgctaaatcatctaatttggagtccgaatgcaaaagttatgcatgatttactgagcaaggtcgaagtagaaaaatttggtgttgtgcgctatagcacagggggtctatgctatagcgcccggctggataaaaatgattttttacgaaaaaaaagataattagagcgtgggttcgagatttttcctcttaggcgctatagcacggggtatgggcgctatagcgcagcattcatcatttttctaaaaaatatcctaattctaagaggcatgatctatctttattggcctatataaagaagcatgtaaatcatatgaaagaacgactagagagataaaaacaagcaactttgagattaaaaaacacattgaagagcaagagagaagaaacttcaagcaatcatcatcaactatcatcattaagagttcttttcttcttcttcttctttattctttgtttagttatttaattctgaacatgactattatgattattatgtttgtgattatgaactaaacactcattatagagt

SEQ ID NO: 51743 - DNA, 930 bp, Cannabis sativa
ttatagaaaagaattaaaaaattacaaaaaaaaaaaatatgggaaaaatagataaaggtaactaattactttagggtaaccagttaccaggtatgttatcctataatgtttctccatatatttttaacttttgtttaaaaaaaaaaaagttccataaaataatttttttttttttggaaaaaaaactatatatttttacaaatttataccttaaaaactattaaaaaaattatatggcaaaaaaaaaaatggtagttcaaaagagaattatcggtttttttcttagcatttttagatagctataattttaatattttatatataattatagcaagtaaatttaattaattttttttaagtgtgattaagttatgattgcaaaattaaagtataaacattttattgcgcgcatggttttttttttttttcttacttatgtaaaacatattttttttaatatttgaaactcatgtaaaccatattgtgtttgtttgaagtgacctgatctaatattgtagaagcttaactatggaaaaagcaaaggcacattttcaaagaaaaagtctaacagagaagttgccaaaaaaaaggtccctccctcaaacaaaatggtgtaaaaaaaaaccattttcagtttagacatgagatagttgaaccaatctatggatagaggttttgttagagcatcaacttgatcgaaagaagtctgacaaaataaagaatttgaagatcaattttaatgtgtttacacctagaatgaaacacaagattaagctaacactttgttatcaacccatataacttgacactcaggaaggagaaacttaaaactcagttaagagagatacaagccatttgatttttgcaaatgttttgattcagaattattatggatttggttgcacattttgattcagagttgcatcaaat

SEQ ID NO: 51744 - DNA, 1210 bp, Cannabis sativa
caatcacctcatgtttaatgatgtgaaaacaaattaaatatttttaatatagttgcggcataaatttctaaaaaaattattttgattcagacaaattttaaattttaaaaattaatagtaatagttctcaagttctattttattgatccaaatgataattttgaaataatttaaataataaaaattatttttttttaaaaaaatatggtcgtttgcttcacttcagatggagaacaaaaggaaatttatattgtggaggactgtcattataacgctgttatgggcagtgtggacagagagaaatagtagaatttttgatggactagaaaggtttgcgaaggatgtttgggatagaataaatttttggactgtcacttggatcttcaaaactaaacatttcgaggatctctcctttttagacttaagcaggaattggggtgtgccttaagcaggaattggggtgtgctgttgtcataatcctgagattttgtgacaatagtcacaatatttttttttttttacagttttttagtttttttttttatttttgcttcctgttttgtttactatgcttttccttcaacttaagtgaagcttgcaatatatataggaggaggctagtataagacaagtggtctctttctctttttttttttcaagaaagaaatatatattttttttaagaaaaatctttttcttttttatttgttttctcccttgactgttcatggcgctctctccttattcttcttcgtggagcacaaatccatggccatggaaactccactaataaaggctcatccctaactgcttaatcgaacatctttctttttcaagctttctgtttatcattttctctccttctccttccttccaccatcatcaatccaaaatctaaaattggagattggctcgtcaaatttcaaaaatgcacagatcaaaactattgtggggtgaggcttcgacaacaggcttgactacaaacaagggccaaacttcactaggagagagaaaagtggcagatctatccagatctcgtcaacgacgagtggcagggctaatgacagtgacgagctcttcgtcaccaagataaaccactctttgcagccctttctcatgccattgttgacctccgccaccagagctaagatttttcaaatatacttttttttttattatttggaatgggtttgtggcgcaaggacaagaa

SEQ ID NO: 51745 - DNA, 692 bp, Cannabis sativa
aaaagaattgaaaatttaggagtaaaaatgcataccatgacaagtttaatgaatttttgggaaaactgaagagcattgagcatctcttctataaatctccaatcaagagtatcataagtttttattaagtcttttttcaccatacaagatggagaggtatgcttccttccatagtgcctcacaatatcttggcacaccatgatattatgagcaataaacctaccatgcactaccttggttttcgacaataatgtgtgaaaaaatagacattaacctattacaaatagttttatagaccacattgcaacaagcaatggatctctaatcactcacatggctcagacatttgctcttaggtataagagtaatagttgtagcatccaactctttcaaaaactcactagtgaaggaccgatatgaatacacttctgtaaaatcatcttttaccaacccccaatttttttaaaaaaaaaccactactaaagccatcaagatttggaggtttatcctccgaaaaggaaaatagagcattcttaatttcttccttagaataaggcctattgaggagagaaacttgagagggagaaacaacatgacctccttaataattgaagaaatgaaatgaaataaaattggataagtaaattaaataaaattgttattaaaatactattgaccattttctaaaaaaa

SEQ ID NO: 51746 - DNA, 1867 bp, Cannabis sativa
ctgctcggcatgttgatccgaacagatgctctaagtagagtccacgtgtcaccattctcgtgatgccacgtcagagtgccaaatttgggatgacaatagtcaagcttttaactttttttttttttctgagtaatcaagtattcaacttgattgtgctttgcatggagaatttgaattcttattaaaagtttttcctttgtgtagaactttattttcctcatttacgtttgtcgaataattacaacaaccattcttgttctagtactgtattgattttataatttttcagtaaatatttgtgttgggaacctttttctttgaattctatccaaaacaatgcttaggctctgattatgccttagtgttgttgaaaccaattctctctttttttataattataattggtttttgagttattatttgttacttatttttactcattttgttgtggaacaggttctattttaatttatgtatcagtgtttttggaattgattcacctttttttaattataaccagtttctgagttactgtgtgttatatgtttttagtcattttattgtggaagtggttctattttaatttatgtcgcagttggttttttatttaagtcattttagaaaacaaatcttgaattatttatcttagaaaccagtttttcatttaattaattcaaagaactagtttttaatttagttatttcgggaaccgatttttgatttagttacttcaaattcaaggaaccaatttttgatttatttattttatttaactagttttgtgtgtaaatttttatcttagttgctttagtgaatcaatttttttgtctcaaatattttactagttgataaatataactactttctttatattattttgagttattgtgtgttattatttatttttatttattttgttatggaatcggttttgttatatttatgcctcaatatttatggaattgatccccatcttttttttttttgaaaaaaaatatcactggttttatgaggtattatgtgttattcgtttttactcattttgttgtagaactagttttgttttttaatttacatttcaacgttttaggaattgatttcctctttgttatttaattataaccggtttgagttattgtatgttatttttattcattatgttatagaatcggttctattttaattataccgatttaagttattttgtgttagttatttttaggaaaatttgcggcataaataccatatgttttcgatttatacacttaaatactacatatttttttttggcggattaaataccaaatgttagtttccatccatttccgttactattattctgttaaatgttaagtgtgttcactaaagtaacacatgtcatatttttattggtctatccatattaatttaaataaatatttagatattattcaaataaataataattattaaaaaaaaaattataaaaattgaaaaatataattaattaccttcttaaatttaaaataggacaattaatccccatcataatatcataattttttcaaactactaatatagaatcaatttacccacaaaatcaaattacataaacttttaaactcatttaatcaacaaaaataatatgatttaaacaatattacacaataactatcacatagatccacacacctaaaaaaaaaactccaccacaccaccttaaactcagatctgagcatattttgtataacaaaaaaaataaaaaaatacacattgaacatcaataaaacctgaaaaaaaagcctaatagaggatgagatgaacagagaaggagggtgtaacatcaggagagacaacgaagttcatgagagagagagagagagagggg

SEQ ID NO: 51747 - DNA, 661 bp, Cannabis sativa
acaactgagataaaaacttatacataaaaatcaataaaataaataaatcaatcaaaaatcagtcttaagcatcaaaaataaatatttgaacaaataaaattaaaaacaaaataccatcaaaacatttaaaaagagatattctttcacaaagaaaaacaaaaatagaaataaattatttcaaaactaaattattttgtctgtatgtttataccttgatgatgatggacaaaatttaatgctaaacaactatgatgaccccctctccctttttactcgtatacatatatggggggatgggttttcgatcactaattcattttaaccaggcaatgcttgctaagcaagcttggaggctttttaaaaacccaaattctcttcttgcttcactttttaaagccaggtattttcctcgtagctcttttctcgaagctaagcatggtcacaatccttctttcacttggagaagtatactttggggtaaagacttattaacttcaggattgatttggaaggttagtgatggaagtaatattcggattctggaagatcattggcttccccataataaggttaagtcttttaattctggtcagatacctccttctccttttctttcttatttcattaataaatttgaggactgggatattcctaaacttga

SEQ ID NO: 51748 - DNA, 2234 bp, Cannabis sativa
caattttgcttgatttgcctaatcatggttagtcttttctgattaatgaaattacattaaaaaaattatatcacttaataaaaaaaatacaaaaaagggatctttctaacctttgcggcttagttccctaatttgaatatacaatagtagttattttttttttgctaggcgggaaaataattatttttccttcaaatcttattattaatttttaaatagttaatttgaatatagatatttaattaagaactagcattatggttattgcgagaaaacgaaaagttacacgagactcagattaaaaaagaattaccccaaaccgtagctgccactacagcattttcaagctctctctggtatcgaagttagccctttcttgtttcttaggtttctcttatcgcttctttcttgtatctttttagtttttttttctcttgattttgtttcacgacgacattcatttgatattgcggccatattggtctgatatgtagatttatttttcttgcttgattggatattttagatctcttgttatatatatatatatgtatacattctcaagatttgatttttttttgtaagaaattgtttatgaatcactgcatagacgcacaaatggtaatgatataaaataatgtgatagctctgattgttttaggatcgaaccaaacaatttgatgattgtttgatattagttcttgatttgagccaatttcattctatgggaatgttctaagatatttatgtcttatacatttcatattctctttgttttaggggagtggctcagggtgtgaacttcaatcttgaactcccatgattcctcccctttttattactattaatttttttttttcactggagtaattttaattcactggagtaattttaacatgtgtttttaattttaacatgtgttttttttttatatatatatatatataaatttaattagataactcttttgattaccaccgagtttggactcaaaaatagtaaaatttcacattctttaatctacgactcatcgtattaaatctcaccgaaatatttaatattgtaataatttttatttgttaattttattgtcttattagtagttctgtttcataattgtggtatcattttacacaatactagtacaaagtagtgttttttttaggggagatactagtacagagttttaaagtcccactaaagcatatttctagtataatataaatattttatggtacatacaatgttttagtatgatatttagttgtcgatttagaggttagagagtaatgggtaattatattatttttaaagcaaaaattattctattatacactgtagttttcagttggagtaagttctcttgggatgtgtttgatttgaattatggttacctgttgtagtaatttccagaatcatctctattatgatggttaacttataaattggctgttttttttttatcatcaccatcgatatgatctcattatcttgagaagaatattatgattagagacatacacaaaatcaattaacagtaatttttgatgggcagggagaaataaatggacacggtcaagattagtctaaaattgttaatagacaaaaaaaatgaaaaggttctgtttgccgaagctggcaaggactttgtggactttctcttcactcttctgtcactgccagtcgccactgtaataaggttgctcaactcgaacaaccgggcgatggcaggaggtcttgaaaagatttataagagcattgaaaatcttgaagacacttacattctatccactgctaccaaagaaaccttactgaaacctaaaatttcgccaaccttgaagttttcactcctctctttgcctcctagtagtagtagtagtgctactgctagtagtagtttgcaaaagaaaatgtacatttgcgtctcttgttattcgtatgtttctgatgacctgcgagctgtatgccccagatgtctgcgttccatctcaaaagaggtttcgtacgttccagctatggctccggctgcagctcaacaagtggttggtaatgaaggaggtggttatgtgaaaggtgttgtgacgtatatggtgatggatgatttggaagtgaagcctatgtccaccatatccagcatttctatgctccgcaatttcaatgtcaaggatcttggagtactggaggagaagacggttaagctcagcatgaatgaggtttgatttctttcaatctta

SEQ ID NO: 51749 - DNA, 1966 bp, Cannabis sativa
caatgttgcttgtggaatggatcctccatcccacataaatatggcatactaccaggaaacaaaccatgcactttaacagaattgcttgatgaaattgaagagcaaagggacatggaaaacctaaagttaaaagccaatcaacaaaagatagctcgatacttcaacaaacaagtgagagggtgaaagttctttgtaggcgatatggtgctcagactagtattcttaaactccaaagatagtgcagtagacgtgcttaggcccaattcggaaggcccgtatcaggtaaccaaagtcacagagttaggagcctataagctggtcagtataatgagaacatggagctgattttggtaccaaggtactaaaatagtgagattttaagaaaatactaccaatgaaacatcactcctaattgatggccttatgtacggttacgtgtgaaggtagactgaatattcagtactaaggtctattgaccactttcaaagtactttttatttttatgttttcttttcaattaaagctaaagatctatttagatcatgtaacaactttaatcttcaatagatgtaagttacttttaagtaaccacacatactgatcagtaaatgaaataagtgatttttatcattcaaattgtgtttattttacttacaatatattatgattaatttcaacaaatacaaaattacttaacatgcacacatggagaccacccaaaagaaagagaccgaatagacaagaaaagtaaaagtgaatagtaagtgaccaatagtcaaaagtctgcttggtcacttgggggcacctatatccatacagcattaaaaagtaacagcaaaaatttcaagaaaattaaaggtgttcaaattaaaaagcaaggcaaaaagcatgaattaagttcgggcttaaaggatgcccgattagccatttgtcttaaaaaaaacaaagataattgtcgcttggtcaatgtttgtctaaaaaataaagaaccaaaggacgcacaactattcaaaagtaaagatggattaaaaatccatagggtttactggttgagagtaattatgggtagcatcctagtcggccacaaagaagttgggatccaaagccactagcacgaaataagcttcagcctcagatgattttgttggcacattaggcttttatctcctctacccgagcaaacataaatgccttttcatattttagataatcaaagttagccctaggattagctgctcaaaactcatagaagaccaccgtgtcagcatttataagattatcaatttctttgtcatcttcgacttaggcggcttctagctcgcaaatctgctctttgtgtttgttgagcagagtctagaacctttcctttttagtcttcaacccattgttggccttggtaacctcctcaaggtcgttttccagctgggtagttgatggagtgttagctatctactgggtcaactcctcgaccttctttgtctgctcgagaaaacctttgatggcttgctccatggccgtctccttctcagttaatatcttttgaactttcccaagttcagctttgtttgtaatggattgcttacttgaaaatgaccttagtccaagaatagatgtagcctacttgaaaattcagttgaagaaaaaataagaccgaattagtcagatgacacgaaataaattggttagacataaaatacgacaagtaaaagccaataccttggtgcactctttaagaaacttccccatcaagaagttagtcataagaatgtctcctcccccagtatctccccagcctccacacggtacctttcgagatagttgttgcaaatgtcctcaacacgtttcagctctgcgggcaccgtggccatagtcttatcctttgaattttgggatgatggggcaggagagaggggcagacttttcaagctcttaatttccaaggaattagttccaactgtctcctgtt

SEQ ID NO: 51750 - DNA, 1680 bp, Cannabis sativa
  modified_base (27)..(30): a, c, t, g, unknown or other
actaatcagattgtaaagagttttatnnnnggcataaaacccaacagtatcctctcggatgcactttctattcgcgctcttttatagaagagaatgcacatcaatgatacttcttgtccgatttgtgggatggaagaagaatccttgaaacatctctttctccattgcaacttagcttttcatttgtggagatcttccccgtgggggatttggccgatacctggttctggtggtcgtatgtggaattgggttaactttctatggggtctaaaataaaagggtgttaatgtggatgcgattttcctctatgcctcggtagtggtggatacgatttggtaggccaaaaatgataaagtacataacaataatttgaatagcattacacattaaaatgactctattattcactgttatgcagattatggctcttgtttatttccttccccatttgctacggttacactcgcttggtctactcctcgtaaagactggataaagattaactgtgatattaaagtagggactggaactatgtgtgtggtggctttggttaaagactttttgggaaaagttttgtggattgctactgataaataggaattcactgatccccttatcggtgaagttacaacatgcttacttgccctgaagatggcagaccttttgaagtatcattttatgattattgagagcgactctgagattattattaattcccaaaagagactttctctgattggagaattgataattacatacaccattgtaataggcgctcttctttgtttgtcggttataatttttctttcgttccaagactgtgtaatcttgcggcctacaatgtggctaattgggcttttgctcataacttaattggtatggtagagatatctactatttcggaagacattatgtgtaatagccatgaagtttaattttcttatctattgacaatttttcagaaaaaaaaagtaaaataatgaataaataatataataataaaaaatatatattttagtgtaatttttagtttcatacaaaaatatgctctttagtgataattcaacaccaattttaaattttaaaagatgaaagacctatttcatttaggtacaactaccaacattttaaaccaaccgtggctccctaacaagaaccagccttatgtcacaactcacaatcttggcctaataaaccaacaagttttctcccttttttctattgagtcaggcaactgggatcatgacctggttcgagacatgtttaattttcgagatgctagcctcatcctcgaccttccattgagcattactgatgaagatgaatgttggtcctggactggtgaaactaacagcagtttcactgttagcaatgcctacatgctgctgcaacaaaacaaggaacctcaacctgcagccaacaacttaagtttttggaaaaatttatggcacttgtagataccgcctaaagtcaagaacatgttgtggcgagccttgacaaattgtcttcctacttgccttaaccttgttactaagcatgtgaacatatctatgctctaccctatgtgtctttctcaacctgaaaatacatcacatgctctcttagagtgtactcttactgttgcgtgttggaatcgacttggcattccttgtccaaacccaacaaccacttttgcctctt

SEQ ID NO: 51751 - DNA, 1130 bp, Cannabis sativa
ttcaaattgatactacataatcaataacagaaatcaatgttatgttcaatataaattataatcacatatattcaaaaaatcgtaaacacataatcaaatatggcagatatagaaaaatactaaaaataagcatatctcaaatttctaaggtgttaaactaaatgatatatcgtgtcctatgtaggcgagagtaaaaaatatcactagttaaacagagtagtgagatattctaaaatggacactactttagcgtattcgatcaaaataaaaatccaatattgtctcgtttaggtgagagtcaaggtcattcctattttatcaacttctactattgtttcatactcataaaacctttttctatgtagtcatccttagggatgagtctactagaaaataaatctacaaaaatacttatcttcaagatcttacgatgtcaaattatctaatgggtgaccttccattaggggacgtcaagcgtctcgagcttccattaaaaacaacaaccttggaagatcaacaataaagatcgaatgtcttataaaaaaaagtcattaatttgaagaaaatagtattttttattcaactatttatttcgacaatttattttaatatatttattgaattactaacttaggaataaaataattataaaattaattttatatccaaagtataaattttattctacattaatgaaaattattaacttaggtagttctgaaaataaattaattattttccaaccttaagtataaatattcaaattaaaatatttttttatgaaattacttaatttaggtaggtctaaatttaataaattaattttataaccaaataataaaattttcaataaaattaacacttattattttgaaaattaattacaaaattaactttcaatacttatgtattaatttcctgtcaaaataaaacatgaaaaattactaagttaagtggttctaaaattaattaagaattaatttatagcttaagtattatttttctatatttgattatttcaatctatttattttagtatcaacatatttatttaattaaaattactaatttagttaaactaaatataaattttaatttaatatttataaaatataacttaggttaatcta

SEQ ID NO: 51752 - DNA, 1368 bp, Cannabis sativa
  modified_base (1340)..(1343): a, c, t, g, unknown or other
taattagttgtaacaatataactaatcaagattaagctctaactaactaactaactccctaattttgatataacaagagtgactattacaaaaagcagagtagttcccaatttcttaatgaggatccaatccatttcataaccactattgaattactttccacaataataaagttttagcatttatctttagccacttccaaagccaaacaataggctacgacttccccatacacagtgcattagaaaactctaaccttaccgtatgcacccaagtcaccccactaaggtagtttctagccacaaccgtgatatgtgatatatatgctttccatctctactttaataccacagtttaacttaatctactcttgaaagagtggtcgccaaccatccagcaagatcgaaaaaggaatagcgaatagagaaactctataatttgcataagagcaatgaatagagccaatacaatatttcacaataactaaaattttattgtgtatcttattattttgagtctatgatatagtatcaataacaattgacgcatgaattacttcatattaatatgtcttgtttttctagataaatttatcatatcaaacctaacaaccccaccgagaggactgccacaaacaaaaagctaaattacaagtgataataggtaccactatttctttttattgtttgaataaatacaaaaaaaaaaaaaaacaaaaaatctgatccttgtatagttttttcctttgaatgttttcttttttttttttacaaaaattctacaaaactataaaaattgttacatgtatcttttctttaaaattttgctacaggtatacaatagtttaattaataactttaagctattgaaaatataatgtattgggtacttctacaatacacctcccgttaaaatgggtgtactactgatgcaacctctaactatttcggtatttataagtattttttaatctaaatttttttatagtcgtgtacgttatagttatttaagacatcctgcaaaattttgaaaaattcagaataatttacaatatagaaatcaatgtttaaaccgtctatttcatgcgcgtataaaataaaaaagtcacgcgtgtaacagactctttgaacactgtttttgacgtgttaaatttttccgaatttcttaaaattttacagtatgtcttaaataaatataacgtacacgactatgaaaaaatttagactaaaaaattcttataaataccgaaatagttaggggttgtatcagtacactcattttaaggggatgtattgtaggggtgttcataaaataatcgatccaatccaatccgcacgatnnnntccaatccaatccgcaaagtgcgga

SEQ ID NO: 51753 - DNA, 1097 bp, Cannabis sativa
  modified_base (184)..(184): a, c, t, g, unknown or other
tattttcttcataaaaattgttttattttttaattttttttttacataatacactaaaaatcttaaaaaataatttcaaaaatatatcacacagaaaatttttcattgttactctatgaatatttttatttacaaaaatacttattcagtgaaaataatgaactattttttagttgttttatantttatttatagttgtattatagtaatcttgtcatgaattttttttgtttcttttatagttgattaatagttatcgtggggttaatttcacgttattttttagtttttttttttttttaactttttactgaataaagtgtatgtttataattttaaaactttataattacttttgtaattaaaattttaaagccgtaaaattataataaaatataaaagaaaaatatttttaaaaattcttatttttttgacattgagaaggaagattcgaacttaagacatgaaaaaaaaatatgaaaccgtaccaagttgtacttaggcaccactaatatttaacaattttctattggaattcatattggaagagttgttggaatataaaaacactactataaaatatccctttcatgatcttcttttatatccatcaaaataggtgcaggtcatgaaagagttgtggggatttttcatgtcaagcgttgctggacataaaaaatatttcatcacactactaaaacaaatggcattcccatcggtcgaaacgtcaatattttttgagaaccaacgctaataaaattgagagccagtaaactgacgcctacttattaaatagtcgtcaatttaaaatagtttcttacacgatggcgaccattacaaattgtcaaaaagagttttttttttttaaaaaaaataaagtccaattacattaactgataaaagcccactagtactccttatttgttttttctgcctgtatataatatatcatatattgtttacactactacaaaatacactttaaaagtggttttttttaaggagatttacatggtatactaacttttgttatttttttacaaaaataatgtcaggcggtattttttacgtttttactatattttttttataagttt

SEQ ID NO: 51754 - DNA, 967 bp, Cannabis sativa
attttttggaaaaccgtaaaaatttaaaaaaaaaaaaacattttttgaacgtgaaaatgtaaatattttacaaaaaatagtaccttatataattattccaatggagaaactgttgaagcagtgggcttgggttacacttttgggcctcatattttatgaacgtcatttttgggcctcagctagaaaaataaaaaagatttattgtctttaaaactgacgaaaaatgaattttttgtcccaatatggctatattattagcaatattggatgttgtcatcttgatatctgactcttaagatgtatatatgacttatgttgcacaatgataatacgaatacccatattttagtaagaaataaagttcagatagaagttggggctactttgttgaagaaattactgtgtattatgacatttgtactcttatgattttcatcaattagcaattggtttgttgttaaatattattttcttaacagctgtgtatttcatatttttgcaatttgaaatttacttgtccaagacatgataaaggattatccagattataggcccaatttttaaaattttttaacatcaattataggcccaattttaagaagaaaaggaagaataagaaaaaagaaagggattatttcaaaatacccaaaaacaataaaaatttacatttttactgaattctaattttttttacatttttaaggacttttttctttcttactgttctaaaaagaattgttttttacacattgcaacgacatgaaaacaacattgaaacaacacaagaccgtaaacatttaaatagaagaaaaagttggtaagaatgtaaaaatattatgtgagtgtatcgtgtaaaaagggtagagattacaaataacaattggcccaaagaatttcggtaggaggattgagaatttccaatctcctattggaagaccaaaaaaagtacaaatgaccaaattttcta

SEQ ID NO: 51755 - DNA, 685 bp, Cannabis sativa
attcaactaaccacgacccagtatacaacactacaagaacaaatgcaagctttgcaaaccgaagtcgatggaagggtcaagactcagcgtcctcctcgagtaccaaacacacgtgcggataaccctcaggtagcaaataacaggcgatgaactaataatcgtactcgcagggaacaaaaaaatgaataggagggactcaacttgaaccaacctacacatagggaacaagtcgcacaaaacgcctatcgcgaggttccacaggaggatgataccgagcgacgtaaccctcaaagctaagcccaaccgcaaaataaggtaaatgatgttgaatcccattccccttcctctcatagctgttctcctagtctttatactagatttggttctgtggaaacacgacgaggagggagataccatgttcataggggtgatctttttgatcacctcaatgaagtttttaggacacaatctaaaatgccctgaaatcgggacgagccatgtgatccttaggtgggcgatcaaggcacgaacaacaaaaacaacccaactaacgttgtcaacccgtccaatgcaccagctgcgactaccgagatagtaatcccagctagcatagctgctatggctgccgcaccaacgatgacacaaaacaacccaggtaccacaattagcaatgtgtcgcatcctt

SEQ ID NO: 51756 - DNA, 1729 bp, Cannabis sativa
aaactatgtgcaggagattttttttgagcatctcctgctttaatacttgataacatcaatatatttttgaaatcttttaatagatagttagtattaaaataaaaaaaatgttaaaacaacttgaatagaaatactataaagaatacttagtgacaagctaaattgggggaataagaaaaattcttatttaatatatgttagacattttatataaaatatgaagcatgtatgattatgaaaaacagaataaattgaatatatatgcattatgaataaaggattaaaatacctctaccattatttgattatgtataaaatgtcgaataaatcgaacatacatgcattatgaacaaatgatcgaaatatctccaacaattaatttttgagagtttcaatcacacacgacctttggatctacaaaagaaaagaaaactcattagtgtaggtaattgggttttcaagctttctctactctctttagatagatttactatgtttcacagaataacagtgagttcgaagaccgagactttatatttatacatgtgagattttccattaaagtctctttcataattaattatcagaatattttgacagtcaattagaaaattaaattagaaaaggagttaattagtgaataaaaaacttaccatttataaaatatctatatttattaaattattgatttgaaatcaaatgtaatgaatatgaaatacctatacacccaaaaaattaagggaaattactccatatactgtttttttaacttttcttttttcaaatttacggtttggatttctaaagtggttgcaacgctagttgcaatagtagtttctatacgattttttgttgcaatttaggttgcagcgctagttgctaggagtttctatgtagaattccgtaaaaatgcgaaaaaaaaaactattttgaagtataaaaatgaaaaaactccaaatattaattatataattttatacttaatataaaaatattctaacaacatattcatttttgggaaactttcaaatttagttcaataacgcaataaccttacacaaatactttgggtgactatttaaacttttacacaccctaaacataattaattatagaattacctcctactcttcattcctagccacaacatagaaatgcagcttgaatacaaactcgttttgtaacaccctactagattatttgtgttatcgtgatttcttaatattgtgcacacctattctaatcaaagagttttatgaaaaaacatgaataatttaatattttcttaattaaaatttaaacgtaataaattaatactttacataatctgagatcccatcttttaaaatttacatctattttacaaaatatttagttaaaaaagttgtcgcctagtgattatcaaaataaagcctactgccctgaagatcgaacactctaggtctaaccgcctcaatatgtacaatcttcattagctcgagttcactgatgtttagctttagccttacccttacctacacaattaaataatatttgtgagttgacagactcagtaagaaaagcataaacataacataaaccagactataactaggcacccatacacccaattataaccctatcccgcgtctcacgagtactaagtctagaatgttcgtacgacagtactattgaccataatatcagcctatacttggtactctaattgtaccgatgtgatagcgtcaat

SEQ ID NO: 51757 - DNA, 1443 bp, Cannabis sativa
ttgaatggtcgattggtgggttcgtttcttaacggggtgggttcaagtaggcgtggattcaagcctcaagggggaaggggcgatggttcatctggtatggtgtggtgagaagaaagaggagagagaaagggagttagagagaatcaggggaattcaaaatagaggaataattttggaagaaaatattaaaagattggaatatctttactatgtgtaatcttttagtttaattaaacaccataactaattttttaacattgtttatcaaatttctcaaaagaaatacatgtttcaatctttataagactatttttttttttttttttggttataatgaaaaaaaaaaaagcaatttgaatgtatctttagtagaaccttttttttattatttgaatacatgcaccattaatggccggccaaccccacttcggctttatgtagtgtgaatttcaaaattgtaacactaaaagtgaatttgtacctcaatagtctgcggtctatatatgcttatatgtaaatatatgcataaatatatattatgcagtagtgtatcaaaccaaacttataagattctgattcatctcgaattgaattgggcatagcataatttttcatggtaaggggattctgattcagtcctttaatacgaaatcttagccacttgataatcgatgatgttattaatagggtgagagttgagattttagttatttacatgtttatattgataccacacttttaggtggtttgctaataaagatgtattttagcatttatcttttatattacgttaatattatgtgtattgaaggtatatatagttatattttttaattttttattttaataatatatatattttaaattgtataatttttttttatgttattcaataaataatattattttttattgaaaaatgtttaattttttttgacgtaaaaaaatgtttaattttagtattatttataaaatgaaacatgatgggttcgtttagtaagtcgtataaagattgtattgtattaaataataaataacactatgcttgaaaaaagtaatttgttgtattattttttaggaccaaaaattttaatacaaggtaagttatattattttatacacaacaaatgatccatattagcttgtattataaatgttatctcattttttgtactatgacatggcaacacatatgagtgacacgtgtccaacattctttgcacttaggcgaagataaatatcccgaacagacttcaagtagcacatctgcatgcacaacgtctacttacccgagtagggtaaagggcagactatccgagcagagaacaagtttggtttttccgaactatgtattagaacttgactactttagaatggtatcgtggagtccaagcacgaagacaatccctacaatcatgagattgaattagagggatacggcag

SEQ ID NO: 51758 - DNA, 1257 bp, Cannabis sativa
atataatcatgaaataacatgtgaaccatgcaacataaaattaatttctaatcttttataaactagtaaatctgattatattgaaatgagttttatttaggtcacaaaacccaacacaataatcattatactttggtgctcaaaagttcaaacataaacccaaaaatttcaagctattttccagaaatttaacctcaatatttcttatcaaaacctttcataacaatgtagatgcatcaagtataaacctactaacacaataaaaccaaaaccaccacttttctcttaattcacaagaacatacattcacactcatcaaaacaccaagaacaccatgaacaccattaacaacttcttaaatccagaaattcaaacaaggaaaagagatttaaagatcactacctcaagttcctcaagctctgagcaagatcaagcacaaaatcacacacaaaatccaagctttttcttcaaaattgtttttgaaaatatcaattagagagatagagagagatgggcgattttagggtgacaaaacccagaaaaataaagtttatttttgctgaaatactattttattgaaaataaattctttggtcaaaaagaccattttcccctaaggcactcatcacattagcatatacacataaaatggataaatttgccattctactcacacacatatgtcacatatgtcacatagataacatatatcacattttctcattaatcacataaaaaccatatttaaatcccgaaaatatattttggcccccaaacccagttcggcctaaaatactcaattgtgactaccacgctgacttgtgagaaaatacctgtaggaagacagaataaacatactatataataatatagtccattagcacaatatattataaaattacaattttacccatcttaagtcaaaattacaaaaaatacccctaatacaccattggaggtcttaaaatacaataaatcataataattgcacatattaaattatatcatactataatttctcattaatacttaattaacttagttagagttgctactccgattattagacctttaggtattacaattacgatagtaacatatttattgaaacacatacatgatcaagaataagttctttttttgaaaaaaactattttgctagtttatttattttattatatccatgtttgaactacatatatcaacaacttcttccaccctcatgttttatagagactttgtggagtcatgaatata

SEQ ID NO: 51759 - DNA, 1850 bp, Cannabis sativa
gcaacataaaatgatttatgatctattattaattagtaaatctgattatcatgaaatgagttttatttagggcacaaaacccaacagtacttgcataagttagtgtggggttaagcgagtcagtacaagacaagacatcaaatcactcttttttgcagaagaccgtataaatgggaccaacattctcaaaatagtgatttgtatatagtacacaccattctaacctcaatatctttgcatcaagtaaaaagtagcaatattcactcactgattgacggacaagagtattacgagggatggctctactacaccatatctggtggcgtgcacaactgaggatggtttggtggatcgagttttgcaaagtgaacgagatgatgagacaaagcgctagagctctagtgtgaagagcagaaaaaaaatttgacacttaaaaggtgatgaatgttgtgagtatttaatgaatacaaggaggggtgccttccacgagaagtgaacgacttagatcattcaccaaatggtatctaaacatctaacgaatgggaagctgagaaggtgcatcgattccaaacatttaacatccatcacaacctacatcgtgaaaagtgcttattaaaagaagggtccgcttaattgatttgtagattttggcgtttccccagcgcaaattgcaagagtcgacatttaaagcattgctagtatacatcaagaatgatatcctctgccagtgacacattagttgagggctacttgcatgacataatgaaaaacttgaagctaccccacgtgtggaaagccaataatgagaaagcaaataaacattgcaagctcctggaccgcgagacgtcccataagcttaagggataaatgctgtccaaatttttataagcttgacacgtggactctagtccaggaagccaagatgataacagaccagttagtgcctttgaccacaattcctggaaggggggagccctagctctgggaaagggctctcaaaaagggctttcgtgaaggatactcccacgtaaggagaagatacagggaacgtccacaatccatgatatctctctcagtcctaggaattgaaggaaaatgcctcgcaaaggctaagggcttcctagaccgtgccaatgaaggtcacgaaagaagtcaagatgaactataatctcgttaagtgtcacgagaaagctccacccgtacatgttagattgcagacatgacatctatactttttcaagtacaaagccaggctttgtcccacattatgctgtagtatagagcatgcgcacccagttgtaccttcccgagtgatccaattaatgactatcgataagggaaattcaaaaggaaagaccttgaagcgacacatataagatgatcgaacagtacaagctgacatctttaaaagccatgtgacaatcagccacctaccaaatcaacggtcaaatttactctagcaagatctgcccaataagcatgtgaagggaaaatggcctataaatacctctgcattccaagaataaggggtaactctttgaaattaaaaacactgtattttacttataaaaactctaaaaaaattctaataaagcttcttcttctataagaggagcgagagaaatatagagttccagtccatagtgtaactactggtgatgttcaccacctgccgatattactaataaaatagactcgtggactaaggatagttaatgcctgagctatgtaaaaatcttgtatatattttttattaatttttttctttcttatgctctaaatatttggtttctaaaaatcttggtaaacactatatatttatttagtcatcaattgatattgttttggtt

SEQ ID NO: 51760 - DNA, 1327 bp, Cannabis sativa
tttttttattgattatgtgatctgtattttttaagaagagacacgtgacgtaaagtggaagataatcacccaattaattatcgtataagcctttccgattgtagaaggacaactgagacatggaatgggtccaggcccaatgaaaactcaaggccctaccttgagacacaatgtcttccaggacctggaagccttctcagcctttctgggactcaaatgagacaaagccctctaagcttacaagaagaataatgtcagatgcctatcgtgaagtggaaattggatatctcccctgacgtgtttgcctttctgacacaggatcagatattgtcccttgtgtcagaccatagtagtgcgtgcacctatactacatacacccattttgttcgatgactcctctgactactttgtctgtcaggcgtgatttccacatgacaagtgtctagtgctagagtggtctcagttgtacggaagcttcgtcccacgagagaatctcttctaatgggcagaacagtcttgtctattgtgtattttgccctaatagtgggcatgcttctacataaaacccgaacgagtcatgagtatgccaggacccaaactctaccctatataaacccccttaccactttatgcaaaggggatgaaaaccctaatcgaaactctactaaattcctttcaaaactttcttctttttcaagggaaaacctagagagattgtcgtacagccagggttagggttttcattgtaaaacttacttgtaatacatttccaaagcctaaaaggccaatatactgagtagataaggataattaacgtctgatccacgtaaatcctacatcacatttacttaatcgttatttaatttcttaagctttcatttatttagtttctgaaaatctcggtaaacaaattaaaatatatgttttgtaatttttttacattttaaaatcaatataaacgggttttttttttttaaaaaaaaaaaaaaaattgaccaatcattttgtgttacgtatttgttagttcatcactcaacatctttgttagaatggatactaactaataccaacgaaataattattgaatgcttttgttgtgaaaaaaaatagctactaaatcaataacaacttataatattgggtacttttacgaccattttctctagctcttgtacaaatctctaatttaaatttagccttatcaattcatgaaaaattaaataataaataacaaaaaatgagcgaaaacataccaaagtgttagaatcaattgtacaaaggttatgatcttatgaatttccaatcaaattttttgggaaccttaagt

SEQ ID NO: 51761 - DNA, 946 bp, Cannabis sativa
gtctggctgacctccaccatacactctcttagagtagggccggccaaaccctatcacaccaaaatttgcaacccctccaagtaggtccaatcagtccagtccctacagcaacatatccttctgtgcaagcacagttggaccaactaagggatataattcagggcatagctggtccaaagccttcagatcttgaactatataggtcgagatggtccccattttaggcatatataaatccttatccttggccaacttcaagatgccagtatggaatatgtataccaaacgagaagacccgttggagcacatcaaatactttgagatgcagctcaatctccagaaggttactggtgatgtgtgatgtcgcatattccaagccactttttcgtaaatagctcaacagtaatacttcaaagtggccccgagaaggttaaattcttgggctgagttctctagagaattttacacacaattctcgtcctcaaggcttgtaccatcacaacttgaagatcgtgtcaaagtcaagcaacaacaaggagaacctttgaaggattacatctagaggttcatggcttaggccacaaaggtcaaaggccttacagaagagggccgatatacagctgtactgggggcacactccaactgagtgaaatctggaaagacttccaaaggatctcagccaacaatataaaggacttccttgatagagctaatgactttatcatacttgaagaagctatctgacaggcccagacatggtatgtcaacaataggcgatattaagacatcctacagtctcatgacttatcgggcgcttaggaagatacgagcaactctccccaaacctctagtggcaagaacactagaaacaagcaaaacaccaacaactctggaggaaatattggaaaaaacagaagtttaacacttctcccatgccacaaaatca

SEQ ID NO: 51762 - DNA, 1057 bp, Cannabis sativa
cctcaaaatataatattgcatttaaaacttttcttttgtaaatctaataattcaaaatttatcataagaaaaaaaaaagttatatatttcacacaaaaatgtataacactataaatatattgcttgttataaaaagtgaaaagaagaaaaaaaatgttttcttttttaaggaacaatttcatttaaataaggaaacatctacaaccaaataggcgcgtccattaataaaagcggtcaactcataatttttgttgatattactctatatatcaagaaagtatttatctatttaagtaatctttgctttagaatggttaattaaggatcattttaccaagataatttgattgaaaatttatcactatcgtgttatttcttctaattcctatgttcattggatgtaactttttctatggttaacccgacggtgtaggttgactctccaaacgcaaacataaatgttaaggttcgagcatttgtagttttataatagaagtaatgatagtaggtaataaagatatattaaaaatcatatgcaaaaaaaaaattattttattattacaagaaggtaaagttggaaaaggatttaccacttgtagttgtaattgtgctttttgggctatgatgctgctggtgtcctcgttaaatcattatatagtgtagaattataattgtgacatatttaaattaaaataattagtaaattttttctcagaacttatgtcactagcgatttgtgctcttaaaatatacgggctgttaaaaaatctccccaatatataacaaatatattgttgtactctttatgttaggttttttaacatatactcatttatttgctgacgtggcataaataaatctgaggtggcataataatttaatggtagttgaaaatttattaatatccctacctaacaaaaatgatttaattagaaattgaaaaaaagaacaaaaaaaataggaactccaatttctcatgaatttcttcttcatcatccgttgttttgttttttttttttttttttgcttgaaaaatattttgatctattcatagttg

SEQ ID NO: 51763 - DNA, 1621 bp, Cannabis sativa
gcagagaaagctggcagtggtacagtgaagaaagctgagaataatagtgtccccagcaggtatttgaatttgtttataatattttactgatattccaatactaatacttctttttattgctaccatgttatttatttacttctatgtttcataccatgttcaattttggttttttcaaaataaatatagccaaaccagctttgttttgtatgatttaattcaagtgagggaaagggtgtttgtatctgtatgtacggtcacatcttggccgaagagcgtcattccttttgcattcaaaatgagggaaagcatgttaatgcttcttcatcttgtaaccgtctttgaatgaggtttcgcaaacatacatgttaatggaaggctgtgactgactcgtttcttctgatttttataaatccagaccgccagcagtggctaagaagtcacccgcagttggaggaaacactgctccgtcgaatcaaacaggtaaaggggcaaacaagaaaaccggaatcaaggatccgaagcaaggcaacattctttctttcttcaagaagaaagcttgaggacaagatggaatggaatggaatggaatggaaagcctttcaaattctttagttattttgggttggattgaattgttgtccatgtgatgtagcccagatattgtgaattagttagtgttttaaactttttggccattttgatggctttgttttgtacatatgaatctttcctttgttagaattttcctatattaagtgtgagtgagtctttttcaaccttaattgtctagtgagatgttcttgcttttggtttcatattctaataatgctgaatatattttccaatataaccttactaaaaaagaaatcatgtatcaatttatataatctatcatttaaaagtgaagttaaaaaagttataatatgtgaaaaaggataaaattctactttttttattttacttcaaacttttatattacattatatatcacttttttaaaatacatcactaaaattttaacatattttattcactttaaacatataatattaatatttatacatatccccatataaaaaagtaaagttaaaacttaaaaccacaaacaattaataaaagagcattgctattgggtaccagtagtgcctagaacattctacaagtggcgattcacgattggttagcaatattctttaaaagttattttcttaagttatatggaatctgatacttaatgacactaatggcggtaagacacgaggatggtgctaggcactaatagtgtcttttaacaattctcttaataaaatatgtttagtagtattctgtaaatgaacaacatgaatactaaattttaaagaaattttaaaatgtagtatgttttttagtttggttctttaaatattttaaagattttctattttaaagcatttgatgtaggtgctcctagcattattttttactttaaaaaagttttacaaattgaccaaaaaagaataatgattgttacattttggcgcagagaaagagggaattagggtttttattaaaatttatttttttaagtttttttttttaatttttaaagaaaaagaaaattttttattttttattttta

SEQ ID NO: 51764 - DNA, 1293 bp, Cannabis sativa
cttatttatgtattttaatattaacttacataaattttaattttataaataatttaaaaaactactaactaattattaagtactacatccatataatattcaacaccttaagattttacccaataaaaaaatcatttaccaataataataaaaaaaaaccataaaaaggcaaaacgacttatcatatccattattaagattaagatatatttgtaacagttaaccattcaaagatgatggggttgaattcaaagattctctctgaagtttgtgtagcttacatagtgtgaatatgtgaaaactatgtggcaactttcatggaccatacttaaagtaaatgtattgtattaaaatcttacttcaaacttctttcattcccactcttttattattttattaatattggggaggcgattgatatctcctttttgtggatagagatataaaattattaatatatgagattcgtttaatgtactctgagacttatttaatatactacagaatatattttgtgaaactatatcacaagacaaaatcgtgttcttatatatatataatgagaatgagatatgaaagatttaattagtttagaaataaagtttttaaaattgtacctttgtgagatataattttttatatatctatgtatatatgattttttcaaaaattaatttatataatttagtaattagtaattagtaacttgttacttttttaataactagtaagtaattaaataattaaaattataattttgttgtatttcattgtattgtaggttgtgagctaagttttcaagttcagaagaatttagtgttgattggattttaactggctagaagtatatacattcactaaatttttattattataattaattatcaatgcatgcttaatagagtttaaatatcttaaatatttattcgtaatgaactaaattctatgatacattgtactataattttagctttaagaagccaacttgtatcacactgttcgtatcattacttgatatatatatatatatatattatttttatatggagaaaatgtttcactttctatctctatcaagctaataataagcaaacaacaagggatattgatatgatcttaattagtgtcacaagtaatgatatgttagttctttatattcatgattacgaagtcaatttaagaagaaatttacaagtgttaaccacttaacctaattaataggttagttctttatattcatgattacgaagtcaatttaagaagaaaatgaacaacctgccgccaaagacccca

SEQ ID NO: 51765 - DNA, 1044 bp, Cannabis sativa
ttaaagagagatttttcaactcttaactttgtactatcctaagacaatttttaatcaatcatcctttcctttgtgaaaaaattttaatttttagattttttagcatttttgtatatatttctaggtgaaatctaattttatatacatatatgccccctaagtaattttaaagaaaataaaactatatgtttacttgaaatacatacctaaaactctatatcatattttaaagtgggattgttcgaccccactagaaattttatgtttttactctgtaaaggcctgccttgcaagaaaacgaggtgcaagtggttttattaccttggaacatacaccaacgatcataggattattgtgagacttccccataaaaaggagttcaaacatgacttcttttagacctcggatctctttcccatcaacaccacaaaatttcaaatcattcctaagtattgccttatctcaaaagcttggttttgagttttaatttaataaatgtaggttttattttactaacctttgtttattttttgtgttgacaacgatcactaggaggcccgtccccactcctgagatcaaaaaaagtcataggatccttcttggccttcctttcgtgttgcgagcagctaatttattattgcacgagaacaacctaaaggcttgtgctctccttggcaaagaccaatttactaatgacttcaaagttccaaagtttttagattggcaacaagttcttgttcctgctgatgaggatgatagagattatgttgctcacacccactatttgaagaacacgaccccaaaggaaagaattgcttgaagtctattgaacacccattatggttttaaccttcattccatgaaagtgaaaccattgtttgaattcaaacataacttcagccttccttcatggaagccaaagtttgctatatagttcaaaatagttctcacaagcacgtgtgtttctactgtgcgtggaagatcactgggggttcgtcttcaaccttcatttctagaggaaaggattgcttgaagtctattgaa

SEQ ID NO: 51766 - DNA, 714 bp, Cannabis sativa
tagcacataaataataaattttgaaataactttaaaatagaaaagaaatttaaaacatctaatatatcttatttttagtttgagaaatgttaaagggcactaatggttcttaacactcttgtgatgtaacttaatatcgggtttcacttaaataaatattataaaaaatcgctaataaattatagggcgacactttaatatcatgggtaagcatttccaatgaaggcaacatttatagttgataaaatacgcacatcatcttaaaacattattttttttttattttatctctcatccacataagatttgtcacattttcttaaaaaaaaaaataattaatggttgataactccaaaaattgtccaccatagtttcacatcacattaaattaatgattttttaggtaagaaaataactctttttgaataaaagattgaaaaaaaagtcatatgaccattgtctgtattaagcaacacttcacataaaattagtcttaaaaattagaccacaatacatgtgtcaagaccactttaatgagcaacctccattgaagattttagtttagttctttaaatattctagaaattttctattttaatgcatcaataccatttgagtgcacttgcaaatttgtaattttttattattagaaaataaattttacaattattatttcacccattttgtatttattttttctatttttgtaatttt

SEQ ID NO: 51767 - DNA, 1507 bp, Cannabis sativa
aaaatcctaattagcctaatatttattatttattattaatactagtcaatgaaatagctcaaactcacatgctaatattattatttttatttttttatgcaaatattataattatttattttatttatatattattgagtggcatggggagcagtatgattggctaaataagaaatgaacaaactttaagaaatcatgcaaaccatacaaaacccttcctttttgccttatctgacacttatatacaattggctccattttcttgaattgacaaacttgcccccttcattttttttttagtttgcctcctaaattaatgagatatgtattacttttttaacaaactatttaagtattacaaattagttttttttattaaataaataaaataatagcatcactacttaattaatttgtatatcagcgtatgacttaacattaaaaaaaataaaattatatattttaaaaaatcattcaactaaaaattaattaataattaaaaaaattacgtaaaactaaaattaaataatttttttaatattaattacacacgtaatactaatgtgataacttactaagtactcatgtcatcatttaatttaccatatgtgacaaaatttgacaaaaatgaccaatttataatagggaaatttcactttttgccccataataaaacctccaatattaaaatttagaccatccactaatttgtacaaattaattccattgattatatgaacttcccattttaccttttttcttaaaaaataaaaaaaaaattgttaaaaactaaaaaaacttccctctctcttcctctctctcttccctctcgtacacctctctctctctagaaaaaactgaaaaagcttccctctcttgcttccctgtcgaatgtttatttctcggtgggcgataatggaaaaccggagcacaccccaatcactcaaaaaatttacaccattataatggataagttgtgttttaagcattttgttagactttatgtagtttgcgtttgttatacgtgtcgtatttgttgaaattggtattttttgtttgaaatggtagagatattgcagatctagttttctgtcgaaatctgggttttccagatattatcgacagtttatcgatagaatatcgatgctatgtcgatatccttctaagaaaggtcagggatgaccattatcgacatgttgtcgacagtttatcgatatcatgttgattaaaaagcaaattactgtttgtatatataatctagaattagaataaaactgccaattactgtttcacaaagcttcttaaaatatataaccttattttgtatatatttttatttttattattaaaatataaattggcatcagtatattagcaatttagcattatgttcagttcaaattaaacccaaaataatagtaaataaacaaaacaaattcttactttctttttttttttgaatgaaagagatgctttattaatgaagaaagtcattcattacaatttc

SEQ ID NO: 51768 - DNA, 1543 bp, Cannabis sativa
ggatcaaatttggttctattaacgggaagagttgaggtaaacacaaggcatccaaaaactcttaagtgtgtgtagccaggctcccttttgtatagaagttcataggtagttttattcttcagatttggagtaggcgtgcgattaataaggtatgcaacagtcataatactttcggcccaaaacttaaattggctatgagcctgaaaacacagagcacaagcaacgttaagaaggtgctggtgctttctttcagccacagcgttttgttcaggagtgccaacacaagtaaaatcatgtaatatcccatgtttattcaaaagttccttgaaagctagttcgggagcattatcggacctgaaacatttatatatgtaattgaattgagtttgaacataagatatgaattgaggtatgacaaataaagcatcagattattgttttaaaagatagatccaagtgaatcttgaatgatcatatacaagagtaagaaagtatctataactagagtgagattgaatatggtaaggtccccaattgtcacaatgaattaagtcaaaaatcttacaagcaaaattgttattgttggaaaaaggtaattttctttgcttggctaagggacatatgtaataaggagaatttttatgtttaacagtagtattacaattcaaagttttgtttaacagattcaaatgtttgttggaaagatgtccttatcttgaatgccaaatttcagcagcaacattgaggatgggaaagtcagtaggtgtaggatcaaggatgtaaagactattcttggtttcacctctgccaatctctgtcttgttgttcttgccctgtacagaaaattggttagccgtgaattgcacacataaagaaataggatttgccaaacaacttacagatacaatattgtacttgaaactaggaacgtatagcacattatctagcacaagatccttagtaataccaacagtgcaactttgatgtgtcataatgtgattattgtttggcaagactaatctggtagggttagtattgcagataaattggaaaagggtgatatcatggaaaatatgtctagtagctcctatgtcaagaatctaggagccttttatgggaaaattagacatagatgaaagcacgatacctgtactacctgtggtgtttctagcatcaatatttatcataccagcttgttgggttgcaagcaagttcagtagttttaatattgtgtagcagtgagttgacgcaaaagagcttggttgtctctagtcgttttattactgtcattattggtctgaattttatttgctacagcatcctttgagttgttggttttgttgtagcctggaggataccatgaattttatagcacttctcaatggtgtggccgagtatgttgtaatgagtgcaaaacggtttgtttctcttgggacaatatgatttgtttcctgtagtatccttcttgttgttgttgttggttttgtctccttgaaaggcaaaggtcatactcgggttgggttctgcagcagtattggtgtta

SEQ ID NO: 51769 - DNA, 1174 bp, Cannabis sativa
ttgttggatttaagaacttttttccaattttaataaaaaagtctaacatggatgaaagttcaaagggcataatttagtacatgccaaagtttaagggacgtgatttggtagatatcaaagtttgggagcataatttaatacataaacattctttgaaatagtaaaactaaacgaaatttgacaaaagtcctcaaatctaacaattttaatcattcagggggcatttttaacgatcttaaaagtttatgaggcataatttgatatatgtcaaagttcaggggtaaaaattctaattagcctaaattaaatattgaaataatttaattggaaaataaaattttagagaaaaaaaaaaacactaagtaggttgagttcagcactagttttgtgagttatgagttgacaaattttgatattaaatggatacaaaatttatgaacaatatatgatgttaggcaagccaaataataatgatatgggttacggctcatgtgatagttatatgtgatgaatattgttccacatttttctcatttaaaagaaagtttattatagtttattaaatgataatgacttcataaaattattatattttgagatctaccatttgtacccgtgagaggactttgtccctaaggttatgtttggtagaaagaaaggagagtatggataatttataagagatggagattgatagtaactctctctctttgatattagaagtaaggtcacgtttggttgagagaaatgaaaatattagaatatgaatgaaaatgagaatgaaaatatatatatacaattattttttaatataaaaaatagtaatttaaaatttaatacatatgattagggttggacatctgatctaatttaacttttttctcttatttcgatccaatctaattagtaattagattttgaaaattatcatctaatccaatttaattagatctcgaaatccaatctaatccaattactaattggattagatcgattttttaactggatatccaattacacacctaatttttaatattaacttaaaaacacgaagaaaaatacctagatactatatataaaccttcatttaagtttaatattacatgaatatatcatccttacaagtttaagtttagtacaatcaaaaatttaaaataactaaaacaataacact

SEQ ID NO: 51770 - DNA, 1667 bp, Cannabis sativa
gtggtgtgttcaagaaaatccatcacttagaccaaatatgagaagagttgttcaaatgcttgaaggtgttgttgaagtgagtgatccaccatgtccctcaccatcttattatctggtataagctttgtttattgtgataatattgcactcttatgagttttgtatttattcacatatactaaaattaaaacgagtgatgaaattaaaagacacattaattgtattgaatcctcaaaatgcataatcctctcaatctgcattcattcataatagtcccaatacagaaaatgcataagtaaataagtaacataatataatcatagcaaaaaaaggaatggaacaacacaagatagatagataattagatatgaacctcaatgacagtagtcaaaaacaagggatggcacgtgcttgactttatagaaatcttctcctccttcttccatcctttctttgaatttctctggcatatgatctatcaccatctcattgagtgtaacaatgtttcttactccatctggaatactcctcaatcttgtgcagttaccaatacgcaaatagcgaagcctaggcaatgcacccttctccactttccactcttttaatctacctacacaaataagcataatagattcaagtagattgaaacctcctcttgagcacaccatctcttcccccatataggcttcataaccaatgacaaggattcttaattttggtagcttttctaatgttggcattggatcatcctccagtttgagcttttccaaacttaacttgatgagatttggggagaattggttgacttgtggcaatcttactataggcgacatcactctaagtttataaatctgaggacaacttaatatcaaaggaacaatatctatgcagatgccagtactatttaccacttggaaagtaagaagacaagtgaatgtgatgattgtttgtggactgtgtaagaatgtgtcaagatttccatctatagtaattttcaatttcttgatactctctagctgtagaaaatcactcagaacaagatctttggtacaaatatttcccaatgtctgtatatttctagatttagttgatctcaagaatttaccaaactctacaccactaactggagtcaaaaaatgcagatgcctcaacttttgcaacttgcacaatgactttggtattttatcactcttagtccatactctcaaagtctgcaggcatcttaaattgccaaaagaagatggaatcttttcaatctgccaataaggaatacttaataaccttagatggattagatttcctatttctttaggcaacttcatggtaataaagtcattccaatgcggaccattaataatcaaaactctaagcatcaaaaagtgattgcatacatgtctcaatactccttgttccattgcgaaattcattccccaaccatctatagtaaggaacctgagagagccatctaaatttcgaaccatatgaataaaatcatgatttgtcttgtcattgttatagatggaaacccttcgtacatttgttgctattggttcttcccttttattcctccaatcaataaaatgcagaaagttttcatcttgagctttagacagacacaagtctcgcatgagatcatgaacgccaaatgattttatccttcttcctgt

SEQ ID NO: 51771 - DNA, 1187 bp, Cannabis sativa
aggggaggctctatcaagtgttggtagtcacgggtcagaggtgattcccacagagataccaagtccgatacctttcctcaaccccaacttaactgtgtctttagcagcatggatgctactccaaataaagcttgggttagaacccaattcagcagataagtagtcactctgagagtagtatcttgctttaaacaccttgctgaccaaagagtcttgtctaaacatgagtctccaaccttgctttcctaacatggcaaggttaaaatctctcaaatttctaaagcccatgccaccctcggctttgtcctgatttatggatccgataaatcatcctatttaataataattaatcgatctaattataatttattgctaaatattgaatgtttaattattattatattgaattaaaatttaaatatccaattaaatcggattaaatgttaaatagaatgtacaaaaatttaatacatccgacgtttaattaaaataattaatatttcatttaatttaaatgattaatttgattttatgtaaaaacaaatatatatatatatatacatataaaaaaattaatatatattttttcaattggattgatttaattcaatctaataagatttaaaatattaaataaatatgatttaaaaaaataataggtctaaaatattagataacaatgaattaattcaatagatatacattcaatacatccaatggatacaaccaatccaatagatctagtgaatgattgaaatgaattagatcagattgcatggtaaaatgtaaccaatatataattgaatcagatttgaatagctagatattgaatgtaatctaataaataaccttgtgctcctcaacttttcaactcattaacaatagtccctagactttttatagaattgtaaaagtcaattgtcaaattttatcgtacgtgacaaacaaaatgatgacatgactgtttagtcaattgtcatattaacaccacatgtataatttaacattaaagaataataattatgtattttttaaaaaataattaaattaaaaattaattaatgattaagaaaattaaatagtttaaaaattacttttaacatactaaaaaattcaaaaagcaccaaaaatactaaatagcctaatatattaagaaaatatgtactacacacttaaattggtatttt

SEQ ID NO: 51772 - DNA, 925 bp, Cannabis sativa
aattttccataaattgttgttcaaattatacaccaaaacttgtttacgccataagtgagtggtgaatggttcacatccacgtactacaaaaaatgttagagggagtttcgtttggttgtcagttgcggggttccaaaaataaatataattatctaattgttgtaggaaacaaaatacaccatatggctacccacaaaggaaataagaaaactatcatatccttcttgttaggcgtgtcaatagagaaggagttagatgaaatatgattgaaattttccaagctatgaattgagcacaacattccattatggtcatcatcgcagaaaatcaagaggttacaggggttgtttgacttcataacttcaaaactgtttttaatttttaaaaacaaaaaacaatttttttaaaaactaatagaagttgtttggccaatatttttaaaaacagttttttaaaaattgggttttaaaaaattaaaaaacagaaaacatcaaaatgttattttcaattttcaaaaatatattttttttttatctaatatattatgctttatatttttactcatccgaatgggtttatattatggtatggtgttaaaatattgattttttttagtaagaaaaaaaattaaaaatagttttaaaaaacttgtgccaaacacgcattaaatttttaaaatgacaaaaaactgttttctattctcactttcaaaaacacaattttaaaaactaaaaactgaaaatacaaccaaacaagctcttgatgtttgtggtgtgcattcatgaaatctcgttggcttattcagaataaccaatatttgctcatgcattttaacctcttgatacttctctttttccctatagtagttaactttcacatccccaataatgtttttattaaacttccttaggacatgctttagcct

SEQ ID NO: 51773 - DNA, 1416 bp, Cannabis sativa
acagaaggatcaaatggtgaattacaaactcaaatattatcctaaatgactataaaatcacccaccctgcaattcattgttactttctcaacttcaaacaaaccaaaagtttaaaaatccatacaaaacatgaaagaaaaacctaacctttctcatttcttatggactgtgttatccacttgacgatctcatatgttcgagatcaaatacaaactaaaaatcttctagtattacttacaataaatctaaaaaaaaaaaaggaaagagaactcaagttagtactctataaataaatattattagacttgccttggtaactatctatgaatgtttcacatgaaagaatgaaacattcatgtcccttctatccttttttgtaattaatttaaagtttcagcaatcgtacaaaattcataatgactcacatttttcttacatagatagaaattcaaaatgctttctcttctatttttttttaaaactcccttgtagtataataactagtggcttgcacaatcattgaacgattatttaagcgcataagcagaaaattagtaaataagaaacaaaaaaataaggattaaagatagaactattcacaacttcaatgttaatttgccaaataaaaacttttagatctttctctatagctagttttataagatacggtaatatgacccacaatcaaaactaatgagtagaaggaaatgtctatttcaactactcccatattgatgtatccttctttattgatactcaaaaccccaaatctatgaaaaaaaaaacttttgatgaaactaacaaaaacatgacatacaatgagagaaaggtctcgagtttgaaagaaatgcagcttatctacgacgaatttcagacttcgaacaattagggacaggctgcgaagaagaagaaagaaatttagggtatcgatacacagttattcacagtgagaaacgacggcgaattttgaactttgaaaaaagagggcaggctataaagaagaagaaaatgatttagggtaaattaaaattcttgattcttttagaataaaagaggatgtatataattatatatgtttatctttatattatttttaatctgatgacacataattcaaaaatgtacacatggccaataaattatggtatgagatggtcatttctatccacatgtgacattttctttctatgttggcagacatgtcattaatattaaatcaaaaaataaataaaaataaatctaaaatactattcaatggagcgggaatatctattttcacaattgaatggcggcaacttttggctccaaatcaaaatagcattcccaccaatgaaaaatcatttagctacacatatattaataacaaatatatgaaactccctatgaaaataattatgagtaacttacctacaaatt

SEQ ID NO: 51774 - DNA, 1436 bp, Cannabis sativa
gcatccataaaggatagcaaattgaaacccgaggtggcatccaccatttgatcaatctggggcaacaggaagcaatccttcgggtaagccttgttaagatcagtgaagtctatacacacccgccatgtcccattcggtttaggtaccaaaactgggttggccaaccattctgggtagtatatgtcccggatgaagccattggataacaacttatccacttctttctctagggcgtcgaccttcactgggtctagtaagcatcttttttgttgtaatagaggcatatatgggttgacgttcaagacatttgtgattacgtgggggcttatcccggtcatatccccatggcaccaggcaaagacatctgttagtcacctttatagtgtctatgatcttactctgctcctctggttctaaatttttttctagacggataaccttaggtgggtcgaggtcgcacaatctcacttcctcgatgtgctccataggttctaaagttacttcggacccaatatgtgttcttttaccaagggttcttctgacaaatgtactacaacattgtaatattgtattgcttctccttggttccccctcaccattcccactctggcttcccgggtgggaaatttaagacacaggtgtcgaatggaggtaattgctccaaagtcgactagggtcggcctcccaaggatggcgttgtaggcagtagggcagtccaccaccacgaaagtgcagttattaaaggtgctttgtgaggtgtcaggacacaaggtgattgagagtctcacctttcccatcgggataagggtcgtcccgttaaaccttgtgagttgcgaaccgctaggagaaaggtccctgtcggtgagctcgatggccgtgaaagcatctttgaacagaaaattcacaaagcttctattataaccaatatcctggccacaaccttattcgcactgggagtctctatgaccagggggtcatggtgcgaaaaatgcactggcttcgtgtcttcctccaggaaagtgatggactgatccataagtctaggcctttgagctggcagttgagtaacttcccatacctcttcgtcatgttttaaggctccaatgtaacactctaactcgttcctggtggttcctctaatataaggcccctcggagatcatagtgactctttcgttaggccgaggtggcagcccggatgtctgctcaaggggcacccctccaggaggtacctgaccctcgagcgtccccccgattcctccctgaggtaagggacctccggtttgatctggattcaaatgaggtaccctatttttgatccattcgtacaagtggcccaatcagattagattttcaatttaatccttcagatttttacactcgtttgtggtgtgactgatgtcgttgtgataatcacaccttttgttggggtccctc

SEQ ID NO: 51775 - DNA, 725 bp, Cannabis sativa
ttgagccatagctgttttgagcgctgtttccagtaggcctctttttgggcgagtacatcatttagcttttgttgagcatctttatacatttgcacgctaagatgatctcgacagcctttgagatttttgatagtagacttacattcattgatacgatccttgaaagagcccgtgatgtctttgccccagcagtgaagacgatccccacagagagaaattttagcttgaagatcaagatggttagaagaatcccagatgtcacgaatgatttgctcgcacatgggctccccaatccaagcattttcaaagcgaaaacgatggattttaggagtcgagagcttgaagcaagggtcaagaaggagaggacagtggtctgatgtggagacttcaaggttatggagtctagccatctgaaataagtcaagccaattatgagaggcgaggccacggtcaatgcgagcttcaatccagttggaaaaaccatgacctctttcccaagtgaattggtaaccatagagtgggagatcaataagagcacagtctgagagaactttttggaagccatcgattaaccaagaagggtaagggttgccgccttttttatctgcttggctgcagacattgttaaaatctccgataaggcaccaaggttgagaacgattgtcttcataaagagtgcgaataagttgccaagtatttcttcttaaagatctattaggctcacc

SEQ ID NO: 51776 - DNA, 816 bp, Cannabis sativa
acactactagtacccaataacaatctttatttatatacattatcttatctaatttaggtcggtgcttcaatttggaataccaagcaaccccacattcatatattaatttttgtttttggatggtttggacattaaatttactcactattttaattttatatatatatcattttaaataaatctaattattataaagtggcagatagaatatgtaggtagttagatttaatataaaatagattaattagatagataatagatatagatacatgagtattaattaatttcttcagatattttttttttcataagaaaattaattttgttttttgatatcattgttgggtttggtttcgatcgatatggtcaagaaaaagagggtagttggtaatagtcaacacgttatggtccccaacccacttcttcatatagctttgaccttagtttagagaaagaacagtgttatttttataggtgacgctttataattgattagcaatatttttaaaaaaattctttttttaaattatatgctacacgataattaattacactaatagcgatataacacttaaaagggtatggtgccttttagcaattctcttaaagaaaataaaagtgataattacaatcctttatgctataatcttttagtcaatttccacgtttaaattatatattaaaatatcttttttcaaattatttttcataataatttttgttataaatttttaaaatatgctaaataatatcaaaattatcctttacaaaataaaaaaatattaatattgaaaataatatatattatagtaattt

SEQ ID NO: 51777 - DNA, 2520 bp, Cannabis sativa
aatggaatcctaaatgaccttaggctatggttaagttagacctttttcaagcctgtaagcagtacaaatccacgcccaaaccttattatggcatcccttagacattagtgtggccaaaaaaatacaatcaaacactccagctaataaaaacctgccaaattcactcaatcctgtctatcacgagcgatgacactgtcaaaatatgaggtcaccgcagccgcacaggcttaagactaatttattataatcttaaaaattgtcgagaaagtgttcgagcaagcaacccgagttcaaagtctgttatatcagtgttttgtttcaaattctactgctaaaaaaccatgaacaacagtgagatctttattacatagctgtatttcaagaataaataaatatcacaatagttgtatgatatctccaacaaagttatcaatttagaaagcagtgcacgaggtgagctgagactttaaaagcatgaaaattaataataataataaacaaatagattgttccatctgatctttggcttgacataacctttttgaaatacttgtctcagcattcagtctttttggtatagcatctgtcttggtcaatcatctaatatacaggttctgcattacaatgtagttaaattaataagttttagatatgcaaccatctataaacaaaagtgatataaacccaccaaaaacgcaataattttattccataactggtattatgagaaccaatcaaattaataccaatcaattaagctaaaaagaaacatacaaaaatgggaccaatcaaagaatttgcttaaaacattggtataccatgaactgacaataagaaataaaaaataatagctaagaatctcggatgctatgcctaatatcttcggccactacatagaaaccaataactagttgatccaattgaaataaaagttcatgaaaagaatactgctgaacccagtcaactaattatgggatttggtgcacaagtgcgagtaggttcatgaaatcctgctcaataagttgggccttctaaaactcattatgggttttcaatgacgcactcaagcaaaaggaaaagggtggtggtgctggcattttatcttcctcaaagaaaaagatggacacatgtcccaaatgtaacctagacccctcttcgtatgagataagctaattccattagaagtcttgatattacatgagttaaaatcaccctgacagattaatatattaaaaattgtaaatgcaagtacagtaacagtaacaataacaataacaataagggcaataaaaaattgggttttatgaactttagtcaagataaccgttggcttgattttgcctcctaagcaagactaaggttgcttttggttaggggtaatgaaatgaaacaaaaacgaattagtttttattctattcctttgtttggttgcattctaaagtattagaatgttattctaatgaaatgattttttttaactattttagtgaaatgactataattttaatcaaatttttttttttttatgtatttttaaatttcattctattcatattctcgttgtcattcctattattgtgttttcattccatccaaccaaatgcaacctaaaagatctaaacaaaggccacctttaatcccatccttataattctttccatccatcatccaacccacctatattaattgaaaacataactattatttcaaacagcgaaaaactcatccttcactgaaaacaattttcaatcctaaaaagaatttttttttgtttttagagggtagaggaaagaaaatatagcacataggccacatcaaatgattggcatttatagttgaaagcagggcaagttccaataatctaaaaccattaccaacagtagttctatttataaggtcacaactctcagccaaataagtgaagcccactatcttcaatagtctttatcctcttctgttcccaaagtaagaccactgtgagtacattttattaaaaaacatcggctaaaaacgcacagcactaggtgagagatgctgtacttgcatctagtagtgcaactgctagatgatgaaactgtgtgaaattgaagttgcagttctatactaggcatattataaatattttcaatacaagcaaaagtgattaagatctttcacgtgggttgaaaatctaagaacacagaagctgattgtgtataggaagagagtggggagacctatttagacgagttattttcctatattcaacaggctatgagggtactgtttcagttataatgtagatattttcgctttttccctctcttgggagtcccaaggtctgtaaccatggtattcctccgccgatggtcagggttctaataacaattttgggtagcggtcagtcaaaaacaacaacaacaacaacatagaagctgattatataggaagagaacgataatgccctttgtaagaaagatgagacttcagattttattgtcagcagttaaaaagcaagagattagataaatacctctttga

SEQ ID NO: 51778 - DNA, 1060 bp, Cannabis sativa
ttagggcattaaacccaacattactctcctaggcgaccattctgggaaagtgatgcaagttttttatcacaaatttgtcacccaagtccaagatggactcataagcccaatactgcaatgttgtagtatagccataggccaagtactttgactcttttgagacgttcccttttcaatcttcctggacatattcttcttcttttctacaaagtctctactccaagtttctttgaccatgttgaacaaagtcttccccacgggtacttgtagaagaagtcaaggtcgttagccattctaatagaaaatggtggaacgacattcttctcttctgtcccaatgagtgcacctgtcaccaatagggcaaccacaacttgtacacgtcatctttttccttgaaactctcaaagactctgcgtagttgacctaaggtgatggatgggtccccattgaagtactcgactatcagacggtttgaacttgctttctcttaaattttggacatagtaggtctagttaacaagtttagcccagtcaccagagcgaactcagctcgcctggatcttcatctcttctttgcaatataaaagtccactttgtgttttttatctgacttgatcttgcgcatgaataattgatggataagtgcatctgaaaacaataattgctctctctctaagaattgtttgaaaggggattccttcaccctccaacaatttgaattcctcatattttaattttatttcgggtaattaaaactaccatcacgccaagtgacacgcccagtgtaatggtctaacactggaagtataatgtgtgaaagtcttgaagactgtaaaataaatacaacaaaaatggaggttagtgtgtaaagacatcgaacatatatcacacaatttcaatatccaaatatatgatagcattggaccaagtgtcggacccacatcagacctatatcagactacaaccaaaaaagatcaattcaataaaatgaaataatgatcgggtagcatatcagactgtatcggtgttgggttttgtgccctaaataaagcccatttca

SEQ ID NO: 51779 - DNA, 1421 bp, Cannabis sativa
ataagccttgttgcatgataaaattggatatccaaaaagcctatgatacaattgaatgggggtttattgaagagatgttaagaggcctgaagtttcccaaaaaattcattcaattagtaatgaattgtattactactcctagattctcattgatgtttaatggcactcttcatggcttctttgaatctaagagagggataagacaaggggatcctatgtctcctttgttatttgttttgggcatggaatacttgtctagactgatgctaaaaattggggaaaaaggggactttaagttccaagatagatgcactgttctgaaactcaatcacctagcttttgctgatgatgtccttttattttgtcatggtgactttaggagcattctctacatgttgcaggcactaaagattttctcactcacatctggtttgcatcctaatgcaagtaaaactgccatatattgtagtaacatgcaatctgaggttgtaaaccaaattattcagctttctggtttcacaaagcaggacatgccttttacctacttgaggattcccatatgtgggaaaaagatatctgggaaagaatgtgatttattagctgagcgaatgactgctagaattaaaagttggagttccaggaatctctcttttgctgcgagaatcactctaatcaattctgttttaactgctatacaggcttattggagtaaaatgatgatttgcctaaaaaagtattgagatcaattgaagccatttggagggcttttctgtggaaaggacaagcccttttccaaggtggaggctcagtagcatggagtaatgtgtgtcaatcaaaggctgcgggtggattgggaatcaagaatattgaactttggaaccaagctgccatttgtaagtacatatgggcaatttcaaacaaccaagaaagtttatggcttcgttgggttcatagtgtgtatatcaagaatcaaaattggtgggactactcttcttcaatacattcaagctagtattggaagaagatggtagctctcaaagatcgaatcaaaaccctcactgatcctgctatattccagacacaaaaatacatgattgctgtaggttacaagctgtttctgcctactctcgaccgactaaactggagtagggaagtctggtcaaggcacaacactccgaagcatagtgtcatcacttggatggctatgcttaataggctgaaaactcacgataggctcattcagtttggtattcaggtccaggctactgctatctatgcggtacataccctgaaactagccagcacttgttttttgattgtaaaattgcaggttactgcttgcttgagttaaagaattggctggaatggcatgctcaaaccagcaacctgcattagcggatgcgttggattggtagagctaa

SEQ ID NO: 51780 - DNA, 1050 bp, Cannabis sativa
  modified_base (981)..(984): a, c, t, g, unknown or other
tgtatagtattatgttaaattataatgtaaagtattaaataataaataatttaagcttatttagtacattgtattgtataatgtattgtattatactgtataatataatattgaattgtaatgtattatattaatatttggtattaactttggtatttggtattaactttattaaaagtttatgtaaaattatactatctcataacttgatcctaactccagacccgatcttggatctgtgtcaaggtccatgttcgagattcgggtccgagatcaaggtctagagcccagacccttttctaaatattttaatacaaattatttgttatgtagtaaataatataattcatatttagcatgcaaaaaatatgattcatattacattaaaatttatggttataataattaatacaatacaaaattttattcaaacatagtgttagttgttatttaatacaatacgatccttacggcctatcaaactgagcccttagagcatctccaatagtagcatcttaagtatgctaaaaatttataaatcatctaaaaatgtaatattttattttatctttttttcatatcattttgccactcttacttctaaaaatacttcaatgtattatactatttaaaaatactataattatgatctcacatattattatttaatatatatcctaatttttagctacaataattttttagcttcaattttttatttaaaaaaaaatgaatagcattcatataaatttacagaatgacattattttttctccaatggtatagtatctcaatattttgccacataatatgtccacctcactaagtaatctctaaagttttatcattagagatactcttaaatgagtgttaaaaggtgtactttaatagcatcattatgaagtattatatctttatttgtgtaattatgtatttgagttttatatattttaatttaataattattaggctaattagtannnntttcccctgaactttgacatgtagtaaatcgtgccccctgaacttttttgactgttaaaaattccc

SEQ ID NO: 51781 - DNA, 1112 bp, Cannabis sativa
  modified_base (277)..(279): a, c, t, g, unknown or other
aatatgaacaaatttattattaattgcaatacttggattaattatatttaagtttaacactaagtacatctaataatttgttattttttttatttaaaaaaaaagtcacccaataatttctcataaattaaaaattttgttatataaccacattttatatagaatagattttcactaatatggccataaagcaaaaacactaattaatcatatcattcacaaactatcgctaattaaaatatgataataaggttattcaaaaatatatatatatatnnntatatatatatatatgataataaagttgttccagataaatatatatcataaataggttttgaaaaagaaaagaaaaacaaaatcatagtaaggagactacaaaaccctaaataaatagaaaatatgaaaagcatactacatatccaaagagattaattagagtcatgtaaaatattatgcgagtcttgctttatttaattgtttataatgtagtagtaaagaaaatgtggcttttttttttttttttgagtacagtaaaggaaataaggttgagaaacatgagaaaagagagaatgaaaggagttgaaaaataaaaaataaatgagagaataaatatcatatatcaacactccaaagggcactgtttccttctccacaggagtcatggactgttttcattctgtccactgaattgcatatcccactgcactgccaatcaaacgatgccacgcaaacatttccttcttgtgctttccattgacaatctaccaacgtatcaaaaatgtgtagcaattttaataattgtaaatttctttaaatgagaaaaatatttctcattttaatgtgcaagttatatatggtaataaacttatatactctaatttgattaagtattgttattaattggtcaatcttgttgtcataattgtatcacaaatttaatatattattaatacattaatttagagaatgaaacaagatgtaagatatagaattaatgccgaagaaaatatttactatttaggaaggatagaaaatggtttgagagtttataaagattacatgtatacaaagtttcagggaattgttaagtgtacaagttggttgagcaa

SEQ ID NO: 51782 - DNA, 787 bp, Cannabis sativa
aagtttaattagaacagtttcgcaccattaatgatttcagagcttaaacaaactccaaactaaggcaaattagacacttaccaatacatggtcctaaagctgaaccttcttcatgggcatccaaaacccttccagtttgaggctcagttgttccagtttcctgatccaaattcactatcacaatttcacaaaagaaaaataaaattcatcataagtgacaactctttcccaatacatgctcaaatatacacaaaactataaacaagaagcccaagataagtctagacacaaatgtacaaatttaattagattactttcacaccattcacgatttcagagcttaaacaactctaaactgaggtagattagatacttaccaatacatggttctaaagctgaacgttcttcatggaaattcaaaaccctttcggcttgtggttcggttgttccagtttcctcatccaatttcactatcactaaagaaaaataccactttatcataagtggacaactctttctccatacataacataaaacaagaaatccaagttcaatctaaacacaaatgtagaaatttaattagattagtttcgcaccattaacgatttcagagcttaaacaaactctaaattaaggtcatttagaaacaaatcatgtttggaacatagaaaatagcagaatttgttgacataggggtagttttgtcagaaacaaagaatgggcatacatataattaatcgatgattttaaactggacaataaaacttgagataccaattttctcggc

SEQ ID NO: 51783 - DNA, 1472 bp, Cannabis sativa
cccaccactctctctctctttctctcgcccatcagcctctctcgaccatctccctctattacacaactatatatgttatatagcttatacatatatatacactttaaaataaaatgcatgatatatatcatatatacataatatatattatatacgtatgtctcatataaacataattatttctacatatttaatctcactaatctatattatatcacatgtacatatatataatatattactcatatatatatatgttatatatcatatatatatatttatctcacacatatatacatataataacatgctataaactcagaaattatattatatacaattataatattaatatgatatatacatatatatatatcacatatacatatatatatatttctctatatgtgaacatgtaaacttctcttatctcaacataggaaaataagttaatacatatactactattatttaaaatagtaaaacacaaaattaataaccaccatgctcatccatgaataattttcacagaaaatctcttacccttgaaccctcaaaatcttgattctaatcctcttccattgaaaataaataaattttttattgttagagattttattatagtagaagaaaattaaatcatcacaactctattgtaatataatatacaaggacaatataaaagatggataagataaatgttacaacattatatacactacatgtattatacataaaaaaaaaaaaaaaaagtagaagaaagaagatattacaccatatgtaatataacatacatatatataatatgatgaagaagaagaattgtagaatagatacactcactcacaattaacctagagtgcagaataatggggatcaccatgacttgtatatggtataacacctttgttcaaaagcttattttccctatccttaagcactatgtgaactctataggaaaaagctttagaaattatcaagccttattttttctagcaagtgcttgttaatagtaaacttcaccatccccatataaacacattagccacctatatataatatttagtttcacacccattcaaattcaacaccctacacctcatgactgttaccatctcttaattgagtgtaaataaaattaaatgagtgatttggaagttgtgaaaactgttagaaatcatcctcattgtcaaaaaatatttaagtaataaagttgaaaaaacagtaactagttactagctagttaccaaatttttcaatttttgtaaatgactctccaaagccttccaaaatattcttacttgatcttatatcacttacacacaagataaatataaaaatagaccctcaacagctatattttcattataactttgaatttcaaagaattaagttgtgtaacttttttttacacatttaattggtgataatgtaaaagttacaccatataagtaactacacttcttatatta

SEQ ID NO: 51784 - DNA, 1138 bp, Cannabis sativa
agtaccttactttttaataacatctagtatcttttaatataaaattaatcttttttggatagattagtcgcaataaaaaattactttgagtatggtacatatttaaatttgtttgagtttaaaaattttattattttttttgaacaatttataaaagaaattaaatgattactttcaatttcaaatatcttttttggtgacagtaaaagaatatacacttcttacatatcaaaatgatcaatttaaggagtagatcacaataatattattttttttaattaaaataattaaaagtgtagttgttatttttttaaaattgtaaaaagtaaaaatagatatataaatacaaaaataaaaaaactagtcagcagaaaagagaaaatgatgaaataaataaataaatgtaccatttaagtctaacactaactacatataaagcatatagcatatatttatttacatatgcggtataattgccgctggctgtatcatttaaataattaatggtatatttgttaattattttataattaaatatatgattaaaaattcccctaaaaaaaataacaataatacaacaaatatatagatctataaaacacaaacttcatatcaaaacatcacaaccaaacacaaacttatgcaaaaataaataaataaatacgttgaaggccatggtgggccaccttcatcgttgggctatcaaactgcctacactgcataagcgcttttacagtaccacaccgtataaaaaatataatttgaaatcttttttgtggtgcaattgtagtttgtatttttaccaaaccgtgcagtgcagtatatatagtttgcgatttttaagttaataagtactgttcaaaccgcaccgcactatatattacaaagttaacaatttttacaatatgatttttatttttatttttcatataataacaaacatatgtaattgatgtgtatattgtattattttttttgaaaaaattcaatataataacttgatgattagtatatgtgttatgatgtttaaattgaaataagatttttttttttgtattattaaaattttattagattgatttttgaatttttattatgatgtttgatgatgatgatagtgtaaaccgcttaaactgca

SEQ ID NO: 51785 - DNA, 664 bp, Cannabis sativa
ttttaaaataaaaaacaaaaaacatcaaaatgttgttcattattttgagaaacaatttttattttttttatctaacatattctttttttcgttttcgttcacatatcaagatccggacatgaacctgctcccagaccccaactcggacccctaacccagacctcgaaccccgattccgacctcgaactcgtgttcaaggtctaggtttgggtccgggatccggttccgagattcaagtttcggggtcaggtcgatccctaggccaagtctgggtctagagtcgggattcgggttcagggtctaaatctaggtctaggtttgtggttcgggtttggagtcaggtccgagggggctgggttcatgtcgtggtatggtgtagacggtagaatattaaagtttattttagtaaaaaaatctaaaattaattttaaaaaaacatacgctaaacacagttacatttttaaaattaaaaaaataataaaataaaaaaaaaaggaaaagaaagaccaatttctattatccgtgttttcatctcaaacacaacctaacaaggcaacgacctttttataggtttttcttattttcatttagagaaatgttaaagggtaccagtgggtccaagcaccatcttatgtgtcagtatcgctattggtccaactaaata

SEQ ID NO: 51786 - DNA, 1832 bp, Cannabis sativa
ttagggtataaaacccaacaagaattatacctttccaaactcttctaacactcttgcaaaagaacaaggcatgtgaaatcgattctacatctctatcacaatggatacacaaaagggaatggatgttttttctatggtcaaggttcttgtttgtgggtaatgtagatgtggaagctctatacgcaaagtattttatttttaaagggaaatttaggtgccaaagtgttttctacaatggggaaaaggaagaagaggatggaatatgaggaggagaattggaggaatagcttaagtgatctcctgtcttaaccgagtaagtcctcgattttgtgaatctccaaataagattgtcttcagtaggcaggagaggaagggaaatggaaagaatgtcttaaacaatatgaggtggataacattggttaagacgagtagcattccaaaccatgttgtcggtgatgaaagacgcaacaaggttaagagctggttgggtagggaagacatggcgaaaagaggcagtgaaataacttggctccagtaccttctccatgattttcaaatacagcaaaacaattctgctttcatttactgtgataaccaatcagcaatacatattgttaacaatctttcatgaaaggaccaaacacatagagctggattatcatttcatgcgtgacaaaatcaaagaatccaaaatcaaacttgttcatgtcaacaatacacatcaacttgctgatgccttcacctaaccactctcttccaacattttagcttctcacattagcaaaatgactgtatataacatatacagtccatcttgaggggggtattaagtttatacagtgttgatacacttttgtccagattcattgtatcacttatgctagttgtccctaactgttttggtagttatttccaacggtattctgttatgaatacctgctggacttttcatcctgctacactatataagcttcctatgtaactttggattcgatcaatgaaaacattcagttcttctttcattcttttatcttttcgcaatagaaggctagcctatttttcttaccattaaaagattatccatgtttggtggcgactagaagagctcacaatcgtcctgctcatccatcgccccttgcttccagtggttctcagatcatttcacgattcaacttggcttctctcccaggattcatagagcacgaggcaacccaagaaaaaagactagttgaataatattcctctattatgtagtcacacacttagaaagaccacaaagaaacagaaaagcaaatgagatttcaacattagattcacccttttaaaggagtctactttagattttagaaaatttacacaatacatctaaaattagacttttgtttttttatatctttacggactttttttatttagatacatatatttataggtttttatttatttatttattgaagaaaaatgttgctttcttatatcagtaatgttaaaaaaaatattgttctgaaacaagagagaaaataaccctgtatttttgttaaaaaaaaaataataaattcgtaaaaatacaaaaaatttgcccgaaaaaattctcaacttcttcaatatatatatgattaagaaaacaagtaaaaaattacttgaggctagctcaagtggtcataaaagggtgcgtgtgtgttggaggtttcgagtcccaaattatgtatgattataatatataaacgcttaaataaaaaaattaaaaaaaaaaagagagaagaagaaaacaagcagaagtgctagaaaaaataaagagttcttttatcatatttgctacttttttttttttt

SEQ ID NO: 51787 - DNA, 583 bp, Cannabis sativa
ctggtatggctaatagatttaataaagataggaaaacaattgtatcgactcaatcagaagggaaaaaacacagtaagtgagtatatatatatataataagctcactagagtagtaattagttacaacagaaactgactaactaacaactctaacagctcactataacaacaagtgacagctcactaaatctaagacactcttaatactccccctcaagataaagatgtggaatgaatattttgcaatcccatcttatctttgagtgtctaaaactgtgttggaatgggaatttaggctaaatttcttacattcttaccatagaaacctaatttttgaaaaactaaattcagtgtgtcctatatgtttgctggacttagaaacgataggataacactcacaataatgataaactcaagaaaaagctaaggattacaaatggactatatggtcatatttaatgcataatagtatttgatgtgtttgttgtgtactcacttaggaacaacataaatgtgttgtttggaacaaccactatacagtcgttgtcatggattggtgaagtttatttattactcttgtaga

SEQ ID NO: 51788 - DNA, 1345 bp, Cannabis sativa
  modified_base (1291)..(1308): a, c, t, g, unknown or other
gaagcttaagggtgagagagagggggtcggataaagggctgagaacaaattgaaaatggatttccttttctttgaaattttcttttattgaaaataaatcccatattgaaaatataataattaaaatttaagcaatatatatctaatctaactatcgaaaccactaataaaattctaatagtaattattttttgaataataataataataattagtatactataccataatatagttggataagcacgcaattaaattaaattcacagttttatctttcacaagtcataattacaaaaattaacagttttaacatgtcatttatcacattaattcacatttaataatttatatcataagtaaattggaggctaatagattttccctcgctttttgctcttgcagctcgtgctgaagctatggcaaaacaaggtcaaaaaacaatggaaaatcaaaatctacaactaagaatttgaggaggaaaggatcgaagactggtacgactgagattcaaacgcaaatgatggaggatgttacctgtattgatccattggagcaatctgaagatgatgaggatgagattggggagatgcagggaagaaggggattggaatcgaatcaagctgacatggatctattctaacccccactgtctcctcgaagttcacagaaagagattcaaagaatggaggatgctgagaaggaatttttgagcttcgtcaaagcaaacaagcaatgtaacagtaacattgcaaaaggtatgtctgttaccccacctgttctgagatctgtaaatgtaatccataatcttgaaagctcttttacgagccctggacagggaagtaaggtcaagattgaaatggaagacatagaagaggaagtgagctattggaaaccctcactagtgtgctatgtcctcggatcaaatccaccattgtacatcctttagggttttgcaaaaagaccctagaatgataaggtttacaaagtaaggatgctcgcatatggtatattttcattatcagattcgaaacaattgagatcatagatttaatcttgaatgggggacacatcttttttaattgtaggccagttatcacgaaataaaggagatatttttcttgattccaaaagtgttctatcataaaattatgatgatcccactacctctgttgtcttgacacaactaaagaggtcaatcccatttagttttcttagatataattcacagtaccttgtcgtagtgggagggttttgtaggaactcatctttttatgacttggaagacactnnnnnnnnnnnnnnnnnntgagtttaaacaagtaatggatcgtcaagataagaaa

SEQ ID NO: 51789 - DNA, 1089 bp, Cannabis sativa
ttcaaatctttatgagtaaagaaatatttaaaactcttattgtcagtatagatttcacacttttctccgaagagatagtgtcgccaaatcttcagggcaaagactacgacagcaagttctaagtcatgagttgggtaacattgttcatacccctttagccgacgagaagcataagcaaaaatcatattaacttgcatcaaaacgcatctagaccttttttggatgcatcacaataggctacaaacttctcttgatctgatggcaaagccaacattaatattaatgtacattttttttatttacattattgtcatttagttttaatgatttactttaatacactttttttaattacattgttatcattattttaaaaaaaatatatttaataatattacttattattttttatgttagttacaccttagcttgctattatacattgaaacacaattagaaaatatatgccaaatatagaatttattaatttttttatgtcaaatttaatatacttttcaccacatacattggagataataacaatatttgagttgttgttgctgttcacaagttttgtatattattttcttctttttaagaaaaaacataaaacatgataatgggctaaaaatggtagttagattttttgtttattattatatatttatttaaggtaacctcatcgagtacaaaattctacagtgactgataatgtaattggaaaaaaaaagaaaggagtgatgtactaatttgtgtccatgcatgcatggcccatttcattcaatgttcaatcaattctaggctccaccaaagttcccaataaaacaatctaaataattatgtatcttttcttttcaaagcatacataattttttttttgaaaaggaaaataaaacaaataatctttgtgaaactctagtgtaggtacaatattttttttttcatctttatagcatgatgatgttttcttaactattgatcaccatgaattttgaatgtataaataaatggtaaaaacgattttgaattctatgttttgtaaaagttattaattggattctttttttttttgttaaatgataaaatgaa

SEQ ID NO: 51790 - DNA, 2571 bp, Cannabis sativa
cctggtaaaatataattccaacacgttgttcctgggtgtagggaatacaaagtagtatgaaactcattaaggatttcctttctgattcggtcatttgtcggaacacaaattctatctttatacctcaatagtccacttggagtcacagtgaaatcctttgtagcaccaatctcaactttctttctgacttcaatcaattcgagatcattttgttggccaatctttatccttttcggtaaatcagactgcaatgtaatatttgccaacttccgactacaaactcaatctcagccttggccatatccttggccaatctgggagagatttccctcaattcatagatttgtcccggacccttctaactaagtgcatctgccactacatttgccttaccgggatggtagaggatttcatagtggtaattgttgactaactctaaccatcgtcgttgtctcatattcaggtctttttgagtaaaaaagtacttcaaacttttatgatcaatagaaatctaatacttttcatcatataaatagtgatgtaaaaccttcaaggcaaaaaccaccgctgctagttctagatcatgagtagggtaatgctgttcaaaatctttcaactgcctagagacataggcgatgaccttccatgattgcattaacacacaacccaagccttgtcttgaggcatcaaaatatatcacaaacttctcatcactgactggtaggctcaaaactcgtggagtaatcaatctgttctttaattcctagaagctattttcatatttatcagtccacacaaacttacaattctttcaggttagctcggttaacggagtagcaatcttggcaaaaccttccacaaacctcctataatacccaaccaatcctaagaaacttctaacttcggtcactgtcttaggtcgtggccaatcccgaacagcttcaatctttgttggatttacaagaatcccatccttcttaccatgtgtcctatgaaactcacttggacagctagaactcacacttcttaaactttgcataaagcttgtgttctcaaagacgttgtaatatgatacagaggtgtttctcatgagtttctttcgatttagaataaactagaatgtcatcaataaacacaatcacgaagttatcaagaaagtccttaaacacctgattcattaagtccgtgaatgctgatggtgcattagtcaagccaaaggttattagtaaaaactcgtagtgcccatatcaagtacaaaaagcagttttaggaatatcctcttcctgaatccttaattggtgataacgagattgatggttaatcttggagaagacggtctttccatgtaactgatcaaacagatcatctatccttggcaaaggatatttgttctttattgtcaacttgttcaattctcaataatcaatgcacatgcgtagtgacgcgtcgttcttcttaacaaataaaactggtgcaccccaaggagaggtattcagcctcgtgaactgcaaatcaagcaagttctgtaattggactttccattccttcaattctaccagtgccattctatacggggctttagaaactggctcagtccctagtaccaattcaatctcaaagttaatctctctctttggtggtagtcctggtaactctttcagaaatacatttgaaaattaacatactactcaaaccttcttcggtccctcagatatatcttttgtggtatctaatacactagccatgtatcccatacatgcttctcacaataactccatggtcctaagtgttgatatcattagaatccaagatccccgaacctttcccataaaaacaaatggggtttcactctctagttcaaaagtcaccatcttcctcttacaatctatggtagcattgtacttagtcaaccaatccattcccaagattgcatcaaaatcttctaaatctaattcaattagatccactgacaattctctcccttctactaacacagttagagaccttacccacctcctggagattaccacttctccagtaggtaacaaggtaccaaatccactagacatgatatcacatggtctactcaattttctcaataatgctactagaaatatatgaatgtgtggcactagaatcaatcaaaatagtaaacataataccaccaatagatatctcacctgtaacaattgaaggaccagcctcgacatctgcctgggtcaaagcaaataccttggcaacaaccatagggctctctctcttagtcttgggtttctgtaactacgggcaattgtttttgaaatggcttgctactccaaattagaagtaaaccttagaccgacatttgcccaagtggtgtttcttgcactttggacattcgaggaaagactgccaagcttaatttctaccttgatagaaaccttggttagcttgaaaccttttgtttggacccacaaccggtggcccatctagtgtcctttttcgatcattagggttaaaacccttactcattccagtactagatgatgttttctacacatccttcctctgattactctttttacgaatcaa

SEQ ID NO: 51791 - DNA, 727 bp, Cannabis sativa
ctaagagatgtatatttaatttatctgtacaacatattaaagatgtcaagggatggagaaataaacattttcttaattatgttggagagactatctattatttttgaaaagtatagaacaatcagaagatgagcaaaaatatcaactaacatggttgaaaatatgaacttagatgctaaagaagaatgacgattctaaatcagtgaatcaaaacctttcttcacctagatgtcaaagaaagagatatagatgggatgatgatggtatgaaggagattatttctacgttcaaaacaatgtttgaacattcaatcgagaaaatgagattgatggtgcaagggactactaatgataaagagttgggtacagagttgaaatcgatgagactttcgattgatgatcaacttgatgtgctgacaaattaacatgatgaagaagccagaatatgtgacaacctttaagccgatagatggtgaaattcaagaggcctttgtaacaagagttcttagagaaaagttagttcaagtcgttgatttggttatgtgagtattaatatgtgatgattaatttggtcagttaaaatttagtttgatcagttgaactttggtttagttggttgatatttgtttgatagttgaaactttgacactattacaatgtctattttagttatataaattttgtttttttatataatttattcgaaattagaatcaatattcgagttg

SEQ ID NO: 51792 - DNA, 931 bp, Cannabis sativa
aaaacaacataattaccaagtgccccagattgtgtcttctgcaacaaatgatcttcggcacgaggaaacgcatcaaggctctttatagcttgtttgagacccattttcccctttgataacataaaaaaattgtcacttcgaatatgataccaaaacaaaccccaaattagggtttttaagatatcccaaaaacgaaaaccctgaaaaagtataaattttcacaatcagcaatctagaaggactcatattctgatataattcaacatgtttacagaattccgatcaaacccggaaggggaggatcatgttttactgcaaaattgtaagattacgcaacagccttaaccaaaatcacgtcaccaaaatttaagtttcagaaattacagctcgatgtgttgagaagaattttaattgaaaaacgaaaatgaagataaaaataaaaataaacgaggagaaattaaaaatattatcatcaataaaaagaaatattgacgaacaggaggaagaagaggtaccaaaagagaaagagaatctgaatgaatcggctccgaagatttgattgggaaatggaagaccaaagtcggatgcagaagaagaaagaaagaagaaaaaaaagtgctcctgcttcggggagttgggttcacctgtgaccgttttatgcttctattcttgcacacgctcttttttccattccagtattcacacgtggaccgccatctgtattctgccactcatggaaaatatgagcttgcataaccctctgtaaacataggacagaaatttgactatttttagtcaaaattaccattttagtctttaatttaacattccatttcttttagtaggataaaaaaaaaaattaaataattgttataaacattaataattatttggatgtacaaattttttatttattactattaattgtaat

SEQ ID NO: 51793 - DNA, 1080 bp, Cannabis sativa
tctctgactccctctagctgactcaatctgattcaatctctttgtgttctctcgctcgtgaatctgtttgaaatgattaacaaacttttcatggttatagaagtttctaccacataccctgcaaaagtaccgctctggaggctttactaaacccttgttctccaactgtgtcagcttctttcgatctttcctttgttctttaatggctgcagggacatagctcaaggtctgttgatttgcaaaggcaaccgtgtggcgtacaaacccgaaggaggacgcggttttcttgagcttgagtgcagcttcatatggcggaaatgggtttgggagtttgttgtttaaatcccaaaatacagaaacattcttttggtgaactcttggcaatgttgaacaaaaacccatttgagattcataatgaaaaattgtatctgagagtgagaatggggttgaggtttttaaccttaagtttctgagattgaggaataatatcatcatttacagaagaactcttctgtgattctttaggaactgaaaaacaaaaaaaaaaaattaagctttacactaaaagaagaggctagaattagattgctataacatctacatataaaatatctatattgatataaagaaagcatcttcacattcaactattcaagtgaatttgaactatttcttagtcattttccaatgacatataaattaatatatatattcatattgttgacccaatttgggattgtcacacaagtagctctacatcacaatctcttagacattaagaactaaacttcacataaatttaatcacaccaaagtaatatttatccaattaccaaaaccctataatggggatatgaagaactaaacttaataaagaaatagagtcacatcagaaacatgcatctaaagtaaattccaaatgaattatgttatagaatgattctgctaatgtaaatggaaatcagagtcaaactgagacaaagatcattgaagaataaaacaaacattatttaatttaatattatatgaaaagttcaaaactaaattatattaccgttctcaacttgttctaatctgatac

SEQ ID NO: 51794 - DNA, 984 bp, Cannabis sativa
ttcaaattgtgtttcaaagcatgtgtgagcaatgaagagttgtaagtgtgagtgctttggtgtgtattgtaattacatttgtaacaataaagtacttacgttttgccattcaacaatcttctttactaaatagagctattaaaactatactgtttgttgtttgtttttgggttcgttgtgattaaacttttctaaccacggttttcctctgccaaaagtgatgattcttgatacataatgggtaggggctaatctaaaacaagtggtccctttctcttttttaatgctgacctcaaacccaaaatagagaagctatttatgcattcacatttagctctaacaatggttaccaaagtagacatttaaagttgtagaatttcacctggctgataggctctggcactcgatactttgcgagtgtcgatctcattccctattaaaaccaaaagatacaaagaaaatggatcaaaagagcttaatcatcacagcactaccaagaatggagcttaacgaaaaaaaacaaagtatcccattttcctacaaatagttttctttattctcatctctcaaaacaaagttaccatcatccaagaactcaaccaacggttctcgggtttgtaatttcgatgagtttgtagaccaaacaacaaggagctagatgagcccttgatcaagctacatcggtttgcgactcaaacaacaatttgaactgaaatgttgtaccaaattcatcgataacaatagtaggcaataaatctaataatggatcattataactaaggaaagctccaactatacaattgaaatgatgctatagcttgaaaatttacataaaaatttgtgatttgttgtatgaattctctatcgtgcctcgacagctgtcatgcttacattgcctgattggggccgattagaggaggaataatctgcatccaaagaatatgtgctattccaatatgctggcggtttgggttgaggcaacaa

SEQ ID NO: 51795 - DNA, 1468 bp, Cannabis sativa
gtgatggctatatggctttaaaactcgacctaagcaaagcctacgatagagtggaatggccttttctccttgccattatgaataagatgggctttcaccatacttggataaacctcattcaacaatgtttgtcaacagttcgctacaatgttgttagtgggggttttaatctaggcccgattgttccttctagggggataagacaaggcgatccaatttcaccttaccttttcttgatttgtgctgaaggtctttctgcaattataagaagatttgaagaaaagaagtgtttgcatgggtgtagagttgcaaatagagctcctattatttctcatctcttgttcgcagatgacagctacatttattgtaaagcaacaaatagagaggcggatgaagtccttcgtcttttggctttgtttgagaaagcttcggggcaacaagtaaactacgctaagtcatctgttttcttttccaccaacactacaccacaggggagggatgttatttgctcaaggatgggaattcaacctgcaagtgacaatagcaagtatttgggattacctagcatcatgaatagaaacaagaatgtagttctgggttatcttaaggataaggtgcgccaaagaattcaaagctgggataacaagttcttgtctcgtgctgggaaagaagttttgatcaagtctgtccttcaatctttgccttcctatgcaatgaatgttttcttgcttacggaggagatttgtaaggatattgaacgcatgatgaggaaattctggtggagatctaagtcaaccgaaacaagtggaatttattggatgagttggaaacgtttgggccgtgaaaaagaaaaaggtggtatggggtttcggtgtcttcgagactttaatattgctttattggctaaacaaggttggcgtttgcttgttaaggaggagagtttggtggcaaaagtcttcaaagcaagatattatcctaatgggaattacctttcagctgaaattggtaataacccaagctatatttggcgaagcattaaagaggctcagtcggttgttaaaattggtactcgaaggtgcatcggctctggtcagactactaatatactgaatgaaccatggttgaatgatgatcaacatccattcattacttcatcacacccagccttggttaatcaaaaagtttctgcacttgtcaagcctactgtcaatgattgggatgaggaggttcttcgtgatgtgcttacggaaagggattacaagcttgtcttagctattccacttacacaatctttcatggaggataaatggtactggtttaaggagaattcgggactgttcacggtccgaagtgcgtaccagctgatacaagacagcaagccgatgaatgggcagccggataactctggtttctggcggtctctttggcagctcaaagtccctccgaaggttaaaaactttctctggcg

SEQ ID NO: 51796 - DNA, 1063 bp, Cannabis sativa
attaattatcctataataccatatgaaacatattccaaccattattgaacttgaaaaaactctcaaacaaaataatctaaatttattaattccttctcttctctcatacaactcttcaacttctctctcctccttacccatctctctctctctctctctctagatatatttctttcttgtttgaatatagtgtgagtacttatgatagtgtatatatatatataaataaataatattatattaaatgtgcggctgaaataatctagatagtgagtgtaagtgataataatattcgtaaattttaagattttggacctcaaatttttacatatgctaaatcatgtcttcgttacaaatcttcatgaactattgagattgttggatttaaaaatttgtgtccaatcttaataagaaaatttgagggcatgatttgatagatatcaaagtttagagagcataatttagtacataaaaaattactgaattagtaaaatttaataaaattagatagaaatccttaaattcaacaatcttaatagttcaaggagaaatgttaacagtcagaaaagttgagacagcatgatttgatacttgtcaggagcaaaaatcctaatatttattatggtccctctatttaaaatatatatatttatatttagaatttttgtttctgaattatgacgtaatattgtaccctttgaatttttcatatggttagaaatagtttttaaattatttacagtattataaagtgatttttttatttaagttttgtcacgtgacaaattaaatgatgacatgactgtttaaatgattgttattagtatcctgtacatatataaaaattaaaaattaattttgtatttttaaaagatcattaaaataaaaaaaaattaattaattataaaaaaattatgtaaaactaaattattttttttcaaaataattatacatgtactgcttacaagcagtgacgaagctagaaatttagttgagtgatggcttgaataaatattaagtcaaaactaataaaaataatgataaatgtatctttcaaattttc

SEQ ID NO: 51797 - DNA, 750 bp, Cannabis sativa
aatggaaaaattcaagaataaagtaaatgtatatgaaaaaaaaaaaacaaactcaaaatataaatgtaaatacataatgaaaaagtaataagtacaataaaatatttttttcatataaatgttagtagttaataattacaataaatatattgatattgaaataataaatacaataaatataaattattgttatacactattctattcttttacaaagttgcaagcaaaattcaatagtcaaagtcatataccgatttccaaaaacagcagaacaatctagtgagaaaactatataaaatcacctaaactttaaccaattagtctttaaccagatcaaagagtcttacattgagactcagagtttgtaattctataccaaccaacatacatgggttgagctatggtggcttggcaccctaattacatagatgttaggtgccaagccacgtatgcatagtttgaagttttgttttttattttattttttttagaaaattatcatatgtaatttcaaaataaataaaattattttcattgagtattgataatgatcgaaagcatgatattttgataaaacaaaaaataagtaatattttaaaaggcaataatgaattatttgaatttgaaagttaataaaaatgagttaggtgttgatattttttaaaataaaatctatatcttaagtttcgattaaagagaaaaagaacgaagttaaaattaaaaaggcatataccactttgaatgaaagaa

SEQ ID NO: 51798 - DNA, 1380 bp, Cannabis sativa
ctttctacagaacatcaccataaccacgaccataaccacaatcagacatcaaagactcgacctttaatcaatttcagctccatcagtaaggtcaacagtcacaagggtgttgacgagagggacggagaaggtaatctcaaaatcacggtctaaattgacctcagattcgatatccatgccttcgaaaacacctaggtacaccatttttgggtttgttgtatttgggaaaaaatttcgggttctgggttggtgagtttggatgtttggttcaaaagttgagagtgtgaaaggaggagagtgatgaagacgagtaaagcagagttagaaatggtgaaatgggctttactgagaatacgattcgaattgcttcttctcattattgaagcaggaattgaagaatttggtgaagaagaaggagaagaagaaaataaagatgagaagagcctgtttttttttttcaacaatagtggaagatgataagagttagggaatcgggatctggtatttgatatttgaagctttaattttttttgtttttttgctgaaattgtaattttctattgatgagttatgagcgacaaaagaaagtggaatggtggtgtaacgagggtagtgataatggtggtggtgtggcggttgtggccatggggaagaagaagaagaagaagaaaagaataaagaggaaaaaaaaaaggaaaagagaaaaacgaaaagaaaagatttttaattttctaatttttgaataatttttttatagggaccaataaaaatatgacacatatacatttgcgcatagacatttcatattggcatttaactataatattttaacaaaattgtaaatagcaaaacataagttgggtttggagagttttaccataaaaaagaaaaaacaatttgtgatttaagtattacaactcctataattcatgtaatttaagcgccaatatctctaatttgtaacataaattattctggtgtattagagtacaattaaaaatattatagtaaatataatatttacttattttatgtatcaaatttagcataatatttacctctttcattcgtgcattcagaaacggtgttattagttactgatttaatatgtatttataatgatcgcttccacaactagatctaatgaaatactccacgattttttcacttataatcatttattttttttattttattatacatcccttttggctttaattttggttcctacgttattattaaatatcatatataagatgcataagctactctactcttctcattattaattggttttgagatggaaactcatgcaccttaccatacactcacctattctactaccttaaccatacacttccacattctaacaagatctaa

SEQ ID NO: 51799 - DNA, 1592 bp, Cannabis sativa
ccaaagactcaccccttcttccattggcagaaaaacccccaccattataggtttattcaactggatattcacttgaaaccgtatgtattaattagtaggaaatccgtttctccacatcctgtcaatcgatatcaccgttccaatcttctgggtgagagcattagcattcttcaaggtccggtacctaggaggcacctcataaacccttacccaaataggagacaaattcagatccgcagaagtccattttccaccttcaggcataaatttcaccacgagaaaaccatcacatatattccaaggaccattcctagcaatctggaccgcctcttgcttcttagtcaatctcaaaatgaaggtattcctctccacttcttggagtttccaacccttagccaatttccactttctacccagtatcaagcgcaggagaccattgaaaacagtcttagtagtgtacatttcgccaccaccgatttctctacgcctccgtcccaagctctgggttatcttcaagtgtaatcttgaaatcctccaacccacaaagctccatctgcatctcatccgattgagccgccatcacaggtacacctttccaaacgaaaagaactaaaccagcagaaagatactaaaagaactataccagcagaaagtttagacaagcaacaaaaaagagcacgaagacaccaggcaccagaggaaccttctttcaaataactctttcgtgtatacagaaagatacagtagggatattgggaaaaaatcctagatcacacaatgaatcagtatgaattacacgtaaaacgacagtcgtttcactgaaattcatatacgacatgaaacttttccattactaatcattcaagaaacccacttgtacggagagcattttcccacttgtacggagagcattttcccacatgtttggtctattaaattattgatgcgaaggaacatagtaacaatgtaaaagtatttccaatacagactttttgtcccataaattgttcaattttttcattttctataagagatactctttaagtatcataattttgatttaatattagagcattactatgaggcgggagtgatatcataaaaatgattagtaatattttgcaaaattaataatattaaatcatgtagaatgcatttttttgataaaattacacaaacaaaacatataagataatataatataatacagtaggtaatacaagccactaaggttagtttagtagtgagagatgaatgggaaaaagggagaggttatgggtttgaactcaagacctttaaactataaactattaattgattgtaaaataacattacgctacactaaaaaaaaagacacattaagtaataccaagcacgaatgatgcatatttttcttatgacatgtttaatttattgcaataggtattgtaatggaatatcaaattacccattattacaatgtatgggttgactcttaaatgtaatggtattataatgtaattatgattacattatagtaaaatttacatgaaaaatacgaaataatgcttttagtacatttttacctctataaggcttaaataatatcttta

SEQ ID NO: 51800 - DNA, 837 bp, Cannabis sativa
ggttatatcattccaaattttgcacaaggtgatgtggcacttggctaggtgacacgtatcgtacatatttggacttggacggagtatgcctacttatagttccgtccagcttgagtcaaagccaaattagttaagtctgaatctttagtaatcaccatccaggtagattccaaacttcacattacttcaagtagatcgagcacgccgagcgagtgccattctccagataaaacacgcagcgagtaaagattcttaaagataattttcctaaatatctccataattatagtccatttagaattcctatctttgcgagattgattttatacgattaagtagatcatgggatttaatatttaagtttctctaatttttctcttattaactcgtgatagttgtaatgtacttgccctatagtgaggccatatcactatttagggggccttttcttcgcattctcaaagagcagttactttgcaaaaaataatagtaagctttctcgagattattaagaaactcacctggttggaccttgtgatcttaataattctctataagtaatacaacaaaaagaggagtacgctattaccattatcaagggtcgaacctctataaatcttgtgtgttcttattgtcttattttattatttgatcaatcattatcatcgctttaaagagtccgtgccgttggctaaaagcgaggttaacattttagtgctttcattgggagctcgattcaatcttgctcttatcaatctacatctttgatttggctgacaatggttttgacaacgagatcctcatcaacagagccacacaatccaatggcaatagatc

SEQ ID NO: 51801 - DNA, 1228 bp, Cannabis sativa
aaatctaaaaatttgtgaaaatgactatctgagttcgacaaagaatttgtggagcaatttcaaggccaaccatatttgtaccccttccaccaagcttaatttcactgaacccatgaaaattggagatcaattgattgctcgaattgatatggaagaggtggttgttgaggcttcctactggtaaaattctattatatgtgttgtttggggggcaaacccaccatttcatgtctttaggggttttatcaagaggatttaggaaaatttaggtatcgaccgaattgttagaatgcacctgggattcactcaagttagctttcatgatgaagctactcgtgatattattttagcgactggtgtgattcaatttaataagaaaccagtggtgattaggccatggtccactgatcttgatattattagagtggtaataaaatcagtaccaatttgggtgagattgaatgaattgaggctgtaatattgggggaaaaatactcttagtggtcttgttagtactatatgcaagcccatcatgatagataaagttactagagatggatatgattaaatttgcgagaatcttggtagatgttgagatatatgataatattccaacttctataagtttcttaaatgaaagaaaacagttagtggtgcaatctattgagtatgagtggctgtcgatgaaatgtgcgacttgtggtgtgcttggtcacaatgtgagcaattgtgccaaagagaagggtatagtttgggtaaaaaaaattgaaaagtgagcagcttaaggggagaaatttaaaagctcatcaataaaaagatgatcaggtggtgattcctaaggttcaaggggagaagtctgatatagtgttctattgaagcaacatcaatacatcagcctgatatatatttattctcaatagaagggtgggaggaatgattactccaaggaaaacaggggtaaagaaaaagtctgataatgaagtgacaacctcgagtagtaatacttatgaagtcttacatgctcaagagactttgaatgggaatggtcccctaattttttagcaatcattggtaattgagtggtgcaacatcctgagttggaacattaggattttgaataagaacaataagcaaaggtctattttagatttttgtatttgaataaaattagctttggaggcttgttggagactccgttttaggagttctatatatcgttgaaaagctc

SEQ ID NO: 51802 - DNA, 1012 bp, Cannabis sativa
gaggtggttcctaattttcacattgttaatttcaagtatggtttgaggctaaaaaacttatggtaagaaattaaggacaatctcattctaagggtctgggattgtaaattctgggttaaattgggacatgattacagagaataataccccgattcctagaaaaacaaatcacaaagaaaacccaaaacctgggaatcacataatcttaaatttctagccctaaattactcaaacattcatatatagttcacccaaacaacaaaacaatacaaatcaaaaaatacataccaagaaattaagatcaaaagcacaaaagaaagtcaacaaaagggaatgtcactacaggtttgatgggagattatgggtattgaaaaatttcgttatggaaactccgattccagagaaattaggtcttgacgattctgaagtcgagggatgcaattgggtgaaacttgaagaaaaaaggtgaaagacaaagaggacatacaagttcaaggaagatgttggttgagaaatttttgaagcgtgaaggtttagtaggcagatatggcaaaaatgggggaaatttaaatttatacccaaacattggtaaagttagattaagagaaggataaatctaataaatgggaactaaccaagaaaggaacagtcacaacattaaatgctaaaatgatttgcctcgaagtcttgaactgcagaaataaaagcatgcaaaatttaaatagaaaatatgattgtacaattgaaggcatttaaaaaaatcattttcttttaaaacgtaccctttaaagggcaattatgatacctaaattttggctagcaataagaagcgaacatgtgtatcagagctggaatatgaaccatcccaagtcatgcattattaaatgcacattaaatgatttgcctcagaaggtacatttaatagaaatatttaaaactcgctgccacataggcaataacgagatgttaactattaaatgattagaccagtgagacaaataagtccatctca

SEQ ID NO: 51803 - DNA, 1044 bp, Cannabis sativa
aatattgaccgccacttcctcatcaaacaaatctttgacaacatcaacatcccaagctttctcacccaccacaaaaagattactaaccttttcattagccaaacaagaatctagaatacttttactcagaattgacccattcggaagccacagagcatcaaataaaagagtctcctctctattaccaattccctttcgcacccccttacaaatcaaatcttttaccgcagcaagacttccccaaatataacaccaagttttaccgaaagaaagttctcatttttaaagtaccgagctttgtacactctagaaactaatgaatcaggcttggtcaagaacctctaagcttgtttacccaacatagccaagtgaaaatcacgaagagagcggaacctaaaaaaaagtttttttagtaattaattttttagcactcaaattattgagatatttacagtaaattttatactaatttaaaattattatgcatatgactctaataagaactatttacagtaataagtcttttgtgccattaaattgttacaactatattattttaactaagtaatcacacgtttgagatattatttggttgcaatttatttcatttgacaagtgaggaacaaggcttattaggatcaggttgtttggactattccctatattattaaaaagttaaagtttgaaatttgttctaaaagatgattattagtacaagggatagtaattggtttaaaagttttgttacatgaatagtttagtgagctttgatgtaagttctaattgatttgttttttttttatatatatactagttaaatttcacgtgtagcacgtggtggttagtatatgaattacatacattgtatcatgttaaatttactcttaatattatagtatttttttaaaaatcttgcaaaaacttaagacataaataagtcaataataatctttattattttaaaaaatataacatatttatttatattttatgcaataaacataattctcctttaaattaagttgctaagttagttattttttt

SEQ ID NO: 51804 - DNA, 1116 bp, Cannabis sativa
  modified_base (1088)..(1091): a, c, t, g, unknown or other
tggttgcattctttcttcatcaccgtcaatattttaatttgaattaactaggtggaatttgtgttatagttcctctaaatgaaaagatctccaagtgtagttttggttatggaaagttagctatctcttggaagggtgctctttagagtctaacttgtccatatggatgaatctcatagaaagttagatgtcgctcggaaaggagtttcagaagtctatcttgtccttctaagaagggtctccagggaaagccaaccttccccagaaaggacttccaggtggctagttgttctctcttggaagggagttttggatagtcgactctagctcccttctatcctatttgagaagtcccttccgcgtaagccttgggtctttcttccagggagtgtatatcttatccgaaagcactttttcttgtgttggcgtagagatattgttacgataagtttgttaagtctattacgtctaactaacttaacaacttaacagttgcacccaccgacttgggacctttatcctgagcctatatataccaccaactcttatcagttcgaaattgattcatcagatgagttttgaagtgattttaaagacagagattgagaggtaaagagagagagaggtacagagaaagagagagattgggtttgggtttgggtttgggttttgtataaagcatcttttgtagatgaagaagattcttgggtaaaagtgtgagagaaaacactttgagataactcagcagaggatcgatctcgactgtattgtaccctgttcttgatcaatcaataaagaaaatttggtagtattccagaactggattagagccatacatcacaataatttattggacttgaacatgtatatattctagtgttgattttattgtcttaatgctttaatagttttttattttagataactctattcatccctattttctccaatattgttcgcgtttcattaatcttgtcattgctaactgtttggtgattaagagtttagttgttttgattctccactttagtcttaattttctcacaacaccctataaataaattaatatataatcttaatttttcatnnnntaatagttttaattatagaattata

SEQ ID NO: 51805 - DNA, 1227 bp, Cannabis sativa
tttgaataattttcaaaataaattttatttttatattagggtattctcagccttgccccaccccattaggggattcctagccccatccccaataaaagataagcgaggatgaggattaaaattattaacggggatggatacagaggagtactccccaccaatttcccgccccatgtgcatccctagttatatatatataaatatatgtattttaaaataataatagagtatatcgctcattaattaattatatagcattgctattagattttagcgatgtacaacacattttatagatggcgctgcgattaattagcgatacattagtataatttcgagaaaagtgctaggtactatgccttttaaagtattagtattggggataccaataatacttaatttcatcacttaattatgatcattattatggtacactaaagtatctaacacctttatgatatattatcttataattaattagcgattatatctataatatttattaaactaaagtgagtgaggatgactagtttcgttgactcttgtagtagatttgcaattaagtatatattcccagctctcgtatcattattagggactagtattttttttggtgtcgtatcactaattaacataattaagtatttaattttaaataatttataataaaataataaattttaaagagtattgttaactaattgtaaggtgcgacttttaggtagtgccgacaaaatgggtcagatacgataacacgactcaaaattcacacgagagttagagagttttgggtttgccttaaatgggttcgggtcgtgttcggtttgactcgatcatctaacccatttaataaatatataggtcgcgcttgggttgatactgctaacacgaaagtaacccgtttatgacctatttaaagttattttagtattttaacaagttataaatgagtcataaacgtgttgaatatgtcataaacgttttattagttgatatgtttataaacggattaaagtagttgtgtcttgtcaacccatttataaatacgagtcgtgtttggaaataatttccaaacagaactattaaactggtcgtattcgaatcaagcatatatatttattatacttgaaacttgacacgatacaaataggacctgtgaacccctatcactgatgcccaagctcaaatatattatcaatcttaataattagaagtaaacttttgtct

SEQ ID NO: 51806 - DNA, 1479 bp, Cannabis sativa
  modified_base (1025)..(1026): a, c, t, g, unknown or other
ggttggaggatttttatttttgagggtggtttaataaccctatcacatcggttattaggaaataatcgatggcatagggtacacacgataattgacacgtgtaccctatgtcgtcgattatttcgtaataactgacgggataggattatataaaaaccttatcagcttcattttcttcatcttcttcctaacgaaataaatagcagcaaagaacaaacacccaaactctcgccaccttcgccaaccacctctattacagcctatatctctactatttttttactatttgagcctattttttttaaatcttctattttcgatacctaaacacattcacgaaaaaagtttttatttttttcccttttcacagtaaactaaacccatacaaagaaagtggcagttttacctctggccaccgatttaaggatttttttatattattaacattgttgttgtgtatgtgtatagtggctggactttttacagaattagttaccgcattatgcttataaggtaaaaatataaacagtaaatagtacatacatgtgtgttttgtgttttattgaatatgtacttatatatatgtattgtgtgtatattatttatgtaaatattgtaattgtattgtatatattctatgtaatatatatgcatgtatatttatgtattgtgaatgagaatgagactggaaagatttaattagtttagaattaaagtttttaaaattttgttagtgtgagatataatttattatatatgtatgtatgtgtaaatttttcaaaaattaatgtatataatttagtgactagtaacttgttacttttttttataactagtaagtaattaaattatgaaaactctaattttattgtatttcattatattgaaggttgtgagctaatttttaaggtttggaataatttggtgttgattggattttaatttgatataggtatatacaatcaccaactttctgttattataattaattatcaatgcatgcttagtggagtttgaatatcttnnatattcatccgtagtgaagtaagttatgtgatatattgtactgcaatagaatgagtgtaataatatgcatgtttgttgagtttatgcatgtatacaccattatataatttaatcatcacatattctatataattatttatgtttaactatataaaagctacaattggtaaaactctaatagtaaaattttctttacatttgaaaaaaggtacatttagcataatctaaatagtattagaaagaaatcactttttacctcattttgttttgaaaagacaaattctacttccacatgaattacaatttcaaatgaataaactttcccattattaatgtcaaactaaacaaatgaatgaattcattttaagaaaaatcattccattcgcagatccattccaatcaactaaatattgttgggttttgtgccctaaataaaatccattacaatctaat

SEQ ID NO: 51807 - DNA, 729 bp, Cannabis sativa
cgtttttggcattacaaatagaagaacacaataatgatttaatttgatgtgatcgagtacaagaggaaaatatattcatcacatgatcttttgatttaatcagaatcagaacaagaagccattgttactacttccaccattaagagagagacccatcaagaattgcacgtacaatacggtctacgaaagagaatttgtttatgtgtgaaatatgtacgtatttgtaaagattctattattattaatttaatgaagttaaatgtttgttttcaaaacctcttcgttgatcattgctcctaaatttaggatgctgtaaatttaacacctaaaagaagaaagggcagaatttggtaataagacatgaattaatataaaatgacgtagataattaaaggcaggcgtagtccttacaagtattaacatttataaagaaataaaaatggcatggacaatgacattaaaaatcaaaactccaaacttaaacattgggatatgcacataatattattagtaatgacttcttcacaaacaaaatatatattagcctttattaaaattctttgtaatggaaatcatatccaaaaaaattataatatcgttttattaaattttaaattacatattaaaattaatttataattttattttatttataatttaaattaaaaattacttatttttaaaatttataatatattaaatttcaaattatatattgatattaaatta

SEQ ID NO: 51808 - DNA, 1220 bp, Cannabis sativa
aggtcttttaattgagaatgctctttatttgtaaattagttttccaaagtaatgaaaacactaattaattcatcaaaaaataaataaatacataaataaagaattaattgcagcataattctaaatctttcattgcacttaactcttaaaattcaaattttagcattagaacttctaaaattataaaatccttaattatttatatatagtttctacatatccaatactgaactgttcatgtgtatatctatgtagacatagtgtacatatgacacaattatattggtttacgtaaaaattatttaaaaaaattataaataaaaatgaaggtctaaaaccctaccacaacatgtacataaaagatgacacaaaagtttaaccatgatcttgtaaaaatagcgttattagtgcatctccaatgctatctttttttaaattgcttgtctgagaatgggcccttatacaatataaatatttgattttttaatatttttaaacaaatatatgggtattgtggcctaacaacagcaacaatgctatctttttttattattattattatctcttatatattatttttaaattgtataaaaaataattagtggctagacaaatagcattacacgttgtctgcattggagatggccttagaagttaggtaaaactcaaccgcacatgatcgtacaagtcatttatgttgatcgacaggagtttttgtatcactgcgaaagccctacaaaaatcaatcctgttcgggccgaagtagggtttttacttagaagtggcacgttattacaaaataggatcgtctcgcaaattttatagctattggatcgatattttatggtcgtctaacacatgcctaattagtgttagtaatgttgattgattgagttttccgtcaacaaaaaaaaaaaaattcacaaatgaacactacaaatttttttacttataattacaacaaaatttgttattaattataaatatcatacttatattattattaaaaagtatgtggttaaaaatattagttataaaaatcataatttattatgaaaatatattttttagtcataataattattgtagttaaaattaaattagtgataatttatatctaaaattacatttaaaaaaaaaggggtatattataattaaaaaattatcattaattaaaactttttattttttgatacgtgacttcttattctcattataaa

SEQ ID NO: 51809 - DNA, 1402 bp, Cannabis sativa
aatttttatttaagtttaatacttcataaatatactatttttacaagtgtattgtagctaaaagttttaaataattaaataacaacatttaagtaataaaatagaacaaaacatcatgaaaataaatacactaaacaattaagtgttacaaattcaacattcaaaaaaaatctaataaatatttattatatttttcaatatttttttattatataaataattttttaatatatatataaatgtaattggattggatcggtttttaattgaattttgagattgacatccaataatcgatccaatccaattagaatccaacttttagcatctaatccaatccaattgtaattggatatctaactttttgtaactggattggatttgaattggattcgattgaatgatgcccacccctactttgtgtcgcctcttaactttttttttatatatattgtcttgattacagagctcttaacaatgaatatacaattggcaattggtgagagtcaaaattagttgtaaaaatctaataacaaattacagaaataactgaaaaagtaaaaacctaagctatcaggattgcttataagacaacttagaaaattgattatttttaataatacgagtgatataaattaaaaaaatatatttcatatatttttcaaaataaaaaaaaaaaaaagagaaaaatcttcttcattcaattattttttttttaagagagaggacatcgatttgccgtaacaacggaaaatcatcagctctgcatgcaatcaaggcgaacaggcggccattcttcagagaataacccaaccccttcattcaattaaattgaacattaaaatttactactaaatgtcaacattacattttaattaattttaaatctaacattttggaactatcaaataataatttataattcttttaatgagaaattttatgtataaaacaaatctaaataatatcataatatttctttataattatacttattttattgtgataatatttttatgattattaatttattttttatgagatttttataaatgaattaaagtccattcatgaagaaaaaaaaaatagtatagtgtgataattattaataaagcatgtgaagaataatatgaaattaatataaaaataaataaaaatctactctaattaatgtgtctttaacaaaaaaaaaaaattaaatagattttcataaaaatttataattttttcaaaaaagtctaatttaatttttacttaaggtacgtcttgttcaagaaaaaaaaagtacaatagtaaccggtccaaaaaaaatgaaaattctctaaaaaaaaaggcaaaagaaaaagttggatgaaatttaaaggaattattttacaaatatacaaaaatagcaaaaaaaaaa

SEQ ID NO: 51810 - DNA, 2871 bp, Cannabis sativa
agggcacaaaacccaacagaattatactatttgtaggcatacatggggtctagggtttaatcttccacacgctactgaggtctatactatgagaggacgatctgaccattggctggtaggaaccttcttcaccgtgttgtgttcagcagctggtgaggacttttgcacaaccctggacacatgtcgcgcaaaggtctttcctttacgaaatagtatccacccaatccattgggcaaaaagcatactcgagggtgcatacccacactatcataacctagcacaggggacaagatctgatcctgtgtcaaaaaaaggtataacaatctatggagcgatattttacaaggatcttacgtgtctaatgcctccaaaacccttatctccattcgggtacctcaccgaaaggagtcactcccagagatcatcgactctcgttaccttctagatgtaagagtcattcgatttagaaaccttagatgattaatgtattgattgtgtcctttccttcgattatgcctcgtatttgattgatgaaactgtggataatatttaccccccaagctttcaagattctctagattgcagaagcttgctatggtcctcaacgttggtcgtggatacacctttatatgagttgtattcttctaacggtatttacgtcatttacttcctttcgtgtggtaaccacgcggaacatcaggaggtttttctcatcccttttagtgcgtaggaaggcgtgcttaacaagaaaggaggggtggtactagcagctgattgatgtggcaaaaaggaccttgacatttgcttgtgccctaggccaatcacatgggacctctcgctttcctagccattggatttactataaccactctaaacagttgatctctcgtagccctgtctcctttttcaaataaaaactgtctatggtggtgtcagtattttttattctttttactcaaaacttcatactttctttgcaactacgtttaccctttttctacaatcttttgtatgcaagaggcaatagaggatttgatcaagagtttagtcgtcattccaaaggaaatcttcccagacgttgttccccttcaactgaactagcaaagttcttcttccaggggaacattttattttcaagttaattatgtccgcaacatctactggctccaaagctttcaggcaaacattctagatatgccaactgtcccttccgttttgataagtaagtgcactaaccccctatctgagtttcttggaatttcacatttagggtaagaaagcttcttgcttaggttagggctagaatcgtacttgtgttgtgtagcaacatagtgtttgtgaaggagaacgccatctttgcatccatttgttgtttcaaagaaattacttgtcattccatggatttgaatgaagacccctttgtaagtgaagctatggctatcgagggggaacctattccaattgttgaaaggtttttcgcaggataggaccaaacaaaggtctctatgacaatgtctcagtttgtggttgccttagaaaccattcctgaaagcaaacccatcgctgagagaaatctttctacgaataacaggagaggtaaaatgggtgaaatccctttactagtggaggtccgtcgtgaagtttctggccttcgtaatgtccctggtctgatgtggcacatgctttccatctttagttaatttgcatccaccagttttgatgggttttttgcatggagttggtcccatatatccagtggcgctctccatgcaaggaacacgtgttctgcaaaattaatacactagagattccctcctcagaggagatcctttactattacactgtcaaggctaatcccacgaggacaaacaggtcaaagttggtgttcatttgactagataagtgaccggaatcctactaccctctttgcgaaatagatcgcactcatgacctccacgaatattggttcttttcctcagggtttcctaccataatggttccatctcttcaattaagattccaactcctaggtactctaactattcacttttagtttttttttttaaactttgccaatttctgtgcctgggctaacatttcttcgactttcaacgatgcttccttctcagagtgttaggacgtatgagataatcaagaaagaagcttgatatagggctttctcagaggatcaactgattgttggagagttgatgacaattgaacttctccgtaggtccagcttgatcaagagtgtgaattatccgtgatggcattcaccccctggacttcaatgctagacttttttagatggccaatagggactattcaatgttcaacgatctctagatttagggccaatgtagctaacatatcggcgaacgagttttgctctctccgaatttgtcgtatattgtaacttttaaatccctgaacaattcacgcgacattaagacataggtagccatttgctcaccttttgtgtgatactcgcaagagatttgattgaccaccagcttggaatgactataaatattcacctattgggctcccacttcttttgccaacttaagatcggccaacatgtcttcatgctctacttcattatttgaggtggagaattcaaaacgtacaggcactctaaagtgggtgcccttgcggggagattaaaattactccatctctggctcctttcacgttggacgcaccgtcgacatagaccttccatgtaggtagcttaggaataggctcttctaggaggtcattgaagcttgtgcattccaccacaaagtcagcaagggcctatcctataactgacactcatggctgagaatggatgtcgaactagctaagctccatagcccacttcagtaa

SEQ ID NO: 51811 - DNA, 1159 bp, Cannabis sativa
gtgctatatttgaagctcattaaaggtttgggtttggttgtgtggctcgggattcaaatgggagcttaattgaagctatttcaacaagtagaagtgggattgtacttcttgaaattgctgaagtaataagaataaaagaggcgttgagttgggttaaaaataaaggttgggaagatgctgttatcgagtcggatgcgttgattatagttcagacaataaatagtttcgttcatatgccatcacagtttggattgttggtggaagattgtcgtttgattttatcaactctaaagaatgttttagtttcttttgtttattgatctgctaataaggccgcccattgtgttgctagggggtcttattttacgtcagattgtattttcaatgagctggatgctcctcctattttgcaaaatattgtaatggatgagaccttctttaatgcatgatcatcctttgttcaacaaaaaaaaaaattatgtagatattttatataaggaaatttaaaatattataaatatttttaactttattattatttattttatattttaaattgaaatagttgtaataaagaattgattatttttcgttttaattttggtaaacagattcacacacacacacacaccatatttttcataaagtttgggaataaaaaaactttatatcaaatttacgaatctaacctaaatatagagacacataaattaaattatgtgagttttggttaagaatataataaattacaatatatgtattatcagatacaaacctaatttaaaaaaatttaaaattttaaaaaatacgtttatataatcacatttaaatgatactaatgtagcagtagccaattttttttttttaaagatcaaaatctcaaactctattttaaaaattaaaagaaaaatacattacttaattcaaaatattaaacatttatgtattgcacttaataccacctaattgaactcaattaaaaaaaactaattatacgttgcacttaacatcaacctaatatatatatttaacaaagctattaaattagctaactgagtgattatattatttcgtgcaatgtatatgatgtgttagaaacggatagtttggtgtgtgtccaagtagtccaaaataatatttttatgtcttcacagtttgg

SEQ ID NO: 51812 - DNA, 969 bp, Cannabis sativa
gcctaagctgcccaatgcttgggccgatcctggtgcttctcatgtcgtgtcgggtttaaggatatatttttcgtgtcgtgtcgtactaatttatagtatcgtaccgtgttatgcataagtctatattttttcgtgcctaattatacttgtgcttttcaaattcgtactatgtcaaaaaacttaacctatatttacatcactaattataagataggtctctctctgaaaataaaaaacattggaccaatagttaattatgacatcattagcatatggtagagaactaaaataagaatgttgatataaaacactttaaagtagctaatatcataccaatatattacatatatgtagtaattagttaataattttttattttatttattaaatcaaattatatgtgaactaaaataacaactttaacatttttcctaaaataaatataaaaagccaacataatggtccacacccttaaaaagtattgttgggttttaattttaacaaccacttaatttaaaaaaataatagtaaataataaaaggagtcagacttttgacttttgaagttgttgtagtgcgttatgaatgaatgacaatgaattaaatttcagagtatttatggtcatttcttcatggaaaaaatggagaaattatatattacaaatacactaagtattgaccactcactgatcaaagccaccggcttgaattcaaccgaccactcccacttctttctcattcctttctatatataatcatcttcctttctctacaacaacaacaacaacaaacccctttcaaaaatggagaaagctctcaacagacagaaaattctactccatcatttaaaacccacttcttctttctccttttcctctcaaacccatcatcaatcttctgctctttctgtaagttttttactattttcccagatttctttcttttcaaatgtctttgtataaccctgatt

SEQ ID NO: 51813 - DNA, 920 bp, Cannabis sativa
ctcccactaagttcatgttcttcagtctctttggtctcaaagcgttggctccatctttaccgtacttccaagcccaccctctttctcgaacttaccctattttgttattttgttattattgttttaaggttattttactgttattttctttcatttctttatcactttttttctaaatattattgtactgctctatttttaatagtaattgtaaaataataaaatttgtatgtttctccagtatcttatgctccaatgtagattcaattttcttccgtggttccactactgtttttttagttgttttgcttctttttatttttgatgccttcttttgtatgttctcttgttgtgtcccaactccccatatttattgcatttgttatgttgtttatttttccagtcaactttcatcctctttttttttttttttgtcttccaaatttcaccatttcaatagaaggtaagactattatcgtccataattctttcattctggttacctcaaataaatatatagtggttggtttagcctgtgtaatctgaaattaacatttgttaaacatacgaaacaacagttgaacaacccaaaaataacattagaaaaatcataacaacctcactattaatagttttaatatttctactttatctcgccgaaattgatggttatattttgactattctagtattgttttggtggttctgtcagtgggagtggaagataaagaccttgtttttttcggtgtttacagtatgaatgaaaaaaaaggctaagacagtaaaaatataatttttgccgtgtgccagtatatatgtatacctttacttaaaaattagtatttatgtaaaaaaacctaataaaaatgtatagacccaatttttattaaaaggaaaaagcccaaaaactcagttaatgg

SEQ ID NO: 51814 - DNA, 1201 bp, Cannabis sativa
  modified_base (1143)..(1155): a, c, t, g, unknown or other
aactgaaaattaatgttgtttgacttaattaattaggctgatgctgatgggaatgggaccatagactatgatgagttcattacagccacaatgcacatgaatcgtatggacagagaagaacatatatatactgctttccaacactttgacaaagataacagcgggtattgataattaacaagaatgatattttgatgtttacttgataaaatcatatacatacattttgtttattttggggtgtgtgtgtgtattgattatgattaaatttaggtacataacgactgaagaactagagcaagctctccgtgaatttggcatgcatgatggaagggacataaaagaaatcatttctgaagttgatgccgataatgtgagtataataagttagtatattgtctcttctgttatacatatccaaaattatatttttcacaatatatatatataaatatatgtgtgtgtgcatgtaggatgggcgaatcaactatgatgaatttgtggctatgatgagaaaaggaaacccagatgctaatccaaagaagagacgtgatgatgtatttgtttgactttgattttatgtgtgtatgtatcatgtatgctgatgcaacttatttatgtagagaaaaagaagtggagggaaaagtgttatatacttcaaagagagaggagagagagataaactcaatatttatacgagctttacaagtggattttatgggtggatcaatgctctatgtacagtactgactattagaaaaacaaaacaaaaaagaaagaaggggaagtataggggtagtggctcaacagaaacataatattggagtttcattcttatttatttattcgatcatataagaaattctttagggttgtaatcatttcctcgtgtgtagtatatgtatatcaactattttcatgtttgtcaaatttttaaccttaaccaaaaatgctcattaaattccaagcaatgagaaaaaaaaaccaagaattcttgaccaaattgcacctacaaaggatgagaaatttagaaatgagagccaatgacacaaatgagggcgcctccaaaaaaattcatatattttagtgatcttccaaaatagagttaagttgaaaaataccctttttattaatcaattaatnnnnnnnnnnnnnaattttatatttatttgaaacatatctctttttatatgtattgtac

SEQ ID NO: 51815 - DNA, 1868 bp, Cannabis sativa
tagcttcactggtggaactaaattattatagatgggttcttacatccttctagaataattcctccacccccagagtaactaccatctccaataagctgagttggtgtagataacatgattctaatatacacccctatcatctaacatataggtcactttcattattctttcttgattatttcccaatgttccttgtttgattacatcttagatggctcccactcaatagtaggagtctggttaaattcgtacataggagtacatttcacctcttactattggtttttagggaccttttgttgtgacttattatcttagtctaaaactataagttccttctagactaagtcatcaacatagaatttataaacattaatgcaaaatacttgcttaggattaagtaatcacattagataccacaaaacacttcataaggactagggattttgcctaagtcatttgaatagacattacaaaaattcttatcttatccttatatttctgataagttgcttctatccatatgtacggttagatttactttctcagttttatttaaagttcctatcgtgaacataacatagtaagctatcatcagtttcatccaaataataatgggccttgaattttaaaatcctcccactaagataaggtattgtgattctatgtccaagaactttattgatatcaatttctattactacagtaacatgttaattggaacaatttcaggatcaagaataagttctaatggttgctaatttgtttattataatatatccatgtctaatcaaaatatgtgtgtcatagagatactatggtgtattgagtatagtctagagttcaaatttaaaactgtttgaacaacatacatcaataccttcttccacccctacgtgttatagagatactgtaaagttatgaatataatctagagttcaatagatataaaagatctttgaactgcatacattgtttcttaacttcttccacccctatcagatcaaaagatctttttattaaataaaatcttaataattgctttagaaatgacaattatccataaatattgaatttaaattctaactgtttatgtggtatatcttttttgcagagaataatataccatagattttgcatcaataagaaaacacaaacacatacaaaacatgataaatatataaatataattggtattggcacataagttaaagtaaatatgaagctcaattcataaatacaatacataatgaaaacctcttaaagagaaagttttattaatactctctaaaatgtcataatgaattgtctacaataatatgaaatagagaataaaatctcaaactaataattgaaactaaattgttcataaactgaatcaattaattcaaaaaaaaaaattaaagaagatttcgagcttcatcttcaatcttggacaatctccacccttcagtctaaccatccgactcaactcgctaggatagcaatccaagtttaagcaattggagctgaaataagaggaaaataaacatgattagtacatccagaatttataaccaaagaggatagtaattctttaaaacacatgagtttatagcaaagatagaaataccttatttctttgccaaaaacttaggacactggggtttccagtgccccttttcgttgcaatagaaacactttcctttttgctgtgcctttgaatcggcatactttttattcttattagctgtgttaacaactttctgtggtccttcaatcaaaatctcaaatgtctgagggttgttgattaactcgtggaagtcaaaagtcaacttgttcatgacatagtttgaggtgaagggcagaaaagttggagtcaaactatt

SEQ ID NO: 51816 - DNA, 998 bp, Cannabis sativa
  modified_base (206)..(214): a, c, t, g, unknown or other
tttttaaagggacgggtctaattattggggtactattcacgtcggtcaacgctatgaatagtagcgttgaccgacgtaaattgtgtaatttgtagtagtgagatttctatcctcttttgacttcggcaagaatcttgtattagccttgtaggcatatacaaccttagtcttatatgtggttcccttagaaactctgtatgaaactnnnnnnnnngtctattatagtcgaatgttcaacttaagactcaacatttgtctaagttgttacacttgagacttgtacttcgctgatatccagcttgtacgctgacatggtatcacaatcagcaacatgtggttcttcaattaggttagcttggttgacggcttctctaagtctgactaactcgagatcttctcccaagtccacatgaggctcgctgatcgtaggctccccaattcctggtcctgtctctccaccataataccagagacgagatctaattgttgttcttaggggctgtcacccgtgagtctttccttaagtgggaggcgccagtggagggtcctcccttgggggtaagggctccttgtttagatccactggggtgtttatgtcagtttggccagctgtagtggccaaacttggggcgcctgatgtggtgacaggattgaccacatctgcagtgttcataggaattctagctatggctggaatgttgacattaggatctgaggtctgtgggtcttgagggagacttgaagatgtagaaggtgaaactggagttcttctcgtgttaaccatggcgtttgattagatacgatatccactcgctctcaatgaaagtaccaaattgttgacctaaaaaagtgatcaaccgacagcggggttgtatgaatctgatgattgccacatgttacacaattagaattagaaagtaattaaagaacacatagaacttttatagagatttggccccttttgatatcagttcatgacctactccccttttagctgt

SEQ ID NO: 51817 - DNA, 1717 bp, Cannabis sativa
ttaaccctcaaactcgatcgtcacaatttcctttcttggaaatccaaagttgttcccacagttattggtcacgatcttgaccatgtgttgttctcggatgcttctcctccaccaacattgatcactggtgccattaatcctgaatatacccaatggaaaaagagagaccaacttttgctttcttggctacgatcgtcgatgtctgaaccaattcttgcttcggttgctacactcaattcttcgtactctgtttggcgtgccttggagcagagattttctagccagacgaaggctcgtttattgcagctcaaaggctaattctcccatctgcagaaagctaatctttcaatttccgactatgtggacaaggctcaaaatctggctgatgctctatcgattgctggttctccaatctccaatcaagacttggttttccaactcttaaatggcttgggtcctgaatttgaccctgtggtttcagggattacgtctcgcagtgatcttctttcctttgaagaagttcaggctcttcttctctctcacgagactcgactcgaacatcatcattctcttgctgatctttctctcaacatgcaagctaatcttgcattccagcaatcaagaaacgggaactctcgttcctatggccgtggtatggatcgtagtcaacccaatgatcccaatcgacctcgcccctatggtcgtggcaatggtagcaagctcctatgtcaagtctgcctccgcacaggacacacgctgctgtttgtcactatcgcttcgataaaaattgggtcactcccaagtatggtaactttcatcctcaagctcatttaactgaatctgatattctttatgacccacaggcacatctcacaaccatgattgctgagcatggtgatgatgaatcatggtacgtggacacaggagccacgaatcatgttgtcaatgattctgcccatcttgacattgctgcaccctacaaaggaaatgaaaccatggcagttggcaatggtaagaaattggtcatttctagcattggtcattctaaactcccctctcttatggacactcaatctttacatctaaattccattcttcatgtcccttctatgcgtaaaaaccttattagtgtttctcaactaacaactgataacgatgtgtttcttgaatttcacaaatcctttgttttgtcaaggacaaactcacagggactgtgcttctcaagggcaaagctaaagacggtctttaccagcttggtgaccatcccagttcatcgattgagtgtaatcttaccactgggtctaataattctgtaactcattgtatgtgtcaatgtaacacacctactgcttgtaattttcaagaagtgaatgataataataccagtaattccactttgtctcagtccccttatcaagttttcactgcttctaaatctcttgatattaatagttggcattgtaagcttggccatccagccaacagcaccttagcaaaacttttgcctaatatatcacacactggatcactcaacaatttgcaattttgcaaagcttgtcatcaaggcaaaagtcacaaattaccctttcctatttctcacagtagagctacttcagcccttggctctcaattacagatttatggggtccatcccacataacatccaaggaagggtttaaatactatgttcacttcctagatgattatagtaggtatt

SEQ ID NO: 51818 - DNA, 1070 bp, Cannabis sativa
acgtggcttggcacgtaacaatcacctagtatatatataaaatatcgaaattagaaatgaaaaatatatttatgtatgtgtaataaataatggaattatttcttaaattcacaaaaataataaaataattataaaaaaaaatattttgatgttatgctctttttattatttgtttattatttttatattgtttgtatgttattttatgtaatttattttgttattttcgtattatttttatatattataataaaaatataaaatatgtataaatgtaaagatataaatttctttctgtcaaaaataatattttgtgtaaatttgttatgaataatctcacagtatatgcatgtggcgatcaagtttgaaaaatatgtgttctatatttgcataattgcatatatgtagatgcgaatattaatggagtccttctagttaattccaatccatgcaaaaattcaatcaccgtagaacttggtttagtcaaatgaaaacaacaaaaacattgaccaattcttcttcagtgtggccccatttgtaagctacatcaaaatatcttcatgcttatttgttcaaatttagtagtgttaattaaattatcaataaataataaaagttagattattctaaaacaactaaaagatataattaatatatagtttaaataatgtgtcagaacaatatgaatttacatagaaaactagacaaacactcttgaatcttgattataaattaaaatatatatggctgattaaatatttttatttctgttcacaaaaaaaaaaaaatatatttttatttctttttcttaaaaagaacttaattaatttatgcatgtcggtactaaaattggataaattgatttgatttggaaaggtaagttgacttcaactaaaagggttttgtatgtatgcgtagaaacatgtatgtacaatgaagattcacattttggacgttttagtctaataacttttgggcttttacagtgggcccaaatcgtgtatattggacaggttcaaattttagaaaaatgggccgaacttttctgacattgcaatatatagctgact

SEQ ID NO: 51819 - DNA, 856 bp, Cannabis sativa
  modified_base (379)..(381): a, c, t, g, unknown or other
  modified_base (423)..(428): a, c, t, g, unknown or other
ctttagccttgcctttacctacacataaacgtagaactgtgagtcgacagactcagtaagaaaagcataatcatatttataaatataacctggattacaatcaggcgtccatacacccatttataaccccaatccctgtactttaggtggtactaagtctcgaatgttcgtacgacaatactatcgaccataatatcagcctatactaagtactctagtcatactctagctgtactgatgtgatagggtcgatcaatatctaagctaaacatacatttatcggtatctaacacaattctatgtgtattgataccgctactgatgtaatctgacaggcttaataaacatgtgcgataaatatgtaaacacatatgcatannnttatactaatcttacctcatttctgaatttaggtgtgccggnnnnnntgagtggaactgctgctcgacgatttataggcccttaaatcataatattcgtaatgaatcactttttcaagacttaaaattgaaactaaaagtttccctatcgatggataacatgacaataccttaaatattgcaaaaacgagaaaaactagggttccctaaattgccccaactggcagaccggctccccaactagaagaccgtttctgtggggtaacctggggaccaaccagaattctagttcctacaggtcccactaaaccggtcgaccgcttcagtgcaagaaacaccaaaaatatcacaaatacctcaattcaatcacaaatgctaccaaaccttccagacctcctaattaggccacaacaagaataaatcaagcaataacatcaagtaatatacccataatccaaaaacaccatttaacatca

SEQ ID NO: 51820 - DNA, 910 bp, Cannabis sativa
aaatacctaaattttaaaaataacgacactaatacgcaaaattcgattttttccaaacttctgctaatacctactaatttttgttagtgcattggacacgtgtacaattcaaattctttcattttttacttttttttttttcattttaacctagtaatactaatttaaaatatatttcctttgttaaattgaattaaaaaaataattaaatcatagtatatattcatttaaatcataaaatgaaaacaatgtggttagaatgcagatcgcttgatatctcccaaacacctttttcaattagtgttgtaatacgaattgtactttttgacgctacgagtatgattaggtatgaaaaaatatggacttagatacagttttacaaattggcaaaacacagcaagaacaatataagcttaagcacgaacaacatgacaagctcgaaatgcatgacatataagcatgaataatctattctaaaaggggtgacatgttaaaaatcttatatctcataattgtaacaatactaatttgaatatttactattaaatattttaatttgaatagtttaatgatttttttttataatttgatgtgaaaaattatataaaaataattgaagcaataaaaaaatacgcaattttattatttcattaattataaaaataaaatgtgacaaagtagatacaaatttgagcttgtgtgccctgtagtgctatttttcaggatggtgaaagaaattttggaaaatacatttaaatgttagtgttacagtttgcttggaaattatttcatgatgctttgctgaattatataaaagaaaagttattgctttttcaaagggaaattttaatttttgcccttaataaaacccccaatatcaaaatttagaccctccactaatttgtacaaa

SEQ ID NO: 51821 - DNA, 652 bp, Cannabis sativa
ctaatataacgccttgtcataagttggatagtttaacactcgacaactaaacttctctgaatggaaatggaattgtaatgtctcaatttgccttactttgtaaaaatactacatttgagctttactttggaaaaataccattttcgtaacaaacatagtaaaaagaaatactaaatccttattgtgaataccggaatgttttatttaatcaaaataaatgaaaggcttcttcatagtttcaaattaaacaaccaagtctcaatgttaaggaaaatataacaaacatccaatgatttagagtttcaaaacataaattagaaatccaaaatttgtatggtgtctattgggccgatggctcgttcataaatccctcacagcatacacatgtacttggaacccatttcgctaacccttcctatgttgcctatcaggtaagtttaaaaatactacttttattaattaattaatcaaatttatctctatttttatatttagttgaaacatacctcttttgatatatattgtacccaaaataccctgatataagagagtcacatggagagtatcttgaagtgacacggacaaaattggtacaaagtttttaaaaaaaagtaaaaataatagacttaaaaaaaaaaagaataaaaataaa

SEQ ID NO: 51822 - DNA, 1577 bp, Cannabis sativa
tgccaatcaataaaacgatgcttcaggacactcattctatgccaaatcgctactatatagtccactttgctagccgtaattaaagaagagtaaaattttttgattttgaacttctcttttaaaatttgcaaaacgtcttaaataactatattgtatactgtcatttaaaatcaaaattaatgttatttagatgatgccatttggggtgcactagaattactctatttttttgtcacttttgaatgatgcaaagctaaaatatatctcacatggtaaaagaatatgcttcattggtgcatggcaaaatataatgcaaatttgacataatgcaaatagtgtgtcaaatttggcctaaattttatatcaccataaattcactattttttttatttatttttatatcattttattataaatatatttagttataaaattaaattgtggacaagttatattttttttattgttttgtatgataaagcaagtaaaattaattgtaaagttattagatttttcaaaaatatttttaataagtatattaattaaatattaaatttcacatcaaattttataattgtaaattgaagtacagtgctaaaaaattaatgcaaatatatcacaaagttattttttgtgccaaatataacataatatgctggttagtgatattttataataattatataattaaattgtgcgggacccaatacttaattacactaatactaaaataaaatgacaccttaagtgatgctagacactactaacgtgttttagcaattctcgtaatttttacatgaacattcatattagggaccattggtacctaacactttctaaatggttaaaaatattatataataattaaattaagagcattgctacttggcaccagtaatacctaataccacttagagatgacgtcctacaattggttaacaatattctttaaaagttattaccttaatagcatgtttactaataagtaatgagaataatggtaagacaatcattccctttaggtatgtcaaaaagatctatttatacgaatcaggttggagctccactccgacggatcattttcgatccaaaatattcgaatacttattggatctcggatcagatccactccgcctcacttcttttccttggttcacccagataatcatgacctaggaaatcaatataattatattactctaaaaaatatataaatttagatataaaattaaaattctttaaaaaaaaaataagacatgtgggatctaatccgattcgggtaattgatctagcggcgcaaagcgggggtggatcattacatgattcggatcaggtcagatcatagtcggatcagatccaacccaatctatttacactcctaattcccttacatttgtttacttactttattaaaagagataattgcagcaaaaatctagaaaaacttaggggtgatgcagattattctctaaggtcacgtttttttgtaagtccgtaggtttctttttctaactgatctgttagatacttatacaatgccacgtgtcaattttttattggtcaaaatcataatttta

SEQ ID NO: 51823 - DNA, 940 bp, Cannabis sativa
atagtttttgtaatgatattgcatcttttttaacaaaatataatattgcatattacaaacgtaaataatattcacacatatttttccatggtgaactttttttgtccaactttataattgagtattgttattggctactaataatatctagtactttctaaagctgatattttatgattagtttacgaaattacgtaaaaactattaaattaaattatataatactggatatttaatagtactaatagtgacaccattgttttgttggtactgtagaaaccttcttggggaagacttgggcccgctaaacacgaaagagcttgagcagattgagcgtcaacttgagtcttcactcaagcaagttaggtccactaaggtaccctatttgcctttattattacatctaatctaatctaatatttactactagttttatacataatcctctcttttgtgtgtgattgaataacatggttttctatgatatatgtaaaaatagcataataacattcagaattgttgatttttgtttttaaacgccaaggcatagtgcatgatccatacataaacttatattagttaagggtaattcaaccatgtatctatcctcttgaaagggacattcttctatttcagcattcaagaaaaaatttagtataattttttttttcatgatcatgtacattgtagttatttaaaataaagtttaaatattttgatatccacgtgattgatttttttatatacgtttaaaaaataattattttgatcttatttttagcacggtaaaccattcaaaaacttttaaaaaaattacaaataatttaaataagtacaacataaaaaaaatggaatataaaactcttcttaatgtggaaacataattatggatttttccttcagttaatccgaggcacacatgacacatgcataacgaatt

SEQ ID NO: 51824 - DNA, 1881 bp, Cannabis sativa
tttatctttattttcatattctttaaaatttacccacttttataaatgatattcccatctcaattaaataatgtaaattagtactagagttaagtggagtgtgaggatatattaggcaacacactaaaaaaaaataggtatatatagataaaaaaaagaagtattcaacttatcccgctaaagtccaccctcaattgtctcttgttttagttattttagttaatttttacgtcaaaaattactaccaagtgactctttaaaaatgcataggttctttgttaaaaaatgcactcacaactcattatatcaaccgtattcataagtgaaggcatcgggttatttttaaaagtaaaattatagcgaaaaattcgactaccaggtaatttttctaaaataacaaggttttttgttcaaaaatgcactaacaactcaacacaatctaccttactcataagtgttggtatcaggttatttttagaagaaaaataaaagtctaaattaccactactaggattttgttttttgtttttaaatattagggttctttattcaaaaatgcacttaaaactcaacactctcaccaatatatataagtagaggcaccatgctactttcaaaagtaaagtaaaagcctaaaattcgattactaggtgacttttcaaaaataacaagaattttttcaaaaattcacccatagctcaacaaactctacttattcatgattgcatgtacgaggttacttttagaagcaaaataattctaaaatttaactactagatgattttttaaaaaatatgagggttctttgttcaaaaatacacttaaagcttaacacactctaccatattcataagtgtaagtaccaagttacttttccataaatcttaaaataagactaccaggtgacttctaaaaaaaataagactaccaggtgacttctaaaaaaaatcagggttttttgttacaaaatacactcaaactcaacactctcaaccatattcataatggtatttaccatattactttcaaaagcaaaataaaagtctataatttcactaccaggagactttaataaaaatattagggttcttttttttaaaaatacactcaaagctcaacacaccataccttattcacaagtgcaagcattaggttactttcagaagtaaaacgaaagcctaaaattgaactaacatgtgagttttttaaaatatgagtgttcttcattaaaaatttcagtcacaactcaacactctcagccatattcaaaagtgaaggtaccaagttaattttaaaagcaaaatagcagcataaaattatactactaggtgacttttttgaaatatgatgggttatttattaaaaaatacaatcacaactcaactcactcaatcttattcaaaagtgaaggcactacatgttaggatttatgccttaaaaaacctgtaaaaatattttaattttataagttgaaaaatttgatatatgtttgaatgttgaattatttactaataatttatatataaatataaaaaaaaaatttattcatatatgaggttgtgactttgtattgtatagagaattaagatgacgagctataaataaagttatgaaatctttaattaatggttgctagtatggttcactgatttttgttactcgatacaagcaatcttaatttagatcgttgatgtagatggacatctcagtgaatgtgttgtatataatagagattatacatgacaatgccattatgtaattaaattgttttatcaaattagtcatttactataaggatctaattcatatcataaagataatcaattagtagatcaacctaaatcttgagaaatcatgaaatcttattcatattattagttt

SEQ ID NO: 51825 - DNA, 1041 bp, Cannabis sativa
taaagtatatattaaaaaattaatgggataattaacgttcaattttttttttttacattttttggtattctataaaaacacaagaaaactacataacaagaaaacaacataaaaaaaaataatatacaaataatcaaaaattaacaacaaaataccaagaatataacgtaaaatagaccatattttatgcaaataaaatctaaaaaactgtaaaattgttgaaaacttcatacaaatcgtattattgaaatttttttttgttatttttatatttttttttcgaaattatcctaaaattaaatatatttataaaaaagttaatttacttaaaattaaaattaaaatactatacaatatttattactcaaagtattaattattattatttcttgttcaaaaaaaatattaattatatttcaaatacttgaaaaatctacgtatatataattaaaaataaattagaaaattaatacataaataattaaaattaaaatattataggtcattatcggggcatgagtgtcaccccaatattccttccaagttaacatttaggaacaaattttaatctttgcgtttcctatttagttggggaatattgtccacccacacctcattcaagaaaagtgtacactagctagtaagtatatttgtgaatagttagtgatttttttatataattattattaaattaaaattatataaaattcatatcaatagtatagtagtatgatacaaattcgaaaaatttatgagaaatatctataaggtctgtttggcacgaaggattgaattagattatgttaaatgtaattaaaaatgaactgattttttttttttttaaataacaaaataaataaaggccaattaaatttaaaatatattttaataataaataattataacattttcacaaaattaaataataagtttttgtaaaaaaaatatatcaataaattataaatataatataatatacaatatatatgacaattaaataaatgttattcatgctttaatataataaaaataaaaatattt

SEQ ID NO: 51826 - DNA, 704 bp, Cannabis sativa
aattaagccttgattccctcctgttttcgtgcctgaattgtctccagcaaatcgcacccttgtaggcgaattaattgccaaatcctcgacatgattccggtgccgtcctccgccagtagccactccgccttcatcctcattgttagaccgaagccattgagctcctatgaggtagttttccttcttggtgattgctttcatccactctccataaggtttaacagtcggatcaaattgaggctcaaaccttcggggacaaaaccgatcactatgaccaatgaggccacatataaagcagaaagtaggaacgaattcatacttgaaagtggtccaaatccatgtcccatcttgtttaatcagtttcatacgccgcttcaaaggtttgttgatgtcaattgtaacccggacgcgaagataatcacgccatatcccaataaagttctttgcatcggatttgataaatgttcccacataattccagcatgtttaaccacccattcagacataaaaccatacttcatgtcgtggagttgaacccacatatcaatcttatgcaacggaaccattctaggatcctctcctcttttcaaacgatgaaacacaagtggcattctgttaaaagtccatggactcccatcgataaccgtttggacgtcaatttcgtgatagaactgaaataggtatcgattagtatccagttcttt

SEQ ID NO: 51827 - DNA, 981 bp, Cannabis sativa
agaattaggtgttttgtggtgtctaaatctacctaagatggtaatcacacaagaaaataactctaatttcatcctagaacaaagcatgaaaatgcaattcaaaatgacgagtttaaaaaacacaatccatagacaaagaagtaacatacttgattttgataataaagttattaagctaatcatcgttgtatcaggctggaggagttcatcgcccctttctcgaagacgagatgctagagtgataaacaaatcaatctttgcgttgaaatccagcttgcgatttttcctaccgtagaattccttatcactgggggtcgatgatgtgggaactctcatgctccaatcctcaacaacaatcgaagacagaaatctacggcgttttccaaattgaagaagaaaattttgattcaaattcagtgcgtggttctggagattgcatggagacttatgcgcttcgaaggatcgaaaatttgaaaaaaaaagtaaaagtggtaactaaaagttaccaggggtatttatacccaaaaaggcgattcacgtgagaagggtatagacaaccatgatcttttctcaagaaacacaccttccatccaacgaacgggaagtccaaaaatctatgtgtatcctagcatttaatgcactccagaatcaaggtgtgaagcaatgataaaaatgcccttttttcaactttcgcgcaaaaattgaacagccatcaaaatgtagtcgttcatggaaagcaactcctcgatggacgtgccttgtcatacttgcgcacctaacatgtggatgcatcatcatcacagacagaggccagcttccgtggtcgagtggcattcgaaatatcactatttcattcttcatttccacatgtccaaatcaagaaagtgatgcaagcttctaccacacacaacattctagaagcttggggaataaatattatctgcatttttgacattagacatgtggactccaaatcaacat

SEQ ID NO: 51828 - DNA, 878 bp, Cannabis sativa
caaaaacaagtgttagaaatttattagaaatcttaattagtaagccttattttatatgtgtgagtccataataaggcttacacacctatagatgcactgtatattgagtatgtaagagtctttatcttttatcataaaaagggtgtttcaaaacatgaaaaaatgttcaaaagtgatgagtattgagcaaataattgcatattaaattgtaagataagaccagtatactatttagctgtaactgatcataagctcaacagtttaccccaatttagagccattgaatctcttccactatgtaagaaaaagaaaaagactacgtttgcaccataacctatattaacatatttaagaaatctaacacttagaataggtataaaataatatactatacacatatatatggactgacgctcatgacctatgcatgtcagtggtcattcaagctatatatatcactcaaataagtaccatggtttcaaattagagaaaaagatgaagctagatcatcatggtttttgacattaatttgtttggttgctgtaccactcatgagaacaatcaaactattacactgttgctactctggacaagaatcttatcacggttcattcatgcatatgtaaataattaaagaatgttttggctattatatattaattgaagatcgacattgttaattgttccccaaacagtactcaatatatgttactgttctatttaaaaatatatatgtatagcctgaaagagtgctaacgcaactcaactgctacaactttggagaatcatcatcattagtataggggaaaagttattggttttaattgggttcggatttgatacaaagcatttggcttagcttttacagtttttttttt

SEQ ID NO: 51829 - DNA, 812 bp, Cannabis sativa
  modified_base (779)..(785): a, c, t, g, unknown or other
aaaaaaaaaaaagaggaaagaaaccatgaaataccagttaagattgtggcttgaatttcatacctgatgtaaaattcttcaaagtaagtgcagatctgatatcgttcttcaagacgagctcaaagagaatgtacccctatatttaaggcgaacctttataatttttgtgtttattttctctatctcttttattttgatgcatgttcttatgtttgtatggctttgatctaatttctggggttgggttctggtgatatcgatatggtgtgatcgagaagggggatttggttcctagggttctttcgagaggaagaaagggagaaagagatttggttcaaatctcgaaagttctttgattgaatctgagctagggttagctcacttgggatttattgtttgctctggtcaacgacaaatcgtttaagttcaaacgatttgtcgtgtgaagataaactacttgtagttttacattgttttaatcaaattgattttaattgtcttcatcaaatttaaccatgtcgctttgcaaggatattaaattggtgtaggatattattggaattaaagaaatcctacacaacttaaaaacataatgaccatcttaatattaattagttttattttttcactagataaattaagtttgtgtatagtttataacattactcattattactagtggtgtccaattatacgctacatttcttagacacaaaattttggacaaaattatacattatgggctcgtttggaacaccgtattaggtcgtattgtattnnnnnnnattatattgaattgtattttatgcaat

SEQ ID NO: 51830 - DNA, 945 bp, Cannabis sativa
  modified_base (27)..(28): a, c, t, g, unknown or other
actaatcagattgtaaagagttttatnnagggcataaaacccaacaggcacatcctgagccaacaaacttgtgctggcctctgcctcgttgcattctacaataaagtatgccagtgcctgggctttattcgagatgcgcgagatgtattgtatgtcgaactggcttagctccatggcccacttaaggagtccccctgaggcctcaggcttctataagacttgccgaagtgggtggtttgtaaataccttgatcgagtgagcttggaagtagggcctgagccttcttgatgaaatcaagagacaaaaagctaattttttgataaggggatactgaatttcagcttctatcatgcatttgttgacataatacaccgagtgttaaacttttccctcctctcggaccaaagatacgctaaccgcgttctcagaaacggctagatataaatataagtcttcttcgtgaatgggttttgatagcactggtggcttaggcatgtgttctttcaacttcctgaatgcttcctcgcattcttcaatctattcaaacttctgacatttcttcaagatgttgaagaatgggatgcacttatcggttgagcgatagatgaagcgactcagggcggcaaggcttgtattttttctgggtttgcctctatctcacgttgactcactataaatcccaaaaattttcctaatttgactctgaaagtacatttcttgggattgagtttcatcccatacctctagactacttcaaaacactttgtgaggtcatctgcatggcccatgcatgttttggatttgaccagcatgtcgtctacgtatacttccatattacgtcccaggagacccttgaacatccaattgaccatgcgctgatagataacagtatacccccttatcggtcctgaagctagtgcactcctggtctgccgtatgcatttt

SEQ ID NO: 51831 - DNA, 1129 bp, Cannabis sativa
  modified_base (332)..(334): a, c, t, g, unknown or other
tgaattttatttttgacataattaccaaataagttgtattcgaatcaagcatatgcttataagttgtatcttaatatgatgtgaatgactttcgaatacgaattaccacccttaccaagaatactaaaataaaaaaaaaaaaaaaatcaataaatagcacagattgattttttatacttattgtttttagttttttttttattatttttttttcttttgtggaaacaaaataaatataaaatcgctcataaattaaaggcatagacctccacttgtcatgttgacagctttcctattactcaatctctaaaatagtttttttttttaaaaannnaaaaataaaaaaataaaaaaatctccaaaatagctttcttattttaaattaatacagttggaaacttattttgattgattcttttttaagtcacttcaaatattctatttattttaccaataaattaactagttttaaaaaaatgatatataagatataaaaatcattggtcattatttatttatgtatactttgtatagatttgcattttccataaaaaaaaaaaaattaagctttttccacaaattaaatattaatctattaaccttacaaaaaaaaaaaaaaactaataaagattatttaactttttaaaaaagattaaatactattttggactctgtgttttgcaaaacttactaaatggattctctattttgttaaatgataaaatagaccctgtatttttcaaaatagtaaaaataggaccctgagctcaatttttgataattttattttttaaaaaaaccaacttgaagatcatttataacacaaacagatacagaaaatataaccatttttatcaaaatatctctagatcagattattattaaaatttattttgacaaaaaatcaattcagagtcctatttgtaccattttgaaaaatacagtgtctattttgtcatttaacaaaacagagagtccaattcataatttttgcaaaacacaagattcaaaatagtgtttaccctttaaaaaaaattgatgagtactaccttacttataagttataactatttttttagataggaatgacaacaggtaatatataagtaagatatacttattttatgat

SEQ ID NO: 51832 - DNA, 1748 bp, Cannabis sativa
ataattaaaaaaagtctaaataaattttaaaagtaatttatattaaaactcttaattcttattttaaaatataaaaataaaattatttttataaaacatgtttttttttgttttaaaaaaaatattatattactattctaattaaaaaatatttaaataataattacataatgcacccatcttatacaaatatgtccccaataaattatcaagaaattttgaaaaaaataaatcactattattataaatcaacattcatttacaacaataataaaaataaaatagacaacttctcctaaccaacaaatgtcttgatccaactttaaaatatattttgccaaactatgtgtggcatggttagtatttctcttatcatgagaaacaacaacttcaggaaaaaagaataaaagacaacgaacatctaagattaaaacaagataaatccttagatgtagtattcaaagcaccagtgactcgtagcgaatccgtttcaatatgggtgatgtgtaattgctcttgcagcgcccaattgagactagggaaaagggctttggctttcatttcatctgaacgaaaatatctttgtactggctttgaaaaggcagcaataacacgaccatggtgatctcgaacaactgctcccacacccaaagttttaggtgccgagtcgagggctacatcaatgttcagcttcagccattcagcagtctgtggttgccatggaatttcttcagaatggttgcttgttttcttgctggtgtggacagcagcagggccactgctactcaccatgcctccatgttgtgaccgccgacgagaagaaccaaatttctccaaatagttaattgcaaatgtaacagtatgttttccttctgatatagttctaccgtgtactactttatttctattcgaccatatcgcccacatgtcacaaatgataagcacaaaatcagcttgaggatgtaaggtggaaaggtgaattagataatcaccattatacatttgttgatcttttgaataatcaatggtgaacaatgtgtgtttccaaactgatttagcatgtggacaatgaaaaagagcatgcccaattgatttcaatgcatctgtacacatggaataagcagccgagtcaataactttcctacggtgaagtgctgctgcagttgaaagagcattgttcagtactttccatgcaaatattttaagttttaatggaagattcagatcccaaaaggttttctaccaattcacgtgtaagtctgaggaagaggattgttgtcgttcttctaaactcgcaaccaaatggaaatttgacttaactgtatatatttataaggttgtgtgatgccaaattaatgtatcgctgaaagggaataatctcaaaggaatagtgacaattctttcaatatccagttgtccaaaaaatcgttaagtaattccacattccactatctttcagtagtgataagatgagcaatgggtaaggaatctggcccaatgtaagaataggcttaaactctgtataaccaggtgttcatttgtctaaaccacattatatatgaaaactattcccaactttgtatctaagaccttgaacaagaagctcacgacctaataaatactttgccatgtaagtgatggtgtatggcttagccttgcttccaaaaaagaattgttaaaaaagtacttgcactttaataattggctcaacaaagaatttggcacttcaaagattctccaagcttgtt

SEQ ID NO: 51833 - DNA, 1121 bp, Cannabis sativa
agatcgggttcaacaagcatttcttgagtactatacatgcctactgggtagttctttggatcaaagaaggcaagttaatcagagtattattgatcttgggcctaagctcaatgaaagccataaaaggatgttgataacagattacacaccctcagaagtaaaggaggctctctttgctatccctggtaccaagtcccctggtcctgatggatttgagagtggtttctttcaggataactggcaacttgtgggatctgaagtggaggaagcagtactctctttcctgaactcaggaaagattttaaaggagatcaatgctacaaccatcactcttattcctaagctgacttgtccaaagagcgttgctgattttagaccaatctcctattgtaatgtactatataaaattgccaccaagatgatttgcaatagattaaggaccatcttgcctgatcttattgcagataatcaaggtggttttgttcatgggagattcattgtgcataatgtgttagtttgccaggatttggtaagactatatggaagaaagaattgcaaaccaagttgtatgatcaaaattgatctcaggaaggcatacgatacaattaatgggatttcattgaggaaatgatgatagcttttgagttcccaatccaattcatttcccttgtaatgaattgcataagaactccaaagttttcattactccttaatggatccatgtgtggtttcttcaatgctaaaagtggattacgacaaggggaccccatgtccccattgctattcgtattgggcatggaatacttatcaagaatacttaagaaagtgggagaatggccaggctttaaatttcatgacaaatgctctagtatgaagttgaaccacctctgttttgctgatgaccttctaattttcagcaatgaggattttattacgataatgctgatgcttaaagggatgaagttattttctacaacctctggtctcctccctaatgagcaaaaaactgccatttattgctcaggaatggcagatggagatgttcaaagaatacttgaggcatcaaactttaagagaagttctcttccatttagatttctggggattcctatatgttcaaa

SEQ ID NO: 51834 - DNA, 2138 bp, Cannabis sativa
ctagttgagaagaggagttagaagttgaataggttgagcctaaagtggagcccaaggctgcccaaaagcatcctagggattgtgatgttgtcttgggtatactgttggctcttatagcgaggttagagagcctctaaatagtaggggtcaacccttagaggttggggttgagcatattgtagacgaggtcaccgtgccttggattttacaacattgagagtgagagagatggatatctcctcaatctacactatttgctgccaagcttgacaaaattatcgatcggggacatgtcggtcagggacggctctaagccatctggctcaccatcccctaccaaactagttatcatggtctggtccccatgttaagcaaggggcggttcctcctttgcatccatactttagggacatagctaacttcttcaagctgtgtccaactcagataacaatgaaaggcataaagtacctctcagcgctcttcatcatgtatgccaaactaggttgttgtagccttttcctctcgaagtgaactacttgtaacgccctaatctacaggaaagtcatgtgtgtagttttataaactagtttagtaataatatattaattagttattaaaatccgtgataatataaagaaaaaaaacatcaccaaaataaaatcctagtaatgaacaacataacgacactaaaatgttttttttttcagatccctattacaacgcttttacgaaaggactatgcatagtagtaagtcaaaatacacagtagatacagcctaaaacagctcttggccactcgactacacaggtcggaagggtcaatatgtataatcattggagaatactgtcgcctcatggctggtctaagttttccttgcccttacctgctccacagagcatccgtcagtcacaaggactcagtaagaaaagtaataaaggaaatacatatgataattaatcaactatattaatatcataacataattaaacaataatattctaatgatgatgtaatataaccaaccatatttattagactgagaagtaatcatctctattacatcacattgcctaatcaggcaagtcgatgcttttactcggtatccatgtatcgcattgcctaatcaggcaagcccatgccataacctagcattcacatatattactttgcctaatcaggcaagcctatgccataacctgacattcacatatattgcattggctaatcaggcaagcccatgccataacctgacatttgcatatatctcattgcttaatcaggcaagcccataccataacctggcattcacatataccacattgcctaattaggcaagcccatgccataacttggcatccatatatatcgaatttcctaatcaggcaagcccatatatcttgtcatgctatgtgatacaaatatacttttctcacattaagtctcaattctggcatgttggccgacctatatggacaacgatcaacgatcctgggccctatgtcacaacaatagtaaatcgataagtgtttattccaaaacaaagcctaatattcgcataaaataatctaggattttctactaaatctcgtggtgaaaataccataaaataaaatacatatcgtggctctaaaatattgaccatattatagagctcatctcaagctttgaagcggtatataaaatgtctaaaatgaacacactagtgaaaagttatggccaaaatacaaaatttggcatttcccaaaactgaccaaatagaatttcggttggtaccatctgaaatttaggttctaaacagtctgaaacataattttcctcaattttaattcttccaaaataactccaatcctaaccaaaccattccaaacttaataggacacatatatatcatccatataacagttctaacgtaacaaaaataaaaaaagagtccttaaaaggataacaccattaaagctcgagctttgagctttaaatctaaaagtcgatttccacttaaaaaccatctcaatttgtgcaattaaacatcgaaaccaatcccgtagccacccaaaaactaaaccatgaagtcacagatgttggaataagtattaccatgatctagatttactaccatgtacgttatttaacatcctaa

SEQ ID NO: 51835 - DNA, 801 bp, Cannabis sativa
aggttcatctaagtcttgcatcgaaaggaaagtaagcattcatcaagtcatttgaagagttcaaacattgtcttaactaattaaagagatttattcaacaaatatgagtacattaaattttcaacaaaattattagagggagtttatatcttgcttaagttaattactttatacttgagaaatttgattgatgaattatctctggacgtgtctctatagactatagtaacatctgaaaggatttgttaattgaaactacatataaaatttgtgctatatataactttaattgaaactacttataaaaatttgattgatgaattaactcttatggtgtatatttctatagtactagtaacagactctcaatctatagtcacaaaatatctgcttcagtactaattttatttttttcaaatagctcaaaaattttcattatgaaatgtagctaagaattatcttagttttagtgcttaactataattttttattatttttataatgtattttatttaattgtaagtgtaaaaataaataaattttacataatatataatattttatcatatatatgtgtattgtaaatatattatttaaatagtttagagaaaattataaagaaactgatatatggtataatgtaaaggtgtggtataaaagagaaatttcatttttttttttatctttaaaaaaataccctatatcaaaatttagactcccaactaatttatacaaaattattttttttgtttatatattctttttccattttacccttaattaaaaaaaaataaattaatt

SEQ ID NO: 51836 - DNA, 1210 bp, Cannabis sativa
aataaagataaatggttgagatctcattttagtgattatattaattcactaaaatatcattttagttgagcttaattctattttttggtgttgtttttgagttatttgagctagtttaagcatgaatcattgtttgtggttgagtttggacaaagtttgagctttagagctcaaactttgctcttgaatggtggatttgattttaggagttcatatcaatttttgatgcttgagttatgtttattgtggatgtttaggggttttggaaggtttgaaacaatttggggtagaattgttttgttggtgaggttttagggtttcgtgcaaggaacccgttaaccggtttaggcagcgtgtaaaattagtttattatttcctccagcagaaccctaataaccgattttctattttgggaatctagtttaccggttttagtagctttggaaccctagtttttcatgtcttagctatacttagggttttgccacattatcaattgatgaagaaacttctagttttgattttttgtccccaaaaagttgtttggtgtgtcacttatcagttttacaaatgtgtcacttagggatctgtaaatcgtcgagcagcaattctattcaggttgatcggcacacctgaacttaaaatcgaggtaagattagtataatgatatgtatatgtgattacatgtttagcatacatgtttatgaatgtctgttagataatatattgaaatagcgatatcagtatacataaagttatattgaataccgacgaatgtatgtttagcataagtactaattgatgctatcacatcagtacgactagagtactgagtataggctgatattatggtcaatagtactattctacgaatgttctaaactcagtatgcgtaggacgcgggatagggttatggttgggtgtatgagcgcctaattatgacccagtttcaattttaggttatgattatgctttttgtaggaaatcaagctagcaattagttgtaaatttacatttaatgtattttccatttactctagtataactaggtgttcacattgtgtattatatataccctttgtatacactaaaagaaatcatgagaaaataaaaatgatttctctcatttttctacatggtatcagagcatgtaaaagcttctcaaagaattttttcattccttcccttcttaaaattagggttcttaaaa

SEQ ID NO: 51837 - DNA, 1187 bp, Cannabis sativa
  modified_base (1155)..(1161): a, c, t, g, unknown or other
aattaataataagtttgggaataagaaagtcaaaaatctgataagtaaattttatgaggtagctaggttttcgtgggaaaaagaaaatcacctgtcccaattatcttttcttaattttttgtctctcaataaataaattccacatgtttttattttatcataattaattcaacttttggttacttccctttctttctattaggcatgtttatataatttacaagatttcaaactctaataaattcagactgaattatttaaaatcagactaaatgaatccggtgtgaatgatttgatcaattcgaaccgtttgaaattctccaattcagtcatgattttaaaaatctcggtagcagttcaaacaaaacaataccgtgtaattattttatatatatttaatatatatttttagacgaaatattaatatttgggaataactttaggtagaatattgatattgacttaatattattatgataaaaattttctattgttatttatgtattataaacttattaaaaaaaattattgaaaaatacacaattattgtaaaaataatttccatggtttcgaatcaaacaaatctatttttgagtagattggatttggtttgattatttaattagtttggtttagttttgaatttttaaaagcaatactaatctgattataaaattttaaaattttaaaattgggaccaaatcaatccataaacccccttactttctattatgttagctccatttcctctaaatatatatatatatatatatataaattttgaaaagctgcattcatttcataatatttcatataatgaatgctcacattcttcgtatatgatactatttttttagcgaattatgatttttatccgtcgaacttttacatatattaaatcatgttctttgaacttgtaaggccgttaaaaatcctcctaaactacttagattgttggatttaaggacttttgtccaattttagtaagaaaaatcaacatgaatgaaaattcagggggcattatttagtacatgtaaaattcaaggagggtgatttggtacatatcaaagtttatggagcgtaatttcgtacatggacaatcacaaaattaataaaattaaatgaaattttacaaaaatccttaaatccaacaannnnnnnagttcaggaggaatttttaacagtta

SEQ ID NO: 51838 - DNA, 7590 bp, Cannabis sativa
ccaaacgaggtccctcggcgcccttaaaaaaatcggccccggccgataacggcagcaccgtcaatggcacagccacaaaaccctcctctcctcctcattcgtaagtctttacttttgggacgaagctattcgtgttccgattattctgatttttatgttcctaatttgcttggagttttcaaggtctttgggtggggagaggaccgtaaagaagctgaggttatcaaaggccctcacaattcctgaaggcgttacagtatcggatgcttgtcggcgcatggcggctcgtcgtgtcgatgctgttcttttaactgatgccaatgcattgctctctggaattgttactgacaaggcgagcaagcaatgcattcattttctgtttttcttttctttcaatttctatataaatatttcggttagttggtaagctgaactgattatattgattgcaggacattgccactagagttatagcggagggtttaagaccggagcagacaattgtatcgaagatcatgacgcggaatcccatttttgttacgtctgattcattagctattgaagctcttcagaagatggtccaaggtaacgttacatagctgctacagtgttctcattagttttacagtttgatatgtaattttcttggttgcttgtaagttacatgtaattgaatataattgtttgagtgagttgtatgcttaacattttgatggaatgatttgtataactttgataaccatattttttgtttgtaaattctttaattcatttgctagctatatatatattaaagaaaaatagaaacctgttaggtagcttttgtttccgaaaaggttaaaagaaaacgtacaaagaaaattttagaatttcgtaacatatttaataatatgagatgataaagtgagcttagtgaggggatgtatttgtaacaagttttactggattatgggtttcgcttatgagaagttctatgtacttattttataccttaaggatacgttaaggttttttgactacgggtttcctctgccataagtgaggtccctaataattttttggggtggtctgattttgacatttgtctctttcctaaattgttttatacataaactttattatatatatatataataggaaagaatgctggagaatctttcaaaacgcagaagtagggaggtgagtgaaaaaggagaaaaaggaagtggattggataaagttcactgcaaaattgagatagaaaatgaagtcgcaattaaagtaagaaattgtaaagtgaggagaaagtgagtggagacaatgatgggagacttatgggtcttagttgaatattctcaagttcttatttagcgatgtgtatagatcttagaggcttgtgactggttggagataaaaaaaaaattctgacctagaaagagcgggcattgtgaattttagggagatatcaggtcctgaaaatcctacattttgtttttctaatacgatcattccatttttatctacattgatctgctctttattaatctgtttttttatggaagtttttcttgttgacaggtaaatttagacatcttcctgtcgtagaaaatggtgaggttattgccttgttggatataaccaaatgcctctatgatgccatatcaagaatggagaaggcagctgagcagggaagtgcaattgctgctgcagttgaaggggttgagcgtcagtggggaaacaacttttctggtttgtagaatacaattttatcgtcataaatggcatgagatgcaaagaaatgtgccctttgtcattttgttgcatggaaaggattaaaccctgatatttacatgaaaactgcagaaaactggctgactgcatttctctcattttctttattttctgaacacgccatccagacattatggagatttaacctgattaggtcaatttaatgtgtgagtttgattggttaattactaaacatttaatgcattatagatactgttttctccagggtttcatcattggaaagtcattgttgggaagagaattagcattaagttgtactggcgaaattatactgtttttgaagttttaatactggataggagtcctttctcttttaattagcactttctatatggtaaaaatatatgtatacacaaaattgttttgatctcagaattacttgtaatagaaaaaataaaacttctgttctctaatgaaattataaacatgctgtaaaagttactctgtgcttaactgtcacatattgcaatattttgtagatctcttattattcgggatacatacttgtcataatctgattaactttcgacttctgtttctcaaatttattgcagctccatatgcttttctagaaactctgagggaacgaatgttcaagccttccttgtcatctatcattactgaaaataccaagtatgttacaaagtttattttctaaaatgcagctctgctgagtaatgctgtttactaagttgtaatttttctagaatttgtttgtcgttaccaaattttgtagctccatgtggtttcagggttgcaattgtatcaccatcagatcctgtctatgttgcagccaaaaagatgcgggaatttcgggtcaattcagtcattatagcaacaggaaacaagattcaaggaatacttacgtatgattctttcttacgtatgttagttgtcctctaaaatggaaatatctacatttattatgttataatttttgtctgcggttattttgcaactaatgtaggtcaaaagatatactcctgcgagttgttgcgcaaaatctctcacctgagttgactctggtggaaaaggttttcttttaagcattttcttaatcagttttgtccttttctttacaacttaattgacttttatttctattttgaatattccataatttgtcacctttaatggccatcttaatttgtcaaggtaatgacaccaaacccagaatgtgccactacggaaacgacaatccttgatgcattgcatataatgcatgatgggaagtttcttcatcttccggttttggaaaaaggtgaggggcactttctcaattcatgactcttgtcttttgacttggacgattaatttcataatatctgctctacagatgggaatgttgctgcttgtgtggatgtgttgcagataactcacgcagcaatatctatggtaaaaatgattttgttttttttttaattattaattttgtagtttatgtatacagtgaagcatttaaacatttctttgttgtctatagagatctagctatccagttctttgattaacttatgcatttctgtttatcgtttttttccttttttgaattgtacctgtcgcagttctctcaacaattttaattgtggatttatcaatgtataattaactgttggttaatcatttttaatttccaattctgaggtaatctccaattttactgcaagccagcgtttatgaattgtgactatgctttgacaaaagttgtgatgggggaagtgaatttttttttttgtgtgcttatcttattttgctattttgaattgatttaaagaagtatacttattttcatctagtgaattttccgtacaaggcttgttttcaagtatgtgcttttccccctgtttttaggaagtggtcaaagggagtaaaccttgttactgtatgattttaaaaaatttcttcactgtgctgcaccattttcttgtctactgcttcatgcaggcctaattgtgatgcttttggtgcctaacagctgactacgtaaaagacacttttgacaatcaaatttcatggcattttttcagtgtcaaaaatttcaggatgttagaacacagaatgttttacgaagctatttattgtgttcataggttgagagcagctctggtacagttaatgatatggccaacaccatgatgcagaagttttgggattcagctcttgctctagagccacctgatgattgtgacacccacaggtagttgaccatttaagatatatgacaaactccatctcaactattaaatttgcttgtacactaaaattgttcgggttcggttaggtaaaaaagaagcatatgcataaataacttatatatatatatattttatatggtatgtgagtacactttgttaattttgtaatcttgttatttattattattgttatttattttgcaattctttttgtagtgaaatgtctgcattcacaaactttgatggggcagagataggaaagcctaactacccttcgcttggtcttggaaattcatttgctttcaaatttgaggatttcaagggtcgtgtacacagactgaattgtggtgagttgcctgtagaattggatgtctatggtgggaggaaaggatggatctgctttcgttagtttgctatttgatgcaatcatttggtcttttcttctttttttccgctagtgtaactttgtgttcttcatccttgttttacaccaggtactgaaaacttggatgagttggtatctactgtcatgcaaaggataggtgctggaagtgattctaaccagcctcagattttagtaagtttcagctacattttatttttaatctctctctctctctctctctctctcacttaatggtgatttgttcggtaattgacacattttttttaaattttccagtatgaagatgatgaaggtgataaggttttacttgcaactgataatgatcttattagtgctgtcagccatgctcgatcgataggtttgaaggtgatatttatattgcatgccatgtgaagttgatttcatcgaatctactgatctcatttaattctattctctataacctgtatctctgaaatttatagttttgatgattgtttgcttggttattgtgacagtattttttccaaaatttttattactccgaaattttaattttgtttgaatggatcatgtcatttttacaattttactttagcttttatctcttttccttctcaggtcttgagattacatctggacttctctgattcaaatcagcaaacaattgagccatcgagcacagtggccttacagacaagtggatggaagccttctcaagcaagcatttttgccggtgtggctgtcttgaccggcattggggtgctggtttacttgaagcgatcttagctgtgaagaatttgattatggaaaagaaagaaaacgaaggttgtaggatcagaagggtgatctctacagagaagagagaactacaaaacttgagagagattgttgggagggccttgtgggatataatatccatatattctgttcaaatcatcaactagagccagtagtaataaatatatgataaatgctgtactggtaagtgcaaaaagagtgaggatgatagtgatggggaagaactgataccattattttttgcttaaaaattgtgaaaagggtgaagtggggtcatttcttgtgtcaactaaagttttggaggaaatgaaagagttgtaaatctggtgatgggcatagttttgattctcctcgtatacattcttacgctcgtctggcttgtgttgctcttcatgtatggtatgcaccacattttttatattattattttattctttctgatgggggtttttcccatttgaaaatcagaaagaaaattagatcacaaattaacttggaaaaaagaaaaaatttaaagagaaataaatgagataaagatgtaaatattgtgttaaatttagtacaaaaagtaaacaaatgctatatttagcataatatttgcaattgtgttacaatacgcagcaatattttaagatacaaattgctctaaacaaataaaatataatgatcatctacaaattaagtgttcaaaaaattattaataaataatattataattaacaataatctaattaggatttttatctcttaaaatttaacatgtactaaatcatgttctttcaacttttttggttgttaaaaattatccttgaactatttagattgttagatataaagatttttgtttaatttatttcaattttactattccagtgattgtttatatactaaattatgttctctaaactttgatttcaaccaaactatacttctcgaactttgacatatactaaatcatgccttctgaactttcaaccatgttagatttttttttactaaaattagacaaaaatctttaaatctaacaatttcaatagttcaggggcataatttggcatatcaaagttcaaggagtaaaaatcttaattagccttaaacatatgtactaaagttagttgctaatgattaatggttgtaattaaaatatatttattttaaatttggcttaatgatagtttgtgttaaatttagcataaaaaatgagtgctacattttgttcactatttacaattttgttccattacacaagatttagaataaatacaaaaaaaaaaaaagttgattattattggttattattaatgtccctagggtttattttatgtaagggtttaaaaggggtagtttggtctttttgggtggtgtgtgttttattttatcttattttagtttattttattttattatgattggtggctgaaatttaattaaggttatatatatatatattttataattaaggttagaaatgaaaacacttaagtcacatatccccctccaaccttcttccttctacccgaacccctaagaagcttcaaccaagggatttcttttgcttaattctcagcaatcagattgtttttgcaaggggtagaagttgcttaggcatcaaggtatgatcttgcttgttttcctttgaattactttagttaaggttgggttttggttaaatcttctagggtttcatggctggttggggtagcttggatcttgagcttattcttaagtttaatttaggaatgtttagattttaattgatgtattgtgtggctggtttggtttgaaataaacaattgagttttagaatcaagttttggttcaaacttggtgaagttatgaattggatgaattgtgattaattgatgcttgagatgagttaaatttgtggcattatactgttctggaatgtttggacaggtatggattggttttggttcgaatttggggaagagaacccaaacttcatggtctgccaaaaccggtcgtccggttggttctggtgtaccagaaccagtcgactggttgcccagtagggggaattcccgagtttttcttccggttctgttttggctcggggtgttgcgtggtacctattttaggttgcttatgagttgtttgacattttttggagttgttgggagttaggttgtgtttggtttagaattagggttttgttttgaaattctagattaaggtatctattaagtctcaattgtcgtgacataggaccgggatcgcccagcttattttccactcaggtcggcccgcactcttgagttctaaattaaggtaagaaaagtggtaagtgccatatgtggctaagtgttagcggttgaatggttatagccttgattattatcaagattctgattaaatatttgttgagcctcagttatgacctagggttggaaacgatta

SEQ ID NO: 51839 - DNA, 807 bp, Cannabis sativa
tgttttaatttattaagattctatgttatcttttcaatgtcaaggaaattaaaattcaggaaaaccagatgtgttgacttctttgctcaatatatagttgatattcgttcatataaatgaatttaaaacctcttataatttaaaataaatctagtggtttggcttatttgtcaaactaaaagttcaatcaataataaataattaaataaacaattaaaagcagccattatttgtcaaatcgtaagtttcatttttttcatttatttgggtataatgctcttatataaattcttgcgcttttttttatatattgacagaggaggattcggacattttttgtggagataaatgtgaaactattaaattatatttatgatgataattatgcttcatttgtggagcttaattcggcttatgtaattaattagccaacataaatcaattcaagtagttatttttattttttattttcattctctaatttgggttattgttagatagtttggtattgataatgtgagaacataacatcatatatatatataagatgtatcacttacttatttcatttccaattagttgtgagagatagaattacaatataattgtgagccaaaaagagtcgtcataagccaaaagtgtcgcttaactaattatgatcgagctatctttggagagcaaaaaacagtcaccattttgaagagatgttaaagattcccatattaattaatttatttttttctttctgaaatggacattgattttgtttagggtgttgttgctccagaattcgcccaaaatacgtgg

SEQ ID NO: 51840 - DNA, 1126 bp, Cannabis sativa
ataatatatcatgaacttccttgaacatttgctttgtttatacgtaaatccactagtaataatattattatatacattagtaatcaaacttttgaaatacaaagaaggttgaaaatgttgttaatttgtcataataaagaaataaatggtcaaaaacgattgagcccgatgtcgttttttgacgttcttgtcgttttactattgaagtcgttctttaagtttagtgtcgtttctaagaaaagttattttatttattagtagagagagagagagagagagaaaggagaagattgataggtttgagtaattaagtaggagggtaggaaaaacatatatgcttttggtattgattgaaatttgatgtgatgacaaaaacaaaacacaacacaaaagaacaaagaagagtaaataggttgtgttgaaggatcataataaaaatatatacaggagggcccattgagatttttaatggaccataaaaatactgggaccgatcgaccttagcatggtgccaaaatgttgggtttggtccagacatacctcacactactctgacacattcaaatgtctcctcactactggacctatctctaactcgaatcccattttataataacaatacataaatttatatggtatactaacttttgtcatttcttttacaaaaatactgtcagacggtatttttttttacttttttactgtgtttttttataagtttcatattgcagtatactttgttaagttttcactggtgttctactgatgtttttttagtttctactgttgttttgaattgttctgttttgtgttctaccggtgttttataaaaacacagtatttttgtaaattttcctagtcttaaccctaatttttttcctaatcttttcatgattacactctgatcaccatttatagttatattataggttgattaaaatttgtgcacccaagttatattaagattgttttaaaaaaaaattccaaactatataagataattttctgttcaattttattaatggatacctgacgtacagacagagacaatcaatacactaaagtggcgtttggttggaagtaatgaaatggaatggaatggaaaagaaacaattttcattccatt

SEQ ID NO: 51841 - DNA, 2024 bp, Cannabis sativa
ctaacatggtgaattggatattgtgatgaatttttcagaatgttttaattgtatacactattttatgttattgaactgttctggggagtttgaacaggtttcatggagatttgactgggttttgatgtgaaaacccgagtttttcttttttgcagcaaggaaactaattaaccgatttcacaggtgtggtgaaaccggtcagccagttttgccagcaagggaaactctaggttttagcctcaaaatcggttttacttaaggtgtttttaagagtttagattagggtattttagtggtgtttgagatgttttgaaacaatgggagttagttatgtccagttacagaaattagggtttgtttccaaattttttgactaagttatttatcaagcttcgttgtcgtgacataggactcgggatcatcgagcgtagttctatttaggtcggcccgcatgcctgattactagactgaggtaagaaagtttattgcgctactaagcatgttaagtgaggaacaattattattgtttgtgactcatttatgatcaaggtagcagttactattgtgtgtggctcgattatgatcgagataaagatacgatcattaccgttattaaaaatggataatgatacgaccattaccgtttattgtgaatgagtaattacttgcttgaaaccgcagataggtttcttacttatcaattgttgtatcgggcatcgatagtgacatatgtagctcatggatgacgagtggtaaggatgctttatgaggcatcaagagcagtttttcttattaggcagatagttgccatgtaacatttaattatgtgctgtataagcatttatttgtgtattatggaattgtgtgccatgtattgtatttctatctcatgttattcactgtttgtgattacttgctttcttgttgagtcattgtgactcacgggtgctttgtggtgcaggtaaagggaagggaaaagtgaatgagccatgagtcaatggtctcccagcgatgtacatatcaatcgtggtgtctttgcttccagggatcaggattaaccctttgactatatttggaaatgtaaccctacttttgtaatagcagttttgaaactagatgtaaatgaatttataaataggggatcctcgtattatggtagtattttgtataaaagttatattttagtgtgattagaacgttttcaattaaaccacactttttctaaactaataaattaattataaataaatttgtaaaagcacacacgtggcgtccctgtgagtcagagcgttacaacatggtatcagagcgaccaaggtttaaagatcctgaagactagtttgatatgtacatcggttgtgaagactcgttcgactcatggttcagtaagtgctgattgttagattatttgttaattacctgcttatttgaattatgctagttattagaaaagcattgtaagggctgatgtgtatgtgtatacatggaaatgcttattagcattactcatgatttgagaggtactgtacggtggaaagttaaggtcgtaggtgtattagattatgcacctgaggcggcctggtaggggtaactgtgagctttctaggcttggggttggcagtgaaggtgtgaatcctccacacccaccaaactgggaagagatgtatgtcgcgatgtaggaggccattcgacagcaagttgattagattcgagaattgagggagcagcgagctcagcctgctccaagtctcaatcatgatccttcggcacttctggtagtgccacaggatgctggaaatttttatggagtcgttgtacaagtggttcaggaagtagagtctgccagtgtacgagggtggtgtagatccactcatggcggagaaatggatgagtatgataatatcgattttttatttcatacgggttaagagtaatgattgggttagatgtgtcgtttacatgttgcgtagagatgcccgcatctagtgggacattgtatcatagggtcatgatttgaataacat

SEQ ID NO: 51842 - DNA, 1118 bp, Cannabis sativa
taagatattttgcaaaatttgagatttttagaaaaatttaacagccaaaaatacagtttaaacatatttcatttattttatatgcgtgtgaaatagattgtttgaacactataattaattaaaattttacaggatatcttaaataactataaaatgcacgattgtaaaaaattagactaaaaattctattaaatgctgaaacagatatgaggtgcatccatacatacccaaaattataatgcaatgaagaattttatttggaaagtatcacttttaataaattttattttatatacaatgtatatttaatttgtaaaaaaaattaaaaatattaaattttattaaaaatataataattatatatgattttaaaaatataaaaataaaaacaacacaaaataatgtgttttttttttttaaaaaataatattagaagtaattttttaaaatgaatttaattttattttttaaatattaaaatgtacttataatttatattaaaaaaataaaaaaataataagtctctaatgtgtcaaatatactgagaatatgtttaaggtgggtttcgattgtgtttctaaacattattttacaatttaagaaaataaaaagcaaagtatttagtattatgtgcttctataatccacactcttaaaaggggtgcaccaatgtacctcttatttgttttggcattcgaacaaattttttagtctaatttttttcataatcgtgtacgttatatttaatatatcttgtaaaattttaaaaaattcggaataatttacgatataaaaaacaatgttcaaacagtctattttacagacgtataaaataaaaaaaaaatatgtgtataataaactgtttgaaactttgaattttatttttggcgtgttaaatttctctgaatgacttaaaattttgtaaaatatcataattacaacgtacacgactaagaacaaaataaattaaaaaattcttctaaatactaaaataaataaaaatacataagtatattcttttttaagagaataaattattaaatttactattagtattttattttcttaaaatatatgtatgtgtaacgtgcaatgaacaaagcaaagattatgaatatt

SEQ ID NO: 51843 - DNA, 849 bp, Cannabis sativa
tagtcacaaaaattataatttattgtgaataaatgtgtttttaagcacaatatttattgtgactagaagtaaattagtgacaacaacttgtatcttaatcatattttagtaactttttattttagctaaaatttatatttaattacaaaaatttatattgcgactaagaacttcttatcattaaatataattattttgtgtaataagtgctgttttggcattatatgtattgattgtagagtgcgtttgttggtttaattattgaaattccttttcttattgaaaaaaagaagaagaagaagaaaatcttatgtcctaattgaaagttggttttaagcccaaaataattttctattaatagtttttgcaactgagtattgttaaatatttattaagatacacatgccattatgtaattgtatcacatattaaatagttaattaaatatttaaagtatattttcaaaagaaatttaatttattactaaacaaataaaaagtgataatagattgatttttttttggtaagaacaaaaaaagtgataatagtttggcataagctatattttattgttaaaaaaaaattacacaaagtatctaaaatcacacttgtttttatatatttttacgggctgttatttcttttagaaggaaaacaatttttatttaatgttgttgcaatattacattatgtttccgtaatgtgaaaatagtttttttttttaagaacaacccaaaaagaaaaagaagggtacaaaaaaaaaaacagtatcttaaaaacgtaaactttttgttgatttttggtattatcaaaataatccccaaagaaaatgctattatattgttctag

SEQ ID NO: 51844 - DNA, 823 bp, Cannabis sativa
tcccattcctaattctccatcgatagccactttagattatttattttcctcatactacactctgccaaacaaaggacacgtgtgactcacatcttgcttccaacaccaaaccattaggaaagtagcttgctttaaaactctattacaaagagatgacagaaaacgaataaatgtccatatttgttttataagaagatcttgatcgaacattttcaagtcaagaaatccaaatcttcctttttcttttggctgacataaaacagaccatgtgcgccaatgtatattatcaattttctaagaagaatcccaccaaaatttcgctgctattttatagaggttgtttatagtagtttttgtcaaatggaaacaactcatggtatatgttggaattacttgtataatggcttttatgagcacctttttcccgtcacagagaacatagatattttcccaatcaggaagcttgttccataacttatttccaatcacatcgcctagcttaggaaagagaaccagactgaagtaatacatcaaataactttatcaatcctttcctcccaatatccaagtttcaacatcataacctgaataaatgaccaatcaaccgtatcgtacaccttaaccatatccaattttaaagtcagcttcctactattttgaaaatgattctttctcatccaatgaagcctttcgtagccaatgatagtattgtcatgaatcaatcttcttttaacaaaggcactctgtaataccctagaattatgaaatggattagcaaaaccctaattagataattatgattaattgaggaattatattatta

SEQ ID NO: 51845 - DNA, 1828 bp, Cannabis sativa
caaacaaatttaattataagacttggatgaccataaaaagtcgtaaggatatagtttactaggaaggtctccagtctttatggcactcgcgtctaaacacaaaaattgtaatgggagaattttctattcttgtgttagatgcaagaatactaaattatatcatttagatattacatcatggtgattaacgtatttagtattgtttgtattgatgactgattgttattattttattttattttaaggaatgattattctattattattgtttaatctaagttgattagttatttttattctcttaaactaagggctcatatgattttatgattcctttttagcataaaatgtctgcagatgttactagttatcatggtggagatggtggtggggatgacccattaggtcctactagggtacctgcttcgtgcgtcttctggtttttttttttaattttttaagtaaagtgtttaatttgttaactcaaatacacttacatatacattttcaatggcaaaatagctagtgaattaaagaaaggtcgtgggataaatgttttggtaaatttggaagatagaagaaaaaaagctggggtcccgttgccattagtattggacaatgcctctaacaaaatagtaggcttggagagtaaagctttccctcgtttggtagggagagagattgcattgcatgttcctggacattttgacagttgggcaaatgtcccggagcagtacaaacacctcatcttaaccaaacttcgggtaaattttttgaaatttaaatcaaaatgaataaatgttattattagtatgttattacaatttttttttatcaaatgcagcattattaccagattgacaataatgcaaaattaacagctatttcgttagctgagatggccgaaaaatacaagacgagaaagaacattagactaacgcatttcaaaaaatattacaaaacaccagaagattttgaaaatgcagtcaagaaccaccccgatgaactcaatgaagaacaatggcgactaatatgtcaattgttcacatctcctaagtttattgctcgttctaagcgaaacgctcttaatcggcaaaaaatgaaatacccttcaacacaaggatcgataactatggctgagatcctttataaaaatgtaagttaacatatataatatttattttatgaagtttaatttagttataattttcttacaatgtatatttatcagcaaaataaaagttacgttgagaataggaaagtttgtcatacaaaaaaagacatggacacctttgtcaacgagtatgccaaaaatgaacgggtaagattatattaattaaattactttttaaaaatataatttaaataattgtaagtttgtttggtttctaatttattcttaaaataggagcatgtgaagaataattatgacagtcggtctagtacttctgattctacacaagtttctaagattgatatacttcatgagactcttggagagaggcgtgaccatgagagaggagtgggtcgcaaattgaaaggacaatcatcaagtcaacacacacaacctacaattactgaccaacccgacttaaagcaaacgatagctcagttgcaaagacaaattcaggtaatgtctcaagttttgttacctaaagaacgtacacaaatggatgttgagatgactgatgcagctccaacacaaccaacgcgtccacaaccatctcgttctcatatgtttggagatagatttggtccttcttttcagccaatgaattttcagcatcagcagccgcaacaaacacctctttcgtttcaacaattgcca

SEQ ID NO: 51846 - DNA, 908 bp, Cannabis sativa
taataaataaataaacttgacaatttttctattttaatttttttaagagagaaaataaattttacactttgctttaatttggtcaacttttatggtataatgctcataactattcctatatatctttatggtgtacgagtagtatttgaaaataaaaggtaaagaagcactactaaacataaactagttacataaatttggtattgctcctttatttttatttttttttctaatttaaatgttttgttttttagcttatatatagtgatttatttagtgtgttttgtatataatgttaggcaatatatcaaacaatatgagtcaagccacaaaaaagaatgtacccaatttaggcaaccaaactataattaaactaattaattaagcaaaaattataaaattcttttgtatttaatacatttttgtttgatcgagcaaatcttgaaagttgaaaacttttaatcccatttcaaatttaaaaagacaaatggaggaagaattgcctagaatttaaactcaaatttgtcaaattgtgtgagtgtatgaattctcactcacacaaatttcaaaagataaccaaaacccactcatcaatcaaaaaagaaaataaataaataaagacccaatttaggggacaatgtaatggtatgaaccaaccataaaagatgagattttccactagacaaagcaaggaaccttccttttcgtctcattgggaccctatatacatacccttttaaattttaaaattaattaaattatgaattatttttagagtaaaatttttttatgttttaattttatacacttaatatttttatatttttctatacaaatttgagccgtaaattagatatcaacactaaataccaatatgactactactgtattagtttcgaagttttact

SEQ ID NO: 51847 - DNA, 1130 bp, Cannabis sativa
gcataaaacccaacaaaatgatggtacactctagaacaagttggcttgatcctgatctcagctacgatcttctccaattgatgagtgcacgtcaaggacaagtgtacgacattgggccttccataacaacatccaaagggacgaacctttggactgttgtggctgggatagaagtaccaataggggtatcattggatggcactttagaatttgaaatggtgccttctgaaaggagcttgagaatttcttggtcaaaaccatagaaatcgtacttgtgaaggtcccaaagaactttactcatatgaaagacaagaaacacagcagttatcccccacattaaaccctaaatcataaaggggaatggaggtcctctaattgctgggaaaaggccccttcttgatctaggcggggcaaaaatcaacaattcctattgccatacatcagctgcaagaaatctttgacataataatagaacaaggaaaaggaaagaaatggggaacactgcgatttctatgaaccctaagcctaaaaattcctagcatagtcttaagacaaaagttacaaaaaatgcaacctagaaaaatggcggttcagaggaaatctctagtgacattctaaaacctaaaaaaaaagagaaagagaacgataatgtctactgatgcattcataataattcaaaagttaaaacttggaaaagttgaaacttacgtgttgaagagaatgcagaggttgtcaaaaccactgtacgctggtagtacttcgcctactagtgataatggaaaaccaagaggtagtctggagagtctggaatatttgcaaaagattaggaaaactttgaaagtgaaaaatgatgagtggttaaaaatcctagaaggaaaaggcacgagcttttatagatcttccagggaatatactaatcaatgaccatctaacgctcaaggctcaaactatccaaattccaataatccaatggtcgggacagcgtggctataaaatgtagtgaaaagggcaattgcaatactcgagtattttcctgaaactgatatgaatgaagggttctattgaaaaggcgagaatcaaatcatttttgccaaaaatgagaaaaatgattataaataataaatgactca

SEQ ID NO: 51848 - DNA, 2221 bp, Cannabis sativa
aataaattcatatttttccttttttcttaaaattgcccaaacttggtgaaatttctcaaataagatataattcatttttcaattctaattgacttattaaattaattaattgagtctacaagatgatattatcacaggcaatgtggggaccataggcctatgtaactaagctccaaataagtagatccgaaatttatcgagtaaatttcctatcttattaattcttcccgactccactatggattcagaatttcactcttgattacatagaacactctatatactaaatatagatacaatatgaataatctattattttaatcacaacaatcattgatcatctatagacggtttatattaagtagggacaaagttactgttttacccttcaatgtattttatccttaaaacacttaactacttgtaaatgatattttgggaaactaatataattatcgaaatgaggcctatatcatttatcgcattaggccaacctctaaggaaacagtcattttacttctaatagacatagaagctatagattcttatctttagcactcctactcaattgcacttccaagttcccaagatataagtattaagctagttccatggtaagatagttacgaataagtcaaatgatcaaatgatctatgatcaattatgtgatattgactaggaaaagatataacaataaatttatgatatcttttccactgtcaatatcggtctagtccgatgtaaaatcgatacatctaatcctggtttactttactaataccttagaaaagatatttcactcagctaagtataagtaaaccttataactgattatcacatcaatataaattcagtgcactaataaatcgtgagacttaataatttaaagcatataatcacaattactttccattgtgatggcatcattgtaattgtgaataactatatgttcaaaagttaatagaaattatatattaaatctataatcatgtataaaacatgtgagcaaaacatatgactaggttaggatatgatttctgatctttattgaaagtaaataagattacaatgaaattagtttttatttagggtataaaattccaacatttattcactctagaaatgtttactttcatgaaaatatttttttctctttcggacattatttctccttcttccattaatgaactattctcatattctttgttgccttctttaggacagtaccacattctactcgtggagaacgaaccagttcctgatgatgatcaatcttcatcccacaagagggatatacccaatgatttgcctcctactatggatcacacatcggcctccattcatgatgaagctccatccacacccagggatattcatccaagttcacttgttatgtctaaaacaggtagactagtatctaaaccaaaacattttctgattatgtttccgaactactgctcctctttcactgctcattctattaaccaacatttatcttatgataagttaaaagatcactattgagcaacgatctttgttacccatccggttattaaacctctcagttacaaaatggcagctaaagaccctatttggcagaaagttatggatactgaaaccgatgccctaaaagccaacgacacttgaattgtcgtaactcttcttgatggtcatcatgccattgactataagtgatatacaataaaatacaatgctgatggtactattgaatgattcaaagcacgattgatagccaaaggctacaatcaaaaataaggtattgattactcttacacatttgttcctattgtaaagtttaataccttagttacattgtattaaaaattttggtcgtaataattaatataatacattgttttatctaaatattcaatataatacgactgttatacaatttattaaatgagccctaaaattattgcttactattgcaaaaattaacaattaatttttgtgccaacttgatattaataaaacattttttttttattttatttttgttttttgtttctttttattctagattatagagattaacttcccacccttaaagaaaaaaaaaaacttcccaccgtaagagttacacagactaagtacatgtttggcatcataactaaaaaactgttttttatttttaaaaacagaaaattgtttttaaaacaatttggcttgtttggctttgttttttaaaaacagtttt

SEQ ID NO: 51849 - DNA, 1056 bp, Cannabis sativa
  modified_base (35)..(43): a, c, t, g, unknown or other
tttctaagtagaatttcgtaaaaaaaaaaaaaaannnnnnnnnttaaagtgtaaaaatgaaaaagaccctaaaatatattatatatatgtacatattattaatgacgacattgtccttatagatatttattttactgacgactttaaatgtcttcattgatacttatttttagggacgaattattaccaacgattttttacacaagtcgccattgatagtcatcactaatgaaaaaaagcactttttactaacgatatttgtcctcattaaaacctatttttcttggagagagagagagagagagtacaatcgcccattcaagagatagaaagtagggtttgaaattgtattgtttgttggattttaactatggattttaagttaattaatatttaatttctctttggtatgtctctccctgtagagagtgtttgtccctcccagtagagtgttttgtgtttggttcgtattggttgtttttgctgattctttcatgatctgtaatggcatcttccagtcgagaagactattctctatctaaaaaatgggcagatatatgccttgaggatgaagaagaacatgtagtctcattggcgaatgattgtgaagaggaggaagatttgaattttgatgataggtggtgtttagtggggagattgttatctgggaaagtttctgatttccaaatatttcagaacattattgctgatctgtggaaacccgggaaaggcatctttatcaagatcttggaccagaataggttcctttttcagttttaccacgagatagatattaaaagggtgatcgatggtagcccatggacgtacgatcgaaagcaactcctcctggagcgactgaaaccaggtggaaatccaaggttgattccaatcaatactttggatatgtgggtccaaatccatgaactaagaacaggttttaaaacagaatgggcaatccgagaggctgcacgttacattgggcaatatgttgaatccgatcctaataattttcaaggtatatggcgtggttacctcagagttcgagtctgagtaaat

SEQ ID NO: 51850 - DNA, 1251 bp, Cannabis sativa
  modified_base (771)..(779): a, c, t, g, unknown or other
aaaaaaagtatagtttttttatggtttaagtttttggtataataataaaattttttaattttttaagcatataaaatcaaaattccctttacaaattggcggatggaaggagacaacacttggctcacatgggaggctgctggaaagaagcttgaaggaggtgcggacaagtgtcacgcatggagaggctggcgaaactcagattgaaggaggagcggacacttgtcgctcatgtgatggctggtgtgggggacaggagggtcccacgcgtgctgctgggactggcaggcggtagaggaagaaggtcctcacacgcctctgtctggtggtgacagaaacacgcccttctgggccctttgatcaaggaacggacgactcggatggggaatgtggggcttgcgcgattgggcttcttcaaggcctaaaatctgatccttttttttttttttttgtaaaaaatattcttttttcttcaattcttcctttcttttcaaaactcccaataattttaattcttacaatcaaaaagaagattaattaaatctaaattaaatatttttaacataaaaatatatcttattattttcaagaaaatattaatttatctttaatttatcttatactttgagcttactaaatgtatatttttcaccattaatcacaatcccaactagcttactgctagttcctagcaatttaagcggagagaataataatcgagttgattaaacaagtcaaaccaagcaaaaccatccaagcattttcaaaatnnnnnnnnngagtcaaaaatttctatcaatgttatttcagttgtaatttttagagttgtgtgtgtgcaccaaacttttattcattttttttaagcattaacacaaatagtatcgaaaaatctgaaaagtgtaaaagtctcaactctaatttcctcacgggtattgaaagtatttgtattgggagggtgacactcttttggagttggaaatatagcaataaacgcacaaatgagagaggataattattttttaggacgaataatttgaacaagaattaatcacaagatagacacatcaaactaatagaattcaaatgacaaataacctttgggatttatgtgaaacacttacacaataagagccaaagaactaactactaaaataaaaaaatacaacgataaacatatgtatatatattacttttttttttatatatatatatatagagagagagaaatatgatgtttctctcttttctttt

SEQ ID NO: 51851 - DNA, 1737 bp, Cannabis sativa
gcataaaacccaacaacaactgccaataaaaagtgagcctcccagactgctaatctcgagatccctaaaattgagactcaagctccaacccaccctccgaccaccgcacatacttacgagctaattcccaaaacgactcaagctttcgcctcttcaagccaagcccttacaactctacctgtcgaggctgggaatattcgcccgaagtacactgcagaatttggtgcagcttgttggcgtcattttaaggccctcctcccccatgaatgtgacttaatcaataatggggacttggaggagatgcttgaaaagagtgtagctcatggcctctcggtaaattcctctacccttatccgcttacttccttttttaacatccttcaaaatactcattcatttttgtttgttggtttttagcaaattttcatttccttcgtcgcccaacggcagggcatggaaaaaaggaaatacatggagagcgagatccaaaacctgataggtcagcgcgaggctatgaccaaggaatggaatgatgccaagtcagagaacactcacctaatcaaagaagttgaggaggtgaagaggactcacaaggccgagcttgaagttactaaaaagtaggcaaaagataaggccgaggcataccaaaaactcaaggaggaataccagaaactccaaggggaacttaatgcagccaaggtgacgctcgatgggaaagatgctgaaaccattgagaaatgtaatgatgttggactacattccatctaccaagcctggatggaaaatccagggatggatacgagtttcttgggatagtccaagggggaagtcttggcctactacgagaaggctaagaaggaagatgaggaagccgaggcagcagcagaagaagaagaagaagaattgtccaagtcacttactatgtaggcttggtttttatttatttttgttttatttaggcaaatggccttaaggccgagacaatggtttgccgctgtggcacttttgtaaagacaaatttgcaaagttggatgaccaactttgcttttgttttatctttattgaatgcttcatacttttatatttgaacttgacatatctgtttacttgcgttttcattcacaacttaaattattatattttgatcaaatttaaaatacttcaggcattttcattgctcgtgtggtttcctttgatattatttaaacagttagtaatctactatgtgtgcgattaattattatctgctatgtttttgatttgcgagcagttataaatttcgctttgcataaacaattattatttgttttaagaaaacttgaatatacttttaatgattcatcactttgtatatttttaattgtttatataaatattaggccttctattcatatattacgtttaagtatttttcaagggattttggtgtctcgtttaatactttcccaaaaaatacgagttgttagtattcagcttcgcatgtagcttatgagttatatctcatttacaatttttgattttcctttctcgtgggaaaggttctttaataaaaaactttaaaaattttaaaattctaaagtaatgggtttgcaatatatcatgtatttccagatagactccggttaatcatacacataagcccctcaagtaattttaaaggatgatactttgtaattacttgaaaaatgattcaactttattaataactgaagtccaaaatattacatcaaaaatatga

SEQ ID NO: 51852 - DNA, 899 bp, Cannabis sativa
ctatttgtactattttagaaaatgcagggtccattttgtcatttaacaaaacacagggtccagttagtaacttttataaaatagaaagcccaaaatggtatttattctaaattatataagattttacactaatataacaatatgacatgacagagagtgctaagcaccagtaaaatgtgctatgccaactctatttttataatttccattaatattaattccacttattatttatttatatttcataatatggtacaatttggtgtcggtataattaccgtaaaaatatagttaaccaatcataaaataatacttctaaataataataataaaaatgtgagacaaaaataagatttatttattaagtacgtacaagccaaccatataatagctggttcaagttggacaaaataaaaggcattataaatttataataaaagctagattgagactttagtcttatattatttaatttaaaatatatttatatctaaatagaaaaagacttgtacttgtccttttttttttttttttaatttctcactttttttctttttttacttaaaaaatctttcttttttatttttttctacttttttaaaaagttatctttttcttttagtttgtataattttggaactctttgttctcttgtatttttgttttcaatttttgtttgctcattttttattaatttttttatttacttattattaaaaaaatagcccaaaagattatacgaccgtatatatatattattaatcccttttgtattattattcttttatataaatatatttttattagttatttgtttttttaaaaaaagctttacttattaataaataataataataaaaaaattatataggcttagcttcaagaaatgaacatatatt

SEQ ID NO: 51853 - DNA, 8625 bp, Cannabis sativa
taagttcattttggtagtgatgtttccttattgagggtgaatgtcaaatattattatatttgtatgacgacataatgaagaccattttataacatctaaatatgatttttatttgttattaaattggatgaattgttataattcttcaaatctgttggtattgtataagttttgtcattaattttactatttttagacaaatatatgtgatacccgtaagttttcttaaattttcgttatctccatgaatttatagtaccaattttctattaacatcgatatttgctttcttgagcccaatgtgtgtttatatatatgatgtatgttaagtctgttaagagatggggttttgttttgttgcagcattttgttcttgaggagaacatgttggaggttgactgtccctgtgtaaccccagaggttgttcttaaagcatctggtcatgttgataaatttactgaccttatggttaaagatgagaaaaccgggacttgctaccgtgctgatcacttgctcaaggacttttgcagtgaaaagcttcaaaaagacctttccataactgccaaggaggctgcagaactgaagcacatacttgctgtcttggatgagctctcagctgaagagctgggtgcaaaacttaaggagtatggcattacagctccagacactaagaatcctctttctgatccatatccattcaatctcatgtttcagacatcaataggtccatctggtctgagctctgggtgagcacattacattttggtactagttatcctcagtgattctattattattattattattaagacttctgtttaagtagtattgatatgtaattaaatctcctctgttgtaggttcatgcgcccagaaactgcacaaggcatatttgttaacttcaaagacttgtactattacaatgggaacaagctaccttttgctgctgctcaaattggccaggcttttagaaacgaggttcttatctttggactttagcacttatgtttgcatagcatgctcatattatttctggtgggtaatggatatgccatctttgtaacgagtattttgatctgtggcagttgtgcaaggtctattttgctcttcaaatgaaaccttaaacaatatctcactccatgaatattgtattaatttgcagatatctcctcgacaagggcttctgagagttcgtgaatttacacttgctgagattgaacactttgtggatcctgaagacaaatctcacccgaacttttcagaagttgcaaaattggagtttctgatgttcccaagggaagaacaaatgtctggccagtctgcaaagaaattgtgtctgggtgatgcagttgccggggttcgttcaaataacttttcttcagtatctttccttgtctttatgcatgcgatgatgatgatgatgatgatgattgtgttacatgtcacttagggaattgttaataacgaaactcttggctacttcattgggagagtgtatcttttcctcacccgtcttggtataaatgaagatcgtttacggttccgccagcaccttgcaaatgaaatggctcactatgcatgtgactgttgggatgctgagattgagtgttcctatggttggattgagtgtgttggtattgcagacagatctgcctttgatttgcgtgctcattcagtaagtatttctttcttcttctctttaatgtctttttttttggtgctggaaacagtgagtaattttttctctacaaatccaaaaaacctctgctcattttgaaccgaaatggtggtgtgctatgctgtgtcagtgtgatgatgagatgtagaaatttaagaatgtattctttggatttgttttgcgattataaaaccaaaacaaaaaacattttagagtttatactgcatcaaacatcatgtaagagcacagaaattcacggctgatgacttgcaaatgtatgacaggaaaaaagtggtgttccccttgtagcagctgagaaattttcagaaccaagagaagtggaggtaaagccaactgttatctcgctaatgattgtacagtgtcatagctcaataactctcttcgacaaatgaactgttttagatgctggtcatctttatttgatgattgacaaataacttatgatttcaggaattgattataactcctgtgaagaaagagctaggccttgtattcaaaggacagcaaaaaaatgttgttgaagctttggaggtgacttgacagatgctttttttattattattttgtttttgatattgtagtgtattttgtgtaattgatcatgccccatattaacttttgtaaggcaatgaaagaggaagaagctttggagatgaaagccaatttggaaacaaaaggagagatggagttttatgtgtgcacacttgagaaaaatgtctccatcaagaagagtatggttgcaatttccaagcagaaaaagaaagtccaccaaagggtcttcacaccatccgtaatcgagccatcttttggtatcggtcggattatatattgcctgtatgagcattctttctacaccagaccaagcaaagctggtgatgatcagttgaacgtgtttcggttccccccactcgttgcccctattaaatgtacagtgtttccactggttcagaatgaaaagtatgagaaggtcgccaaagacatttccaagtccttgactgtcgccggaatttcacataaaatcgacattacaggttgggaacagagccaacatttgtgttcttctgaatcgatttgcaaatgttggaactagctgtttgatattgtcctgagtatggctctaatgtatttgaacaaactgaacaggtacctcaatcgggaaaagatacgcgagaacagatgaactcggtgtaccctttgcagtcacagtcgattcaaccacatcagtgaccatcagggagagagacagcaaggatcaaatccgtgtcaacgtggaagatgctgcatctgtagttaaggatgtatcggaaggtctgaggacatggacagaggtgtgggcgtcgtttcctcaccattcttctgcctctgcagatgactgagttcagcttaatcactcgttttgacattcaagagtcttacacattattttaactttgggagtttgacattcaagaattcttatgttttatttttgctgttgtgtgaccattgttgcagctgaaaacaagaaaccagtcaaccacatcagtctgcatgatagaaaaattacagattagaaatgttcttctgtttttctctctgtgttggatgctaattctctttaactattattgcacatagggtggcagcttgggctgcaaaaaattaactcttgtagttttatataagtttggggaggtagtaccttgtttcctcttctgtttgttttatgaaattttgcttctttatcaaaaataaataaataaataataacctaattatagggtgaaaaaacaatattgaatacttgtaaatttgataatttatacaactgtgcaatgttcttcttttatggggacccattatttaaaaatatatataaagttaatatttttattggttgattacgtcaaagttttgaatattatattatgttaattattcaaaaccctaaatattaactaaaataaaattaaaatatatttaaaatgttactaaaattcacatgctaagctacaaaagcatgtaaaattaaactctctatttgttaggtcaagagcatcaatctcatattggctttgtttaacattttaagaacaaaattttttgcatcactcactatataagatagaaaatcttttaggttttttgtccttcgaatttttttggccgttaaatttttttgtccaagtttatttaattttactaatttagtaattgtccatgtattaaattatgttccttagtttaatatctagcaatcatgcactttaacatgtactaaatcatgtccattaaattttgatttatgttagattttttttactaaaattaaaaaaaaattcttaaattcaacaatctcaataattaaggggaatatttaaccaaaaattcaaaaagcatgatctagtcaatataaaagttcagaagacaaagattataattatcctaaaacaaaactctcgatttgttggatcaagtcagcctcatatctgcttcgtttaacattctaagaacataaaattttatatcactcactatataaaataaaaaatctccgtccatcttgtgcataaaatttccattttctaggaaaatatatgtaacaaaataattttttttttagaaaaaataatgaaatttaaataaaataaataataaaaatagtggttcatatatattaaggtaattttttcaaattttatttcctacgataatgataataaataaatataaataaggaaatatccttaaagatgttgggagccaaggtttaagcgaggtttcggctccttttctctatcctttctcctcttctccttcatcctcaactgacactagcttatctctctctctctctctacccaaaatggcttccacagcttcctatacaactcctcaatctcaaatatccaactcaacatggcggaagccaccaaaaactaacgaaaggtctctcaaaaacctccatttcctatttgggtcatcctctaactgtctctttaagccatcactctcttcctcaactcctttcccactaagcctcaaaaccccttctgacccaattcagttccgacccatattagactctgttcaagattatttggtcgagaatttggagagttcaatgaatttacagatacccattaacgaatttggtcatgttatgcctcgggaatcggccccaaggatttttatccaagacccaccttggattgcctcacttttcttaaagggtatattcaaaaagtctaagagagaagtgaggttggagtttatgaagattgagaagagaaagtataatctgttgaggaggagacagattaaggctgagactgaagcttgggagaaaatggtggatgagtataatgagttagagagagaaatgcgtgagaagaagcttgctcctaatttgcctcatgttaagtctttgtttttgggttggtttgagccattgaaggaagctattgagagagaacagaagttgccccatagtaaaaaaaagatggcttttgctcctaatattggtctgttgtctgctgataagattgctcttattgttatgcataagatgatgggtttgatgatgtcagcttcttatgatggctgtgttcaggtggttcatgctgctattcagatagccatggctatagaggaggaggtatgttcaaatgcctttcaaatcttattgaactttgttaattaagtctttgtagttagagaattattgctaaagattatgagtttgtgtgtagtcaagttgcattagattaaattaaactttcaagcaagtagtgttgatagtaagggaatgttgactattctattattaaatgaattgtaatggggaaggaataagataaagaatcaaggattgtaattaataaaatcttgattgtcaaagcaaagacatggataagaaagaaaacacctccttcatttactttccattatggggtcattgcaaatcagtagacattgcctgaatgtgttgaggttaagactttgctgaaatattcaccttctagttgtttgtgtatttttttttcctttttggcataaaaaaatatacttgtttactacatgacactggtaatatctttgtgtttgtttggcttacacttttctctgctaacttcactaagttggggatgagtgaagcatcatgggttatcattattgttaatatttcaggtgagaattcaaagttttatggagaatactaaaaagattcagaaaaaggagaatgtagatgacaatgaagagggtttaagtaaggaaaaagagatactcaggaagaatattatcggtttgattagaacgagaagattgagtttggcacaaaagctactggtaaaagaagagtttgagccttggagtcgagaaacccaggctaaggtttgtggctcttggcatatcttattattctgaatggttaatgaatcagattttgaacaaaaattcatgactttgagacatttttttactcactgtaattttgcagctgggatgtcgtctgatagatttattaactgaaacagctttcatacaacctccacttgatcagtcaggagatgttccacctgatgttagacctgcatttaggcatagattaaaatccattgcaaagacagggtgagtctttcggaagaattgtttgatttagtttttgtcaaagaacaataaagaagcaactcacttcttagaatccgagaatccgatttggagtatgtaccttggaacataatgataatgcacaacactaccttataagttggttattgagcaattattatagttttaacacaagaatagacttgataaagtgactgttattttttttttcttgttcatgttgttattgtgaaactttttttttttaaatcctaacaggcagaaatttctgaggaattatggagttatagaagctgatcccttacttcttgcagggcttgatagaactgtaagttatgaaatctctttgttttcgtttacccttttccaaaacgtatgaaagtaatttgcattgttaaatttatttttaactttttgattcatcatggttagaaaattactatttctttaactccaacgacattaacattttttctttttaatgttatctcaactttgtgtacttggatttcctggaaaacagtttgtgagacctaattatgtctatagtctgtatatatcttgatttcttattggtttctcaaatattttaaacatataccgaacgtgatatacatatgaaagcggcctatgactatttgttactttttatttgactgcatttatgtaattatcatctgcctttgtttctaacaggttaagctcatcccaattccttatgtgccaatgttgatacctccaagaaaatggaaagggtaagatttagttaaaataaatgatttcatgttgcttctctctaacagaatattgtgttagggatgaaattttacatgaaagacatcattgttagaatgaaatcgttgagtatgatatcttttgacttaataatttattgaataccgcgcacattgacaatttgatttccttaatttcataaaatatgtttgcaactcaagtttttaatatcttttgtgcttttctttttcagatatgacaagggcgggcatttgtttctaccttcttatgttatgcgcactcatggatctaggaagcagcgagaagtacttagggctgctcctggaaagcaaatgcagaaagtatttgaggtgagaatttcatctattatctttgtgtagaattagaattttttttttcatttgaagtaataattataatcattgtgttttctcttcggctcttctatttgaactgcaaactttaaatcacatatatattcaaattataatgccttatgaattattttttaaccgaatatttcgctgttcgcgtctcaggctctggatatgcttgggagtgtcaagtggagggtgaacaaaaaagtatttagtgtggtggagagcatttgggatggaggtggcaatgttgccggcttagttaatcgtaaagatgtatgtacaggattaatcttttcaatttccctagtttttttccccaagataaaatagtcttctatgttaattttttagctcctaaaaagattagtttagttttctaccagcattagacaaaatttatcaaatgatctgaggaatgttgtaaaaaattaatgcctctgaatatttctttcaattagactagcaagaaattggagtgggatcttgtatccaactcccttaataaacttgcttggcatcattgttgggctcttttactgcattatatgttagttaatcttcattaattgtttcattcatcttaattggtcacaggttactgtaccagagaaaccaagctcagatgatttaacagaaatccatcaatggaagtggaaagtgagaaaggcaaggaaaattaactcggagagacattctttacggtgtgatgttgaactcaagctttcggtaagtgtctttcttctccttttaataataaaacatcatgtcacaacttacaacacataagcttcagttgtaattactgcatttggaatttgaagcaacaaaccagtagacaatgctttcaagagttgtgttcactttgcagtattttagtttaatttgtgtgtactgatagtgagaaaattgattttgaaaaggtggctcgaaagatgaaagatgaggacggcttttattatccgcataatcttgatttcagaggtagagcataccctatgcaccctcatttgaatcatttgagctctgatctttgtcgtggagttcttgagtttgctgaaggacggccattaggcaagtctggactacgctggcttaagatacaattagcaaacctgtatgctggtggagttgaaaagctttcatatgatgggcgactagcgtttgtggataaccatattga

SEQ ID NO: 51854 - DNA, 1754 bp, Cannabis sativa
  modified_base (1703)..(1710): a, c, t, g, unknown or other
ctgagatcattgctacccttccatttggtttaggaggctatccgggcactggatggtgttagggcagggttcctgaaggaacttgcacgtctagaacttgagctctgggaggcgctggtgctctgacttgtcccttattcatgtgcgtcaatgtgtcctttatccatttgtacaagtgacctagccttattaggctctaaatctcatctttcaagtttttccatttataggtagtatgtccaatatcattgtgatattcacatcttttgttgggatcccttagtagtgggtgttttgccttgtggccaagtacaaacgttcttgggtgtccactaaatcgatatagtgagtatactaggaggtgtaacctttctttttccttttgttctcattccgtgtgcttccttttgacaacctcttactttgagaggtcttagtagcttctgctgcacttgctacaggaggtgtggattaagcgggatgctgtgagctcactctaggagccaaattaccccttagcgctctgaaactagactgggttggggtaagagcaaggtagcgggtatatcctagtgttgctgaaaattttacgttgggcgttccacttgcctgtggcacaacaagaaaggtaattcttggaaactacattttgggagcatacccaggatcgtcggtagggtaatatcctcccaaagcagtaatctgcgcttcctctacattgatatatttttggaccctcttttggaagttctgaagagtagcgactccttcttgttgaagttcattccagaaagggttcctgtccagataccagcttgtagcaatgccaattattgtccatcatccacttttctttattttggaagcttcttcctaaaatctttttatcgaaatttttagagttttaactggtagttgtttaatgttagtcaaagcgctgacttcaaggtttattttcctagttgccatgaactgccttctaaaactaacttgcaatttgttctaatagtccatggatccaggctccagctttttaaaccactcctcagcggatcgtcctaatgtcagcaggaaacacaaacactttatgttattgctgaatctcatgaccgtcattacgtggtttaatctagataagtgatcactgagatctgagtccccagcgtataaggtcatttcaagaattttgaaattctttgggagctccccttcaagtatgtttctagcacaatgttcccgatcctcgcaattagactctgaatcatctcccttttgcctccgggagattttggttatatcttttcagaggatggtgagttcagccaagatgccctcattcaatgcactatctaagactagcataattttcttcttttgctcgaagttatttctaagatcaccgtgcttagtattatctttttgcctcaggtcgataggaggatccttgtgactcttcccttttctctcccccgacttttggtgcacagatacgctttttcaatctcccgaatcttgaggaccagcatttctctttgtagtaaatcatgttattgtaataattttttttatttttttatttttgtgtattttgtaaaataatttcatatctaatgtatattagtaggagattattttattattgtcctatgtaagcatagaaactgaaatttccttaataaaaatatggctaattaggatttttnnnnnnnnaactttgacatgtaccaaatcattgttggaaattattttatcag

SEQ ID NO: 51855 - DNA, 788 bp, Cannabis sativa
  modified_base (625)..(625): a, c, t, g, unknown or other
aactctaatatatatagtgaatgcatatatagtctcaaaattaatttatcattaattataccaaattatctgtatctgtattttcagattggactcttaattaaatcgcgtaattaattagcactgcactgcttaaaaagtgaacacaatatgtacagaagggaaacttatataatagtaaggataattggagggagttttttccacacaaagaagcttgataggcaactctacagatataataattaatatagtgaaaaaagcatttatcttatattttgtggaacgaatattagaatataatattttattaaaatccatcactccttcatttatatatatatgtatgtgaattttaaactaaaggtggcccaatatctaaaattttaatcatgcattgacacacatacatatatatgtatacggcatatatttataatttataaaaccaagtgtggcgcagaaatagttgtggccgagtatgatcgtacgtgtggtaaacgtgtaaaagctcatttgagatcatatattggctatgaagagttagattaccatacggtgttatacacatatatacagcaggaccatggtgctctcatctctattcttatatatatatatatanatatatatatatattgataatttttgggtgatatagagcatgattaattgatcgacataaaaaaaacaaaaataaatttgtttgacttattataactttccatttaataatataacatggtcattctccactagttgcgaagaattaaagtccaaattaatga

SEQ ID NO: 51856 - DNA, 1634 bp, Cannabis sativa
  modified_base (351)..(359): a, c, t, g, unknown or other
ttagtcacaataaattgtaatttttgtgataatatttttatccatagactttttagtcacaatataagataagaattataatttataatttataatataatttgtcacaatttttttacttttagtcacaacttgtatacatttgaaaaatatatatatatttatatatatatataaaaatgaggagaggcatttgtccatcctaggaatcaaactttgtccattctaatttaggtattataaattatttatgaaaaataattaaaaccttatgtaacaccatcttaaatatagttttctataatttggctgtgtttgaaaaatgtacttttttatatttatttatttatnnnnnnnnntttttttttttttttgtaaaatagtatagttacaatcctaatgacaaaatacagcccctattgtaaaatttccataaacatatatatgcatattatgaggtaataataaagaaaaatagtaataaaacctctctaaataatttactttgacatttttcaatatattttatctagaaaaaaaaattaccttgtataattttttattttagtttaatattgtgtatttattaggctatagtgagaattgagaagtgcattgtatcaagaaaatgtaatagttgaagaaaagtaccaaaatgacaaaagtttgactcaatatagtgacatgttttgtagttttgtactaaaaaaacacaataaatatggctgatgtggcaatatatagatatacacaaattaatacaagattctttcatataaaaattccttttttatttttacatgacatcatggcatgttatgtgtgatgtgatgactaaacggctaagatcactctaaagtagataattacttatatcgtccatcctgtatatgtgttttttttttgtaaattattatcattataagcacttggaaatattttataattagttatctaatttttataataattattaaattaacaaatattaaatttgatacatatgcatatattaagttgatgctagtatattataattaattttctttttaattaagttaattatgtgatattataatgttctctttttaaattttcattggatcttatacacgagtatgtcactctgactgtttcatgaaatgacgactgatcctataaatcaacataatagtttctagcgtgctttgtcctcaaccgcacacttcatgggaaaacttctcaggaggtcacccctacaaatcaacacatgtgtttcttgtcatcactcgcacacttcatgggaaaacttcccagaagataacccatcctgaaattacccaagtcgaacacgcttaaccgtgaagttctttcgtgatggactgccgaaaaataagatgcattctgttgatataggtagtatcaatcaatccatttaagctctcttcaattgtgtagtctcatacctacacaatctcggaatcattacaagtatttctagcgtgttttgtcctcactcgcacacttcatgggaaaacttcccaaaagataatccatcctgaaattatccaagtcgaacacgcttaatcgtggagttctttcgtgatggactaccgaaaaataagatacaccttgttgatataggtagtaccaat

SEQ ID NO: 51857 - DNA, 805 bp, Cannabis sativa
attagagaattaattagggcaataattaattaataatattaaatgttgatttttataatgaaatgtttcataatttacataaatgtatttattaatattttagatcgagctcgatcaatatgacactttaattcataatatatgtatatatatatagatatatataaagatattaataaagataacttttgtaattgatcatcatcacatgggacttatattcaaccatgcatgtgttatatatttctatacgatcagctgcccccactaatatatttgtgtatatatatacatgaaatattatgatgaaaggtgtatatgtacgtcattgcttagcaattatatatatgcagcttcattcttctatatatataagtaatatatatatatatacacgtaaaattacttgttcgctagttaatgaaaatttgagagtattaattaattatgtatattatatatatacactcagccgctaataatcctccaatccactgttattggctattagcaattagaatccgtcgttaatataacccgccgctaataaacccccaatccactgctctattgtgctattagtagcgagaatctgtcactaattatagcctgtcgctaataattgactgttattaatagttattagcagcagaatttaattttgtcggccgctactaactattaatagcaatggatattatgttatattatttatcaataatataatgtgtagattaaatacatgtaacaaactaatatgtaacatatgacattatatattatgtgtcatcattttgtaatattt

SEQ ID NO: 51858 - DNA, 1018 bp, Cannabis sativa
accctgaacataccttattatgccatgagccttgaagcaagtttgggggggataagtgctgcaagtgaaaaaaaaaaaaaaaaaaaacaaaatacagtggagccaggaggtatgggctaggcttaatactctaaaacatagttttgtactatggttgggaatgcttttcagactgaaaactatggataggttgataaggtttggcctacaagtggaagagaagtgcatactgtgcaaagaacagagagaaacttctagcatttgttctttgaatgcaagttctctatgcagtgtctacaagagataaaaggatggcttataattggagagcaaatgctacctgtctaccccaacttatcagatggattggcaaggctaaaattagtaagttcagaaagcaagtcctggcagcatctagtgcctctctagtctacaacatctagagaacttgaaatgctataatttggaaagaagaatcaaaggctcctcgcaagcttacaagggagatcaaagagagtcgagtaaaaaaaattactatgtttttgcctaaataaatcaaagaagctgataagacttggtttcatgaattgtaaggattgattctatactttgtaaaggaaaaaaaaatagaaaaatgtatagatagaacagaaaagtaaataggagaatggtgtatagatttactctagaccctttactggggtgctattaattagtctgtaaaatattttttagagcaatacaacttcctaatttatccaaaaaaaattataataaaatcaatgaaaccataacaaaacttataaactcatacaaaatcataacaaaatcagttttaaccatattaaaaaataataaaacaaacttaaaacgagaaatatataaaacactacaaagaatgcaacaactccattacaacaaaacaaaaaactaattacgtaaagtgaacaaattaaaaattaatatacaaaaatctattattgagaaactgttgcgatattttgcacacgcaagtgta

SEQ ID NO: 51859 - DNA, 1222 bp, Cannabis sativa
gattaattaatccatattataataagccatagctaactagttgcactgctaccattgtgtagtactgctctactaaacagctttaattgttgcatattcatgcgacgcgttggggccgttggggaattattgggtcgaacattaaatggatataactagaagtcaaacacgatctggatgattaattaatacacactataatcaaatctgcataatttcttttttgacttatctcaaacaagcttatatgatatgtatcattatcaatgtgtgtgtatacatttccatagtcagctgtagtctccacagtactgctactagtatattgatctttatactagtttgccatattgaataatggcatgcatgcagtcatatataactattagatctttatatatataccggcttattaactatatgcatatgtaatttgaaacacagccaatttagtaataaaaatatatagttacattatatatattatcatattactcttataaaataatcatttttaatcacaatatatataaaaaatatttttggattttggtgtattataggttccttctagctttagtacgtactatcaatcatgctatgtgaaaactaataatttgtaggttggattatttgttttcatgtggactgcatatatagatacttaaaaatattaaacttaatttttaagacctgatcatcataagtaactctcacttatcctaaaaaaaaaaactcacttatcttatccgatctttatatatacactaggttaatgttatgtgcatttgcacctataattagtttttttaattaagtttaattaagtcatgatattaagtagaatatatgtataattaatttttttaattaaataatatatatttttaaatttttttaaatgaaatttgagattataatttttgagaatttttttaactattgaggtaacattagtgtatatatgtctcctatcaataattagtattttatataatcatgatatattaagtttggcttaccttacaaatatagtttaacttaaaatactttcgattttgatattagaaaataattaatataaattatatttaagatcacgtgcctttaaaaattaggtaaaatgtatcgattgaaaaaatcataaaatcgttaagtttcactctacttatatattaatcgaaaagaaagaaaaaacaataatataagcacactaagtatg

SEQ ID NO: 51860 - DNA, 1355 bp, Cannabis sativa
gaattggcttggattgaggattttccctcttttcttattgatgtattaagctcttttcaaaaaaaaaaaaaaactgaatgcatgaataattgttggaatttttttgaaaattgttagatgcctaatatatttgtaaatatactatcatatgaaaaataaataatttataatttcttatatgtgaaaaggtaagagaataactgatgctttcaccaaataatttttttatatatataagctagctagtggcaaataacttctgtgaagtgttgcaacgttttttcttttattttttcttttttttaaaaaaaaaaataacatttcattttttaaccataaatatttcattgattataataaaaaagtgatacaattgaatcatgatgaacatgaattaagaatatctcaggagatcactagacaataaacttttttttttgaaaggtagacaataaacttggtatataagaattttcaatataaagaacctaatacattacaacataagaatcttgtataaaaaagaaaccaaaggccatcccaaaactatcatcgaagctacctacaatttgaatgatcgtggaatcccctcttttttaataattcaaaacttgttgaccatatcttgtgaaaattgttaaaaaaaatcaaaaacgtattatttgaataagtctcacattgttttaaaatacttatttgtaagtgtatatatattgcaaacttgatcgggttggcacccaattttatgaaagagagatgagtcacacaaagtgttgaccttgcttttagccgcgacgacagtgagtcaattattaaatgattaagaacataatgaaaatagagcaaaaacaaataagtaacaaagaatatccgattttaaaaaagttcggcctcctaagagtggtaatagcctaatccccttagattgtattaacttgagataaataattaagtatttttctctctcaaagctcttacaataaaatctctgagtaattctcttagatctctctttgaagcaattctttcgatccctttcacagtgaagcttagtcactatttatagggaattaatgcatgaggaaaggtttctactttgcttataatatataaaataggaaagaatattcattacataattatgatacacaaaataaaaaattagaacaggttgccatattcctttgactcaatcccacgatcataggaattatcttcgtgtctggacttcacgagatcattctgaagtagttaagtccagataagtagctcaaaaaactagatctatgtctgctcggataatctgcccttcaccttgctcaggtaattaaaagttatacatgcagatgtataat

SEQ ID NO: 51861 - DNA, 1013 bp, Cannabis sativa
taccttcttcctaaaaaatcaaatcacatgttaaaaggagagagagagagagagagagagagagagagaaactcaatttcacaagtaaattaatctccacattatgcataaagaatatgttagaaagaaagtgaagaaaggtacccgaaaacggaggaataggagagtggagtagagctatcttgatcaacccatgagttgatatcttaatctatttatcgatttgattttcaacaactttccttcattgtagcagttgaaaaccaaatcgttgttctgaatcatgggcatagaacctagtgagatttcgaatatggtaattgaaaatcaaatccttctgaaataattgacagtatgaaatgtggcaactaaaaatcaatttattcatatgaagattgatggaagttttttcctcattttctccaaaagtttataggtgaaaaaaaaaatcctcaatcgcatggaaggaaaaatatcaacatgaagaatttcttttatcaattttattttatttttaggatgctaacgccaaacgttaatctgccataattagtttttatgttaaaaagaaaatattaaaagaaatcgtcaaactaaatattttgttgcatagctacattttttatataaagatataaatatataagaggtgcattgttctttaaagtttgtagcaagtttaataggatattgtggacattgtcccgaattgagccatatataagaatatgggctactccactcattgccaattggttttgagatggaaccccatgattctgaacatggtatcagagccatatcccttccgcacctatacagatagtgagcatctccactctgaatgagccacctgctcttgacattttatatttattttatgtaaaaaatctgtgtaattgaacatctctaacaaacctagtgatcaaagcaaaatgcacatattcttgtatcaagaaacaatgaacatatttttttttgcttcaaatgcaagttttttttttttaaaaaaa

SEQ ID NO: 51862 - DNA, 1198 bp, Cannabis sativa
tctcgaaactcataatcatttcttaatcattttttcatatgacatgttaataatgatgtaatttgattgtgtaattgttggttgaatagggaatgtgtgctttgactctctcggcatcagttccggctttaggtccagcacaatatgcagtattactatttggactttatctggttgcatttgggactggtgggatcaaatcatgtgtttcaccttttggtgcagatcaatttgatgatactgactcaaaggaaagaatcaaaaaggggtctttctttaactggttttatttcgcaatttacattggtattcttgtttcaactacctttcttgtgtggattcaagacaatgctggatggggtttaggatttggtattgctgcattgtttatgggcattgctcttgttggttttgtttctggtactcacctctacagatttcagaaaccagtggggagccctttcacaagaatgtgccaaactttggttgcatcgtgtcgtaagtggaatctcgaggtgcctgaagacagtactcttctgtatgaaatacatgacagaagctctgctattgaaggaaacctcaaattggaacataccgatacattgcagtaatccctcgtcctttctgaactgacagtctcttactttttccttgtttaaatatggaacattgcctatagctcacacatggtgcccaacatcatcttatgtttattggtataatttagtatcgggagcatgaagatggtggtgggcaccattcatccgctaacaaaaacacctttgattcttcctaaagtgggaggattaatttcatgagtgtctttcaaaagcatcttgatgcattgaatttccattgaactttggattttttgacaggtgccttgataaagctgctgtgatttccgacgctgagagaagtagcggggacttaaccaatccttggacgctttgcagtgtatctcaggttgaagaattcaagacgatgatacatttgattccactcttggcaactggaatagtcttttcttccgtttatgcccaaatatccacaacatttgtggaacaagggatgatgatgaacacaacagtttattctttcaccattcctccagcctctctatacacttttgatgtcattgcagttctttctttgcttcccatttacgacagagtaatcgtcccaattgtgaggaaat

SEQ ID NO: 51863 - DNA, 2329 bp, Cannabis sativa
ccctgccaccatgaagattgtgagctggaatgcacgtggaattgggagtgatcgtgcattccagaatctctcccgtttagtgtcaaccagtagtcctactattttatttattatggaatctcggcttctaaagaatgctattaattatgttaaaaacaagctccattttgattcgggcttagaaatgcctagggttggtagaagcgggggcttacttttgttatggactaatgatataaacgtcactctatgttctcaatctattagtcattttgattgctatgtgtcgtgtgccatcactaatgtttcgtttcatcttacttgtttttacggctctcccgttgactctctcaagcttcacacttggcaaatcctgaaaaggattggtagggataatccccgtgacccttggcttctcattggggattttaatacttttctcttttcccatgacaaacatgggggtaaccctgacaagggcccttcttctgattttagacagttgttggactctgttaatctttccccgcttgacccagtggggcccttcctcacctggaacaacgatgtggctcaccctaaaaatattcaagagcggttggactgggggatcatcaacagttcttggttggatatcttcccggatgccactcttacccacttgggtttcttcggatctgaccacagagccttgaaattagtcacatccaccactccgggatatcggtcgagggaccatagtaagcggtttcttttcgagaacgtgtggctacaggacccaaattgggatagaattttaaccagtcttggacaaaccccacgacctccatggaagccatccctaacctcatcgctacccaatccttgtgcgctgaaaagctcaacaattggaatcacaaaaaagacttcaacttcaaacagcaaatctgtaagcttgagaaagagctggaatcggccaggtccacccctatttgggacgatcgtaccattgcaactattaaacacctccaatcccggctcgacgccttcctctacaaggaagaagcttactggaaacagcgcgctcgtacccaatggttggctcagggggataaaaacacgaagttttttcaccgatttgcctcccaaaggaaaaaaaatcaacaaaattcaccaactccatacgccaaatggaggcatggtctcggacgaggagagcattattcggaaaattgagtctcattttgaccaactcttcacctcctcaaaccccaccgatacaaacatgaatacagctttggaaggcatcagttgttttctgttagactcggataaatcccttctgaccgaggatttttccttagatgaaatcgtgcaagcgtttttccagcttcctctggacgaagcccctggcccggatggcttcaattctcacttctacaaagctaactggcctgctgttaggaaagacgtgctcgaagcggcttccagttttctcaatggaaacgcaaatgtggcccctctgaataacaccctcatcacgctcattcgcaaagtcaagcaacctaagttcatctctgagtttcggcctattagtctctgtaatagtatctataaaatcatgtcgaagactatcgccaacaggctgaaacttgttctgaataatttgatctcacctaaccaaagcgcattcctcccaggcaggctcatatcggacaatattattatagcccaggaagttgcgcactccatcaaactaaagacgcgcgggaaaatgggatggatggcgatcaagcttgacatggccaaagccttcgaccgagtggaatggcctttcatagtagccattctcagaaaattccaattccgtcccaggtttgtccaactgatttttgcatgcatctccatcgcctccttccaattcaatttgaatggcaaagtctgaggcagtgtcactccttctaggggcattcgccagggtgatccccgttctccttacctcttcctctgtgtgcggaagacttctcttccctcttgcaccaacaagaaagaaggagagctctctcgggttttaaagttgccagaagagccccagctatctctcatctcctgtttgcggatgacagtttcctcttctgtcaagcttccattagctcgtgcaacatcatcaaagatgttctagaggtctatgagagggccacgggtcagaaggtaaatttccaaaaatcttcgctgtacttctccccaaatgttgagctcagggatcaaactttgatctctgatttcatgtgtatcccggtgtggtctgccttcgaaaaatatctaggtcttcctcagcacattgggcgaa

SEQ ID NO: 51864 - DNA, 2161 bp, Cannabis sativa
aacataagtcaatgcccatttaatgacaaaattaagagaaatgttaaaaaacaccagtggtgtttagtacactcttcggtatcatcactattggtacgattaagcattaggtctcatacaacttaaggaaataacttttaggaaatattgataattgttatccatggttccagaagatagacacgtggcataatctgaaggtaatcattacttaaagttgggtccaaaccttcctgctctcaaaaggccaatccatacctggaataggcctatgcccaacgaagacccagaattttacctcggggatataatgttcttctaaggcccaaaaattaaacctccctagtcgcttgggacatgaaaagaatgaagacctcttaatgaagataatggtacacctggaggcaggccacgcgtgatggtcctggatgcctaccacagactaggagtcagatgtctaccgtatggtgagtaccagatttctaccatgagacaagaggcggatgtctccattaaaatgatgtgtccacctctttgacacagaattagatattatcccctatgtcagatcattgcgcgcaccaccactacatacaccccttttgtccgacgactctcctaccacctttgtctgtcagctgtcacgggctcacattttcacgcagcgaaacacttgtgtggcactttgacttatctaagtcaaggtcagccttccgaacatccgagtaacaatgggctcatttttcgtgtgaccatgtgcctcgtgcacactttcgtttctcaaataactcttgctgagtcatgctcccaagcatctatgagtgcatccatgcatcgaggctctctaaccaagatactcacattgttcataggttcccactatgataaagcaaatccgaacaccgtcggtcacatagtcacttgtgactaaggtagcacgttaagttagtgatggcagaggggctccgcaagagatatagcctagctctaagcaccaaacccatctatactcctagaaggagacttgtccagaagggagagcctattccagcatagacctagaatgttttggactctgcccttatttgagagtcgttggagcatattgtagccccgaaacttattcttgatttggtcaatttccaaaatgggcgagctatatacaattcgaacatttttatttttacgcttccattttggatccgcttccagaactgcatctttctctagctctttggccaaagtctttacctaaacctcctcgagatctacaactttgaggtggaatttgtcattaagacttatcacttgaagaaaagaaaagattcaagcagttacataccccaaaccacaaagagagcaagggtaccggggaaggcctaccttgaaacttcttggagaggtcccctccggacctgttacctggaagtacagccctcgcgaaaccacacctccgagtagcagatcgagaacttaaaaaaaaaaactaggaaaaatctaaaaagatccatccaaatccctaatggcttcaaatgaggagacccatggcccaatctagttcaaaatctacttacacatacagggatttttgagctaacttacctagaaaaaataacatgcaatcacagttcaacaatcctataattaccagataacccaagcactacctatttaattttcctagtattatatgcgtgcaaatggtggtttcttaaattaatacttcaatataaatgtacagaattaaaaagttccaaggtttagagaaacttactcgtaatgcgacacggggacgggggaaggtaagggtggttaacctataaattgaaagcctaacgaagaatctgatcacagcctgcttgaacgttaattatttcagacggctagggtagctcacaacaggattcagaggtagcgctcctggaaattttgaattcgtagtaggaggtggataagaacgtcaaagagattgttcattcaccaaaggatgcagctcgtattttttggattttttttagaatcattctctgatataaatattttgttcaaatttgaaaaaataagctaaaaaaatttgaaaatgtgaaaatggtaaaagtggttccctcacgcctatatacaggcaaaaatggcgatccacgtgcttcgaaatcaagggcca

SEQ ID NO: 51865 - DNA, 1149 bp, Cannabis sativa
  modified_base (980)..(985): a, c, t, g, unknown or other
acaataaaaatgtaaccattgaaacctcttccatatatatatatattatatatatagatgtgataatatataaatgtagtttttatttttaaatataaataataacattaatttttttatataaaatatctatataatttttattttaaaatatatataataatattataaaattaataaataatattttgttaagtaatttagatattttattaaaattaacgtataaaattaaaaaatctcattaaattaaaaatttcgttatatagttacattttatatagattagatatgtatatatataattagttagtatagaatagaggtggtgggattattaaggaaatactaatagtatgttgaattctcatgaagtaaaatcaaagtcattttctaagattttccaccaagtgttgaattcaccactctatgctctaagctttaaggctcaaattatttataatttaacacattcaataattctttgttgtcccttttttgtagttttatatgctcaaaggtcaacccacattaattttgtaagatttgtttattttatttttccccaaatccacttaaacttgagagttgagaagaagttggcaaggtaattatatataaaataaataaatatattttattagggtgtatttactaagtggttagaattacactatattttaaaatataatatgtggttagatataaaataataattacaaataaattctttggtaaaataattaataaattacgcaagaatattatattttagatcatatcactcaataagtacaatatatatatatataaagattataaaactttaaatttgtatattccctaatttatataaaatttgtacaaaaatagaattatttatgtcgcataatgaaatttttattttgttttacttttctactgtggggtgatttttttttttcaaaaacactgtgtttttttcaaaaatattgtgtaannnnnntactgtgtactgtgttaagttttcattgttgttctatagttgtcttttaggtgttccagtgttatttttagttgtttggttttatgttttactattgttctataaaaaaaacagtatttcttttaaaaaaaaaatcgtgtaacagtatttttataaaaattaac

SEQ ID NO: 51866 - DNA, 1318 bp, Cannabis sativa
agagggaaagttgcaggtaatggtatttttggtagactttcttgtgtattgtagtttttatgttcaacatgtggggtttgcattgaaggatttccttttcttataggctgaattagcagcactatcttataagaagaccagacttgttcgtgtacggggctcagatggacgccttacttttggaagttctggagaatctgaagttgttagtgcccgggggtaaatacatcgccctgtttctaagctgtaaaaaagaaggtttaagcattgcaagactatgatctgatatgttttgcttgcaggagaggaagtggtggacgcgggtttattagtggtgctggagaaactgaacttcaacttcagcgacggaggttggttcccttaattatgtaactttgattgtataataatctgaaacttaagagaccagaatactggttggttttgcataatttggacaagattcttctgctaaaatgctatgtcacggctcgttatgcacattgattcataatttatcttagttgaagttcatattccataaggtttgtctcttcatatgtgtaatttcacttctttttcttagaataaaaagatttcatttatataaccgaaaggattttaaaagagtgcctcaaagcaccgcccctaaatcactgggagataacctagaaaaatagaagcaagtcaagtctatcaagaccaaattccaaacaagaaactggaacagaacgaagcaacttaccaattgaagttcgtaactaccatgttgatgtgatattattcacatcaggtagtattgaaaaggcaggataaatcagatcataacagtattcctctttagggtttagtgtcccttctttcatatcctaataccatttaattcattgtatattagatacatttctagttgctgttgtctcatttatggctggctaattttgttggtatttaatagtttctcctgttaaacgtaatttcagaattatagaacggcggagaatgttattatcacaaattgaagaggttcgtcgtactcgagctttgcaacgggctgctcgcaagagacgtggtggctcagatggtcaaggtttagtaactgttgctgttgttgggtacaccaatgcagtaggttatatgaaccagattacttttcttcatttttattcaagcaatctgttaaagggtgtaaattatattacgatcttgtaggtcatcttgactattggatatcgcttttctgtttcttgttttccttgtaattgctattgttccctttttttccttttaacacgggaaatctacactagttggtgca

SEQ ID NO: 51867 - DNA, 781 bp, Cannabis sativa
ctgacagacaatgtatgcaactcggggcactccaagattttaagtgttcgcaaggaggtgagttgtgtaaagccatttctgtccaagcttttaagttttgcaaatgagataatactaagatgggtaagagtggtaggcagtagcccttcctccggaaatgattccatatcttctttatttccaaaaatacaaataaaggtaagatggggtgatgtttgccaattccatttcaacctcaaaaatgcatcataggatatattaagtgtagacaaactaacaggcaaaccaccttcattttcagggcaaggctctatcaaaggacaatctctgattattaaggactctaaagatgagagggaaatcatcatctttggcaaccacttcaagttaggacaattaataatctccaactcactcagtttgggagcaataagtccaccatatgggaaagatacaaaactaacacaatctttgatagaaaaaaatgttagttcctcaagagacacccatcggacattgagactgcttcaaaatagtgactggattcaatatgaagagttttgagattgggaaataagtccaaatggaaggatgtgaaggatgacccgcaattccgcaaatgaagctcctgaagagtctttcccatgagtggagtgagagtggcaggcaaacatcctgtagaagtgaaacaagaattccttggcttgattgcctcatacaatgacttcgaattctccaaatttataattctcgtttgtgtgacacatggtaatcttggaag

SEQ ID NO: 51868 - DNA, 1155 bp, Cannabis sativa
ggatttattacatgtcaaagttcgaaattagcatttatttttgctttaataaatattataagaaatgactaatcaattatatgatgacactttattgtggtattaagcactatgaatatgaaagccttgaatcaaaataaggtaatgtaaatgtcaagtcattatacacatgtcatttttaattgatatttttaaattatatttttaaaataaaatttaataatctggaccaatcagaaattatcatatgataatttacttaacacttaggtactattatcgctaaaaattaaatttaagtatttatttgcaaccggagttaaacttatgaatttaattatttatatcataatttactctttcttttttaattttcttaatcactcaaaaagatttttttaagatttacaaaaaaaaaaaaaaaaatatattgaatctttcttatttttattttgagtgtaaggtttaggggcaaaattgttaatttataaagacacgttagcatttaaatagaataatagaatagaacctaatagaatgaccaaatttctataaatgtaaaaattcagacaaattttttaacaagtcacataaaatgagtaatattaaaaatttggagtgcaaaattactaattattttcttaacaatcataatagaatgatctaaatttacttttattttaaaaaaaaattaatatgtaattatatgagtttttattgaatttttcaaaataatgtactgaattctctgctctacaaagcaatacaatttgacaattttattcttctttttaatattctcactgtagttttaagcttatcataataaaaacttaggtgacgtttagttaagatgaataaaaatacaagaatataattgagaatgaaaataaaaataggaataaaataaaatttaaaatgcataaaaaaattaataaaaaaattattaatttttttctcatcttgttttaaaatgatttctccttccattttaatataaatattcattccaccaaaataatggaaaggtcgtttcatttaaataacattctaatatatgtaactaaataaaaaaatatattttatttcattaccttcaaccaaacgccaccttaattcttccatattagtaacttttttttatatatattttta

SEQ ID NO: 51869 - DNA, 918 bp, Cannabis sativa
  modified_base (612)..(622): a, c, t, g, unknown or other
aaaagtgttatgaaaaaggttgatttagaccaaatttaatttattcctctcatataaataaataatagttttctaagtatgaataatttgaaacccataacttttgtcagaaacactaaacccaccaccaaccattatatagcttttgttatttgaatttgtattcatttatttgtctctctctctctctcacccaaaataaatcttaacataacacatagcattttatttgactggatttaactattttggattatgtagtttgtaaattaaatttttttattttttaaaattgtataaaatagtataaggagcttaattttcgattattttttttaatataactaatttaaagataatttttagcatgcacaaatatataaaatgtacgcaatcttttcatgatacctctagatcgaactattattaagttgagtaatttgcgacgtaattatttaagtttaactttcagttgtaaataaatacctaaattttatttttttacagtaataatactaaagttatattattagaaattttgtaggcacctaattattaaatgtcaagttattattcagatgttattttcttattgatatatttaaattaatnnnnnnnnnnnaaataaaaatttaatgacctggactaatctaaatttattacgtgacaatttacatgacacttcacaatcaggtacttacagaagtttcggaattataacttagaaattattaccgctaaaaattaaacgtaagtatttatttgcaaccgaaagttaaacttaagtatttatgttacaaatacatgatccaatttatcaattaacaaaaatcagttcaaagaactattttatattatattttaaaaaatacatagtctaatttatcatttaacaaaataaaaaaatttaattaataa

SEQ ID NO: 51870 - DNA, 862 bp, Cannabis sativa
ttgtttaaagagcaagtacttgctgtggtttgagggggcaatacagctacacaggaacaaccaagtatgctcgccatgttcatctacttgcctgtagggatcagctaagggcttcttctaaagcaatgcaagacaggtgagctattgatgtctgaaaggattcatagcatatttgcagtacttgtaagattggtaaacatattcaattaactaagatgtgtgccaagttttgatgctccggcaattccacttataaaagaaaagtatattttgaagcttttcattcatccggcatggcacacctgaaactcctaaacaactccattgggaataaagacaattgatctttggagtatatttttgcataatgatgcattaattagcaatatattgagttttttccccttaacttaccatgctactgatggctattgaaattttcaactttttccaaactagtataaggttcacaactcttgattgaaatgtatagggaacaggagtgtattctttgacagagatgctatgcggatataaacgttcagttttatttaatgtttgttatatctttcgtttaatgctgatttatcttcttttctatttcttttcagtatgctctacgtaaattttaccatgcaagtccaagactcatattaggtaccatgcacatcaccaacaagccgattctcagtaaggtatgtcattttaaaccattttttaggttgagtttattactcaaaacattagaaaataacacactcaagcatccaacctcttgaactagaagacttttttcatgtagtttaatagtacaaaatataggaagcttcaaatagatgactaactaggtctcataggagaa

SEQ ID NO: 51871 - DNA, 1521 bp, Cannabis sativa
attttctataaattctttaatgagatcgcattgattaaacatttttaatatgaataattacataaaatactaatttttgattttttttttatatattcttatgttcaaagttaatttttgcattcattcttacgatattttataaaaacacaagaaaacaataagaaaatcacataaaaatggcaagaaaatgacatccaaaaaatataaaaaaaaaaataatatacaaataataaaaatcaacgaaataacaagagtacaatataaaaatatataaaaacattgtattttatgtaaataaaaaaaaatcataaaactattaaaaaattccgtaccgattgtatttttgtaatttttttgtttgtttttctttttaaaaaaaattatccctttttaatatgcagtcaaaaagagtagaaagcaacaatattattggaacaatagaattaaaaacacatccaaacacatctgaggttcatgtatagtcaatcaatagcataattaaattttattttatacatatgtctcctaagttgtcattttacaaccatatataaataactattacaaagcacaaactttcgaacttaaataaattacaaaagatcagtttctatgttgagttaaacataggaggcctaagaataataattgccttcttaattcttttgaaagcttcttggaggtcggcgagggatgtagcataagagattcgtatgcaactatcgtctccaaacgcaccccctgggactactgcaacctgtaaagaaaagggagacctattataaagaaacttgagaagtagttattctacttgatagtgtttttaaagcttcaccagcctaatctgaaactatcacattatttataccttaagagtatgtttagttgaggataatcaaatggaacagaggtgtttggaaccaatagtgtctttagtatttctctttttgcaataacatgcataataattataagtgttttgaattttgattattggcttacctgacccttttctagaaggtaacgacaaagagactctgaatcatctattcttccaaatccttcaaccattgttccatagtaatagcttaaatcaatgaagagatagaaagctccctggggctctgagattttaacaccctccattttacgaaagctttcgactaagaaatcccgcctttctctgaatgctttcaccataatagcacactcctccccaccagcataacccaatcctaaggcagcaacagccgctttctgtgatatactacaggcacctgatgtgaactacaataataaatatgaaattagtccacttatttacctatacttaattataatgtagaagaagaaaaagtaagcaacaccttaacttctcataggagaaactctgcaagcttgtaaacacaaaacattaattacttgtgatttttctcatatcacacaaaactcacctttgcctctttttattttttacataaaggtaataagactcaatacatgcaaaatatatacctg

SEQ ID NO: 51872 - DNA, 1395 bp, Cannabis sativa
acctagacctagaccatgataggaacccgggacccagacccaaaccccgaccagaacccagactaagatctggacacgacttacgacccgaacttgaaccaggacttaaaccccgacccagacccacacccgaacccaaacattgaattagaactggaatttgaattggacaaggactcggatcagatcctaaacttggaacaagaaccgaaacgaaactcgaacacaaacccgaattgaaaccgagaccgtgacctggacctaaactgggatatgagaatcgagaaccgaacccaaatcgggagctagacaaaacctgaacccaaaccaagacctggactgggacttgagacccgagacccagacctgggacctggacttggacaagaacttgaacccaaacccagaatcgatgtcaggacgtagacccacactaagtcctgagaccccagactgggacccaaacctggactgagatcggtcgccgaacccagacccaaacccagaccgagacttggtcttgaaccaagaccctagacccgaactcgaacccgaacccaaacttggacccaaactgggacctaggacccagaccgagatgggggacccaggcgcagaactgggacagtgacttgggccctaaaattgggaccaggaccctagacccgcccagacccgaacccgaacctaggacccagcttcgatttcgggacctgagatcgagatctggatcttgacttggggcttggagccgacctgttgtcagtgtcaagatttgggacctagagccagacctgaacccgaacccgcacttggacccggaccaagaccaagacaagactcgaacccacacccggacctgaacccgtaacccgtgacctaaaactggaaccaaaactggaagtggattaggactcggctgggacccaaacccggaccaagacctagactcggacccaggattccagacccgaacccgaacctggacccgaattggaacctaggctttggtcttggatgggggacccagactcaaacctaggacctggactcaaacctaggtcccaaactgagacccgagacccaaattagagccacattgggaccctagattgttatcgggatctagacccgaggcctggccatgactcgtagctagtgttttaatttgggacccaaacctggacctagactttgacccagacttggaccaagacttggacccgtacctcgtgacctgaaattggaacctgaagtgatctaggacctgcaaatgggatcgagagtagaacccagacccagaaatggaacatgaactagatgaggaccagaactcacaaacagacccagactcgaactgggacctagacccagacctagatccaaacttgcatt

SEQ ID NO: 51873 - DNA, 1695 bp, Cannabis sativa
ttatttaatgaatgtatgtgaattacaaaatttttccttaaaaaaaaatttattttcattctgaaattattttatttggattccttatcttttgtttttacgaaacttaattatgataaaaaatgagaaagttatggaggtttgaaaaatttgggtccaaggtgtgtcgagatggtgctcacgcgcaccaggtactaggacaaaccttatccgtgtgcagagctcaaacaaatcatgtttgaagctcgttgatgttgcacgttcagacacgatgcacgctgcatgtaatatcccgaaaacattattgtgataattaattgggcatattttattaaatatgtgattgtattgatgttggggtaagattatgatcttactttggctaactgtgtgataattagtgaaaaatttaatagtggttaataaagcgtaatttattaattacggagactatattggaatatgtgggtatcgtggataccatttctgaagtaaaatattttcagaccaggaaaatgtggaacttgacaggatggtcagaaatatcacgccaataaaagatgaattgaattggaattataccggattaggttaaaatattgagaagtacgaatgttaagttgaaatgaccatagtgccctcaagttgtttttttagtttgtgtgtgtgtaaggggtaagatagtaatttcataagttagaattttattttgtcttatttagaatattagggctgaagacttatgcatgatataagtttattttcttaagttattaattaaaaaaataaggggaagaagccctaactaaggaacctctctagtcttctctctctctcctctgttcggcctagaagaaaccaaggggaaatcaaattctttcttcctaattcagttcaatcttgctagaaaatcaaccttagttgctatccaagttcttgaggtgagtttcctactatgttgtttatggatttttgaagtttaatgttagttttagattaaggttttaagattttggggcagagatgttaaactaagattagataatgttcttagattggatttaaagtttgtttgagcttgttttagctagagttagggctggttgaattgtaatggttcaagtgacgtttattaagtttaaattcctttgaatatgtaatttcaatcaaaaggatgaattgtagttaattgatgcttgggatatgttgtatttgagatattatattgttctggaaggtttcattaggtttggaggagttttgattcaattttagagcaaaaaccaagtttttcccgtttttgcagcagggaaaaactggctcaccggtttcacaggtgttgtgaaaccggttaaccggttttggtagcaggggaagaaaattttggtttttagccttgaaaccagttttgttcgaagtgttttttcagagcctagatttgagtattttagtaacgtataagctattttgagcttgtggagagttagaatatgtctgattgcgaagttagggttatttcaaagtttgtaataagttgtttattgagctttgttggggtgacataggacccgggatcgtcaagctttggttccacttaaggttagcatgtacgctaaagatctggaccgaggtaagaaaagtattaagtactgtatatggttaacgttatgattgttacagtcttgattatgatca

SEQ ID NO: 51874 - DNA, 634 bp, Cannabis sativa
agtataattatatagtatataaaacaagaattttattaaaaaaaaaaacacatgtggcgtccctgttggacagggcattacatttgtaaaaactgcatcactctttgagcctccataccattggccttacaatacacataattatcatccacaaaaagcatatgagaaactcttggggcacctctagcgactttacacctggttaaccactgatgcctttcatatttcttcaacagggtcgagaaaccctcctgcacaaattaggaacaagtacagagatagcggatccccttgtcgcaaacctcttccaagacaaattggacccatagtatgtcccgcatgagtgacattataagtaatagtagagacacaaaacataattaactccaccacccttctactgaaccccatctgaagcataagagtctcaataaaagaccattcaactcgatcatagactttgctcatatcgagtttgatagccatataaccatataactccaaacctccaactaaagactctattatagacaactaaaaccacaataccctaagtaacaaggaatcacctaaccaaagctctaaaagtaacacgaattgatgaaatggattgcttgggaaactgtcctagaat

SEQ ID NO: 51875 - DNA, 658 bp, Cannabis sativa
cccaagggctgaaactgagaagaaattttatgtggatcctgaagcaagtttcttaattggatgtggtgaacgcggggaatcatcgaagaggaagacgcgaggcaaatatgcatcttctagtggttcaaggaagaagcagagttcgggagtttaaactcgaagtaagaggaaggcggctttggaggttaaggaaattacacaaggagacttgggagatatacttgaaagctgtgtggagatcctaatcacttatgttcagaattttgggcaaggcgaggaggcggccgaaagcattcccccacctccccaatgaggtgcttatcttagaactgcagggggctccgtcggccttctgtagaaaggactcttaggagtctaatttgagataaagatgcggatatcatctttctctcgaaaactaaggtgagtgcggactctatgattaatgtagtttacagacttggttttttaaatatttgctgcattgctgctacgggctttgctgggggaatgtgtatcgcgtggagaagaattcaagtaaatgtaatggagactttggaatcggggttcaaagtaaatgttatgtctatgccaggatgtgcttctggggtcttattctgcatctatggccctccttatggggccctgaagaaaccat

SEQ ID NO: 51876 - DNA, 1010 bp, Cannabis sativa
attaaaattaataaaacaaaaaaaatcaaattttaaaataaccataaaggcaagtttgtggaaaaatcaaaatttcaaattcaaaggctactaatatctaaatctcatgtaaattaatttgattatgataattagatttttctttgaaaattatattctacacaagaacctagcgagggggctaatagcgagacaaaatgatgttggcagcctcgtctgactgaggaaactcgacgtgacaaggggcttcagacagcccgtgtccaagaaaccttggtcaggccttgtctgaagctcggtcatgaccgagtgaacttgcttgtccagcgcgcccacatagtgcaacaatttgagatatttatttattccgaattcaaaaaatcataactaattcaataaaaatccaaattaagttctttaagagcctaaattcataaatttttcatctactttctaaagtactttcaagacgaaactagaaatattttttattgtgaaatcgtaatttacatacattcatcaaattagcacataaactaattatatgaacacatctaaatcatcacaatcattgttttaaatccaaatttcataaaagtaaatcattacatggctttgatggcagttgttagagattattttaccaggatctaaatttactaacatgtatgttaatcaacaccctaaatatgaattatctaaaacaatgaaatttaaacacatcttgtaaagaggagacattagaaccagagagaacaattctgcacagggaaaaaactctactccaagtggatacaaaggaggtaattcataaggacctgataatcaaacactagattctgggagcatcatgtgcaactattgtaagaaaccaggtcacaccaagtttgagtgtaggaagttacagttcagaaatagacaacaacactctactaatattgcaagcactagtgatgcatctgacaaattggtccttatttctgctgatgaattcgccaagttctcaaggt

SEQ ID NO: 51877 - DNA, 784 bp, Cannabis sativa
taaaaatgcataaaattaattagaaaattaaagaaaattttaaataaataacacatatcatatcatcacaaaatagttataaaaatacataaaaacctataaaattacaatagagttaataaagtcaaaaataattaaaaactcattaaataaattaaaaactaaagaacaatactaattttagtttaaaaaaaaatataaaaataactctaatttttagagttatcaactgacaaaaaagatttatgagtattaaaggatatacgaagtgtgtttttatttggtcaaataatttctggttttctatgtttgttgcattttctttttcttctatttatatatgtttgaaagttttgtaatctataatctttttcttcgtgaattttcaatggatcaaaatttatgtattagatgagtcttttgcaacaatatttgagacaactacttttttttatgaacttaagacaactatttaatatgtgataacaattactctttcaaaagcattgtagtgcaggaagaatatatgcattattcaacaataaaaatatgtattattagtaatatcacacgctgtagcaagactatatttggcatgtcttactgcaacaacactagaagtgaaagaggtcttgaaagtaaagaatatttttaacataatcaatgatcccataatcaatgatcccattgttatattgtgatataatattttttgattgattaaataaatgttacaaaagttacaagtttgttactaaagagaatatatttttttttttttgac

SEQ ID NO: 51878 - DNA, 1571 bp, Cannabis sativa
  modified_base (116)..(116): a, c, t, g, unknown or other
  modified_base (1507)..(1532): a, c, t, g, unknown or other
aaaccaaaaagaaaccgaaaacaaacctgcgatcgaagaggagcaccatcctaatcatttttttttgagcaggagcatgacaaaatctttcatgggcagcaacctttgatttcttnttaggaggagctcgctcacgtttcgacaactgaggagcaaaatcggagtcatcgtcttgaacaacaggacgtttgcccttattcctattagctacagattccaaccccattttagaacttttctttggcagaggggaatgagtggatgaagaacgagtaatagccatatttataaatggattaagagcaatagaaagagagggaaagcaattatgtaaatcggttaatgtgagttgaaaaaaaaaatggaagaatagaaagaagagggaaaacgggttgggatcgtgaaaggagaagagtttggctatggaggttttattttttttaaaaaaaaaaactgaaaagaaattgaaaataataagaaaaagaagaaaaaaaaagaaggaaatgatgtaaagtatgattgatataagtcatcaatcaatgacgtgtacggctgcatggtgtgtgtgtgcaagtggtaagagtgtaataaaataacgttgatgagtataaatgttggtttaaccgtgtgaaagtatatatgtaataacgtgtgtattttgtattttttgtgtaaaaatttcataaataaaaggaattatatattgtatttttttttttttcatttttaagttttgtttagatttttttttttttttttataaaaattattgatattttgaagttatgttattttaattttgatattatattggttctatttttataaaaaataaaagattaattataaaaatataaataagaaaaccttataaataatatgtattttaccagggaacattagccaaattaattcgtcaaataatttctctctcgttgaaataccaaatgtgtactacagaaaacttttagttgggtgttatcaagtcaagtaaaaagaaaagaaaaaaaataaaaacatatccaatgccttaatttgtggccctcaaatcgttctaatttggattgttcatttgttcttttttttttttttttttttttgagggaaatcatttgatcttatcacgatacataaaatatagtcaattttcatacaagtttttgtaaaaccaatctttgggacataacataattgataactttatagtttacagaactaaacctcttctttcgtacccaaatttatatatgtaatatatacggaaaaccaagatcttcaaactatgagtttctaaatgtactgagaaaaatgatttggtgtgagtgcccacattgataagtttggtgtaccatctcaatcatcgtatctccaataatttaatgactgtccggaactcgtataagtattggggtcccatctaacacttaacaccaatgtaaatcaatttaattctatctttaaatatgttacagacaagagtactttatgggctcgtttggaacgccgnnnnnnnnnnnnnnnnnnnnnnnnnnattatattgaattgtattttatgcaatatttttatgtaa

SEQ ID NO: 51879 - DNA, 1588 bp, Cannabis sativa
  modified_base (433)..(436): a, c, t, g, unknown or other
ctcaaacacaaaaagaaatgatgatatgaaggaatcatctaagaattaaaagaaatagaaaaggcacaacaagtatttttcaatttgttcagtgtacaccgagttgactgaaactcgtgagaacatatttctcacaagtcaaaatagggttgcatttcgcaagcctaagcccatgaggcatgcgagatataagtgtgattccacaaaatattattgatgtcacaaagatatatggcatactactgaagaatatcgacaactgcaagacgagataaaaaatctaatctcgcgaggatatttcagacagtatgtaagacatcaaggaaatgggctaaacaggcaaacaaccctaataacccaaataaccgaagagtgtaacctcctccgattgagggtgaggatattcttgtcattttgggagggccacacctcnnnngaaatagcaataatgcccaaaagaggtttatcaatgaaataaaaatgggataatcgacgtttgctctagttacactaaataaggaaaagtcaaatgaatcttcgattatcttctcagaggaagacacaaaacacatgttgatcccctcgtcgtaatagtccaactcgccaataagagcgtgaaaagggtattggtggacgatgggagtttagtcaacatcctttacaaggaaacattgaaaaaatggggttagaggatgcgatgttgaagccttgcatggtgagcctatgtggatttaaaggtgatagcattgcaagcctaggcatcatcgaactcccattgactgttggagagccacccttataaaggacgctgatgcaggaatttttagttattgatcttcaatcagtatacaatttattgatgagtcgctgggcattaattggactaggggcagtaagctcgatcaagcacttgtccctaaattttccaacacaagcaagagtaggagttgtccgaggcgaccaattattggctgaggagtgttatcgattagaacttcagaacaggaaagccaatcatcaattgatggtaatcctaacaaaagaaggtgagaaggaagaagaggatctagatcccagaatccaagataaaaataactagctaaaacctattgaagagctgtaagaggttattttagatcttaataatcccataatatgtgtatacattgggaaaatttttgaagaaaaactaaaatagtgattaatcaattttttaaagtcaaaccacgatcaatttgcttagaacgactcatatatgatagggaaaaaccctaatataatttttcatcatttaaacatcgaccccagctatccagcaaaaaggcaaaagcgacacccgctagactcagagagacaaggggcacttaaagaagagatttacaagttattaattattgacttcatatacgaggccttctatcccttgtggatttcaaacccagttcttttcccaaagccaaatggtacttggaggagctgtatagatttttttagactttaataaagcatgtcctaaagattatttcccactacccaggatcgaccaattagtggatacaacagcaggacacgagctaatgacttttat

SEQ ID NO: 51880 - DNA, 868 bp, Cannabis sativa
cccccatcagagcaacccccataagtcggccccgtccgccacagctcggacctgttctcgatctctagcttccccacaaccacgtcccactcgtccgtgtgaagatcggaggtctcgtcccagtcatccgtcgaagatcgcgtcctagccatccgctcaaaggcttcgtcccaatcgtcgttccttctctctgtacgaaggacccatctgcccgaggccgtcgttggccattcctccactgtcagagcccatatcccgccatatctccttgattcttcaataagaaagttaatgttaagaaaaaagtttgttgttagttagtttttttttttttggttgatttagagattgttcattgtttgttaaaatatacttagttttgatgattttttctaaattttggtcggttttgaatggtggttatggtattttccggtccagtgtggtggtggttggaaaaaatgaaaacgatatatgttctcgaacatttatcaacggattctcgataggttatcgataagatttagcttttggtgatggtcattaagtttagctattatcgatgggttatcgatatgttctcgatagttgaagcattgcaaaaaaaatttgtaattttatttttctttattctcatatcgattgattatcgacgggttgtcgataaggtgatagtcattaaattaatctattatcgactggttgttgaattttcttaagatatgtaacgcccgtacttttcataaattactaatttagttaccagcattaaaatgtagaaaatctataatgttgcttttatttataaacataaaatatttcatatttgagctcagtttggacttaaaagacataataattaataaat

SEQ ID NO: 51881 - DNA, 771 bp, Cannabis sativa
aaaaaaaaaaagaagaagaagatggtgtgcgcttatatgccgtgcactgtagtatatacaacaaattggtgaaagatttagtgttaccttgaagaaagaatttacaccatattgatgttatagtgtctctttagacttgctctaagcattcataaaattaattatatttataccgtactacatatatatacattcattaatagctagagccaagccactataatatagccctatttgaacttttatttgctaataaatatataatttataattatcataactagattaacgttaactatgttacattaatatctagatactgtcgccctattacacattatatttccctatataccccctactaattaattaaatattacattttctaaaataacacaccacattgagcaactaaaaagacttttattacgcataaaagtattaaagtagtgaaaaaagaatatataataggaatttatatatattaaaaaagtagctaaaaacattcttaatttttaactcgttataattatgaaaagcactctattataattctattcccttcttttaacaaaatatatagctatatatattatagaccaaatattatataattaactgtagatacatatatattaataaagttaccatatattttttcaaaaaaaaaaataaaaaataaaaaaataaagcatttgaaggataattattttatatgattataatttttttagagggatccatatatttccaaactgcaattatggattt

SEQ ID NO: 51882 - DNA, 1855 bp, Cannabis sativa
aggtattattgaggaggaggagaatatccaaaagggtgctgatgaactggaacttttgagacaagacttcttccagtccatgactttggacttggaaccggattttgagctgagcgaagaaattactagaacgggcattcttgccagatttttcgacggaaaaggtgtatccagatcacgactcaaggaaattctcagtcatatatggaaaccaaagctcaggggggcttggaaattcaaaactttaaagacaggtttatgggggattttctttgatcttgaagaagattgtgttgagatcttgactcataggccatggctcatcaatgggaaattacttttaatcaaggaatggccagaggacggagcttgggcttcagtgaatatgaacaaaacgatcttttgggcaatggcttcagggcttcccactccgtatttaaacagatcaaatattcctactgttggtagaaaggcaggtatttttaaaaggagtgatactgctgaccaaagattaatcacgagaagaggttttttcaagtttcaggtggaaatagatgttcttcaacctctttctacggggttttaccttgatatgagaaggggaaggaaggaatggattcagtttaggttcttcaaactgccacggtattgttataactgtggccgtatcggtcatgatgaaaaaagttgtgcgtggccaacggcttttgtttaccctcttgaaggtaaggctgttagagcttttggcccgtggacgaaggctgaaacagctgtgataagctgcttcaatactaggaactaacttgagtggttcaggaaagaatcatctgtgttacctccgacgaaggaacgatcgacgaccaaagagaaaggaaaatcgccggtaacggataggcactatggcggtagacagaggacacagattccaaaaccagtgaagaaggttatcagaatcaatgacagaactgcaggtgctacttttggaaagaatttgaaagttgttgagaagaaccctctttgcccagcgggtgcttgcagttcgaaggcagcaagtgttcctcagaactcttcagagctaattagggataggcgtgctaggtctatctctcccagtttttggagacgacatgggaaaggaaattctataactttatctaatgaagaaatagtgaagaagttttcctcaaggccttatccagatgctagggatgcccaggtaattgccacgattatgtctcaaaatgggcctacttatttgcaaacaatcgaaggcccacatgaagaggtttgtatgtctagacaaccacataagtatcctgaaaagacccctttcccttggccctcttatgctgaggaagttgggcttgctgaggagctgatgggcccagtccaagtggacaaatttgaacctgtcttaactctgtttcatgaccctaaagatgtttcagatgagatccacccctgccctcagcctaggaaacgaaaggcatgccccaacttaatgccatatgttcctaggactgaggaaaatacaaaggagttctcaatggaaatacctgaaatgctccccttctctccgaacccttcgacttcaactttcaaaattggtgcaggggctcctgctacaaattcaaagactgagaaaagaaggcgcaaaggctcgaattctcgggcatcttcaagttcaagcaaagggcgaagggaagcgattaagaagagtgagattactagaaatctggaagaaagtttggacttggttgaggttagaattgatgaggctgagaatattcatatgggcgaggaggcggcccttatcaagccccccaagtcaccatgaaaatactttcgtggaact

SEQ ID NO: 51883 - DNA, 3316 bp, Cannabis sativa
tctgcctctttcggggatttcatcactcactatgtgacaaagaagaaccatttggcatactcatgcttctgctaaaagagagttgaattggaatatggattattagcaaagatagcttaagtaacaaaaaaaaaacatggcagctgagaagagaagagaagatagaaaggaaaggtcaaaggtcaaaggtgtataatgttgttatgatttggtttttggagaaacgtataaaaagctaagttactatgtgaagtgaaggtgattgttttgttagagactgcattttgatggaagaagttgccatcccatcctctttcttatcatggttcatatattgtttaatacaattttaagacccttttttttttcttactcttttattttttaggtttattctttgtaatgtctttagttggctttcaattttgtttaaaacaagattatagtttgtggtggtggcaacccgagatgcataatatgtcaaattctctctatcaattaaattaaatgagaaatgttaaaagacaaagtgttgcttagcactttctatagtgtaacattattactattagtgtaattaatattgaattttatcgttattcttacatctcatctaactctcgtgaagcaatgataactctttcttaaacatttcaaacaaaaacaaatgggacctgaaaatcccaattattaaatttcattattactcatttattgcatcataatatgcatcactatataaataaatataatatatatatatagaaaaagttgttttcaaaattaaacttattcttaaatcgtaaaatatcaagtttagttccaaagacatgtaaaatgaataataagtataagtataacgaatgaaataccttggttgtgtttaagtaaatacaattgtttggttttcttttacattcttatttgtaaataaagctcttaatctaaattgattttatttttttgatttttttaagaaaaagtgtcagagcagaaaactcagaaaaaagccaaggacaaagattaataaatatttggctttggcatcaaccaaaattaacaaataccaaaccatactatcactcttctattattttggttcttttattccataaaaatacatttgactttcaattaaaatggaattaatgaatttattgagcaactccaaattataagaacataataatatatatcctctttatcatatcatagtgtacaattgtagtgacaaaatccagtaaaaagccaaaattcggatgtaattcacaagggaggtgaaaaaagccaaagtggaaaactaacaaattttattttttacacactatcctttcaacataatataatatatatatatatcatattatacccgaagctttaagcaaagcaaacaaaagaaaaacagtaattcagtagtaataataatacaatgtaaaaataaatctttggctagtactttgttgcagtatagatatatatattttttatataattctttttcttttgttttgttttgcttttgcagtagccttttagttgtagtagtagtagtagtagtagtaatagtagtagttatttgttcttcgatggatgaatcaaaggagaaggggaaaaaatattatgtggtacgagcatttctgtagcgacgaattggtcgacggaagtactcacttaatggggtcttcggaactggaatcagctttccaacaacagcaagaggccacctgacaaacataatttagatatcatgttaggtaatgctcaatattgcccaaactctttggaaattaagttttgaacttacccaatgatagcaataccgaaacagataagccattgtgaccaattcagatgaactgtcgaggtgaactttccgaggaattcgatgatgattatctgcagataagtttgaggaaggagtctacagttagaaggaatagatccctttaataataatgataggcataatgtaaataataaccacactggtctttacctgaaggacgaaagtaacagcaataattccaacaaagaggcggtttttagttaccccgctgaatacgttcatttcgtcaggctttcgagcattgaattcattgaatatctgaaattttaacaaagcaaatatgtcaaacagtgtggtaataaacaaatctaatttgcttgtgagattgtagtcgtttctcagcataaagaaatactcacttgacagagtacaaatgcattgaatataacagtgttcttcacatcttcagcgtgcgctttgttgctgtcaccattcaaccgaagaacgctcttccccgaaaaatttaagaccaaaagcacagtaacttgatacaaagcctacatgagtagattttattgttattattagttatttattacatttcatttcaaaaacaaaatacattaaaggaatagtaagcgtgatttcggtacctgtatgagtaagttcctccacataatgtttgttataagaggttctctgcattaaataagaaaaagaaaataagagaaggagagagaatattgtctcaaataacctcacaataaatgcaactcgggtcttagattacctgttattttaataaggggggaaatccccatatcagaatcaggatttaaacacatttaaacagacatgactttatgtttcattttcctactttaaaagggaatgcacattcacacatgacataaatgttggcatttaaatttagtgaatgccacaaatcaatatttacataaaatattattattatggagaaatgagatcaacatcactgacaggatcagatgcataagcaaggtataaatgttttcttctttttcaacacaaaaggattaaaaataactggaatttttaaacttgtacacaatttttttattgtctattttaataggaaaaaaaatactctgtcaagaaacatcataaagaaaatgtttttaggtatagtgaaaacatagtgtttttattttagaaaaaaaatgaatgaaaaaataattgatgaaatctactagaaaaaatgcaattaatcaacataaagacaaaattgtaacaaaaaaatatcacagcagcccaaaattacaacaattacagcatgaaaaatactgaaattgactaagcacgatgtttcgaacctccggccaacaggcgttctatccatgaggtggtctgtaggtggttcagtagccaaagcaagtgctccaagagtatccattataaggttaacccataaaagctgtgaaagaaaagtcattagttcgatacattgacattgtaacttgctaatttgatgaacagcataatcctaaa

SEQ ID NO: 51884 - DNA, 1030 bp, Cannabis sativa
tattttatttccttaattagaaatattctaataatagatgctcaaaaaaactcaagtctaaacccagaattttaaagccaaaacccaaaaattaaacattaaatctcaatcctaaaatcccccacaacatcctagatgcaatttacatattcccataagcttaaatacaccaaaatcatcaacaatccacaaaaattacaacaacatgcaacttcatcccgagaacatcaagaacaccaacaattaaacacaaaacttcataaatttacataagcaaaagagattaggagtattaccacaaattccttaagcttaagcaagagaaacactcaattcacaccaaaaacctagctccttcttcaaaattggttgaaattgaaaaacaaaggtaagaaagagagaaaaaggggatcgactatggggttgagaaaaaaaaactagaaaatgcttttccaattttacaaaatttaattttgttgaaaaatgtaatatgtggtcaaatgaccaaaatgtcctgaaggcgtaaataatgacataacatataacaagggtaatattgtcaattcaatcatacatacatacataacacattaatttaaattttctcatttatcatatcaatgccataaataaatctcgaaaatgtattttgggccccaaacccagttcaacccaaaatactcgattgtgactataccatccgacttgttagaaaacacttgccaatagacaaaataaacataatatactataatacagtctataagcacgatatatcataaaattacaattttacctttctcgagtcaaaattacgaaaatacccctgacacaccaatgaggtcttaaaatgcaatttatcaatatagtttcacatattaaattatataataatataatttactattaatacataattaatctagttagggttgctaatctaattattaaacctcaaggtattacaaattagcacttggtctaaagtaaaacagtgaaacttgaggggaatgatagaataacataagtt

SEQ ID NO: 51885 - DNA, 1516 bp, Cannabis sativa
ttattagtgatcctgtaacagctgatttgatttgagttaataacatactttctttaaaaaaaaaaaaaaaaaaaacacttgggtatttaaattattggtgtgaaaaatttaaacaatattgagcttttgtagaagtttaacatgcaaagttcactgtttattcttgtgttactttacaccaagtacttggtccaagaagaagctcattactttctaggaagagaataatcaaaagagcttgagtcataaaaccaaacaatgaatatgaactgaactttcttgatatcatgtttgttatgaatcattaggaaattatgtatttattagctttacttaagaaagtttagaaattatgagtgcatgcaatgtttttttaaattagtattttattttttttaattaaaaaagtgaaaatattttctaaaaacatgttttataaattaatttaattgagaatcaaaattttaaaattaaaaaaaaaaaaaacacttttaaatttttttaaacaatttttttttatcaatactttggattccgactctcacttggatcttaggacctggatctggacttagacccggaccccaaattcgaaccccaaacccataacccgacccctaaccctggtccaagattccagccttggccttggacctggactccagactcaaacctcaaccccgatcctggacccagacctcagccccagacctaggcccaaaccctagtccctaggggtgtacataggtcggtttggtcgggttatagtgtatttttaccaacccaatataaatgtcgggttgcaaatatctaattgtaacacgtccaatgaaaaaataaaaagtgtaacccgcccaatgattttcgtcggtttagtcgggttaacccatttaaactgatctttattttttatttttttttttttcattattattagtttttagtgttcaaataatttatttgaaaaaataaatgtatagtataagtctttcaagattaaaatagttatagtttaaataaatgttaaaaaataaatataaattgaataaatattaaaatattaaacaatattttttaaagaaaatagaataaaaaaaatatactcatatgtaaattctaaatttcaacttcaatactcaaatacaatcaaaattatcaactattaattttaaattttaaattaaacactataaaatacaaactttcaatgtaaaatagtttaactattaaatgtaatttatatattatattatagattattttagtaaaaaatatataaatcggtttttctagttttttgggcgaattagaataatattcaacccacccaatatattcattaggtggtttgaatttttcgtaaacttattcgagttgtattttttgtcagtttattttgtttgatttgggtgatttattcgagttagacggtttgtaaattttattgaacatccctactagtctcggccctggacccagaccctggctccaaccccaaattaaataaaattaacaa

SEQ ID NO: 51886 - DNA, 784 bp, Cannabis sativa
tatttgttttgttaagtaatttaaaataatgtattttcaatttaaatatgctttgattctttatgtcatttcttttggtaatactttttattgttctgaacattcattgtaagttcatttactaataatcttaattattatatatttattttttcttgcaggaaagtcaacatatagtaaatccgatccctcttgctaggtgtaaaatattgaagcactagaagatttatacgaaaataattacttttatgatgaatttataaaatcatttgagtattattccaatgtttagtatgatataaatttggaaaacagattgtatccatttattcaattataattttcatttcaataatatatgtttagtatggccataaatcaagttatcatataagaattagtgtgcgtggaatgtatacaaaaacataacaagaaaataattaattataggttttgatagttttttcacaatattccagtaacatttacaacatgtcactaattctaaatttttaaaaaataaaattagatttcttaacaaataaaatatttattgacaatttccaatgtcactaatatatatagcaaatagtgacataataaggttttagtcatgacatgatcaaaatattttacattaatgtcactatttcataaaaatgtcaccaaaagcatatgtaatagtaatatatttgtaaatgtcatttattcaatattttggtgtagtgattgcaaataaataaataaataaataattaacttaattttaaaataaaattaatct

SEQ ID NO: 51887 - DNA, 1282 bp, Cannabis sativa
ccgtttacatccctagtaggatccttgaaaaaagctttacccatacaacaattttttagcaaataaaacattgccaagtgagtggtttttaagacccgagaaacactagattatatctttttaaattacaaaatatttatttatttatttgaagaaacctgtgtatccattgatgaataaaataacagtccaggatacaaacaagagaataatggtgttcaaaggacctgatagcttcgattatctaggcctaaagcatactttgctagggagtgagcggctgaattggaacccaagtatcatcatgtatagagatgtctgcaccattacctaccttcttcttgagccctgacaaaagaagctccttaccccaagagatgttattccaaaccagcgaaggccggcgaccctttccagcatcagggaaagtggtatgggggaaatagcgagctttaagcaaagaagccaccaacgtttgggggaattgaatgatgcgccagccctgtttgaccaacatagcttgattaaaagctttcatataccgaaaaccaagaccaccacgaaatttggaatggcaaagagtgtgccaagccacccaatgagttttcctagtttgagcgttgccaccccaccaaaagttagccataagagaatccaagtttttgtggaaacgaaaaggaagcttgaaacaacccatggcataggacggaatggcttgaaccacagatttcagcaagatttcttttttgcctttttaaaagaaagtcgaattccatttattattcccaaaattcgattggtacttcaaaaggcgacacgtgtcaatctcagagaatatgaaccagcaaatataatggcaattatattaatagaatgtacgaactattgattcacgtattaatgagaaaccatttcgcatcagagaacataatcgcaaggatgacatcgataatacatagcgaggcatctacctcacaatatgtagagaggtgttgacaaggcgaattggctaataaaatacgtagcgtctaatatacattatctaactaattgtaatagcttgaggacatagataacgaatagcgagacatccatctcactataggaaggcatactcctggtaaactccagctctctaccagggttattgttgttattgagaaccctcaggatatgattgtccagtctacgagaccttatggacaaagagcagttcttaaatttgctcagtacactggtactcatgccattgctggaagacttatgaataaatcaagttgtt

SEQ ID NO: 51888 - DNA, 1316 bp, Cannabis sativa
ttctttgttatttagtttctagtgagttgtggtcctaaaaatttattgtgttgcagttagtaggtgaagaaaactaaaccactattttctcttgctgtccacaaatatcatttgctctttattatatatctactcttcctatttttagttacaaataaatatggaaggttagtaataatatgtaagttaaaattctataactttctacataagtatttgatagttaaatattaagtaaattataacgtgataatttttgattggtttatatcattaattttttttttttgttcaaaaacaaaaaatagtttaaatataaaaaaaatgacatatatgtataatgatttgtcgatcagatatctacgaagttacataaatataactttaagtattattactgtaaaaaattaaactacgaacaaaaattaaacttaattatttatgcccaaattactcttttcattattgcttctagtgttttttatcactttcttctataaaataaaactaggccaaattatagaaccatttccaaatatatacttcactttctttctttcttgatctcttgttatcaaaaatggcaaaggtgaaaataataaaggagtacaaggtagctcctccctctgctaatacaacaactagctctgagctacacaactcctcctctccaaactctctccctcttacttttttggacctaatttggctaagatttccaccacttcaacgtattttcttctatgagcttccaaccttagatgatccaaatacagatacaactttgtttttccattcaaacattgttccaaggcttaaacactccttatctctcaccctccaacacttcctcccactcgctggtaacctcatttggcccgaatcctcctacaaacctctcattctttacagttgaattacacacagaaatggtaattggaattctcagctcaaatggaggctgagacaacattttctttatatactttgagagagaaatacaagcaccaatagaagaaagacaagtggccctaatgttggtaaagaggagaccaactcaaaacagaaaaaggcaattgcagaatacaatgcaacaaacttaataaaccagtacaagcacaattaactaattaattaacaatgattaactaatctattttcttaacatttacaacgaaggcgacgaggacaacgcggtttcctttactgtggctgagacagacgctgattttcacagtctatcgagcacaaatgaactcttggatgcaacagaatacaatcctctcatccccagcttggcagcgtctcgcgaacga

SEQ ID NO: 51889 - DNA, 571 bp, Cannabis sativa
catgatttcaagttactgtgcactctttcgttaatcaaaaaatttactgaaaaatataaataattaaaacattcataattaaactcgaatcttaaatatattgtggataatggtggaggcaaggctagaggatacactactaatccaaccttctcgagaatctcaaaaggccttgtaaatctagggcatagcttgccctttttcttgaaacgcttaattcctttcattggagacacttgtagaaatacatgatatctaacctaaaattttatatctctacgttttggatctgcataacttttctgcctgctctaagacgcaagcattctggccttgatcgatctctatcatctcattgatccactgaactgattgcagtgtcaaattactatgtctgccaaccacaaagtcctgcattgaccatatccacgactaactgaggggaaatcataattgcactaaaaacctgcccgagacctttcctgcttcaggcatcttccaccacattaaccttcttgggatgatagataatttcacaatcgtaatctttaactaactccaaccaccttct

SEQ ID NO: 51890 - DNA, 1764 bp, Cannabis sativa
  modified_base (1119)..(1120): a, c, t, g, unknown or other
agacccgatattaaattacactaaaatagtagtttgacacctcttgtgtggtgcctcttaacatttttaataaaaatatatgttttctaataaaattaagagtattgttattgggcattaatagtgcccaacatattttattagtgtcactctaccattaattagcgatatcttctaaaatttattactttaaattatatgagacgactcaataattatcatataagtagggtcaatcttaaagtatatgggattaagataaaattaaattttagagttcttatatatagtttaattactaataataattttagtgctttgatgtaatggtaataaattttaaaattcttaaagagttttaatcataaatagttatatacgttaaaaaaataaaaaaatggagattaaaattgatattttatctatttattaataattttttttataatttaaggatcctaagtatcttagctcgcctactttaagggcttatcctgcatataagaagagtattgttattaggtatcagtagtacttagtactttttcgatatatcgtgttatgattgactagtcatacttcttaaaaattattatattaaactatatgaaatctgatatttaattgaaccaataacgatatttacacataagagagtgttaggcactattgatcctctttatcattgtgaatcttttggaagcctaactatttacgtaatgtatcatatgaggtggctcggtgtgtggtagtccaccaaagacttagacgaatagcattaaataattacatttacacaatgagagaaaaaaccacgtagccccaaatgtttgccccactcgccagtcgccacgccaaaagtaagttcactagtcatgatagttggttttaagggtacttcatttcttttaggggtgttcatcaaaccgcccaaaccgctcaaaccgtccgcactgcaccacaccacaaaaaaaatgcggtttaaaattttttgcggttcggtcgcggtttgaatgtttcttaaaccgcggggtgctgtgcgggttacggttttgaattgttaatatacggttcaaaccgcaccgcaccgcacgttataaaaataccaatttttatatnnatttaggtccaatatgtgaatgtttaattcaaagtccactaattattgtattgttgacacttaattttttttcatatttattttcaaactttatggtattttgacaaatagtttaattatttagtgatagtccaaaccgcataaaccacaaaaaccgcaccgcaccgcactatttttcgcggtgcggtttttgcggatttttagtttcgcgtgcggtttgggaaattgaaaaaaccgcatgtgtgggttgatttgaaaaaatagtcaaaaatcgcaccacccgcaccgcgaacaaccctaatttctatcactataatttattaaaataaaataagtgagactgaatattaagttacactaataaagatattatactttacaaaaatattaagtactataaatgctagtttagtatttctttttaagtttatatactaaagaagatgactccaaatatttaaatatttgatatcaactaatagagaaatactaaaagatacttgtagtatagtgtttagtatatttgtaaagtgtaatatatgtaatttaatattgagtttcacttattttattttaataaatattatataaaagttcactaactaattgtaaagtgacattttatcgtagtactagatataagt

SEQ ID NO: 51891 - DNA, 1094 bp, Cannabis sativa
cacaacaaatattgtgactaaaacacatttagtcacaacaaattgtaatttttgtgtctaaaatttttagtcacggaccttttagtcacaacacaataatgataatttgtaattagccataattttttttatctttagtcataaattttgttgtgagtaaaagtaaaattatttgtagtgttacaaatatatgttgtaactaactaaattgcatataaatttttttacgattttctttttcagggggggcgactgctccgcctcgcctacatgtaggtccgcctcgtgttcgcacacaaagtttcagtgaagctcgatgacaacaatttcctccttggtattcccgaattctctcagccattcatggtcatcaatttcaagacttcatctccgattcagtctagccttaagaggttgctttcaagaatgggaagttcaagatcaattgttgtagttagtttcttcaatgactaatagattaatatttatttaaaaaaataataaaaattataggagttacactttagtgacttttcatatatttagtgacccggattgtaggacactaatattgaattttcaaagactttttgtgtaggtcactaaaacttagctctaactttttaatgactcacactttaataggagtcattaaagagtatcactaaaagtcaattttgtagtagtgtaattaattgtgatttcaagccaaaaccacaaggtttgatgtatattttatcgtgaattaaaataccttttgaagaatttatattttgatgtgtaataattactgttacatggactattggataaagcaaattggattacaatttattttggactgatctattgaaatttgttgacttgtctatgattgtgttttataaattaggtattaaaaatatgtccattttgtttttggattcaataatgtaaatattattgtttggattttagatttggctctgttgaacgataaaaaaaaactaaagaggaataaataaatttattattatttcattattggatcttaaaataataataataaaaaaaaaaatatatcagtcaaatagagagaaaataggatctcaact

SEQ ID NO: 51892 - DNA, 1324 bp, Cannabis sativa
aatgtaactttgtaaaacacagtgtctaaaataatatttaaagtaatgaattttgtttgggtgtaatcctcacctttgcttgcttgattgtaatttcgtaaacttatattaacactggtgagaaaagatatattttatatctcttgtgaattctaattggatatagcaaatatagtagaaactctatttaaaaatacacttagaattaaataaattatattttgattgagatgttataattaaatagagatacactagaaaaaaaaaacacaataaagtattaaatctaatagcaataacaataaacaatcattaatattatatcataatagaattatttttaaatttatataatatttatacttgtattacaatttaaaataaaaatattaattctatataaataaatttataaactacatatatttttattaagatataattatttttacatagatgtatattttcttaatacgagtttcaaacctcttacaataattttgcactgccaagtactatcaatttttttctcggattgttgtagtgacaatctcactccaactggattgttacaataacagtgccaacctcacctcaatcgcaatttggaaatgtattaggaattacaagcaaactcattctaaatatatgatgatagagcgattagtaagcacacttaaagaaataaatacaaattttggctcaaattgtgtgaaaagtattttgtaagattttcgacttgggagctcataaaatcacttgaataggtttggtatatgaaatatatgctcaatcaacttgaatttttgagtaaaaatcgagtttatatagtattggggtgaaatatagccgttagtacgtattccaaagggaattctaccgtgatccagaattccaaatgggaaccgaaattctagattgtttacaactggaattccaaattccaatcgaaattacagatggcttacagtggcaaaatttgtatttttgaactaaaacgtgcataactttttactcgtttatccgattttaaaaattctaattttattctcttcgttaaatgatatgtgatcttaaaagtcaatttaaaattattagatatcattttgtgaaataacttgtcacacaagttagtgggccaaaattcatagttaaaactttttaagtatgaacttgaaaatcactacaccagactagaaaatgtaaaataaaccttcatgaagtcctgtcttgagttccttgagtcttggaatccacttcgggtcactttcaagaattttgataaaattacttgttgaccgagattttcggcaactattagaat

SEQ ID NO: 51893 - DNA, 1126 bp, Cannabis sativa
ccttaaacttggaccacggacccgacccctgcccctagacccttgtcccagacctgaaccctagactcgaccctgtcctctgacccgaacttggacacgtacccccaattcgactcggacccccaactcatactaagttatttattggaatcagattttaaactaattcataatgtttccgcaaccttaatctagtatttatatttatataagaaatggaaatatacaaaaatataactaaattgttaaagatccaaaattataaccagagattaataatttccatttttttaaagctttttctcctgcaaaaatcaaaactcataaatgtaaacatcaatggcaatcttggcatatcaaaacatggattatgaggacgagcgtcactagcctacatgaccctctaggtctgttcaattgctcccccgcatctctctcggtctgttcaatcgctctttctctttggtgaggtttcgtggtctgcttcagtcgcacaaccgacattactggcgattgacggacagaggcaaacctccaagtcgtatctctgatccggcatcataaaactcccatcttagccttcgtcaaatctgatttggcatcatagaaccccatcttaaccttcgtcaactccgatctgttgctaagccaccttctaaaacttcaggtgacgaaaaggggtattgggttttgattttactttttcagatctagatatttattataattattattttagagaaatattggtggtggtggtaatggtaattaggggtggacatcatccaatccaatccaattaaactgaaccgattcaatctaattcaattacaaaaagttggatatccaattataattggattggattggatgctaaaagttggattctaattgaattggatcggttattgaatgttaatctcaaaatccaattaaaaactgatctaatccaattacatttatatatatttaaaaataatatatatttattatatttttattagattttttttttgtatgttgaatttgcaatgcttaattattttgtgtatttattttcatgatgttttgttctattttattacttagaaatattgttattttaattatttaaaacttttggcta

SEQ ID NO: 51894 - DNA, 1175 bp, Cannabis sativa
taacccatttgttaggcttataaccaacaaaacaacataagtaagtctccaagaaacgattaacaactttagtttgaccatctgattgtgtgtgataggcgacaacgtccttcaagttggtgccttttaaacaaaatagctctttacgaaaaaggctaaggaaattcatatcacggtctaacacacttgaacatgggaagccatggagtttgaccttttcccactcaaacacttcagcaacagttgttgccgtacaagggtggcgtagggggtataaatgaccatatttagtcaggcaatccaccaccaccaaaataaaatcaaaaccacaagacatgggaagccccttgattaagtccattgaaatatcttcccaaactttctcaagaattggtaacagttgtaataagcctgcaaaaggctaagcgaaatacttattttattggcaaataacgcactgtgtcacgaacttttgaacatcttttctcatactaggcaaataaaaattagctgccactcgttaaattgtttggaacaaccccctaatgacctcccacgaagttgcactgatatttttgcaataagagttgaatgcaaggtaaggtagattgcattgcaaaatttcccacagaaacgtagcaccccctatacaagagtttaactgcccccatcattacctttattgagtttcataagaatcttagacagcaaaggttcaacttttgcttggtcttgtatgtccagaatagaaacaacattgggcaccaaaatggtagccaaagatgagtaatactaaacctgcaaaagtgcttccattgccttttttcaaacctcgattgaacttaaattcaaagtcatatcccaaaagcttagttagtaacttttgggactcatctgccaccaatctttactctaaaaggtacttacgttggtctgtacggactacgaattttcacccatgatgatgtgagcaccatttttgaataataatcatagtggccataacctcacgttcataaacttaattagcattacctaggagacaaaacgtaaatgcaaaaacaataagttgctgatttttcatgaacactaccccaagtccaacactagaagcacaattttcattataaaggaaccttacatttcaggtgaggccaagactagcactgagcaca

SEQ ID NO: 51895 - DNA, 914 bp, Cannabis sativa
accttaattcattttattcaacttgggacattttgaaactgagataaatccagtattacattaaaaaaaaaaaaagttggaaatgcgatagcgtcggtaatagacatgaaattgtaaatgtatctttcttggataaagaaaaaaatagaagataaaagagatagagagataatacttgtaagagtgggagggattttggtagtggcgccaatcaatatatcaaacgtagaaatagagagaggactgacatttggtgggggtttcatttcgagagagaagaagggagggtcgatgagaagtttgggtcaccgagagaggacatgggagcaggaccaataatggtgggggttttatcgagagggatacaagagaggagagagggcccacgagaaggtgggtcgctgagagaggagagagggagctagtctgggttgaaagaaggagagagaggagagctggagggtgaggcacgaatggggggaagatgaatggtattaacttgctagttttaggtttgttattatttgggtcctaagttcgttagctcctaacgaacttccctcttttctgggtttattttgttggacttattgtttataaaagggggcttttccctttactcatcagtaatcgtttttattttctgtttcttaaaaataaactttttttattttttgttatggtatcagaagaaacctaaagtcttccactcatatatatatatataccttcttctccaatggcgcatactcggtcttgaggatcctccttttccagagctcctccttcggccgtagatcggcccattctcactgttgtcgacctgtccatagctctgtatgatgctttgcccattttttaagaacctgtaatgccaaattcaccgctcgctcctcctctgcaaacatttatta

SEQ ID NO: 51896 - DNA, 1891 bp, Cannabis sativa
ctctcaccgaaatggcatccctcactacgatgaggcctaaacacgtttgccaattgcgatttcggtgtcggagaacatgtttaaagcttcaaggcattgagtctccaaggggcagtaatgtgtttgattgtgtgggtttcatttatattcatctggtttttagcagcaagcttaactgttcatattctgcaaaataatttttaattggttttagagatataaaaatggtgtgttttagttttggtaatcatatgtgataaattggttataaaatggttcattaatatttttttgattgaactatctgctacaagtgctacaggtacaagaaagaacgaaaaaatggaggagatttcccatatcaaaatcaatgaattgtttagtctttaattctttttgttattagcacgattggttactattgtttttaattctttttattttaatttagtcttttttttgttttaatttaaatgcttttttttctttaatttatgatatatatgacagctgacgtgccaatatttgagttggcaatttttttaatgaattgttgattgtgattttttttaaatgatggggttcagttataaggtgacatgtggcatattatgtggctgtaaacagtgaggtacctacagaaattctaaaatgttaacagaaggtatttttgccgccaaaaaattaacttaggtatttaagtgcaactaaaagttaaacttaggtatttatgccgtaaattactcaaaataatataacaaaaaattgattagacagtcactagttaaaatattactttgggttggctttggcataagcaaagcattggttttatccttttgaataaatgattactgctaattagattttttgtactccaaattttgacatgtatcaaatcatgtctctgaactattgaggttgttaaatttaaggatttatgtccaattttgttcaattttacttacgtgatggttgttcttgtaccaaatcacaactccgaagctttgatatgtactaaatgtgccccttaaattttgacatataccaaatcgtatccattgaactttaattcacatcagatttttgttagtaaaattgaacgaaactggacaaaagtccttaaatctaataattttaatagttcgagggagttaattcaggggcatgatttagtacaagtcaaagttcgagaaacaaaaatcctaattaattaataaaataaataaataaaataaaatgatgatgtaataagtgagtttattactttgtatgtcacgtatatatataagattatgatggaataaattgttcggtaaacttaatacgtaagtatacgtaattgaaacaattaatataatgataaatagagtatcgttccagagaattaattatcaattaccaatcaattaattctttaattctatttgatgaataaaaattattagagaaaaaataaatgagcaagacaatgattaaaatttaaagaaataacaataataaaaaaaaggtttagtatgatttccaaccaacttttattttacttcctagtgtaattactcaatttctcttcttcctattcaatagacaagttgagttgaaaagtttataatctgattaagacttataaacctaatttatgtgaaaatttcatatattcctatggtaaattttaatcacaaagatatcattaacaaagcaactaataaaatcatacaaacaagctagatactttcatcctaaattaatttatatttgtaacaatcagagcatattcaaattttactttctagaattttaattcaaaggttaattagtaatttttccccctgaactttgacatgtagtaaatcgtgccccctgaatttttttgtgttgggttttatgccct

SEQ ID NO: 51897 - DNA, 1422 bp, Cannabis sativa
  modified_base (939)..(953): a, c, t, g, unknown or other
aaaaaaagaggttaaaatgatagactttaaaaaagaaattaaaaataaaagacgacaatataaaaaaaagtatagagtgtaatttcctctaaacatatagatatataataatatttaaaagattttctctcatagctaatgtggagtacaattcaaagttagcctactactacattctatatgcatctatatgaaaatgctatagttctttctaacctctgaacatgttatataagctatttgacttttttttttttctttttacgacaattttttcttttaagaaatataaaattatagtttaataagaatcattttctacaatgttcaaataaaatataacaaactaaatgacttataacatatgtttgctttattttgtttaaaaaataaataaagtaatagaagggatcactggtataattatttttaggaatatatttgtagtggcgaatgtgcttataaaatattatgtttatatttttgccaaaaacaaacaaacaaaatttatttagggctattttcaataatattaaaaaaaacattattaaagttatgataaatatggcattatttaaccaatcaaattaaaaatataatttttttaaataaataaaaaagcatataaaaaacattaaaaggaaaatctgaatttaagatttataaaaataaaaacttaatataaatgagattgaattaccataaaaatattaaaattcatttatatttatttttttttgaagaaaataatataaatgaaactacactgatcgtcggagttctcactcgtgccaaaaaagtcaccggagtttgctatcggcactgaaaaaatcatcagagtagtagccggtgccgaaaaagttgtcggagttgccgagggcgccaaaaaagtcgttggaattagcattgtcgccagaaatcacaggaaaaatcaccaannnnnnnnnnnnnnnatgaagaaaccagtttcttggtattttaccggcgacaatgccaattctaacgactattccggagtttgctgtcggtgctaaaaaagtcgccagagtagctgctggtgtcgaaaaagtcaccgaaattgttgccggcgtcgaaaaagtcgtcaaaactggtattgtcgccagcaaaatcaccgaaaaaatcactgagaaagtggtttcttcatcaagaaaccggtttttttactaagaaagtgttttcttcatcaaggactagtttcgtcacacaattataataaagattatgaaaacaaaacaaaaatgataaacaatgaagataattgaaaccagttttatcaatcaaccaaatggagaaaaaaatacaaaaaaattactcatatatataaacaaaacaacatacaatgcacaacaataatctaaaacaaaatataataatgaattttaatatcaaatcttcttaact

SEQ ID NO: 51898 - DNA, 994 bp, Cannabis sativa
tcccttggcttccatgtcttgaggtcgacagcagccatcaatggggtgagacattgcagcctttactttgtctgtagagtctcttatgatagcaccgaacccaatcctttttctggcttcatcaaaggctgcatcgacattcaattttaggaaagtaggtggaggtggagtccatgttttgtgtgcggttggagtgtcagccggtgccaaaccagcatgaagagaaagctgctgggccgattgaaaactgctaagaaaagagtcagctttagcagaaacaaccgaaggctgttgggcaagtttaccatgaataacattgtttcgatcagaccaaatagaccacatagtgcaaacaatcatttccaattcagatttggtgtagcattctgatatctgaaacaaaaaatcttcaattttcattgaaacagcagctttgttattaaaagaaaacccagcaattttccaaacatgtcgagcatgtttacaagtaaacattgcatgccccacagattcccaagcattgaggcacaagctacatgaggcagaagtgagcgattttctcttataaagctctgaagcaaccggcaaagcattatgaatagctttccactttaggaggtagtttgagctgccaaaaagacttccaccaagaaacatgtgggctggacacagagacgaaagtctcatctgcttacaagcaacatgataacccgactttacctcatactgtccaccagtagcttgccaaacccagtaatcagagttagcatgatgagacaaaggtaaggaaagaatccgctcgacatcaactgatgaaaaatcaacattcaatttgctaacattccattctttttctggtgtgatatagtctgccacagtattagttggagcaccagtaaaataaataggagtgaaaatggagttaccagggatccaagggtcagtagaacaggctatatcaaaaccattgcccacttgcaaacgcaatcctttc

SEQ ID NO: 51899 - DNA, 970 bp, Cannabis sativa
  modified_base (31)..(32): a, c, t, g, unknown or other
gtgttgtaaaaacttcaaaaactattttttnntctcatttctaaaaacaattttttgaaaacaaaaaacaaaaaataataccaaacatgctctaagaattcaatgtgttaatttcatttaaaaggaagagttaagttttgttaaaaaaattaaggatatactgatcgacttaattaatattatttttaacacaagcacaatattataaaaataataaaatctcagagactagcaagattgtaattaaaaaaacatactagctgattatgaagccaatatattgggtgtacttattttttcaatctgtggttagataatcgagtcgtgtccctctttcaaaaaaaaaaaaaaaagcattaatttgaggcttatcttattttttattttttattgatgaatgaaaaaggaaaaattgagtaaattaacgatgagtaggtgagaaatgcaaatgataaaaccaaattgaggagtagtgtgaaactgtgaaagattcaaaataatttcactgtgaaacattcaaaataaattgtttatatataactctaaactttatttttctaataagagccgaatttaattacaaaccgttaaacattaaatatttagttgtgatggattggattggatgttatttttcaatattgaattggattggatcttggatagagtgtctaacaatccaatacatccaacatccaatccaactaattaatatttttatctaatttaaatgagtaataaaatttgatattgttatatatatagttaaattaacattaaaattttactttttttatattatccaaaaaaaaatattaaatttaaaatattaaataaatttaaattaaattaataaatatatatgaaatacatgttatctcatggatataaccgattcaatctagaattcaataaataaattagatgactttaaattaattgaatcatatgttaaaatttaatattagat

SEQ ID NO: 51900 - DNA, 1463 bp, Cannabis sativa
agccataacaaaaataagaacttgttgctggctaagaaccaacgaaacatcttttcgtaaatcttcatattcaagatgagatacatattcataagcctttgaagaagaaagaccaacaatttcaagatttaaaacaacattaggaataggctcagaagaatcgcctttcccttggctgaaggaataaatggtttcatccaagaaatgatcagaaaaattcaacatgtctttctcctcagaagttggattgatattcttgagttgcaacagtaaccttaataaaaagaataaaacaaactttataataataataaaataaaaaaataaagcaacaacaaataatgaaacaacagtaaataactataaaacgataataaaacactagacaaatacatgctttaatggacgattaaatatcatattattaatatgatgcaacttcaactatttaacttcagctttggcattttactccaattgagaatcctaagaatcacaatattataatccaaagcaagcttgccaacatacggtcaacactcgaaaaatcatatttggagagtatatgggaatcccaacaacctttaacaacatttgttcatattttgctccttatatttcttaattcctgcatcagtcttactcttcacagagttaatagtcatttcataacactctctaccccaaccatactcattatatggaccactatcgataaagtcaagctcctcctcaaacacaactttcttaggggtaccagctatcaattagcactgtacaaaatacaatacatcatacttgacaacaagctcatcattatgcccaaagttcttaacattgaaagcaacttgaatagaattttttgtgattttatcgttgcccttcaaacactgttctacaagagtgttctctctttcttagaccaaaaaatatttgactcaatatgaaaatctaaaccaatctgtaaagcaaactcctcaataataaacctaagtactttcccagcaacacttgcccaaaactccatctcattgggctgttgaaattccctcaacaacaaactgtaaatctgttgaaagtggattgaatactcagggagacaaaaaaacaagaccaaacaacagttttcgaaaacaactctttttgaaagaaaaaaaaataaaaaaaaaaaactgttataaaatggtgatgaaccaacttcaaaccgttggcaacctcaaataatggtagaagtgtggatcaaacttttaaacaaataaaaaaaaaatgaaatagaatgttgagaagaataaaactaagaaaaaaatagaaagagaaagaaagacgatgagtgtctcgtgggtgtgtgttattaatagaggtaacatgtatttagttttttgttttaaaaaaatgacccaaactataatagacgtgacccatatcactcacacagtacaaaaaataatttttaaaataaatac

SEQ ID NO: 51901 - DNA, 646 bp, Cannabis sativa
ccatatacaagatctttgacttttggaggaattttgagttaccacaaaaattacgctaaaacctagagttttaaatcacactactaaaaaattgagattttttgactattttaaacactcaagtaaaatattttcgttggtatttaagattgtcgtctattcaaccgttgagaaagctaggtagaataagtgacgatgcaaaattattgagaatattgagcattataatccactgtttataacagtcgcctatactataggcgataattttgcaccatcgcctttgcaccgtcgcctataatttgggcgacttgcaaaaccttcggctatactattattgacgatagttttgcacagtcagctatatcattacataggaaaaaaatcttcaaatccttacaatataaacaatatacaatacaaatatcaaaatttcagacctatatacacaatagataaaaaaaaatataacaataaaagaatggtcagctctgtcgaaatcacaatcctcagatacatgacgatctgctaaatacaaatttttttaaaaatatataaatcccaaaataaaaataatagagattaattattttttaaacatatggtcaccgatgaggaagaggcgccaccaaccctcgagatccac

SEQ ID NO: 51902 - DNA, 694 bp, Cannabis sativa
aagtatggacatgccaaattaagttatttgtatcttgtgaaaggatttcgctctttctattattataaatgagttagattctcaagtaaaaaaaataaatgagaactattggttgaatttgaatgagcccacaaaacaagaaacaacatcggatgtgaaaagtaaaaattaaattattaataaaatttttggtatatataattttgtggaacaacctttttctttctttaatgggtaagcttatcttcccgtacaattgggcatgccccattattgtcactctctactcaatttatcactatattatgaacaattaattctcatgatatttccttatctactctccctccataaccataagagtagtagtagttggcaactaacctagctaagcttttttggtattttcaaatataggaaaaagaattgctaaaaggcatcacactattagtgtttattatttttctcagtgtcatactgctagtgtaatgaagtatcgagtctcatataacttaagaaataacttttaatgaatatcgcttattagtaaagtgctacctataaaaaatattgtgcaccgctaatgcttaataacaatgctcttaaaaaaaatacatatttgtaataataattaataaaagaattagagaataaataagttaaatttattccagatcaatttcttttacttatt

SEQ ID NO: 51903 - DNA, 963 bp, Cannabis sativa
tgttttcttttaacatttaatacaagccaaacttgggtgtaaaactcaggtttgttacactctataatgggcaaattctgtcaaaccatataatgtaaaatcttgctagctttactattcctcatttatgggggccatcaccaactattcatatcaggccgaaaatgtattagccatagccacgtaaaagtaaaacccatactaaattgggctagggtgactttaatttagggcacatggatgaacctagtcaacactttaaaaagaaaactataacacaaataatagttttggtatactctttatttgttttgaaattcaaaaccacattattagtcttacgttgtaaatttttagaaccacatgaaattttacatagtttacagtaaaaaaaaaaattaagcaataatttatcacacatgttatattaacatgctctcttagataatgagacaaataaaagttatattgaaatattctttaggggttttactataaaattaccatatatatatatatatatcaaattaagagcactccccctaaaaaaatattaagatcatttccaagtaaatatatagctaaagttctattttcggtgctctaataagtgagctaaatagttcacttcattctttagctacatttagctaagatatgaaggtgagagcactcccaatagttttttactctatctttaaaatacatcactaaaattttattttctctattttgcaacacatttctacattacacaatacatcggtttttttaaaatacatcaccaaaatcctattttttttaaattttattatattttattcattttaaatatataatatattttatttttttgaggaaaagttaattgttattataaattaaacaaaaatgtcatttacaacaacagagtaaaaaggttgaggtaaatcctctaaccaaaagcaagtctcttccacccct

SEQ ID NO: 51904 - DNA, 622 bp, Cannabis sativa
attaataatttaataaagcataattattaatcttcttttgtttcacacattgatccatcaaaggttaactacaggcatacagctcgtgaaactaatatgtaaattattgatattaagataagaagaatattaaaggaaaggagaaagtcatgggcaaaaggtgatgacatagttggcccctccagtgcatgtaaaagtgctggttttatcatcataagcataactgtatgcctggggacaatgctgcttgaagagccttgaatactggcttggttggcatgtgttgggagaattaaactcatctctgcaacaatactgcgattgatcaaataccaaacatgcacttttacaagcaactacagcaccacttccactcttcacagccaattcttttggacacacatcattgatactagcagagcagctagttgtgttacagccatcattactaccagacccccctccttcaggcttcaccgagacgggcaagttaaagccgtcgacaaggctaatgtcgtagaaatctcgtccattgtttggcgctagagtgaattcgacaagcgttgctggtggaattccccctgctcctttgcagcctatctctcccgagccacattctccc

SEQ ID NO: 51905 - DNA, 1057 bp, Cannabis sativa
atgagagacaccttctatacagttttcaagcctccttcattgttcttcatactcgagctaggcatgcaaaaaagatctatttagttagagcgggttggaactctgatccgatggatcacctctgatttgaaacattcagataattattagatcttggatcaaaccgctccgccccgcctaatttttttttggatcggatctgatctgacccgatttcaatttatttaaaaaaaacttaattcaagactcggaccccatactcggatcccttgggacctagacacagacccgggacccagacccggacccgaacccgaacccgaacccgacccggccccaaacccgggacccaagaccaggttcaaacccgggacccaagaccaggatcgaaggcgggactcgagaccaggactgggactgggacccaggaccgggactaggacccgaacactgactttggacctagacccggactctgaccaggtacccagacccgagacccgacccgaacccgggacccagacccgaacccagactcaggaccgggacccaaacctggttcgaaccccgatcccagatccgggactaggaccgggacccagactcagacccgaacctgacccagcccggccccaaactcggaccgaaccagggactcaagaccaggatcaggatcgggacccgggacccaggacccaggacccgggactagaaccgttacctaagaccaagaccaggaactgagacctcggactgggagctagaccgtaactcgggactcagacccggacctgaaaccggattgggaccgggacctggaacccagaccaagactcggacccagactcggatctggacccaaacttggacccaaacccacacccagaccgagacccgaacccgaacccaagacattgactcagacccaaactcggacccggacccaaacttggacccggacacgaccctttgttggtgttggggtagagtttattagaaatatattatctttatacaatctattaatacatgtaaataccaaacatagtattgtatt

SEQ ID NO: 51906 - DNA, 2315 bp, Cannabis sativa
agaaaatacataaggttgggtaaaccctagatcaaacatcccttaaagttataactttaatttcttaagttctactggagctattttattgggtgccctaaaagtcggctctgctccaggtgccaaatcaataaaaaggtctatcctcttgctggggtggtaatcttagaagttcttctggaacacatgcaagaattctagtaccactttaatgtcctctgaacgaactgtctcaggctaggtggtatctaacaccactacaaggaatcatatacatttttctcataaaaagtttctagcctttcacattgagataactagaatttgagaactctaaaccgattccacagccacgaatggttatttccctccgattgaaaagttaccattttcctcttataattaatactaacgatgtgctcatacagaaagtccattaggagtaatatctcaaactctagtatacccaattctacaagatcaacactcaactccttattcttaactctaatccgcatacaactgatccacattttggagataactaattctctgctaggtaacatggcttcaaaccctatttcctaattgtctcaaggcctacctaatctattaattaccttggctgccacatatgaatgtgaagctccagaatcaaataatacaaagttaatagagtaattggctagaaactgacttgacaccactgaaggaccagcttcagtatcggcttgggtaatggcaaacacccgagctagagtgggttttgcctcttatcttggttctttcgtcttaaattgtgggtagtctttcttaaaatgccctactagaccaaattggaaacatgttttacgattaaactctctcggatgatgcttcttgcaacgagggcactccagataggtatagtgacccccaaggccaccttgaccttatttcctacaattttttttactcgagcccaccaatgtagatggagctttcctcttctgaatatccatggaaccatcaccatctctgccaagtttgaaaataataggagcagtaaccccaccaatggcaatagccttttgaggcttttgaacaaactctgcagtgctctcagctcgaggattattcatcagatccaaatttcccaaaataaccaaaggtccttgcatccaatatcttccatataatggatccattcggttaccaacaataaattctcctgcagacaactctagaactaaattaattggtacttgaggtgagggcacaacatgagatccatgttgcttcaacctcttaacctccttctttagctgttgaattctagcttctatttcaatgaacctttgctccaaatctaacggggcctgtggtggattttcgtgaccaccttcataagtccttcatggcctttaacttagccttgggaaaaaaggggatcccaatctctccaactgccaccagttttgaccacatcgtcccaactacttgcgttttacgaagcatccatctataggacaagcctacgaattcatgagtcggcttggtcaggtagcaataaaaattttaatcaatttaccgcttacatgggaactcaatatgctcctattccgctatcaatctactaacatgctttctatcatgcttttatgatcatgcataacgattaaaactactaaaacatgtaaaagcttaccaaaccgggagtcgagcttatcttttataatgattgtacatatcttgacaatcttcgaagaacaatcttgcggctctaataccaaattgtaacgccctaatagttaggacactaaagtattttttttaattatgatgcataactttgctaatcaaagggtttattgaaaaatgtaaataatttaaactttttaaataaacttaaattttaataaataaatataatttatatcacttcgagatcctggtaaaagtttacaactatattcaaaatatattttatacaaaacctgtcacccaacgagtaacaagaagtgagcctaaactgtcctgaagatcctaaacactttaagtctaattatcttgatatatacaatcttcatccagctctagactcattttgatttggttttagctcttacatgcacatacacgtaataactgtgagtcgacgcgctcagtaacaaaagcataaacataaatataaataaataaccagatcgtaatcgagcaaccatacacctaatcaaaatcctataaatgggtcatgaacgtactcgaaaaaagtatgactaaccacgaattcaacctatactgtaatgactgcatgattagaatatggattagta

SEQ ID NO: 51907 - DNA, 2441 bp, Cannabis sativa
ttctctttctcacaaacttactggagaataaggcgcctagctccatcgagtagagaaggggacatgtgatgccctatttggtggtcaatggcaatggacgctggtgttccaatcgagagagatagattcgtctagtttttttgttttttgtttattttctgatagagagtttgagtcacgaagaagttgagataagaaagaaaaacaaataaaaaaagactatttttattttttaatttaaattaatttatctttctttaatagttttttcaaaaaaaaaaaaacactatttatatggaccaataatgtgccacgtatgcagtgtgtccatgtggacaacacctatgcagtctaacatagcatttaatagcataaaatggatagaaatggtgaattgctaacagaacatgagtttgggaggttttactatcaaaaaattaattttgggggtttgttgtaagtgtagtgaaagtttagaaagttttgccgcaacttactctatatactataatacacccatgttaagggaggtatatatactcctcccttaacatacagaccgtcggtgccccacaccagggcaacccacaatgcttcatattgggctgaccctcagtgctcctcattgagccgaccttcagtgctcctcattgggtagaccttcaaagtctagcaactcacatgacttgggtgcaggtgagaggcactctcgtgctaagcacgtgccatcaaagctgttacaaggatatttacaagaagttatgattttttaaagatatttatttcaaatattattttattattattttatattttgaatttaacttaactatagttaagaaaaatatatatctgatgaagaaaccctaagccctaaacgtaaacctttataaaagttattaagtcaattgtaaagggactttcacattcactccttcactctaaaaactcacttgagaactgaagcattgagatcaataagggggtgaactactataaaatcttgtgttcatcattaattgtcaaatttattctttccaaatcaatttaattattttgatcaacatctgcttgtgttcatcttgcttgtttacgatcttcttataagatccgttgacgaataaaaatcgagtcaacaatagatatcaatatagaagtgttaaccattagattttgatccaatattggctaatagtaaaagataaattagaatttctatgcttaatttagtaacttaattaaaaagaaatgtcaagaaatatctctttttataaatatatttatataaaaaatatttaactcaaatttgctaaataacttttttttttcgtctccattgatagaacaacccaagtccatataatataaaaataagagttttttttttattaattagatcaaaaattaagcataacactttaattttttgcaatgatatataatgcacattaaaagtggttttaatattccttggagattgaaaattcgtctgccgagttttatcaatttataaattcttcatcagttagtacgtaattaaaagaatgaaataagatatatatatatatatatatatattataacaatactgggtaacataaatatcattatgggacttgatctttgtaatgatataattgatacaatacaaatataaaatatatacatatgtgtatattatatatatagaacactctcatgtacgtatagtagagctaaaatatgccctttaacgattctcatttaagaataatagaatattggaatttgctttcccctcatatattccattacaagaacaagagatggagacaaacccaccacaaaagaaaaaataaataaataaataaacaacaatgctagctatagctttatgcaaaaattatttacacattacatatacaatataatttaatcaagccattccttaagggttaagtacgatttcctttcaatcaaaaaaaaaaaaaaaagtacgatttcctttctctgcctaactattattccacaaaaacacaaaatcatcaagtgactgcatacatacacacatttaaataactttatttcattaattaattaataagtataaaattacttagaaaacaaaaatcaatacatgctatttatttatcttttataatatgtctattacatgtatgtgtcgatataataaatcaatcgaaagaaaaggagctatagagaacttatgaataaaaataaatatattaattaaaagaaagtatatatgcattaattaatataataagtatctaataatgatctgaggagtaattaattaattatagcccataataatcagtaaccaatatggagcctttgtaaatcctggctgcttctatgctacttataacattattattagccatgggagattccttcttctgatgatcatgatcatactcatcctgttttcttggtaa

SEQ ID NO: 51908 - DNA, 1917 bp, Cannabis sativa
aaatcaaattaaaaaaaaaaaattgaaagaagatattaaaaaatgtcatatttattgttgagacaagagaaacgagagtaagagttgcaccttatctctttcccaatccccatttcaaaagcacaaatctattaataagaaacgaaaaaaaaaatacatgcagagaaaggaaagaaaattacctgaactcggtgtcagaggtttgctcgatctctttattttttttcctattgtgagaactctggagaagaaggaaaaagcagaagagtagaagccaaaccaagtatgttttgcaaaatataatctaattgtggttaagtttttaaaatatttaacgtatttttgaaaataaattagattaaaaatacaaaagtgaaaactcccttaaatattttgcaaaatacaattaatctttaatttaattcttttttttttttttgaacaatgaacattattaatttaattatcttttattatgtattgttttcttttctctttttcttgaacaaatataaatataatcttagagttttatttaaaaaaaatggcaaagtttttgatctatttattattcatttaaaatttaaatttgttgaaagttcacgtgttgaatttttttgtttttcactataaaatttgattttagatccttataatataacatacaaagaattttctccaaaataaaatagtacttgagattttttactgaaaaaaaatctcccgacattttatctcctcacatatttttttagactattttataattaatctaaaaaaatcctaatttcaattatttgtgatgtgttattatataaatattatttttaaataatttaattcaaatttataaactttatagacttagaattagagtaggaaaaaaaaagaattggaataggattagatttttttttttcatactttcacttattcttttcactaattatctctctcttctattaattcatgcaagctaggattataaatttagaataaagaaagaccgactacatatacattctaccatggttgttggttgattgggtaaacataccaaaagatatcttagtgttaattttggaaagaatagagtcatcgattgattatttgcgatttggagctgtttgttcagaatgacattgcataatgaaagataatcaagttaaacaaaacaaaacattatataatttttcatggaatatttataatattaccaacaataaatttcgtaccatatgataaacgttttggtggctcttcaaaaggttgggtgataactataaacaaagattggacagtaacattgtacaagccttattctatggttcaaggcaataataatgcaaatcatacatgtattattcaacttcctgccttcttctctttagagtatgaggatgattctgatgatgatgacatcttcgatttggttattgatccaaaaaaatgtatattgctactgtatttacaaggctttactcagtgacgatccactagcaaatccagataaagaatgcatgcttgttgtaatatttagcgatatgaaggagttagcttttattagacttggaattggaaacaataatggccatgacctaacttggactaaaatacaaccaacagagtattttaattccgatgatattttgttttataaagatttatgttatgctgtaacaagagaaggtacattgagatcttttgatcttagtgactcttgcgtcgactcaacaataagagaacttggtcatgagtttccatggatgtacgaaggacttggacatatatctattaagagatatttggtggagttgtgtggaaatatcataatgattgaaaggtgtatggagtattttcacaaagtgaccaagaagggtcgaacaactaagttctttaaagtttggaggtatactt

SEQ ID NO: 51909 - DNA, 1019 bp, Cannabis sativa
  modified_base (619)..(624): a, c, t, g, unknown or other
aaatgtttgaaagttattaatgttatcggttattaatcttgaatacgtgttattaaaagagtttaaaagttaataattgttattagttataaattttgaacatatattcttgataaacttaataagaaagggtggaagtttaatttttataaaataatagaacaaaaataaaaatatcatagttacaattaacatataatcattaggtagtcaccaaatatatataaaaaaaatatatatttatataaaactacaaattagtatccaatttgggttaacactagtccactaccaagtagagagaatgagtttaatattggattataagtgatgacaatcttttaacctcatgtaatatttttgtgttaagaaacgttagtattaattgtagagtataattgtattattttatttaatttaataaatttaatcatatataataataaatttattgtttgggtacattacttttagaaatttctacaatacaccttaaaaaagatatacatatacacatttatctgttttggtatccaaaatcattttttagtcaatttttttttctcatggtcatgtatgttgtagttatttaagatatcctgtaaaattttaagaaatnnnnnnaaaaaaaaaaaaaacaaattacacaccaaaaatagggtttaaatagtatgttacacccgcgacttttattttataagcatataaaatatattatttgaacactgctttcaatattgtaaattatttcaaattttttaaaattttgtagaatattttaaataactataacatacacgaatataaaaaattagattaatttttttttttctaaatactaaaacaagtagaaagtacataaatacatctatctttttaaatgagtgcatggtagaattaccccaaactttttactcatatttgttattatttgtcctacaagtatatatatatatatatatatagggctgttcatccgatccaatcagcacttttttagtcaaacaacatccaatccg

SEQ ID NO: 51910 - DNA, 1669 bp, Cannabis sativa
tatctctttccctaatttaccattgtcatcattcccttttccccttcatagaccaggtgtgccgttgctcgattcttctccgtacaacccagaaaaaagccgaggttctgctattttgttctaggtgagttatcaattttttcgtatttgtaatttattctacttttgatatttccttgtattgattgtaatgttgttgggacttgtttcaattttgttatggttttctctttgacttaaaatttagtaacatgatgtgattagggggaggaaagagcagagtgtgtgtgtatttttaggaactgtaatatttttttttatactatgtttacgcttagatttactggtctagttagtattgcaatataggtagcctcattcaatacaacaccctttcaagaaattagtgttatatatatatatatatagagagagagagagagagagatttggattcaatttctgggtttttttaggtaattgagaagatggaaaccacaaaagctttgagcaaaacctgtaaaatctgatgctctgttcaatctcacagttaagcctatcatgcaaaccacatgctctctcaatgaaacaccttaggcctttactcaactccatccattgaatgaaaaattaaggaacatggttgtttgtggatcaagttgctgagttattttgtagtaatcagcagaagcagttttaccaagtttatcctcaaagaaattgaaatgcatattctcattcataacatcccacccaattacctttcgtctgtacttagaaactacagaattgattcttttagccgccgcctttcccaactcgtctggagaaagagaatgaacccaataaggctggtatataggatcatcccaaaatatcttgtgacctctaatagaaatgccatgcttttgggaaaattccaccatggcatctgcagtggagtagtactactctctactttggagtactccattatacatataggctgaaaaaataaaagcccttctcttccctttctctctttgttaaattaagccttcttcaatattttatatgttgatgtgtctctttcacatttcgcttagctagcccaccttttatatattatgttgtagataaagaaatacaatcttgatgtaagaacaactattgttgtagacgcgcgtaatgtcacaaatgtcagtgactgtgagtaacagaaagctttgttccaagacctaaaaatatataaagtatatgttgaggaaatatagcaaagaaaatcaaattgaagcaatttgagcaagtggttctcttagtaggcatggtcaacgtgtacatatctaagcaggacacctggattgagatattttgtcaaacacctagccaacgactgaacaaacacgtgtcatttttcccaacccttattctgagactacacaagttttctcatgttatatatattatttatataattcaatacttttaattaaacactttgtatttttgtgaggagatttatctctaagttttgtttctttctatctagcctttgtgtttttgtgttttctcatgataatatagttttagatttagtgtctatggttgttatatgatattttttatgtacatggaatgctattaatagatatggatatgcaacaaaagaagattatgatatttcttttca

SEQ ID NO: 51911 - DNA, 977 bp, Cannabis sativa
  modified_base (929)..(947): a, c, t, g, unknown or other
aaatagtagcatttgtcacaaaatttggagttagaaaaattgtgttccatggcacgtgtcttctcctgctcatttatattggttccattttcgtggcaatttgtgttcctcaggtgaagtacctttcttacgtctactataatttgtttaataattaaataataataatagaatttatactttaaaacgactctttttttctttaacaataaataacttttatttatggtctttatatttttcttatacaaacacatcaattctcatttttgtgaattagtcaatcattaatttcctctcttcttttctttttttatgaattgtattttattatgttacacatttgactacagtttcaaaatattgtgtgaactataccattttgttgatttttgtgcaatttagtacaatatttaattagatataatatcttgaataagtaattgttatttgaaataagcaacagttctaatttaattaaaatggaaaaatacatgaatatcttatgtttggaaagcaagattagatttgatagaatttataaaatattgtaatttatatttgtttttttgtaaattacagaggatacgaaaatattattaatcaaacaacctaaatactataccccttgataacttcttaacactgttaataaaaaattgagataataattttatcttttttaatatttatcaacatatttatctccatggcaatttatttctatatatttattttaaagttactatattggcaaatgatgaactatagtttattcttttattttgttctttcatattttcaatccaatctaaattctatgtaatttcactatcaaaacgtgatatgtaatatgtatcaaaaaaagaaatatgcccatactaatttctttactatatatataaatatatgggtgactattcaatggnnnnnnnnnnnnnnnnnnnatatggttacatttttctttaacctgtaat

SEQ ID NO: 51912 - DNA, 2295 bp, Cannabis sativa
aatgggtaggaattttaaggaacacccccaagccttaccttaccagttccaagcaaacgtgccccctacacgcgcgtattgtcaacggattcactaaagacatggcatgcgcgccacgccagtggcatcttgattcttgatatttcaatcgaacaactcaataaaaagaacacatccgtgttcccaacgatcatccacgtgtcataaatgtgcctcaaagatctggaggaagactgcaaactcccacaactcgcaaagttctcaagagcttggggtaaatgctatccatattccgagataaagaaacatgtggtataagaagagaagtacaacttcaaacactcataaaataagtatcgtcagtgacaccagatcacagagaggctacgcgaatccaagaatagattaaggccaaaggatacatggaggtttacctaacctcagcatgccatccgaaacacagaaggcttacccttactccaggatccagagtttcccaagatcaaagtttgcacgaagagatacctctcgaagggcctatcatagacactgacttcccaaaagaaatgtgaacgtctaccttaaggataaacccagatcatctagcgagattatgcattttctaacacaggattacatcttgtcccctaagacaagccatgatagtgcatacaccccctacacctttttgccaaacaattatcccaggcattttcttttcaaggttaaacctttttgcgacacacatcatgtacgaatggtggtcctctattgtcgagctgcttcaatgcacgggcacaatatcttctaagggacccaatagttagctctttgcatgtattttacctcattagtgggatttttataaaaatcctaagcaagtcatggacatgtccatatccgcccctttagcctataaatacctttctatttccatacgaaggggggattgaaatgaaggtagccgaagctctgctaaaattactctatactttcctcttcttcaagagaaaccaagagtacagagttagagtttcttgctaaaattactctatatcatacaagtcttttaaggccaataaattgtttcgtggactaaaactcattaacgttttaaccacgtaaaaatctatatctcatttattacaacatttagttatttcttaagctcttattatattagtttccgaaaattttggtatacaataacataaagtattttttttttttaaatatcacaattcaaatttaaactcgttgtacatatttcaaaaataaatttctattattattttttgtactcagtctacatatcttaaaaaaatctttttataaatataatttttttaaacaataaaaaagagaaaatattatgttccttaaattagtgtgatggggttacttattatagttaccaaaaaatattttttatttctttttttaatataaaagcagaatgctattttttaaaaaattaaaagtattataaaattaaaatattatgattaaaataaaattataataaacaataaatttaaatattattatattatttttatgaataacacttaaattaaatctttttacttattaataacatctaaaaaaaattaatttacaactaactaattaaatttgaagatatcaatactaattttatgaatataatagctttactgtagcactcaaccatttatatagaagactaatgaatgttatacgtgctgtatgctagtggaataaaatatttatgaaaacatatcactggaactcaaaattatattatatcactgctatataatataattgagtattaagttttattgtctatacgcacccaaacaaataattgtacaatgtacatctgtatcatattttcaacatttaaaaaagctatcattttattatttttttatgacagtgcacactttgattatttatcttccgtaattttttaatttttataaataattttagtgccaaagtcatttatatataagtctaattatatataggagaattacattgtacgtctaaaaattaaaaaatatactaatagtttaatgagtgattgcatagtattaatttaatgaactaaaattaatcgaaattatatgcatatatttttctataagaactctcaaattggtgacatttattataattcgggtaattttgaagaaaaaaaattatatatatatatatatgtatatatttgaagaaagaaatttcatagtcatcaattcataaaaaatatacatatatattgtaacgtccccgctttaagcctccatt

SEQ ID NO: 51913 - DNA, 790 bp, Cannabis sativa
aaaacaaaaaaaaaaaaatccaaagccacattgcatcggacccatcggacattaacaaaaaaacaaaaatagaaataaaaaaaacacatagcatcagacccatcggggggtcccatcgggctcgaccccaaattttctaaaaaagaaccagatagcatcggaccatagcatcggatcccatcgggggtcccatcagaccattgtcttccacaaaaaccaatttccccaaatcgcagatcttaccctaaatctaacaaaactcaaaaaaaaaaaaaaaaaaggatcgaagcttacctttgccatttcagtttttatgtcccggcagtgatgagggggtgacggcctgggtcgtacgcggtggtgaagggccttggtcgggtcgtacgcggtggtgaggggagacggcatgggtcgtacgcggtggagaggtcgggtttgaatcgggtcgtacacgggggtgaggggtgacgatttgggtcgtacgcggtggtgagaggtgacagtttgggtcgtaagcggtggtgcgaggtgacagtttgggtcgtacgcggtggtcaggtggggtttgaatggtgagggttcggttgagagagaagctagagagatagaggaagagagagatttggggtgttgttatgtgagggttattcttgggtttttgataaaagtgtcatatattttttattttgaaatgtattggtttaagcataaaatattaggatttttaatgcataattttgtaaatttccctttgttatttggtgatatacgcttgtacatatctactttt

SEQ ID NO: 51914 - DNA, 1148 bp, Cannabis sativa
tatatatatatatatattttacccatatatatttcaaaactcaccattgattttgtgaaaaatcacattcagttttatctttttactatggatgttattgaattgctgtaatagacaaatttttttttgggtatgttattcaaagataatggagaatcttttttttttttttcgttttctttaacacccataagggctgaaaatatgcaagattttttttggagttttgagagtttcttggctaaaatgggtactggaaatggattgtctatgataaatggtgaaattcccctcaaacggcgtcagaaacggagcacctgaggtggtgttttcagccggtcaggaaaacgggttcgctgtcggatcgcacgactcggatatgacccgcgtgcccaactgaaggtcagggatgacccttcgaacgacgtgtcgtttttggctctccttcagacaaaacgacgtgttgtttttggttaagggctgcgcatcgttttagcaaatgacatgtcgttttggaaaaacgacatgtcgtacggtcagcccaatttttcaaaaaaaaaaaaaaatttgtggcacgttggggcgcgtgggggcgcgtggagggttcctattggaccaaatttttaccgttttgctctattttaatttttcatttaattgtgtggttatattttttgttttggtcaatttaaatgtttaattgactcataattacataattaaagtaaggtaaattattttctcatatttataatctcacaatattattatttgttatttatcaattaaaacataattatattcatgtcacaacatcattgtatagataattgacattttttttttggataatataattatgttaatgaataaataattgagcgcttatgtactcacctatcgtgggtctaagcatgtcaatttcattaatcataaattgtgagaattgtgacatattgttgttaattattttaatctcatacaacactattctttttcatatgattattatctttccataattttgtcatatatatgccttatgtgtttttttgagattctttttatgaatttcattattattattatgaaattcttttggggcatatactatggaaaatgtataataaaatattgatcatgatttg

SEQ ID NO: 51915 - DNA, 1233 bp, Cannabis sativa
gtacgcatacgccatttgaatcgattgatcggacggtggttgttgattggggaaagaaagagagatgttgataaagcagttgatcgaattgatcagtttgtaaagatgttggtaaaggatttatagagagagagaaatggaatggtttcgacaagagaaattgaataattgaataattttgaatttggtggtgagagcgtgtaacccatgcgcctgcaacaacgcgtgcggcatctcccgcggcttacgcgccatcgttttgagtgtttttgtttatttattttacttatttgtttctattacgtggaaaatactaatttcattaattaaacttaaataggctgttttagaaatatcatactttcttcttcttttggaaaattcgcaccattttcgtgattagttttaatcttaattttattttataataatacatattattagaaaattttacaaatggactctattttgatacgttatagttattgtaaaattttaaaattgaatttaaaaaatctattccaggaatgattttattttatacgcgtgtaaaataaattgtttgaacaatattttctatattgtaaattattttaaaattttcaaaattttgtaaaatggtttaaataactataacattagggatgcacatttttcccatgaggatggcccagcgaggacccactcctaatgagacagggattccccatctaaatggggaacaaaatggggacggggattattttttatccctgaatattaaatagggcggggacggggatcacactcgggggcccatttagtattttatcttatatttagtaatattctataatttataatttatgtttgtatttttttagtatattagtataatccttttatgaattttaagttgtgttttagataataattagtttattgaataataattaatgtgtaatatttttaatttttatgtagtttaatatttttgtatattaaaaattttattataaactttatttttctattaggggattttccgccctgtccctgccccatccctgatgggaaataagcagtgatggggattaaaatccttaacgaagatggggatgagaggagcattccccgccaatttttcgccccgtgtgcatccctatataacgtacacgactataaaaaaattagactaaattttttttctgaatgtcgaaataaataaggagtgcattgatgcactctatatta

SEQ ID NO: 51916 - DNA, 1441 bp, Cannabis sativa
tctgttctgttttgctgtagcagagttactttctgcttctgcagacgcatactgttttatattttcttatatataattgacatttgcaaaaacacagtttttcagacttcatatggaaatatctcttttagttgaacttcctatccaaaccaaacaagttgaaccacaatattgttgtaacaccagccaaataagaggtgagagtggctctccaactcaattccacacaataaacacattggagaattaatattataaccaaatcgacataatttgtaatatgtcgaaagtctgctcttcaaagctaacgagattatgaacctaagtttgggagtgcaaaatctatcccaaatattttcatagcgccatctcaataagtttctttgagacatcttaggacacaaatttctatgaaaaattaatatttttgaaagtcctattgcgagaagattaactttattttttcatttgatacaacttttttccaataccagctagtctccaaagggacctggtagtcctaccaatcttattttttgagatacacatcattaactcatttcacctaaagattacctttatttgtagaaatatcccacacatatgttcctaacaacacactgattccataaggctatgtctttgacacccaaaccaccttcgttcttagatttacaaaaaatcatgccaaacaacatttctagaaccattacacatatctgctcccttctaaagagaggctcaacaaatctaaataatcttctacaccacagatttagacaagataacaatttgagaccaattaaaattaatagatagcaaaatagagttgataaaaaccattcttccagcataaaaaatttctagaactccaggttttatttctacctatcatcttctctactagaccctcacaatcagattttgaatatagagaaagtgattgagtcatgtaatatttatgctagaaaaatatgtatctatatgttggagtctaaacttctatttgctacttctcattataatgatgatctattcttttaatttgacccttaaaaaatattttcatagtttgtctgaaataggaggaataaatatctattcctttcttcttcttttaatcttttatagggtttgctggcactgtatttagttacaatgtttctttccataccaatagatatcattgtgaaatagccaactttaaaattggcattatcttagatgatataattgttgacaaggttaaatataacttaaatatagtacttcaaaagagttagaaattgaatatatgacacatataaattaactatatgataatatatattattatatgatcactacatacatcaaataaaaatattaaatagtctaaataacagtgtaattctaaaatttatttaaagcactcaaacacaaaaaaaaaaaaaataacaaa

SEQ ID NO: 51917 - DNA, 1287 bp, Cannabis sativa
tcggaggcaggtataatcctagtattgcctgaaaacttcaagtttcattatgcataaatgttttaatttctagcttcaaataatgaggccaaatatgaagtgtttttggcaagcttgagaatagcagaagttgtaaatgctagagcagtacattgccttaacgattccctactaattatgaatcaagtgcttggagaatacaagcgaagggaatcaaaatggccaaatatttggaaaaaaagtttaaaaaaacttggaaaaacactcgattatttcaaaattgaacaaattttgagagaacaaatgtccaacaccaattctttggccaaactggcatcgcaatctgaaccaacgacctcaacttggttctaattgagaaattgcaagaaccaagtattttctagatggaagatcaagatgtagaaatgactaatgcaagtcccacatggatgacaccaattatgaactatctcttaaatggtatacttccatcagacaaaaacgaggcaaggaaactatgtacaaaatttcaagatacacgattgtcaaaggaaggctataaagacgtggatattcgatgcctttgctacgatgtgtgtcaccaatagaaggtgagagtattataagagaaattcatgaaggcttttatggagatcatgtaggttgataaagtttatcaaagaagataatttttcagagatattaccagccaactatcaataaggatacacatgagtttgtaaagaaatgcgacaaatgtcaaagattcttgcatatactgagggtacccttactaaactccacatgatgaccttgctctatccattttctatttggcaatagatttaatcacatcattacccatagggtgaggaggtgtgaaatatatgcagttattgcagtcaatttcttcaccaagtgtacaaaggctgaaccattagttacgataacttcaaaaaacgttttagacttcgtgatcaaaaacataatgtatctattaggtataccaattaagatagtatcagacaatggaacacattttgataactatttgttcactgagttttgtgagagaaataaaatcatcaaaaggttttcatcagtctcgcgaccacaagaaaatagacaagttgaattagtcagtaagaccctaaaagctactaaaaagaaaaaacttgatgcattaaaaggaagatgactagatgaatttccatgggtgctttggacccatcgaaccactgaaaaaactataacgagtcatactctcttctcactagcttttggttc

SEQ ID NO: 51918 - DNA, 807 bp, Cannabis sativa
  modified_base (641)..(643): a, c, t, g, unknown or other
aaaaaaaaaaaaaaaaacaacctccaataattatagatttaaaaacaaaaaaaatcctaatttatccaatattattataagataattttctttctttaaaccaaataacctctaaatctatttatttattttaataatatgttcattattaaaaaaaaaaaaaacaaaactaataactaacaatgtgtcggtcgaatacatctaaaatgttatttacataacaaaattattatgcaaaacaattaaataaacactaattaagtaccaataacccttatattaaatttgaaacttattttcatttatatatatatatattataggttattgttattttcattctatacttagttatatttttagtttttatttttgttaggtatatttttaaattttataaattaaaaaaaatacttattaattttacttttaaaaataatatttaaaatttgaaaaaaataaatataagaatataagatcatcaaaatcaaacatactcctaatattaaaaataataatattataaataatatattaatattttttttaaaaaattaatatattaatatatatatatttgaattaatataagctcaattaatataaaataaataatattaatatatatatttaaattaatnnnaaataaataatattaatatttataaatatttgtaaaactaatgttactaaatttaacgaaatattatacttttaaaatattctgttaaataaaaaaaatcgttaaataatcaattttatacaaatttattagttgagacgatgttgttattaattgttgaaata

SEQ ID NO: 51919 - DNA, 774 bp, Cannabis sativa
ccacttcatggaagcctctgagcagtgttctgcaaagctttcgcgtatggctacgaatcctcctatatatactgagatctgattctgtcgttaggaatttattttcaaattcacggtgtaataaggtgaagattaccaatgatgatattcaagaggaggtggatttctggaaaccatctatagtctgttatgttctaggagcaaatcccctgttagctgtgtttgagggttttgtgaggagaatgtggactgataaagaatgggagccctctatcaatgtgaaaaaagaagacattaggatggtacctatttgggttcatctagatgacctagaactcaagtattggggagagaggtctttgttcaagattattggacaaattgggaagccggttatggttgatgaggccactaaaaatagagaaaaactgagttttccaagagtcttgatcgaggttgccattaagcaagatttgcccgagatgatagaatttgaggatgagaatggctgtaatacttcagtcaccatttcgtatgaatggaaacctgtggtatgtgcgcattgtgaaggtttgggcacttgacggctgattgtagaaggaaagaacccaaaaaacagcagcagtgggtcaagaaatatactgggcagcagcagggtgtgataaaagaacatgatgatagtaacaaagttgatgccaagggcttccaaaaggttccaaagggatggaaatctaaacctaagaaagaacatactgctactacaactagtaacaa

SEQ ID NO: 51920 - DNA, 1429 bp, Cannabis sativa
atttgacatgtttgtctgaccatgtaattatactgtaactgtgtaatgtgtaattattaaaaactttctatattaaacattagctattaattttttttatttttccacattttgtcaaataaaatattaggaattcatatgtaattatcacctcatatccaaatacatcttgcattttaaaatatagtgtaattactaaattgtgtaatttctaccctagtaattatcctacataataattacacagttgtttcccaagagttttatgaaaacataaaaagaatttgttgtataaaatcactaaattcagtaaattgtaagttgacaactataatcgaggcgtattatataatccaattacatataattggtatgccatatcaaaaactgggaccaaatgtagcaacaaatccaagttaatgcaacaaggaaagaaggtcaaaaaataattaaatgctatagattgactacattcgaaaatttgagacaaaatttcaaaggggtccatgctttgtttgatatttgatttgattgattggactgaaattaatcaattcgagtgggttactttaaattacttggtcacattttgccactttaattagtttagaactgcatttaaaagcccttagacaaattgtataacgcggaataatcaattttgataaaggcattttaataattaattatatatgaattgtatagaaggagaaagtacagttacaaaacaaactatacaatattaaggttcatataatttagaatatgaggttccaaactccacaccaaatgatgcgaatggtctaatcaatttagattgcttataatgattctttggtttaatcatgtttttcaaactgtatgtaattcaaactaaaccggaccacctagttattttagatatacttaatatgttattttttttttttttttgttaaatgtggtggaatagttccttcaaattaaaattttttaaaagttattattattttgaaaagttgttgattcgcagaagcatgtctttgaaggctttcttgtcctttcgggaaagatctttaagaaagctagcattcttccagaaaaaaatttcaaacggctaattgttcttcttggagtttcaaggtcagttgaaatgatgcaaaactaaaatatctagagatatcgaggaaatagtcacctaacaaaaagaaggcccccacctcatattgactaggagtagagccatagatcacattgatctactaaatttgaacgagtatatattttagtgttaattttgttattatacttctttaatcgtttctaaattttaataccatgttcatccttatttttcctctaattcttatttgtgttttgttaatcttttcattgcaaattgtttgattgtttaaagtttagatgatttttttttttgaatgaaaaggat

SEQ ID NO: 51921 - DNA, 635 bp, Cannabis sativa
agagtgtataaggttacccaaaaagtttgaaatcaattagagaagtcaaaaaagatatttaagcacaaaatgtatgtccaagcaacatgtcgcctatcgcctggaacacaatgcatggggcatggaaaatgtataaaatattctctgtcatatatatgttctcggcgacatgtcgccttagagcactataagaaaattttcaacattgtattttagtctaatttatctgttttggtatgaaaaaaaattagtctaatttattaatgagaaattatttcatatactattttttattttttttttcaaatttacggtttgagttattccagaggtttgtgggctgctatacagattttggttgcaatttattaggttgttttgttaattgctatagaaacttctgtatgtaatcccataaaaatagaaaaaaaaaactattttaaagtataaaaatataaataaaacccctttattaattatttagataagtgccgaaacactttttttagggttgtcatattaatatttctaataaggctaattatgaattttttcccctcgaattttgatacgtaccaaatcatgctccttgaacttttttggctattttactgtttcagtgattgtttatgtac

SEQ ID NO: 51922 - DNA, 2794 bp, Cannabis sativa
tcacccgccagtatttccgatccaactgcaccttctgctgctactccttcttcttggaatccgttttctcattctctgacgtcctcactcacgatcaaacttgatcgtaacaacttcctggcatggaagtctcaagttcttcctacggtaattggtcatgagcttgatgagatcttgctcactgatctttcaccccctcggtccttggttaatggtgatccaaatccttccttcactcaatggcgcaagaaagatcaactcctcctttcgtggatcagatcttcaatgacagaaggaattttgggtactgtggcaaactacactacttcgaatgctgtatggaaggcccttgagcaaaaattttccagccaatcaaaggctcgactgttgcagctaaagagtcaactctccaattcccacaaaggtaacaagtccatttctgattatgttgataaactgaaagtaatttgtgattcccttgctgttgctggacactccgtctccgatcttgatctggttcttcatctattaaatggactcggacccgaattcgattctgtggtctctggtataacttctcgaggtgacactttgtcccttgaagaagttcaagcattgttgttggctcatgaaacaaggctggaaaggcactctacaatgttggatttatcgacaaaaatggcagccaatctcacctttggctcaagaaatggaaacttcaggttcagtcatactgctgggagaggatctggtgcagaatcctcttcaagatttcctaatcgtggcaatcagcaaacctataatccaagaactaccaactctaatcgccctttgtgtcaagtctgtatgaggtatgggcatactgccccaacttgtcattataggtttgataaaaactgggttacgcccaaagctcccactgccacttctcaacctcaagctcatctcacagaacagtttgttgactatgaccctgctgcctttgttactaataccgttcctgattttggcgatgatcaaggatggtttgtcgatacaggagctactcaccacatttcctacagtgagactcctcttgatacttcggttccttactcaggccatgaatcggttgctgtaggtgatggtaagagactcattatttctcacattggtaaagcatttctacctgccaaaaactcttcctctttagacttgaattcagttttacatgtgccctctattacaaaaaatcttattagtgtttccaagcttactaatgataaccatgtttttcttgaatttcacaaatcttgttgttttgtcaaggacaaacaaaccggggctgttctagtcaaagggaagcttaaagatggtctttaccttcttggtgatgatggctccactctgtcaaacacatctgtccagtgtcatcttgctgagtctgaatgtaccttactgcctaatcaatgtacttctccactgtgtatttcacattgtggttcaaactcttgtaattcgtttgatatcaataaagattgtttttcttccatgtctaattgtaaggctgctgtttacaattctgcatttactcatgatatcaatgtgtggcattgtaagttaggacacccctcacctgctatacttaccaaaatcttgacccaagctcacattccacactccttaaaacacctcaagttctgtactgcctgtcaacaagggaaaaatcatagactcccgtttcccttgtctacctctagagcaacacaaccattagaacttattcatacagatgtgtgggggccatcacacattgcttccaaagacaattacaagtattacattgtcttcatagacgattttagtaggttttcttggatatttcccatgactgtcaagtctcaatcctttgaactgttcattcaattcaagagtttggttgaaaaacagttcaatcttcctattaagaaagtccaagctgatggtgggggagagtatagagtatttggcaaattcttgagggaccaaggaatttggtttcaacattcttgccctcatactcatgaacaaaatggtagagttgaacgaaagcataggcacataactgaaaccggtcttactctcttagctcaatcgggtcttgatatgacttattggtggcatgcttttcaagctgctacctatagcataaatcgaatgcctacccctgttttacagcacttgagtccatttgagtgtttatttcaacaaccacctgactatggcattctcaagacttttgggtgtgcttgctttccacatttgagaccttaccatcaccacaaacttgagttcagaacagaagagtgcattttcttgggctactctcccaaacacaaagggtatctctgtgaaaattcccaaggcaggttgttcattgctcgaaatgtggtgtttaatgaactgtgttttcctgcaactcgagcaacaataccctctcaggtacattctgaaccctctatatttcctacagcacagttctctaccactggtcattctgcagtatctaatcctgtgcatcattatgttttcccacatgttttgcctgagactcatgatgcatctgcaccagcaagtaatcatgctccagttgtccatgacgcatctgcaccagcaagtgacaatgccccagttgtccatgatgcatctgccctagttgttccagttactgctgtgcctgatgtcactgcaccattttgtcatgactctcaaacacctgatgttgctgctcctagtactattgatagcatggtgcctgctgctgtttcagatgttt

SEQ ID NO: 51923 - DNA, 1674 bp, Cannabis sativa
tttacgtgcctcggcacgtaactcctacctagtatatatatatgtgttaatttatataatttagtgacgtgaccgcgtatgtgattagatggtcaagaacgttgcatgcatgatcacctaattgcaagtatctctacaatcgatcgagttagataagtcacaccattatgattatgtgccactattaatgtcatagctagtataaattatatttggtccaccataaaactaggaataaaaatcataattaagatttatgctttagttaaacgccaaaattaacaatacaattgcatgcatcctttcctagtacaataaatttaattagcacacttgaagtttaatcaagggcctaaatggacatgacaaattacataaaatactattttttagtaaaaatattatatttttacgtttaatttttttttatatatatatttttacagttttttatagaatcaactcgaaaacaacaagaaaattacataaaagtaacataaaaataatatctaaataatatcaaaacaaataacaaaaaatcaacaaataacatacaaataacaaaaaatcaacaacaaattaataagagtacagcataaaaagaccgtattttctgtaaataaaataaaaaaatattgtaaaaatatataaaattccgttaaacgtattttttataatttttttattattatttttgtgtatttatgaaataatccctaaatttatcccgggaaaatttgtcttcatcggctactatatgacctctaaaagcccaattaggaatttaggattacgattaggattagcatattttaaaaactttttgttttaccctattcattttttattttattttaggattagggtttcaaaatgtcatagaattttttcctcttgtttaagttttgtagtatttttcaaggattaatgttgttagggattggtctatagaatttttcaaatgagggctaaggagaatttttattttgggattattttagatttacccaaaaaaaaaattgtttttacggaattttgaatttttatttatatttttacaaactttttttcttacaaatcattattgacatgttgttctaaaaaaaatcattgtccaaatataatataatattgtgacaatttaaaaacaacattgaaacaatacaaaatcgtaaaaatataaataaaaaatcataaaaatattaaaaaaaaaaattgtttttaggtgtatttgtaaatttcccttatacaaaactttacaaaaatatgcacacttaaggggtttctttttcgtagctctttaaattagagttgatgtttattggatttattgttatacctccgtctgatgcaactttcggacaaccacccagcaaccatcgagaaattttcgtctgattgaaactttcgtctgatgcaacattaacattcggtcaaccaccctacaaccattgtctgattgaatctttcgtctgatgcaaccaccgcgcaacccgcatcaaccaccctacaattgtctgattgtgtaagtgatagtgtaagtagtattttggtaattaatcatatcaatggtataaatattgtccacaccttatagaagtatttttataaataaagtgtcaatgtatattttctatgtaatattttttatttatatcttcttttttttaaaaa

SEQ ID NO: 51924 - DNA, 1238 bp, Cannabis sativa
taaaaaataaaaaaaaaaatgaaagaaataaataagatatataagattatgatagcaggctaaatccagttatatatatatatatatataaatgagtacctgagggtcgagttattaagagagttgaccagtacttaattgacaactttatgaataagtggatttattatcaaagagagagagaaaattggcagaattaaaagagagagaaaaagaaaaagagagagttatcattattgaccagtcaataaaaggataaatttatcaatttttacttttattaagggcaaaattgtcttagaactatcaacttattaatacacttttataatagtaagattagtaatatttggtacaaatataagatatacccatatcactaaaatttaaaatattattatcaataaaagtattttaagctatattaattttattttttttaaaagaaattaatcacatttacaaagtatcaccattaatataaatagaaaatcatattaatcaatattttgtttttacttatcttttacataataagagaaaaaatatcaaaaattaaaatatttttattatacatacagaaataataatctttacattgtcatatgatcatcatatcaacaattttatagtacataagttgaacaataaagatggcatattatctctaagattataaatttcatattgctagacttacagtacaaaacaataatgatagatttggacaacaacagatacttcccctctaacagttttattatctccatcactatttaattatattcagattcattaggtacgccgtattacactgtattgtattgtataatattatattaaattatattatacaatatttttatgtacaactatatgtggtatcaatttttatggacacctaattagtttactgtccaattttcctaaggcgttccttattcatacaaatcattcagccaatatagctacacatgaattagctgcgcacgcacttaggatagatggtgagctaatttggagggaggatcttcgatctcctttttttgatatactcaattttttttttcaatgaaattttgtcaattgttcaaaaaaaaaatatttaatagggaaattatcccatatcctattttttaacttttattttttattttttttcaaatttacagtttgggtttctaaagtagtttttccggtggtttctgtgtggattgctatacgatttttaattgcga

SEQ ID NO: 51925 - DNA, 894 bp, Cannabis sativa
tttttttttttgaattttcgataaaataagttaggtttggggtgctttgaggaaattgagttatgtggtattttggttggtttagaagttgtttaaaatacatgtttgagttataatttgggttgtaattgaagagtaatgcagttgtattatattttggtcaaagtttgagtttttgaaactcaaggttactttaatggtgatttcttatttattgtgaaattttgtgatttgagttgttgtattggtttgtaattagtgtataaacgtttctagaaatgttggtttggtttggacatatggggaaaaagagaactcaaaaatttttgagttgggttttttgtcacagaaccagtctaccggttccatgaatcggttggcctaaaaaattggtggatcaattggtcagtcttggggtagctcgatttttgtgttttctttatatttaaggtattgtcaagctatttatcaatagagaaacttttaattttgactttaagtcatagaaagcattataatatgatatttactagtttactgctaatgtgacataaggcattggatcgtcgagcgatttctactcaaatcggcacacctaaattaggaatggatgtaaaaaaagtataattatacttcaaagcatgtctatgtgtgacacagtgattattgtatgtaataaaaagttataactctattaaaactgttgaaaggttttatatgtaatggttgtcttattagacagcagtattaaaaatgattgtcttttcaattttgattaaatttgttactgacgtttttctaggctatgctatagggaataatcgatgacataaagaccctatggcgtcggttattataaaaaaataatttcatagtgcttcctatgatttatta

SEQ ID NO: 51926 - DNA, 636 bp, Cannabis sativa
tattatgaagtgattgtaaacgcacaaagctggtaccaacaacagaaaatcaactaacacaagttggttaagaacctaactaaatagggcttagcaaccactaacaaaaaaaaaactgtaacaactaatcctaactaataatattaggaagagacagctaagctattgctaatattaattagctctcattaatagatattaggaacatggcatccattgcaatgttatcagaaacaactttagcaagtgtgtttgctagtttctttctatagattataggcttaatttcgtcatatatgggctgaggctgttggagtttatacactgggcctagtcctagttcagttgggtccacaatatattagtttttctaaagtggaatattttgggaaagtttacgataatatacactttttctatttaatttacaataataatattaccacttacatgccacgttagctaaatctgatgtttttttcctgtattttgaaaagtaattttttccattagaaaaagtaattttttgattactaataatgttgataagaaatcaattagttacatttacattttttttttgtatcatataatttgatatttattttagttacctctaaaatttatttatataca

SEQ ID NO: 51927 - DNA, 1161 bp, Cannabis sativa
aaaaaaaaaaaaaagttaatccaacgacgacatgtgaaacaataggctttgatctccagcctccttgaagtttcattttaccgtgattttctttattcacttgtaattgtgaaaaagaaagcataaaaattagattaaaaaatgtagagtatcacatgagaatgagagaaaaaaaaaaaagataatttaaattttttaataatgccttttttatgtcacaataaataattgttatataaaaaattcaataaaaattggaaaagacatactattaaaaacatcaattcaattattcttagagagataattagaatgtattaaaaaagatgagaaataaaaatttgataaaagatgataatagaaaagctaaaaaaaaaacttatacatatatattaaaaatcttctacaacacgtagaggaaacataaactgttttgaaaataaaaaaataaataaataaagtgttagaatatttacatattacagagtttaataccaccgtcaacaagcatctctaatagatgtgtaaataaatggtgaaaagctaaaatataactcattaacaaaaagtatgctccaatagtgtgccaaaaaatgatataaatttggcacatagcaaattttgtgttaaatttgtcacaacatttgttatgatataaaatttacaccacaataaatacattattttttatttatatttaggtcatttctattattttattagtatatttaactatcacattaaattataaaatatttatattgttttttattatcttacatattaaaataataataaaattgattataaaattataaaattttatttttataataaaacattaattagatattaaattttacatcaaaattttgcaattgtacattggagttcaaagctaaaatttagtgtaaatttaccacaaaattattttttgtgctaaatataacacaatttttttatctccccttggagatggtataatcaaactaaggcattattacctaatattaaagtgaaacaatttgagataaaattactaatattgtaaagactgcatatggttaatgttttgaattattaaataattaaggtttgtgtatgagattatgaaatgtatatcttggaaatatatttattattatatatgttattatgcta

SEQ ID NO: 51928 - DNA, 1115 bp, Cannabis sativa
ctcttatttttaatatggttgcgacctgagaaccctcccacacaagaacctatccaaaggacccacaggtacctgtatactttcaaaggcgcgccacataaaaagcttaaaagaagtggcaccattcgaactctaaaaagcaactaagtgaggactatatacacactcataatcatttttttttctatatttatattttatgtgaaaaaagaggatcaggtaatgcacattctatccccagtctgtttggcttaatagtaatatcatagaccaccgagaagtaaattaaaacttatacagaatccttaagatagttatcagttgagaccctcggcctactcaaaaactgatatattttttttatacatatatatttagagtaatgaattgaataactagaattaaatttgatactgaattgatcagacagttgatcaaatacattattttccatgtttttttttaataatgatgagtaatttataagccaaatatatataagccgttttatttgtaaatatcattttaataactattattgttgacattaaagtcataacttcactcattattcacctacatgtaataaataaataatgttttaattattagtaaaaaaaaaaaaaagaaaagaaaagatgaagaagacaaaattgaagatgatctagtaatttgtttcgtattatcctacaaataaaaataaataattaaataaataaataaaatgtactatgctgacagatgagatatgaaacagctttatcgatacatggtgaaaaaaaaatgaaaacctctttcttcttttaatattatttattttttagggaaaaaaaaatatactattatattcttttcaataatttgtcatcaatatatatataaaatattatttatctttcttcaaacaccaagataaaagtaaaaggttaattataatttttatttttattatattcaaaaaaaaaaatttagattgttaatttttttttaattattgaaattttttgatttaataatttttattcaattttaataagagaagtctaatatagattaaagttcgagaatataatttggtatttgtgaaaaaattgagagacataatttggtagaca

SEQ ID NO: 51929 - DNA, 822 bp, Cannabis sativa
tatcgtcaaaaatttaacttaagtatttatctacaattgaaagttaaataaaaatatttacgtcacaaattattctaataaaaataaaaaaataaataaataagaaatgtggtggttatgtaggggagtgaaaaaaaaaagatggcgtcgtaggaattgtttttactgctatctttttccgtttaggttaagggttcgaaacccaccacaactcctcccgaaataaattaaagcatttgcccttctaaaagctaacttgttgtacgtggtgtcatctattgatatataatccttaaaattattaaaatgaccgaagatataagaaaaaaaatctacaccacatgatcgtcttagcaaagatgaataaaaaaaagatggcggctggctaaattggttcgtctattataatctttttattgtttacatttttggtttaataatacaataatgacacgtgtttttgacaatggatcttcaatttaaaatattaaaaataaataaatagaaaagggcaaataagaaggaaggtagtgagtagtgtgagagtcgttgttgatggtcactaatattatgatcccatgccgtaactattcatctctcttcaacttcaaccttatccactttttttctcttctcaattccttttctttaattataatataattacttaactatataacaaggttaattaagatttttctttctcgaattagttttaaaacttaaaaaatcctatcaaagtattaacaaggccagtataagctgactactccgtagtacttagggcccatactttttagagcctaaaataaaaaatgaaaa

SEQ ID NO: 51930 - DNA, 2159 bp, Cannabis sativa
  modified_base (97)..(108): a, c, t, g, unknown or other
tgtacagccctagtgaggatattttgggtacaatacatataaaaagatgtatgtttcaattaaatataaaattagagataaatttgattaattgatnnnnnnnnnnnntatttttcaacttacccctatttagggcatcttacaaaaatatttatttattgtcatttttatatttttattgtcacatttttttatatatattttaactgtactaagtttttaaaaatactttttataaaaaaaagaaatattatgttaaagtttcaaaattacaaaaaactgtgtttcagtaaaataaaaaaacaacgaagaaataactctaaaacaaattacaaacaatatgaaaacaactataaatcaacaaaagaataatttcaaagcaacagaaaaatagcaaaacaatgacctaattgcaatatgcaaaacaatatcaactcctgaatatattttattacgattttttttttacttaattttgacaatttgatgtatctttttgtaccactatattttttttttttatagaagttgttattactttcaactttctttttttttcttttcctttttgagttagtgacagttaaaatgataatttatttttaaaaaattaaattaataattacattaataatagaaataataaaattgaaaaatggggtatgtaatataatagataatatataattaatatattaatatctattactcacattgtgtcatttaaaaaaaataaaaatcttatcattgtatttgttgacctcaaaaagtaatcaatcgacagcgagattgtatgaatctgatgtttgtcacgtgttacacaattagaattaaaaaataaagaatacacaaaattttatagaggttcgaccctatttgttagcaggtaatgacctactccccttttagttgtattgatactggaggaaaatactattcagatcactataggtgatctgatatagctcccttaaggatacaaaataagaatcaagatgacaaatcccaagtgtttgagaatgctatatggggcatgtgagataatgaagaagagagagaggtatcagacttatagatttaggcttagagcttggaggctagaattagacttagagatttctaggttagagttaaggccctttatatagtagagcttaaccctaatttacaactgaaatccttagatatttgtatattaaattgattaattacaaaagactagaatgcctttaaatctagatatttttcagctactttattgggctgttagggcccaattcccagcccaagtcgcagtccacgtgtggaatcgtatagaaaattctgccaagtccttttctagatggccaggcacctgcagggatttggttggccaactatgtgttgtccagagggtggtcggcaataaggccggccaggggtggtcggtcagctcctgcgaggaagctggtctgtcacttgatgtctcatttgagtgtcgggatccatattggctgagatactgacttggccttcttattggtgagttgtgttgccacatggtgctaattttatccacgtaaacaaagccacatcaggtgggaaaaaaatcagggtaacagtattttgataaaatgtgttaaaaaaactaaatatatgtatctaaactacaaagcaatatacatacaacaaaaaaaaaaaattactagaaaaaattaaaaatacataccataaaaaatacatataaataaaaaacaactaaaaataactgttgaacaaaaaaatatattttgaaaaccacttaaagataactacataataacatattaaatgcacatatataacaaaaaattgtgtagaataaatttaaaatatacaccataaaaaatgcacataaattaaacaacaattgtacaaaaaaaaatacataaaacaactataaaatgtctaaataacaactataaaataccaaaaagacagctataaatcaatagaaaaataacaagacatcaaccttgttaaaatatgtaaatcattcataaatcaactctgaataaactacaaaacataaaaaaaaaaaatatattgggtttttttaagttttaaccaaaaaaggtaacaatattacaaaaatattttcagctggccaaataaacaaatatacatcccaaataaaaaaa

SEQ ID NO: 51931 - DNA, 1039 bp, Cannabis sativa
atttcatcattccaaatttgaccattccttgtttattcaacatacttcaagtatattcatagccttactcatctatgtcgatgatataattgttgccacaaacaacttgcacgagttagcacaattaaaagattgcatcgacgctcaattcaaattcaaggaccttggagactaacgttttttcctaggccttgaagttgactgtactgacaaaggaataccagtaagccacagaccatttacactacaactcttgcaagatacaggataccttggtgtcaagcccgtgtccactcttgtggaaccaaatacaagactcagcagaaacaatggagaacctctccctgatcctacatttatcgcagtcacataggcaaactcacatacattacaatttccagacctgacatcaaatttgcagtgaacaagctcagccagtacatacaatatccacaacaaccacatttcaatgctgcctatagaaatcttcaatacttaaagtgatcactaggccaaggacttttcttccatgctacagctccaacactactgcaactctctgcttttgctaatgccggttggggttcatgtcctgacactagaagatccatctccaaatattgcatttttctcggcgactcatttatttcttagaaataaaaaaagcaacacactatttctcgctcctctactgaagccgaatatagagtacttgccaatgtcacttgaacaacaatggctcactacaataatcaaagactttaatatccaagtaccaaaaccagctactattttctgtgataataaggcagcaattcacatatctaaaaaccctattttccatgagcacatgaagcatgtcgaaattgactgccatatcataagggacaagataacaagtgaatttctcaaattaaatcatgttacagcaaagactaacttagcagatatcttcacaaaataactcttcccttcgaaattcagcacaattatatccaagatgggtgttacaaacctttacactccaccttgaaggggc

SEQ ID NO: 51932 - DNA, 2444 bp, Cannabis sativa
  modified_base (2191)..(2194): a, c, t, g, unknown or other
gtatttcgatccttattcatagtgtatatatgtttgattaattccgcacttaatacttaaacatatacatttcagtttatatatataaatgtctaacatacgtacctttcataattaagaatcccatgcataacatttgcttaattagtctctcaaagtcacatttttgttttccttatatgtgtgtatatatataatatataatacaatgtatatacaaatacccttaattaattaataattttcgatcaattatgccatttgtggatgaataataaaatagagaaaatatacctaattgatcaattaaaaggttatacaaatatgtagtgaggaaaaagctcatttgttgattttgtcttttctctctataaaaatttttatttttaatcgcaacaaaatttatgattaaaagtaaaaaaattgtgactcattataaatttttatttttacgttgtgactaaaaagtcagtgattaaaagtattagtcacaaaaattgtaatttattatgattaaatgtggttttaattagtcacaataattgttgtgcaaaaattaaattagtgacaattaataactaaatattatgtttaatcacatgtaacttttttattgtgactaaaaggttgtcactaaaaattatctttttgtagtatccgaccatctaagcatcataataaatcttttcctaaaaccatatcatatgaattataaatatatataagacacacacactcaattagaacttcttttctctcccacacacatatcttgttttgtggattcataacttagtatcattactaaaaggtgtagaattgctttgttagttggttccttcataaggaaagaaataaaaagtgttcttcccactacaaagttcaattgcttatatacccttttctcacttcccaccaataatagaggatccataattcaaaagtgcctttttttcattttttttcctttattaattaaatatatattttatttattttattcaagtaattaggattgctagatcaaccaatgactcccatattgtaattactactcttatccttataatgtaattttctttttctcattcttctaatttgaccaaattggaatctctcaaaaaggggtacctttttttattttccttttttctcacacaaagttcaaattggcaattgctcaagcaatgatcatgggtcggttttaaataaaaaatatatatattatttaatttttcttccttaaggcaaaaatttgatggaatattatgagacaaaagggcccattttactcttcttttttttcactagtgcaagccaaaaccccaccaaagcttttgtgacaataattataaatatatatatgatcataatatataataattaatcatgtacatcaacaaggtcaaactttaagcaaacacaacaacacatatagcaacaaatcacttcacagctgggaagagagagccctttaattacctttttatttttattttttattttaaagaaaaaaaaaagcttttggtagcttcttgcactcaaagcaagtagactttgaagtcctcttcttgtttttttttttcttttttgttagaatttatataaataatttttatatttattatatataaaggaaagtgatattgctttttgataatattagatgaattgggtaaaggagaagcaccaatcaaggcaaaaaaaataaaaggtttgatgactttggtttccccttttttctattcctttttgctaaaagaaaaaaaaaaacaattgtactatataatataaacctaattatatatatataaagtgatgttaaatattttgtaccaaccaatatatatagctaaaataaataaggtgtgattttgaagaagggaagtataattaattctgatgaaaaaatagtgactttgttgtgatcttattgggagtttctttattctgaagttttcgagtaatttctttgcttttctatgcaaaaatagatgcaggcatattttgctttaacataacactttttaagtaaaattatatatttataggaccacatttctcttctctttatatatatagataattatgactgaaaatgcaagcataaaatatttttgtggatttttttgttttgtaccaaattcaacttgtacatacatatactatatatatatttaatatatatatnnnnatatatatatatataataaagttgatcaagaagacattccaattaataagacttccatatataatacagatcattattattttgtatgaacatttttatatattttttaatagaatattatttttatattttaataagtactaaatggtaaaaaaaaaaaccaactttgtagatattgatcgtataaatataaaaataaaattctttaaattttttattttacaatcactaattaagtcttgttataaat

SEQ ID NO: 51933 - DNA, 788 bp, Cannabis sativa
cttattctagatccacattaacttctctattcctgaagattaagtcatacattaactttcctattcctgaagattaagtcattatgggtacctagaattgtttaatgtgtaaatttgtaattaaatccatatgtttgactgaactaggagactcacaaggagttctctagcttcttagtctatacaatttacttgggaatttagattagtgatcaaagtgatttgtacactttataaattttgtccaagatagttggagataccccaactatcataacttacttccttttagctgcctaagtccaagtccagctagctctctggtaaagagtatagaaactaattgttgtaactaactttaactaataccacataatttttttactaattttaaaaatactacatttctttctagacatgggcctattttttttccattgacccaataaaatttagaactggccctcgttataactatgcatataaagtatttgtatataaagattatttttgaaatacttaaaaaaaaaaaacaaaaaaaaaatatattttttttaagaaattctaatttttttaatatttttataaacttttttttttcttagagactgtgtttttaggttgtttttaaaaaaactattatttacacatttttacgttgtgggccttgcggctaaatgaaaagggaaacttacaaaaatactgtttttttcccaaattttacaataatactgccacacggcaattatttcttttttactgtccaagccttttttttttcttttata

SEQ ID NO: 51934 - DNA, 1251 bp, Cannabis sativa
tgtaatgcccaggcataccacacttaaaacatccttgccctctacactcacccagatggtgcttcttacagttgggacactatggataattgtatcaggttttagaaccaccatgacggttgccacgaccttggttccctcgaaacctcttgttctgacttaagccactagatgctgacgatgcctttctcttctgattagttgttgagtcactaccacccctaccataaccagaggtaggaggagtagtggttccaccaacaatctgtgtccttcggactcctgaacgcagttaactgtgccatctactcgtagttcttttcccaccatgtacgtcagcataggtgctataattatcatctattgtgatcatcatgtcgtgtttgttattgagattcaacctatccaaatacttttctttcttactaaaattaattggcacaatttctgaggccaacctatcaaactgggttgtatactctgtaacaaacatgttctcttcctaagtcagctgagtaaattattttctttgtgcactatggaccgcctcgttgtagtactttgcattaaacaactcctaaattcttcccaggtaatagcagtaacatcctgaataagaagcatcatatcccaccagattagggcatcctcctagaattggaatgttgcacaagccactctgtcattgcttgtgactcttataaagttcagaattcgagtaatgacaatcagccattgttcgactttcactgcatttcgacctcccaaaaatactagaggtgcctgcttgcaaaacctttcgtacagtggttccatccagttcacaatagcaaccggccctacgtagaaaacaagggtaggagctacctacaccacaggatcaggcattgttggagcaccctgctacctcagacatctaatctcttcatctttctcataaattttggcttgcatcgcttcgaacctgttctcccaatcttgagcagcctgcaatgggttaccatttccccagccacgtgctctacctcttgggcctctacctcggccacgaatattcgagggaaactgaactccctaaccgccactagatcgaaccaaattattctagcttctcgtgttccgcctggcatccattttaatagattatcttgaaaaactaagaactagcttagtcagatcgcgatcaagaataatttactaattaccacttactttaaaaataaaaatatgtgcctattcagctatcaggat

SEQ ID NO: 51935 - DNA, 1307 bp, Cannabis sativa
  modified_base (45)..(63): a, c, t, g, unknown or other
tttcattgttttagaattcatagtaggatgttaatgaaacatacnnnnnnnnnnnnnnnnnnnctggtaaaatatatccaacagttggcatattggtctgttgttgttggatcgtcctctgcctcgaccacgaccactagggttgtaggagcggccaccagtaggttaatttgggatgtgtgtgagatttctaatgttgaaagatctgcgcatctgtgtggcaaggtgagtagcaggcatggaagagtcaccaggggttgagttgagttgttcaagtcgaatatcttgactttgcagcatatactgcacttcttgcagagtgacttgatcatgtcttgaggttaagttcataacaacaaactcatactcatgaccaaggcctcccaatatgtacaaaatgagatcatcatctgaaattaattgccctgcagcagataaaccatcagctatgcttttcattttcataatataatcatgtatagttagattgcccttttttagggactgcaattgaaatcgcaactataaaattctagccttagaacttgtagtgtagagatgttccaaagtgatgcatagatcaaaagaggtaagacaacttatcacacgtccaaacatggattcgaagatagagttgagaagctagctgagtatagactgatctatacgtctccacatagcatacctaaggttgagttgatgaggttcgccaggaatagggcctctgaatgtgttatccacatactgtagtggacatggtttggttcccagtacatacccttcaagatcatgtgcacgaagtgcaggaagggcttgcgatctccaatatgggtaatttgttctctcgagtttgatggtaagaggggctaagctttggaaaggagaaggttgtatggctgtagctggggagctgactggtgggttaactagttaggcagtgggcgatgcatcaacagggtttgatgcagagaacatttcggctgaggttggattttccataggtaggttagaggatttttagctttgatacaagctaaaacagagaaaaataggaattgataaacctttgtatattaccgagtaattacacttcactactctcaatacaatagagaatgtttctttttatatacacagagaatatactagaagctatcacactattggttgatacaataacagaaatatattctctatggcccacacaatgatatgataattgaaggaatcatttttccaatgattgataacggtaaatgaattgtgcctagtaagcatcattgattttagggataagttgaaaaata

SEQ ID NO: 51936 - DNA, 865 bp, Cannabis sativa
aggataatatgtttgttgattaggaggagttttaggaatttaattagtttgggaaacaatttgtatataccaaatatagatgatatgaactgatttgagaaattttttaatcaataaatttcatatacataatatgagacatcttttaataaataaatttcaaaatacaagataatatgctttctatatataatacccaaagaaaatagggaaatttagatgtagagtccgtttttacaattaattaataaaaataacgtgattgatttatttgtaaatgttattatttgtcttttaccttatttattgaaatctatttctttttactttgtatttgtttataataacccacttaccgtatcttatcgactgcatagaaagaagcatttctgtggtttatttactccaactcatttatttattaaatgttgttttatcgttccaattttatcggatgcccccgaagggccatccgataattaacaacctttgtaagaacatcttcttcttcttgaagcttcctacaggctttgctctggttttgcaccaatattggctttgtggcgtccaattccttccttcccaggtttgtgcattcttaagtttcgttcctcttgtcttccttttctggttcctctttgtttgtgcatttattgttctatctgtttcctctcttttgttctcctttgtttctactcgcctctttctccttttctctgatttttgatttggttctgttcaccctcattaattttcttggatttgtttcccttaatacgtcactctaatcattatgcattttcccctaatttctcgagcatcctcactgttcaatgccatctctctctcacacttgcatttaatt

SEQ ID NO: 51937 - DNA, 951 bp, Cannabis sativa
ttaaagtttgacatgatatatatgactgaaagaaaagttgaaaggagagtaccaaatcaacatcaattaagtataataattctgacacacctacatctagctatttccttttcaactattgtaggtaagtgtcattcacttttattagaagcaatcttaatgagaaagttattaattaataaaatgttagcatcataataaaatgttattctataattaattaataattaataattataataattattaaaataattaaataagacttaataataaataataaattaagctgcattctgaacatatttaaagcaccaactgagagtttactctccataatatacaaaaggcaaaataaataatcttatactttttttttttactaaaagagaaaaataatctcacacttctaattggaataaataatctcatatatattaaactattttggaagaagattattaattatagtcccaatgttcaacaaactttggatgacaattaataatcttaatcttaatcctaattctattttattgtgccaaacgacgaatatattattaagagttagttatttacatgttttaccacggtgaaagatgtcggtgtcacataatgtaagtgttgtaagttcatattcgtgttttaaggaatacgtggatttcaaataaaagcattaaggtctatcactaagcccaaataatataaattgggttgagctcatgattcattctgtcttccaggaaaataatacataactcgcctatatgagattccgcaaagcctagtctgtatttggaaggtctatctctgtatatctggaaaaagtcctcagtgtgtatctggaagattatttttcctatttttttgtcaaatcgcacaagatcataaattactttcccaaaatctcgaacaaagaataatatcttgataaaaagggaatatgaataa

SEQ ID NO: 51938 - DNA, 2226 bp, Cannabis sativa
agtgaaaaatcaattcctaatttctctctgcttgttacgctcttttctcgttaaataaattaaataaattatctaagtatatatttaattcaataattaaaagataattaattaattaattaatttaaattattataactaataaaataatcatataaaattaacatgaatctttatatgtcaccctacacgtgtgggctaaacctacacgtgtaggtcatattttaagattgaaaattaatttatcaattttaccataaataaaatttattatttattctaccaataaataataattaattaattctcattaatcttttatttcacaaggattaaaataaatattattttttctaaaataatatatatctttgttcaatattatttaagaataatattatatttaactaattaatatagtttatctaataaaactaaatagttaaatactattaattatacaattcataattatcataattattcaaaactataatttcataaattatgattttgcccttaagaatttatttctcaataattaattctcactcaaatttactcatcaaataaaaccttctcctgtacgatttttgtatagaggtgactcgggaatcatagacctatatatatatattttaaagctctaataaacacttaattatttttgatctcgtcaatagaataatccagtttattaatttcattattactctactataaatatggaattgcactctttgactatataaaattatatttacagaattcttacatgtagtctattgatttgatataattaatataagtagttcgccctccaattattagttcataattagagttggtcaaaattaccgttttacctttctaattatctcttaactctttatataccattaattcaatgtgaacaaaatctataatttacttttaagattaattttctcatttttatctaaaactaattaataagaatttatttttaggaattcaaaactttttaaattaattaaatttaatataaaatatagttttcaagtaaataattaaaaatttaatattatgtcaaatgaaatgttgacaagtgcatccttgcttacacttaattaacaaatttttgtggcaattaactgcaaaaagaactaatttgcaataaaaatgtagcattaagtattttgctgtcaaattccttgtttaggaagttaagtgtaaaagaaaatgggattttgatgcaaattttcctaaatattaatggttaaacggtctcatttaatattttattaaaaaattatttattttaaatatatagctaattataattaatttaattctaaatatgaaattttttttagtgtaaccattaaatagttatatttctaatgtaatcattaagtaatcactcttatttaaaatataattttagtaatcatatatctaacaaaagaaaaagtaatcaaatggaacaataaatttagaagagagatgatctatataacgtaatacaaaatatgtaatagacttttcaaacattaatttatcttatatattattatatataattaaacatacagtacactataattccattgccatatgaaatttctctatcattgagttgatagttgaaacttattgtgttacaaatatacgagagtacatagtatatgttttattgcagtatattattcaaaagtattgaataagtcataatagtataaatatatagatatttaataatatttataaggtggaggaaaagtgttcacattcggacaatttttttgcttgtgcaaacaaagcagaggaggtggttaattgggtgggtgagttggcgattaattaagtggatgaacaaggtggtggatgtagattaggttaacgaggaggagcagcagtggtgatgaattgaattagggaggtagacgtgaattaggacgacgtgggggaggtggaggtgaacgagggggaggtggaggggaaaaaccgagtggtggaggtgaaggtgaacgaggaggaggtggtggggataaaccaggtgggggaggtggatgtgaacggggaggaggaggcggggataaactaggtgggggaggtggaggtgaacgggtaggaggaggcggcgataaaccaggtggaggaggtggaggtgaacgagtaggaggtggcggggataaaccaggtgggggaggaggaggcgatgataaactaggtgggggaggtgga

SEQ ID NO: 51939 - DNA, 1108 bp, Cannabis sativa
taaccaatcacaaaatgacatgtcaagaggtgctaggtgttggtgcccaataacaattaatactctaaattctttgccaatgtaataattatattttgactatcaaaaaatatttttgatgtttataaatactgaaaaaatgtggggcttttcttttgccatctaacatctctatatgttagcaacttaaaatgctttaaaaatcgaatctatatggttttatagatgtaaagtaatttagagaaactttgaatataagaataaaaaaaaggtatagtactgcattttactttttttatttgagtaattaactgcttatcataaagttgtaattttgccaatcacctagaaaaattaacatcaatattatgcgagtattcaccaaaaaacaacaaatactcaaaatatgataagtaatgataattgaaagtgaacaacaagcatatgcaaagtagaagtaaaagataaaaaaaattataatagtttagtaagagcttaacctatttaatttatttttgcaaaagtttgtgatgtgtgaatcatatatctctttatatagaaagtaaatgttcttttaattacataaccagtcagatgggaacattatacacaatataattacaatatagacgaaataaaaaacatttgtaaattaaataaatgaaaaagaacagaatgttgaccattcttattatttaagcccgaaacatatgcgactatcttcattgcatattgacagttcatgtattagtctttggaccaatctaagtggcgcaggggaaaaacacttggtcatcatatatgtatattcgatttacgtagcgactatcttacttttttatcccttttactttattcattgttatatgcaatgtataattatgtgtgactagattctgtctcggtttttaccttctcccgtatttctatcatgtgaaaacacattatttatctgaatttatatccttaacataatatataatataattagttaaaatgtatattcaaaagtaattatagacatatatatatatatatataatctagtatactttatttctcaataaaagattaagtcaaagtgaaaaataattactcaagagaaagg

SEQ ID NO: 51940 - DNA, 613 bp, Cannabis sativa
  modified_base (26)..(34): a, c, t, g, unknown or other
gaactaacccgaccaacccaattaannnnnnnnnatttattaactcgacaatgagtttttttttatatatataatctatatataatatgatttataaacatatttataaaaggtagaaaattgaaattattatatttctttcatgatggttgatttaaactttgaatttaatctatatatttgtcttattatcacaattaactaaaatataacaattgaatgtataataaaacattagtgctcggtttgggcaggttaattcgaccaaaccaaccaattcattgggcgggttacaattttatttttttctttattgggtgggttgcacttagatttttgtaacccaatatttacgttaagttgaataaaatgtaacataaatcgtccaaaccaaccaaacatacacacccctatatccaatggtgtataaacacatttttttagctcatatttataaaattaaactccaatagtagtgtataatgtggtaaaaatttagcatatgcgtaaaaagttatgtaaaatttggcacaaaatatagcatggaccaaattttacatcacaataataaatatcactaatctattttctcttttgacattcattaatgtaa

SEQ ID NO: 51941 - DNA, 867 bp, Cannabis sativa
attgttgaattcaaaaatttatgtatgtccaatttcaggtgcttgatgtgatagaaagttcaaaagacatgattcggtacttgtcaaagtttgggggccacacgatttaatacatatcaaagtttaggggtatgattcggtacacatggttggggagcacgatttggtgcatggataatcagcctgttagtaaaattgaataaagttgacaaaaatccttgaataaaaaaatctcaatagtttaaacaaaatttttaatgatctgaaaaattcgaaggcacgatatagaatatgtgaaagttcgaaaaataaaaatcttaattagtttttattttttttaaaataaaatttgtaaatctataaataatatcataagtatataatttattaatttatttacaatattaaaaaaaggttcataatataagcttgttatccattaaattttgtaaataatatttagactaaataaaaaaagtgttattaaaagtatttttataatttgtataaaattttgtatttcctaaatatttttaaaatttataatgttatgcgtaatttttcccacatgattttatttgtatgtgtgtgttttgaagaaatttttgtgtgtttaattaattatctaatgaatatgtatgtatcacgtatttattattattattttatttttaaataaatcaggagatctattaattaataaattcgttcaaaacaatagaacgcacttgagaggaacaatcctccaactgaagcacacaatctatttagaaacaagagtctcttgccaagcaatgagccaacttgtttgcagatcgtttaacaaaacataactcaataaaagataaagccaaaagtaaattccta

SEQ ID NO: 51942 - DNA, 2302 bp, Cannabis sativa
gtttattgaatgccattgtaaagttcttcatggtatcaatcgccactgacctccgtctcccatggcttcccacgataacacttcctccactgctgctcaacatgatcctgctcctgctactaccgctgctgcaactcagtttcttccacaacaaactcagtcctggaacccgttcgctcattctctctctgcctctctcactgttcgattggatcgcaccaatttcctggcgtggaaatcgcaagttgttcccacagtaataggtcatgatcttgatgacattctattcaccagtgtcccacctccaagaaatcttgctaatggaactcccaatccacaataccttcaatggaagaaacgtgatcaactattgctttcttggcttcgatcgtctatgacagaaggaatccttgctgctgtggctacatacactacatcatctcagttgtggaaagctcttgaacaacgcttcacaagtcaatcccgtgcccgattacttcagctcaaaggtcaattttcccatattcgtaaaggttctttatccatctctgagtatgtggataaagttcaatctctttctgactcaatcattactgctggttctacaatttctgaacaagatttaattcttcaattgcttaatggcttgggtcctgaatatgactccgtagtgtcgggtattacgtctcgtagtgatgatctaactcttgaagaagtgcaggctcttctcatggctcatgaaagccggcttcatcagcacaactctcttactgatctaaatctacagatgcaagctaatgttgcttatggcacaccaagaaatggctcttctcgtccttttcagcaaggtcctcgaaatacaactcaagatcatccctctcgatctcttggcagaggcaatggaaggggattcactctcaataatcgtttgatctgtcaactatgtctcaaaacaggccataccgctgctgtatgtcactataggttcgacaaaaattgggttacccccaaacccaatcccactcatcatcgggcctatcttgctgaaatggacaatgatcaagaacccaacaattactctccacaggttgttcctgattttggtgatgattttgggtggttcattgacactggagccacaaatcatgtcaccaacaccagtgataatcttgacaatgctatagtctaccatggaaatgacacattggctgtaggtaatggtaagaaattagcaatttcacacataggctctacttctttgccctcttcttctcacaaatgtcttagtctcaattccgtccttactgttccttcaattacaaaaagtttgataagtgtttctcaattgactaatgacaatcatttttttcttgaatttcataaaaattcttgttttgtcaaggacaagaacactggccaagttctgctgagggggcgacttaaagatggtctatacttacttggagaaggttcttccatctccaaatctgtcttgcaatgcaaccttgcatatatgtcatctgatatgactcatgagtcaatttctaattcttgtaatactgatcccagtatcagttcttgtaatcataatacaagtaataaaaattgctcttttactactgatatagatggctgtactcattctattttccattcatctcttaataaagatgtgaacacttggcattgcaagcttgggcaccccaatgcccaaaccttaagccgattattaccccaattaccacacactggcaccctaaaagatttacaattttgcaattcttgtcagttaggtaaaagtcatactcttccattccccatttcacaaagtagagcaactcagccccttgcactaattcacacagatctttggggtccttcccatgatctctctattgatgggtacaagtactatgtacattttcttgatgactatagcaggtacacttggatctttcccctcaccttaagatcccaagcctttgaggttttccttaaatggaaggcattagtggaaaaacaattcaatttgcctatcaaatctgttcaagccaattggggaggggaatatagacctttcaaaaggtttcttgaagatcaagggatacattttcaacacccatgtccccatactcatgaacaaaatgggagggcagagaggaaacatagacatatcaatgaaactggccttactcttttggccaaagctggattgggaatgacatattggtggcatgcatttagttgtgctgttttcataataaataggttgccaacaagagttctagactggtcatctcct

SEQ ID NO: 51943 - DNA, 1736 bp, Cannabis sativa
cgatcttacttatcactttattacttgtgtgactgcgtatacttgcgtatataattttcacaacagtttcccctactcttgtagaagcaaaagctctctagctagcagtaaattgggctcaaatgatcaagctgcctgtctcggcggtcaaagctgtttgtaaaactttagtagataagctaaattcttataattggaacaatagtatacttgatgattttctatgtaacattacaaattctttatcttttagtcctatccttaagatatagtatgttagcggggatttgaatatcactgctcataatttagctaaattaagactaggattagatgaggagttaatttaaaatggttctttaccttttttttttaaatttgttagctttgtacctcctttttatcattgaagcttcaagtttttcaaaaaaaaaaaaaaaataatataataaaagagaataattcaattctattttttttgagttatcaatattaccatcgtgaaggataattatattactacggtaaacaaagtaatgtttcacattaccactctcttgctagcattaactcattctaaacaaccccatattgatcaaaaattatatctattttatattgcttggttttgtcatatatgtcgtttttctttattttttggtaagataataaatacaatatttaatgtattgatttctttcaaattaaaaggacaaaaaaactattgccaaacatgatagaatgaacaaaactagattaatttgataattatttttcgttaaccctttttttttaaacaaaatgcataattataactcaaacagtacaagaatttggcaaatcatgctcaattgcatgactagcacaagagggtaccacaccaatccacatagcacttgctttacaatctaaagcgtaattagctaacaaatgggtcgctctatcagcttcccgatacacaaaagatagcctcatgactgtagaacctattaacaacttcctaatctgaagcaacaaaccatatcgaactcatggcagctttgatcatcatttttttgcactagctgaacagcctccctacaattcaattccaccccaaacgctgacagacgtctctgcaaccccacctgaagtccatccctgatggcgcacaattcagccactaaaggggagctcttcgttggacaccaccgactggaagtgaacttaacactaccgcggtcattacgcaccacaataccaacacctgagcccactgacgaaccccaaacacatgcgtctacattaattgtacactgaccacagctaggaagtatccatcttgttgtagcacactgctcttggagcttcttctgcgacccagcatcaccaaaatcctgcatgtaccttccacagcattctaacacatcacttgctctaggagccgaatcaccatgaagtatggtgttccgaatagaccacaaatgccaagaaaccagtagaaaatagtcaaaacacatctacaaaccacactggttgtaatcctcccagaaaagttacaacatctcatgttttttgctgtttcatttgctcccataacctgttgcttttccaaacatccaggttaccccaacaaccccataaagcatgaaaaacatcttcgtcacaattctcagaacaccgaaaatatttcttctcaatttgcatacctcagctagcaagggccacctttgttgggatctaagaatgactaatct

SEQ ID NO: 51944 - DNA, 1265 bp, Cannabis sativa
ccccaaaatttaattttgtcccatataccttaggatgggcggtgagtttagtgaaaggatgtggaagtagttaggtttgtcatcccaaaattttctccaaacataaaacatttcgtgtgtgtgtgtgaagagagaaagcaggtggaatggattgcataacaaacacctcacctatcacttattcacactttttacatttaactcactctggtcatgaacttatgataatattcaatattttatatcacacttaatttcctacgtattaagtacctacttcaatttaatctctatatatacctacttgttataagtaattagcaaaaggtgattaaggcttggtataggcttttcctttcaactagttcttatataaactagtgatctctttttcactctttcattacacttcttcctttctttaattcaccctagttcatatttttcaagacagtatacatacattgtagccaccaattttattcttacagagattgacatttaaggaacaatagattacatatttagtaatgctgcagctgtaattcaaaattgcaatatctatctatctaaaaattttttctagatcaattcaccatcatcacaaatcatggtcgaactcaaccaagtcaacaaagtggaatctccattgcaacattttacccgcacaacctctaatgctaaaccctgaagacgtggaagaaccaagacattttttagaaaggtcgtggaagcattactcatgaattgtttttatgcaattctactcattttggtttgaatgatgcgtatgggagagtataataattggcttatagcatcgcatactaacaaacgacccaacttaatagacgagattcatggtgattcttggttgtccaattttactgtccataatatttaagatgctcactcccatctgcggcaaccacgaatcaccatctataaaattggacgctataaaatcctgagcctctgtagtgttgagtagatggaaagctgactatttgggtcgtttttcagtatgcaatttgggaccccaattattatactctcccatatacgcatcaatcattcaaaataaaataagttttgtgtcaagtctggtgttggtaaaatgttgctattgtgaataatgtagattctgctttgttgacttggttgggttcgacaatgataacagtgaatagacttagaagagactttcggacatagatattgtaattttgaattacagttgtagcattactaaatatgaaatctat

SEQ ID NO: 51945 - DNA, 872 bp, Cannabis sativa
tcaaaatcaaataaattaatcaataatgtctcaacacattttgattaaatttgtggctcacccccacatttctagcataaagtgaattttttataagaaccacttttcaccaatttagctatctaaattttttccacattatttaaatatcttcatttaatcatttttttttaaatacctcttagatcattattaagaaaatatcatttgacattcttagtcttcttaacaaaaataaaatatcaaactcatatcaccatttaccaaataatgtgattattttatccatcattttaaaattatctcctcaataagattaaccaaaatattatactaaagtttacaaacttctcatcaattatgttcacaactttgattatttaagattcaaaattacttgttacctaccttttcacaattttttgaatccacattgattcattttatttgagtctaaaaattttcttctaattttatgacttatttcacaagtttggatccacttttgatccatttgttcttgctatgacaagacaaatctcataagtgtaactctcatagttcacttttcttatctcataaatgagataatcactactagaaaataagcctttagaggtggtttttttttcagcaatataataaaattttaataaaaatacctacagagtcaattattttgtaataattgactctgtaggtgataatttttttaattttaatgaaaaaaccctacggatgcggctaattcgtaataaccaactccgcaggtattttttaattttaatgaaaaaacacatatggcgtcggttattttgtaataaccgacgccatatgtctttatataaccctctccagctatcatcttcctc

SEQ ID NO: 51946 - DNA, 2086 bp, Cannabis sativa
aagttattatatgagattatataggacctgatacttagtttgaccaatagcgatattcacacctaggagggtgttagacaccactagtgccctttagcatttctgtttagatatatatcttgtaaaacttattgattaacattcaactttgataattgataaattagattttgtatttttttaaaaaaaagaattataaaggtattattggtatatagtattttttttagtattatattattattagtataaataatatgaaaaaaaataaaaaatattaaattgtatttataattttgtgagatataaataatcttttatatataaaaagaatagaaagacaatttaatcttttcgaaacctatcccataaaatattattacatattatattcttattaagaaaaataaagtaataggaaatgcaaattataattataatttcatattcttttatcaccgaattattctcattttaattaatttagtgaagctatcataattggtgtgtagtacagagccccaggtgggtagggtggggtgatgtgctggcatgatcaagtgtatgtctataaaatttgtggtgatcattcatcagacggttaagccatacagattttgacacgtggaaacatctcattcatttgtttaccacaacaatctctttgttgtggcttttcggctttctggagttgagttgggtaggtagggtccaccacacacaaattaatacccttttctttcttttttttttatttgttattttgttatgcaaaaattggctgtgtttgggtccacacttattttggcttaactttcatcattgaccataactccaaattcatggactctctaactcctcacatttctcatgcacttttgtttttaattgttattattggtgtatttttttttttatgtgaattgtaaaaaaatattattagtcttattatatatatatatattttgatattttagtgtaattaagtatttaggttctaaataattgaagaaaataatttttaggaaatattgtgaactaatcgtgaaaagtcatgtatagaatgttctaaatactactgatacttaataacaatactcattctttataaaggtattttggtatattttttacttgtttcatatctaaaagagtttgtcagtttaagttttttttacgattgcgtatgttgtacgaccacttgtaaatttttcaaaaaatctaaaataatttatagtgttaaatataaagtttaaagagttgtatcatataccttcaataaaatataaaaaaaattaatcgaaaatatacaagtgattctaaataacttcaacatacatacaaaaataaactaaaatagtaacatatcaggaagtgctagacattattgatatttagttaaatataattttggactttgtattttataaaagttactgattagaccttctgttttattaaataataaatttagaccctatattttttaaaataaatatttaaattaattttttgtcaaaataaaagttaactataataacccaatctaaaaaattgtaatgataaaactgaatacattttatgcatttattcgtgctataaattatttttaagttagttatattaaaaaaattatcaagaaatagaggattcaatcagtaatatctataaaacacaaaaattaaaattaaccatatttttttagcaattttcttttcaacttttcaattttagaattttagttttattattatttttttttttaattttatgtattcttttgtttgattagttgtttgtcttcacctcttcaccggccaccaccaccacatctctcaccagtcacttgaatttgtggtccaccaccactagactaccctacactactacaaaaatttaaattattaattgagaaaattttaaattaataaataaataacgttgttgaattgaatatattataattattattattattataataataattgagtgaatataacatttcatttcttttttaaggcgtcaaaatcagatttggcgtaaaagtgagtccctacccttttcagaatcaatctctattctc

SEQ ID NO: 51947 - DNA, 804 bp, Cannabis sativa
  modified_base (330)..(338): a, c, t, g, unknown or other
aaaggtgacatttcttgtagtgatataagagtattttagctataatttatccaagtgccaaaacgaatatgatgaattagataaaaagaaattactaccttgtggattggatgatggaaaagcattattagtgccgcatgcagtaagttgtctgatattttggttatattttcgaacatgttgcatggcacaaatggctacggctgctttagggttgaaaggttctcccatgcagaaatacaatgtatcttttccgggatcttggttccaaactggtccgaaaatgctaatattatttgttgcctaaaagaaaaaaaaagattttttttnnnnnnnnnttacacttcaaaataatttttttatataattttacagaaatccacacaaaaatctacgtagcaactaacgaagcaatcaaaatcgcaatcaaaatctaaatagcaattctaatagaaattactggagcaacccaaactgtataaaaaataatatataaagtaattccctaaaaaaaaacttaaattttaatttttatttataggtattcatttttattattttcaagttgcaactctatttattttctataacggtatataatgcagcttcaagagattttccacaattgttttttcagaaattttgtaactattattaggatgttgaaaaatatatctttttgcaaacaatacttatttttaattatgctttttgacattctataaaaatgatttgtaattttatgaaaatttgtgaaatcttcaagtaactatattatatatcgtcatataaaaagaaataatg

SEQ ID NO: 51948 - DNA, 1217 bp, Cannabis sativa
ttctcaagtttgcatgagcaaagtttacaagagagtccaacccttaatcaataaaattagtgggatatttatagtagtttaagaattacattaggtttctcatttccctctattagagagtttacaataaataatacaattgggctttctcatgaaatccaagtcatggagaagataatctactgactaggcggagcggatttggattgatctagtcaataccgcgtacactgattatggataattaatctgaattaattgcataagatttgttataataagtttcccctttaatcttaataggatactctgttgtgatctggcaactggagttttttatttgtatgcgggaataaaaagggaaatcggaagggtcttttaggaacgtgttgtcttgtctctctaatttcgtggtaccggacatgtctttcgggcatggtttgctgaaggcgaaaggcttttccagggcggaaccataacacgttttttggaaagtagcctccaagtggggttggcccactttacctaatgatcttatttgggattcgatgaggtgaatgacctcatttgagattttgaggatttgtgattgtacctaattttaaaaattaggttgcttacgtacccagaataggatcaaattgttcatatagtttggtgtgtcttcgtaatcttttattctttgtagacataaatttattttggaggaaacctcattttaatctcacttgaataaatttagagatcacttgaattacaattctattttgatgagaattataaaataattcaaatttatttgagactttatatctttatagaagcaatttaaattatatatgatggaattaaactcaacaatatttgctagaatacttttggcaatgatttagatttttttttgtcactttcgattttattgggatattttaagttcctaatttctctcattgattgtgtattcgcatctttcgacttcgtatgcactaaaatattctgaagctttactttgggatctaatttcaaattttatatacatccacatacatatatatatacttgatgcacggtgagaaacctttaagaacttgacttttagtgtcataatcatgtatacaaatatatatatacaaatatataatatgtatatgattgtagattgtacactattacaaaaaccccctttagaggcagttttttagccttttcagcgtcgg

SEQ ID NO: 51949 - DNA, 1281 bp, Cannabis sativa
  modified_base (644)..(657): a, c, t, g, unknown or other
aagattaaattgtttttcaacaagacccttaaatttgataaatgtttcagaagttgagccttaagagtaagtgggaaaatttaggaaaacctactataatcatctataaatgtaatatagtatttgtaattgtctttagagacaacataggaagaaccccaaagatcggtatgaataagttcaaggggttgaaaggctccgctggtggagaagggaaaagaaagtttatggcctttaccttgtttacaagcaatgcaaggtttgagatttttgagagagtggggaacattagagttatcctcataagaagtgacaagatgacactccaaagacttggtggaaagaatcgagttatcctctactagacaataaagaccatctttaactttccctttgagcaagactacacttgtttgcttgtccttaacaaaacaacatgatttgggaaattctaagaaaacatcattatcttgagttagcttagaatcactaattttttggtaatagaaggcacttgcataactaaatttggatgcaatgaattatgtaggatttatgccctgaaaagtctgtaaatatatttctatttataaatataagttgaatattttgatatatgcttaaatgttaaattattaatattnnnnnnnnnnnnnnttatatataaatatcaaaaaattccttattcatacatgagggtgtgacttatattgtacggagaattaagatcactaagccatgagtgacatagtcagcaacatattaaagttatggaatctttaatcaacggttgctagtactgatgcccgttatttggtccacgcaatctcgattcagattgtcgatgtagcatgacatctaagtgaatgtattctatataatagagattatatatagtaaggatcgatatgtaattaagctgttattattaaatatatcgtttactataaagatctaattcatatcataaggatgatcaatagtagatcgacctaaatcttgagtaatcatgaactcatgttcatgttagtttctttgattcacttattaaaatttctccgagaagatgattctcacaatttctgttttgggaatctaataatatggatgactggaaatatgatttacaattacggaatcctaactttccgaacaaatcgaatgtaagttcccttttaagtgttaattctagaactgaaatgttgtacacaaatttatattggatttaaattatactcttttttttttttttttgacgcggtgatcaaaatcacacatgat

SEQ ID NO: 51950 - DNA, 1032 bp, Cannabis sativa
ttgtgtaattacctccaattacactcaaatccaattacactgtggctttccaaacgtaccctaaatatattttttttccatttttttcatgataatgtttgttgtagtagttacaatattatttttgtaatttttttttaataatttactgtatcaaaaatagaattcttgttattctaatttaccacacttgtaaatgtagcaaaattaatattatgtaagtgtacacacagtcgcaatttgtaataaatcttgaaagaccaagtatcatctcacaataattaatctttattattaaataaacttctaggattttaaacaaaaaaaataataacaagttaaaaacaataaaagaatagagaaataacaatgagaaaaatatggattattataatccccaattcataatctcattaagacttacaaacttactttatgtgaaaattttttatatttctatgacaaaatttaatcacaaaaaatgtattaaataaataaaacaactcataaaatcatacaaatattctatattcaaatctcattttttgaaatttttatttgaattcataaataataattataggtgatcagtcaataattacataattaaactagattgcataaaaataaaataagagaagaagataaaatttgaataaccattttaatccataaaaaaaaaaaaaatcaagttattcacataataatctcaaaaataaattagctcataaaattcattctaatcatctaaaaattaattgaaaacataaaagataaaaatagatgatgaaaaacacgatttagaatctccaatggtattctcctacttccatccgtcacttctagccttcaatattcagaaaaatcgaatagctccctttaacttagtcccaatttgtgattttattgaatttagaatgttgtcaaaaatagttgaattgcttcgagtcgccgctcttgacttttctccaaaaattattttctataactttagaagagttgtgatttttgatattgaattttgaaaacttg

SEQ ID NO: 51951 - DNA, 793 bp, Cannabis sativa
aaaacaaatattatataataaagaaaagagttagcaaaaaacggcaaataatatgatttatttcattcacaagatttggaaacaaatcaaagtgggtcatatgtttatgcttgttttactcacgtgatcatcccaggcatgttcctggttgtagacgatggctgcaccgagactcctggcagggttgatgccggttccggtgatggggatggtggccaagtgaaccaaaaacacagcgaacccaatggggagaggagccaagatctgcaacattgaatttggaatcattagtacaacaaaactctataaccagtaactgtttaactggattatgattatatatgaggtggctcatgagtttatgtaatggggtaaggtttctacaatatatttctaagatggaaatatatgaaaagccattgtaaacaaacgatctctgacataatgggaaaacatatggatcttcataaaaacctcaacaagaaaaacaagcaaaacgcctatatgttataagcaggtgaattattagactgtcctaagtcatcttattcttattatatggattaacatatggaattaatacatttaattgactctttcatcaatatcgtcataaaaacctcaacaacagaaggaaaaaaaaacgcttatattttacaagaaggtgacgtaaactgtcctaaagttcatcatattcttatgcaaagaaacgtataagaaagaacactctatgtttgtgatgtgtacccacaactgaagagattcatttaatacttacagggacatgagagtc

SEQ ID NO: 51952 - DNA, 1182 bp, Cannabis sativa
tactgcattagcaaattcttttcataaattctttccttatttatggccaccaaagacaaagaatctcatgtagcgggaagaacaagttgccttgctcatgtagtgtatgtttctactctttgtcgattgtaccgtggttaatttgcatgatgagaccatctcctacgtccttgttacatgtcatttggctgcagctcaatgctgctgggtgaagtatgacgtttcctggaccggtgcatcctttctttccaagctgctcgtaattatacgcgttgtctaattgcgcgcatgctggaccatttggggagtaaggaatgaaaaggtttggaaaaataagtcttctaatgcatgcctctttccttttgcatttgttattagttaccttgacaattatgacatcgaagatatattttttagtgaagagtaagttagattttcggtatgcatgaataataatgtaattctctcatcaattcaattgcactgtataaattaatagaccgaaaaaataaaacgggaagtaatattttttgaatcgagaaaggagttgttgaacgtgtcacataaactaatacaactaagtattcctactcaattttgattaaacatgtttcttaaaataattaaatttgtttgtaaggtcagcttgtaaattaagtatacgagttctcacctatttgcataaaactggggacccttccgccccaacccaagtgacaaacatattatatacactattataaataaatactcatatcccatgtaagattttatattttgtctgtaaaaagttgcaacaagtactattcgttattattaaaacattaatcaactaaaataatttataatatcaacaataatttctaatattaaatgtaggaattttagttaattaccaaactgccctacaccaacaaacaaattaatcagtttaccaaaggtcaatttcgacctttaccaattcctaacttttcaaagtcatagggttataatacgacctcgttttgccttagacaaaacccaagagatcgagaaccttcccaatcactttgcctcagccctaggatttgctcaaaaccctagcagagagtttctctctgagaaactcgaaaccaaaccccaaacaacccagaaatcccagatcaaacacaaacacagggtcagatctaacttaatctgacc

SEQ ID NO: 51953 - DNA, 1131 bp, Cannabis sativa
  modified_base (1057)..(1057): a, c, t, g, unknown or other
tgtttagtagtttcgatcatattattttataacccaaactgtactctgtattagttcttatatgataattgaataattaggtgtaaatgatggctttagagttgggtgccgacctagttgggatgcttctttattagcctgattatgcatctctattcacatttctttaaaagtattatttgtaatttttcaaaaattagtattatattttcctatgacaacttatgaagatatatgctttttatgtagcattaaaaaacaactgttttagtgacaaatttttagttacaatataatttttctgtgattaaatataacttttagttacaataaaaaagttacttgtgactaaaatatatagtatatattaattagatacaagttatcactaatttagttttagtcacaaaaattattgtgactaaaaatacattgagtcacaatagaatgtaatttttgtgactaatatctataagtcaccatattagaataatgatttataatgggaaatttgacaatctatgcttaaagcgggatgtgggactcttaatatatttcacttaacaatgttgatgatgatgattgattttttagatggggtagagatggcatatttgagtttcacattagcaaaggaacaataaaacaatgcagattagatggtttgacatataaaagtaaccgatctaattcaattcacacatatttatttattttttaaaaaattattgtaaaatgtgtttgtttataaagtaattgtcaggtatacataagaccaattttgtggtccatttatattttatatagccaatattattttgtaatttctattatctactgctacataaaatgatatttttgatttccttacaaaaaaaaaaataaacaaaatctttttgatctaggaaaaaaaaagtaaaatataataactttaacacttcccatgaatatttttggaaattttgactaattattactaatgttgtaacgtccccgcttcaagcttccattggatccttacacttacggaatgaattgctcttatacacgagtacgncactctggctgcttcatgaactgatgactggccctacagacaaacacgactgtttccagtgtactttgtcctca

SEQ ID NO: 51954 - DNA, 1146 bp, Cannabis sativa
  modified_base (1119)..(1121): a, c, t, g, unknown or other
tgggaggagtagctcattcctcttatatattctattatctttccacacattagcaatgtgggactctctaacattaacctttgtcacgtgaattggccactaaattattgacatgaattaattgtaagaaaaaaactaacaccatactatcaaagacagacaagaaacattccacacaaagaggtgtgctaattaaactcataacaacgtgactcttattgaaaacattaaaaaataaagaaacaacaaaattaaaagaaaaaaacaaaacaagacaaaacaaacaaatccatggcccaaatctcaaatgttggctaccctttcaatcttgaaacatggccgtattgatggaccacttctttgtgaaccctcacaacatagccccagcccgagaagacctaatacaagaactcacttcgtatccaaacaaagctacaccatcgtcaaccttgtagagatccacaccacccaccttagatctaacaccaccacccctaattggaagcacaaaaccttagaaagatcgtcgagtcttcgatagagtcacacaacccgtcgaagaaatctcacaagctaaataataaattaataatctttgattggattttctttttggaacaaagattttcattaaacaaagcaatcgttcaagatacaagaaagcagcacgggcgaaacaaaagactctgtaaaaacacgatcaacccataattgagaatttttggcaacaacatgcacaactcgattggcaaaatatttgacaaattgtaaagacaaattatgaaatgacattaacatgaactaacatgaatttacaatttttagtaaccaaacaaaacatataactgttggaattttatgctctaaataaaacgcatttcaatacaatcttattttttatcaatagaagattagaagtcatttaagttaacatgtgattttcatgattatggtttaatatacaatttctgataaatccagaacataatgtcattcacaattacagtgatgtcatcacagtgaaatgtaattgtgatcatatattttgaagtttaagttccataattcatcattacgctggatttacactgacttgataatcagcgataaagtttactnnnaccttggataagtgttatgtcattt

SEQ ID NO: 51955 - DNA, 1225 bp, Cannabis sativa
tattttatatcaaactttatttatatataaagaacttcatttgtatgtgcaaatatgtacatgtaaacgttttttatagtttgaagaatttggataataccaaaggtatgcaaataataaataaataaaagagaaacaacgaatactctactacttagaatggcgagtattcaaaggaaactgctaaaacaattgaacaattgaaaaaataaaataaacacaagaaatatagtagtttagttagatttcggtctgcttagtctactgttgtaaataatgtctgcttagtttattcatcttggatcactcctttatatagaatgcaagtatccttttagttatacataactgattggttatagaactgttttacaataaataacaatattaaatcagaataaatgtaaaagaataaatgaagaacaatttaatccgttctaataaatgcagcaacgtatgcgacctatagggtgccagttgcctgttcatattctcgcacaagctcgcaggctttgggtgcgttctatattcttaaaagggctaatgagcctctcactaggatgtttgcattctatctaagtcgcattgacggacatcttgtgtgtcgacaacatgagacgcgcaagtccttatcgatttatcgaacatgtttcgttatttggaccaatcgttatgtaaagaagcgatctttacttagttgcaggagaaggctacttagtcatcgcatatgttttgatatatgcacaggttgtataaatccctctcggtcctacttatcttatactacgcaaggcatagtatgcgactagaccctgtcaaggctgcatcatctcgcgagttttgtttaagcgaggccaactctcggaaagtcattaattaatagctcatccatcccttaaggattggatccacatgtcaattttataggagactgatctcgagtttctaggcaaaaaattcgtactataatacttttcaattccaatttgttaaaattagatcctctaatataacctaagttttataagcaaattcttgagtatgaaattacagacctaccctcaacaaattacatcttacaacaaaaaagaaacacaagacataaagacagttacaaagacattctcaaccagattcaagaaacaacagttacaaaaacaattacaataagaaatctctagggctcaaataattacagctatagataagttcacagatcttaaag

SEQ ID NO: 51956 - DNA, 3826 bp, Cannabis sativa
  modified_base (1086)..(1089): a, c, t, g, unknown or other
  modified_base (3118)..(3120): a, c, t, g, unknown or other
  modified_base (3773)..(3784): a, c, t, g, unknown or other
tttcctagaagataacatccaaaatcacacataaattctattagtaagcataaaaataaaaaaaaaatgcagaagtaaaaaaaaaataatagagataacaaattgctaatacttagtacaatacaaataaattaaaagtaattcaatggggttatatattgtaaataataggcttaccaaaacttgtaattcctcttcaaatggtggaaaattcaaatcttgaggttcctctcaagcattctactatgtctaatcatttgtattggatttttgtgagcaaagtataccctctgttatttgatatatgtttttatatcacttaatcaatatttctaatatattttaaacttaaaaattgttcagagtatgaagacataattttttttattcttgtttctctttttctctatttgggtaagtgtataatattgagttttataggaaacaaaaaggttattatctaaaaaggaaattacaaaaaaaaaaatttacagctattttaattactagattggattataatgcctccaattgaggaatgccatttcataaattgttaaatatcaaaataccccaataatgttaatgactgtcaacactatttgagttgtttgtttagtattttttcttcaattatttccatcttctttttgacaaatggattcttttctatataagatatatagtttttttgagaaaccttacaagggactaaaatggtttcactttcaaagttgtaaaatttagatgagtgagattctatttttgttttatcttattaccccgataaatttaataggtagatatgaatctcctcattaattgttttattataaatattaatatataaaaatatattatttaaatatgttgccgaaaaaaatataataattaatttatattattcttgaaaaaatatattttaatactataaaatttataagcttaaagtttatattatccttaaaaaaattaatatggaatatttagcaatgattttaaaatttacttatataagattaatttttttaattttgaattattaaggttaattaccacatatatcatttttttttattttttttnnnnaatttacagtttgggttgctgcggtagttgttccggcgatttctatgtgggttgttgtgtggactttggttacaatttaggttgctccgttagttgttatatgaatttatgtaaaaatacaaaaaaaaattgcttagaagtgtaaaaataataaaaaaaaaactcttacatttattttaattttaaataaaatatatgacagtaatcttttttttttttctgcgtgccatcattctatccctgaacgaagcttgattagtatgtctggctacagtcacggcaaaagtggctataggcatacctacagcagcagaacttgggcgacctacgggtatactgtcaactatatccagtctggcaatgtatgtccaattggacggcaaatatcgcctccaccccttcctgagctcccagatataatgttcatagccttcacctgtgatttggtcgggataagaatggtgttgcacctcgggttttgaagaaggtgtatgttcgctgcttatctcccagctgtcctcaaagctcgagttggaaagactgtcacttgatgaggacagactggcacaaagacgaagatgattctcgtacagaagttgaagaaggtcttggtcgatatgatgttcgcctccccaaaacttaccagggttcatctacaaaaggtaggacacaagatgagcatttggacgggatatcgaacaaaaacaaattgaatataccgaccaggtccgattgaaggattagaaaagggaattttgcatgataataggtttataatccagaatttcaaaacttcaaattaagggtcaattttcactaaaccccgaatgggcaagtgaaaccgaatatcgtggaataaaaaacagaatgcaatcaagtcaagccacattgttgaacataatcaaaatctcatattcctaaacctagattttctacggttttcctagaacaagttcaagaactatcaaattttctatagttgaaacccagaaaataaaatattcaagcataaaagaggaaagagatgaggaacttactcactgtttgaagctttagagttgttcggatgacactgatgggcacttcttggggattcttcgaagaatttgagaggaaaagctttctttctctgaactcttcaagaatgaaaaatgctaaaagtagtttattagagatttctgcgctatttataagctgattagtgaagaagggcaatcgtttcgaaatttaaatgccttggtttccccccaaaattaaacgttaaacactcaagtacctgaatggaaaccgtcaaggcatgctattttttgggtgtaattcgaggtacatgtcagtcaacattaatgagccgaatattgaagagacccttggtcaaaatcacgtcggatcaccaacagacgcttcgaacacgtgccacccgttcaaataaagatccaaaccgagtgaagtccacgtgcaacttcggaagtcccgcacagacttgggggaaaatgttatcccattttttgcactatgacgtggcagcatgtacgagtgacacgtgtcaatcattccttacacttgggcagagagatattcccaacagacttcaagcaacatatctgcatgcagaaagtctacttatccgagtagagtaaagggcgaattatttgagcaaagaatgaggttagttttctgagctgtgtaccacgacttgactactccagaatggtatcgtgaagcccaagcacgaaggcaatccctataatcattggattgaatcagacgggtacggaaggctgtctcaatcccctatttcatgtattctaattatgtaataaatattctttccaattatagacattgtaagcaaaaaggaaaccttccctcatgcatgtagcctctataaatagtgatctagcttcactgtaaaaaagatcaaaagaattgctttagaaagagatctaagagaaacacttagagatttcactgtgagagctttgagagaggaaacactgcgttctttgttctcgagttaatacaatctaannngagtaggctattaccaaactaaagaggccgaacgtcttcaaaacctggtgtcctttattgcttatttgttttttgctttgtttttattatatttctaatcgcttcataattgactcattgccgttggctaaaagcaagctcaacacacaaattttggctcaaagtgtgtgaaaaatgtatgtttgattttaaacttgggagctcattaatctcgtttgaatatgttcggtatatgataaaatgctcagccaacatatcttttttgagtaaaaattgagtttttatagtgttagggtgaaatatagtcatttatagccgttagcacgattttcaaaaataatcctgggaaaaacagcctttctttttctaaacggactaccgtttctaggaaaaatggcctgccatttggaaaacggaaggccgaaaacaagacaggggcaaaactagtattatccaactctaaaacgcacataactctttactcaattattcgattttataaaatccaattttgttctcttagttaataaaatgtgatttaaaaagtcaatcaaaaaaattttgaactattgggtgagaaaacttgtcgcacaagttagtgagggccaaaatttgaacttatggaccctagtgtatgttgggttttatgcccnnnnnnnnnnnnatttcaatataatcaaatttatttattaatatagatcagaaa

SEQ ID NO: 51957 - DNA, 809 bp, Cannabis sativa
cgacctcacctgtgtgagatttatgacttgattgcgtatacttgcgtagtgcttataaattatagcaacagcctccctccttccactagtgaccagtctgtaccgtccatcgtcgtcgcttatggcactggtgaacgccaactttctttgctcccatattcttcgatcgtgaccgttatagccattttgacattgcaaagagtgacttctactagatccgtgccaaatccagctagagtcacgaacgacgaagataacatcggaagtaacatcagtcattggagctaagataattctctcccccgttggtgttcctcgaactccattcatggccgcagatctaggatccacaacgtccgatgaagccacgccgatcttcttcgcctttggtgttcttcgagctccattttttccatttttagccacagatccaagatccaccacacctgatgaagccaagagtatcttttcgacttcggtgctctacaatctgccgtcgtcaacatagaaggagtatgagtcaattgcgatttatgaggatcgaattcagttgaaatgtcaccgccgacaagattgagagccttctccaatggcttcgtgattctcactagtttcacaggaacttcgttgttgtttctaatctccgacaaaataggtggtgcctgagctgagggagccatagatgtctctgttgatgagcaatattgctcaactctagcatctaatttctccctgagatgcactttaaatgccttcaattgagcatcgaagaattgatcaatacggctgttgcccctgatttttcccaa

SEQ ID NO: 51958 - DNA, 1277 bp, Cannabis sativa
aaatatccttaataataaggaatcgtggagtatgtagattttaactacaaaaccacgtaaaatatctgatgttatttatcatcatttaattctgtagtatatttattgcagaaaatgcttgttaacgaaaatctgtgttaacaccagatatgatgaaactcatgtcaatggtagcacaagactgtaattgttcacctcctcgaggtccgaaggtggttggatcagacctaaacacgagcagctccgacgagatctcttggtgaagcctaagctcgcctaaacatggcttgaatgacatggatgggaactccaatgaggagcttgcagtgatgaaaagacaatgaaatagggacgaagatctgcgattggaggtttcgagaggtccggatttcaaagatggcctctgtctctctattgtgtggctggaaaaagctcagccgagttaggcggagatctcatgagagagagagaataggggagagagagtgcgagaaggttagagaagggggtttgggcaccgactgtgggctgtttggtgtggcagtcgtgagcttcaaagagagcaaggtagagggaggtagtgaagaagatgagatttaggtttaggatagggttttttttattttctttttcttatgttttttgtgttttttttaaattttaatttctgatcagtttaaaaaatctaatttttaatgattttttattttaaattaatttatttttattttattttaaatatttatgtacgtgggctaataatatagtgccatatgtatattatgtccatgtagacaataccctatatacacatggacaaccaagttaacgttaattggcaaaaatagataaaaggactaagtgctaacagaacttgaatttatggggttttaccatcaaaaaatagattttgaagattaattgctagcaaggtaatactattgagaatttatcgtaatttactcttaataataatattaagaattgcaatcagtattatataatggaaataataatattatataatattacttaggttaaatcaaataattaaagtaaattatcgtgaaagaaaaattaccaatcttaagatttacatctttgcctttccaaaaaaaaaaataatagatttataactttctaactttatttattttattaatgtatataaatttatactaacatttattcatagtatgataatataataattaagttttaaaatagattatttttcttccaatatgaatggtttaaggagaattgttttttttttt

SEQ ID NO: 51959 - DNA, 757 bp, Cannabis sativa
gctaattgccttttctaatccacattactagagcggtcattacatagagtttcggtgcaagttccaagccataggcaaagttctgatgcaggttccaagccaaaggcagagttcctatacatgatctaagtcatggatagagtttctatacaggatctaagtcatggaaaaagttcctaaataagatctaagagtcagacagggtctctaacaagataccaatccaagactcaatcttattcatcaaaaagtcaaatattatacatcctaaagctatcaaatgtattataatgtgaaaagactacatgagaatcaaaatgtttccaaaaggtttaaaaaacttgaaacttattaatgacagattcaaagaagagatgtcaaagaaaaaaagatgaggaatatatggagagagaagatcaaaggttcaagagaacaccattcaaaaagctcaatatttggcaaaacaaggttgcttgtcaaaggctcctacagtcaagataagagctgaaaagtccctatccaaatagacattcgaacatggacttaaggggcaaatattatcccaaattttgtccacttgacatggcatagtcaagactcaacttgtcaataataagacaaaatctccttacacaacatgtaaactatcaagcaataagcaaaaggagttaagcatgctaatgagaccctggccaatcatgtctggctcgccaaaggaaggttataggctgaccatgtcttgagaataagctggcca

SEQ ID NO: 51960 - DNA, 1106 bp, Cannabis sativa
tatttatatgagattaggaatgtgaacccacctttttttttaatcgaatatacatcaattattcattgctgcttatctacgaatggttctcttgataggttgattatattatttgtttattgcttacaactggttgtactaggtaagataaattgggattttttttaaacataagaattggagaacttttacactttttgacaataatagtaccacattttgacaagaatgttggatttagaggaatcctcagaagagaaagattattactataaattgataagtgaattaatatgtgagatcttgtgtgtcaaacataatctcttgaatgttaaacaataaagtttcacactcaactattcaagttgcacatgaagtgtgagcaccctttaaaagtcatggaaggagttgtcttatctaaaccaatacataaaattgcttctagtcctatatcttttcagttaaactatataattttaaggaggttggtattggagaaaaattgtagaaatcaaagagagaattaaggcactaatagatccagtgcagtgcagttttcattgtcatcatataaaataacaacagggtataagttgataaatcaagttcaagggacttgttattggagcaaagaagtgtggagtcatctcaatgttcctaagcatagttttgtgctttggatagcagtgttaggctaaaaacgagagattagaggctccacaagttcaagatcactgatgaagtgaactgtgtactgtgtggctctgttgcagaaacaacattgcatttggtttttgaatgcaccttcttgaagtcctcacagcagctaatggtgtgctgcaatcacagagtatcacagcaggaaattgtcatttacagctcagcagtacccaccgaatattctcctatgattttgtctaatgattctgcaatgattgtgcaaatccctatgatgatttttctgttatactgtaccaaattatatgctgccacttgtcaatataacagtggcatttgtttgtaaaaatcctctttaaaaggaatgaaatctctcagcataatttgagctgagttttattacctcatttattccctgatttctctct

SEQ ID NO: 51961 - DNA, 643 bp, Cannabis sativa
aacatgagatgccttttgctgctgtagtagttgtagctgtactaccacggattctttccttcatttttttctgcttagtagacctgttatggattgaaaaatcatgtgaaatattggatgttgattactatctggtgattttgagcattactatcacgggatgatgccttatgattagttcgtgattttttatagagtaatttgcggcataaatatttaagttatattctcgattatgtatacgttgataatgatttcatatttaaggactatgtacttacgaaacgttttaaaaatataatttagatattattattgttaaaaattaaatttaaatatttatgctgtaaattattttttttttataaatacattaaattgtacaataataatatgatagtgattgtcattggtggtcccatatggagatagtaatgtttcggaaagtataacttaaatgggatgacatgttttacttatctaaccactaaatccccttttaattttgttaatggtagcatataatagcattctaaatctttcgtgtatgactcaaaaatcagttgcatctgcattctgcaattgggaggccttaagcttgattagcagatgagtctaattggaagcagatcaccaccaaatt

SEQ ID NO: 51962 - DNA, 610 bp, Cannabis sativa
atttactaattccatcatggatatgccaacaacaacatattttcattgatctttcgagttgaagcttctgaaaaccacacattattataggagtggccatttataataaaaaaaattctaaacaaaaaaattatcatgtcgtcattgtttaaattaagcaacacttcatataaaattaaccttgaaaattagaccatattgtatatgtaacaagaccattccaataaataacccctattgaagatgttctaagtcaaaatagtattatagcttgagtccaaacggctagcaattctacagccattgatataaaaagagcttgttctaatggtgttactttcgtgcctcaccttggttagccagatttggttagaaaatatagtcgaagttgttagtgaatctcatattaataatgtgtgagaatttcgtataaattgtcattttcacatcgaaaatgatatcggtaacttagcgattgcttcatgtccgataaatgtaggaggaaacgaaaggatggtgggtggtggctcggcttaataaaattattattttttgaaacaatagataataaaacattaaaaacaccagtgtttgtataaatattttttca

SEQ ID NO: 51963 - DNA, 3193 bp, Cannabis sativa
  modified_base (330)..(334): a, c, t, g, unknown or other
ttaattaatcacgatttccataaacctcgttgattagcaaccagctgcacaatacgattaaaaatcacgtaacacgcctatgctagttagggtgtttcaacagctgtgtgattttcaaatattaaccacatttattttacgtgatatgtaatcaaaccccatgatttcaggggataattgttgtaaagataacagtctactctgtacttaactgcgttactatataattataaataggggtaagttagagtgaaaaagggataaaaaattcataagagaaaaggccctaaaacactatcagaaatataataagattgactcgtggactannnnnaattttaactgcaaaaccacgtataaaaaacctttgtattcatacttcttactttactgcttttatttttctatgaaagtttatcaccttcaaggctcatatttggttaacgaaaatccgcgttaacagtttggtgctttcattgagagccttcgtgaaaaagctcagaaaaaaccctctttacatataaaaaagaatatccttcatggctgacagcccagagaacgttaacacaccacatgaagaaactcatcaccatcctggaaaggagcccatgggctccagaaggccttccaactcacagtctaaacggaccactcgctctaagatgacccaacttgagggtggccccaacactcgaaccactcgctctaggaggacacaacctgagggtggtctcgacactcggaccactcgttccaggaggactcaacttgaggtggtcctagtacacaaacgacacattcaaggaggactcaacatgggaatggccaaaatcctgaaatgagagatgaagggcccaaccgtggaggtgctcaacaaatgggtgagggtacttattaaatggaaaacgaccatcttaagcgccacctagaggaggcaaaccggtgtaacgctgaattagagcatgatgtagccgcagctagggcggcacaggggaataacacttaaaatcaacctgaccttggagtttgaagaccacgaggtagacctcatggctcacgaactaggaggcaagaaaatgctcaggaagaacaaactggggagaatgaggttccccttgaaaatccgaatgatcagtttgaaccctctcatagaaatgagaatggtaggcaaccaaaaactaacgaataggaaattcctcgtggaaatgaggaagaccctgggacacaacccggggaacgtaggtcaccagtgagcaatcaccaacgttcttcccgaactcatagagagagggctcgtacaaatcccagaggggaaaatacgacaaaccacgctcagggggaagaatagggcgtaaagaagcaagtgtgacctcggggtgcccaaggacccacaatcagtcaactcgaggaagagaaagtgctcgccgcattgatgaccgagaaaacacgggaaccagtaaatctgcaagtcactcgaagatgaggtccatgagtatgacgaaatccatgaggaagacgagatccgtaagtaggacacagtctatgagtagaacgaggtctgctagtaattattcccaaccggatctgcgagagcacttgaatttgaaaaaacccgatctttcccaacaactcggtccgaagcaagaggatcctatcctattgcgaatagacgagttagaggataagttcaggagatatcaagtgggggaattaggaaaacaatctagatacgactcggacgaggagctcgagccgtatcatccaaatatcatgaatactccttttccctaggaatttaaaaaccctcacgtctcatcatatgatgggaccaccgatccggtctcgcatttgaataacctcatcacaataatgcgagctagtaatgtgacaaacaatttacgttgtattttttttccacctcactagtttgagcagcaagcagctggttcaacaaatttactcatcattcgataacttcctgggaacagctatccaaggacttcaaaaaatagttccaggccgcacaggataggcgatttgaggcgttctcgctaactaatataaagcaacagccaggaaaaacactgaaggcatatttaagtcgttttagcacggctgtcgcaagagttagaaatctggatgatagtagaccacttattacccttcaggcagggatcactactaatctattcatcactgcgggcgaattgtggggcgacttacagggtcgtccggtgaagaacatcactgagtttaatgagaggactcaagtgttcgtctgaaaagaggaagctcgaaaagagatgaacttgttgaaaactggcttaggaggcaaacccatcaatttcaacaagtactatctcaactagagttgataactcccatctggctcaaagagagaagatgattctaaggagttgtcaaaggacaaaaagaaacaaaagaagcatgataagtatgtgccagtttatactatttataccgagcttaatgaaactcgaaaaaatatttacctcgcacatgagcacaaggttgcctccaggaagcccgaacccatgaggcatgcgaggcataaaagagatcctaccagttattgcaaataccacaaggacattgggcacacaacagacgagtgccgtcagttgaaagatgagatagaaagtctcatctctcggggccacttcaagcagtatgtgaagagacagggcaatggatataaccagcccaatctgcccaacaacccaaaaaaccagggattacaacctcttccttttgaaggagaggacatcctggttatttcgagagggccgcatattgcaggagagagcaacagtgcccaaaagaggtatgtgaaagaataaaaaatgagcaatcgatatttgctccagaaccttccaagaatgtaacaaatgaagaacctccaatcatattctcgaaggaagatgaaaagaacgtgaggtatccccacatcaatccattgggaattactatccagctcgccaataaaaggataaagagggtgttgatagataacgggagttcagtgaacatcctttacaaggaaactctgaagaagatggggctaaaaaaggccaaattgaggccttgcatggtaaatctgtgcgatttcactggcgatagtatcgccaatcagggcataatcgagctcacattgaccttgggagaggcaccc

SEQ ID NO: 51964 - DNA, 777 bp, Cannabis sativa
gataaaaaatcagttcagagtactctttagtactattttgaaaaatacaagcttcaatttatcatttaacaaaataaaaagtccaatctataactttataaaatactggatccaaaatagaatatttcttaattcaaaaaaaaaaatagcaaaaataataattatataattttaattaatactaattatatgtattgttgcaggtgttgaacatgtggccggagatatgtttgaaaagattccaaatggtgatgccattttcatgaaggttgaatttcgaaactttttttattaattaattttttttaaattaaaaaataaatgtatgttatacttttgtataagtttatctagttaaaaaattaatttgggtagggatgtaaacagagcgggacgggtgcgagaattgctccctcacccctataccttcttaaattcactcatatatccgccccaatacccgtttaaattaaagcgggggcagagtggggatgatccgacgggggaaggattcctatcgagtacccattacatatatatttttgaaaaaaaataatgtctcaaaaagaattaaaaaaaataatcataaatacttaataaaacaataaacttaaatggaatagtatgtatagtaaaaaaaagagtataatcaataaaaagcttattacatgaagttattttaattgtagtagttatgattttaatgttagaatactgtaaatctgtatatagccctaattaattcatgagaaacaaacaataaaatatagattagcg

SEQ ID NO: 51965 - DNA, 987 bp, Cannabis sativa
aagcatttttgggtagcgtgcctaattatttagggcgttacactttctatctttctttttattttcttttacagagttattctctcaaactttccctcttaactctttgattttctcttttttttttgggtctttttcctcaagatgctactctctctaacgagagatgaagatcatatcaggttgtttttgaacttgagcctccttcgttttatagagtcctaattctgttagttgcgagtataagagtctgaatgctgagttggaccgttggtaactgtaataatagttagttgatagtgttgtaaaaggactctttatgtaggtatttaacaatacttatcaaagtagaaccaagtaatttaattataaaataattaatttttaactgaatgacaacctatattacactattaagctaagcaaattaaaaattgctaagccacacctatattcaatgttcttatataataccataaaactaaaacaaatttagaaatgctaagcttatagccacaaaggttggggggttcatttgggaatcgagttaaactttaatttcatcattgaattagattgtttgaatgttatttttatcatttctaacaagcacaactattgtggcgatttaaatagtatcctccagataaaaaatcttatcacaactaagtggaattactattgtttagaatagaattttttccttcttttgcttgtgctattttttttttttttgaatagtgtttgtgctatgtacttacattacttgcatttctcgttataagtttttttctctcacaagaggaccctaattttttaacactttcttatacattcatgaatgggggtttaattaattaatgtatatataccatattgatatattcatatgagctttttatataaatataaatatatattcaattgaatttattaaaacatgtcaaataaagtcttttttttttttatttaagcatttatatatta

SEQ ID NO: 51966 - DNA, 1886 bp, Cannabis sativa
gctaactaagggggtcgaacctttataaaaattcttgtcttatttactttattgttcttattgtgcaaaacgtggcaaacatcatattcatacgactccactattggttggctactttttgaggtcaatacactgaattagtcacctattgtgttttgtgttgcgactcatgttgatcacttaggcagctcccaaatgatatatgattcagtaggtttgcatcttccggaggccagagtcacattctgttcaattatccttcttcattcgacgatgttctctttgacacatttcttttcttggggggaatacaaagaacctctagtgctaatagttatcatccacgtgcatatgtgggcattgtgaccatgtggcatcttattttcttgccacgtattttggtaaaaaaaataccattttggaccctatgttttgtaaaaattattgattagaccctctattatgttaaatgacaaaatagaccctatattttccaaaatagtaaaaataggactctgagctcaatttttgataattttttaatataaccaacttgaagacaatttctaacacgaacagatacagaaaatgtgacaagttttttcataacatctcttgatcggattattattaagttacattttgacaaaaaatcagttcagggtcctatctgtatcattttagaaaatacaaggtcaattttatcatttaacaaaacaaagggtccaatcggtaacttttataaaatacaaggtccaaaatagtatttatcctataattagccgacgaaaatgagaatactaatttaaaaactgtcctcaatctgcaccattgccattcctaatattaaattttatcctattaaattcttatttttacccctatttttttacacactatcaatattttcattccaccataacttactcaaaatattttaaattagaacaattttatactgtatgttcggtaaaagggtgccacgatgcaccctctccttattttttactctaatttttttcatgatcgtttgcgttgtagttatttaagacattctataaaattttaaaaaataaaagaataacacgattaaaatagggatttagcagtctgttatacgagtaactttttattttatatgcatgtgaaataaactgttttttttataagtatgtgaaataaactgtttgaacactgctttctacattgtaagttattcttaatttctcaaaattttacaagatattttaaataattacatcgtacaagatcatgttaaagaaatttgactaaaaaatttttttaatgccaaaatagtagagaattcatcgataaactctttttttagagagtattatagaagcaccctaaattataataaacattttctttacgaagagattaaaaatttctttttttgttgacaccaaatttatatatatttggggaaaggagagttttaattgcaccctacaaaatgataagtacaacccagtatttaaaaatattaagcttaaaataatttttgaaattttttcttaatatttttttaaattttcttctcacattattttgtgttaatttcaatatttattttagttttattttcaaataatgtataattttttttattttctttctaataaaatgtcatataatttcttattttaatttttttataatatttaaaatataattttctttgtttgataggtacatttttttaaaagctaagttgatgtcacgtgcaatgtacctaaaattatttctttttaattaagtgatgtcaagtgcaatatatgtatgtttaattttttttttaattaggtaatgtattttttttttaatttttaaaatgatatttgaattttttttttaattatata

SEQ ID NO: 51967 - DNA, 1090 bp, Cannabis sativa
  modified_base (897)..(897): a, c, t, g, unknown or other
acaacgccgataggatttgagattcgttgggttggttcggatcgggggtcatgggatttctgtagatgagttacgatatagttgttgatttgtggtggccagtggaatgggaatgggaatcggaaagaggagatgttgttgtgggtttcttgttctccgactgaatgaacggaatcgattctggttccgatggtgtcgtcctggctgaagtggttgcatcggttcggttcggattccattggtgtttccgcatattattttgtaattgctttttttttattattattattacttaaataaatgccttcgtaattttattttaaataagcctaatataattatttttcaaattctttaaattaaataatttctttttctaaaataaaatattatttatatacattatttttgtaatgatttctttttaaaattctattatttcaatagtataagaaatattgtattaatttttactcattttagtttactcataatcttaattttgatatcatatctgttttattttttttataatattacttcttaacaaaaaaaatttcaaaattatatttttcaccatattttattttattttattttattttgtacacaaaggagagtcatattatgttctcacattttcttagtttgttagtgtatttttgttgtattatgtttttttgtgttatttattttttaagtgtgtagatttttggagacattaaagattattggaagatagtgaatattatagataagtttttcttcatattttaattgctatataagtatttatatattgaaattttagtttttaaatttggtttattttttatatgttaattccttacatcatttatcttttttggtattttgtagattgtttatctatacttnaaaacacaaaaagttcacatattgcagaagatctgaactcattggttacttcttagtcattcaagcataaacttcattcttaatgatagtactggattggttttacacattgttctttctctttgttatgtggagtctgattatttagctttggtttctgtttttcaaaagcgctctttcttttgaaatgagc

SEQ ID NO: 51968 - DNA, 757 bp, Cannabis sativa
aattttccgaaattagtttaaatttctaattcccccccccccctcttggaaacatatcttgggctaacagttgtgccacctcattatggtgccagtcaaccatgcatgtttttagacacctcggggtgtgttttcacttgttttttttttttatgaagagtcatattttgtgggttccggggtccagaaacctcatatcaatgttcgaaacccaaacgggagacctgccccatcttttgatgccaaaagacgccaatgattggctaggccttgtgagaagaatttattgatacttcttgcttattttagtcctaaagatactatattttggccacatcatctcttcataaattggtgagggagacctctgccatctttcgagtcataaatatagtagtgatggaccataggtgttctacacctctaggtgacttttctcacttatttttggtacttgaataatagaaaaatactttggccaaagaaattttccaccaattcatgtggctaactagtgcctttctatcgtgcacaaagatgacataggttgactaggtggtttccacaccacttggtcacttttctcacttgattttgatgtactgatgtggaaaaagtacatttgacaaataataactcttcttttccttttggcaagcatgtgaaactttattgtgtacaaagatggcacaggttggctaggcatgatattgagtgggaaatggttcctttcaattgttttatgctccttggtgtt

SEQ ID NO: 51969 - DNA, 3270 bp, Cannabis sativa
ttatctgttactcgacataaaacttaggtatttttgccgcaaattactctttatattatatatatatcaaaaaatatattatttaaatgatatgtaggaaaaaaaaatagaaaaactaatatctggtgtaatgtaaaagaattgttgtatgctcacctaaaaatttaacttgatgatgtggacactgttttcaacatgtggcacgaaaaaaacaaatcaaggctccacttcccaagatagaacagtgtcacctacacattgggggcgcctaggaagaggcttagatcccacaaaatctttctaagcttcatccttcaatagtccaagtaaacaactcaataactaagacaaagaacatgaagacatgtcacaatcaagccccgaaccctgaaaccaatttcgagacaaaccctaccaaggagacacccaggtaggtaccaacacccttgggcacacaatggctagggtttaggttttcgagaacttctttggacctcaatttcttaaatctaacaaggaatgatgtgagcacttgaggctttacaaattgtgcccaggaggggcacaaaacctagaccagcccccagcttgactatgtgcagctcccaatgccaagtcacccaactcaagttcactaagtaagactcaactgaattagacgaaactagattagtgtgagtactttttagcagaaagaatattgaagataaaaaagacagattacatgtagttctaacccagactcagggcccacgttggcatcttccctagctataggttcctagttcgacatatgtcagcctggggcgctttccaacatgcaaattgaatatgttttccgagcatttattttgttttcatcaaatacgaagatacaaatgctctcggacagcaaacgaagccatctggaggggcgcccaagttgacaccccccattaacataggcacccaagttgaaatttaatttcatacacatgatttctttactcgaataaaaattctatcttgggtattgttgactaaaatttttgccaatgatacagagtcaatattacaataataaaattttacgattgtaagataaatataagcaaataaatgacaaaaataatttatagaggttcggctccaattgtatgactataacctactcctcttttttggtattacttgtagaattatcaagatcacttgaacctctctcaagtgagtttctcaataattctctaaggattaccaagatatcattttagcaacgaaagagatctcttgaaaattaaaattcgggtcctcacttcattgaaataagccactatttatagacctataagtcaataaatagtactaattataaaatactcaataaaagctgaatattcttccaatcccttgattttagggaccaataatgacctggtctttaggaatttgagagttaattttatcgatctagaacaattcaatcctcactggtgtgttggtccatccaggttgttgcctttcgttatttttgagaagaatctagctgatcctagttggttgccatatcgctagttaatctatctcaatcggctgggcacttggttggctattatgcttagaatgttctagctgattcaatatttctaacatagtacgttgtacttccctatcttctagttactccacactattttagccttatggatgtattttgtgtcgaccaaatgttcactttttatgccacacgtcgattgatcccatgccacatcatttaggcagtttctgggataataggaataattcttgtttttctaccaaaatagtatatggaacttataattagaggaattcatcaccaaagtagcaatttggccccaggcattgccttctgacagccatcagcgcccaggttgatatagccttggtttatgtggttttgttcatccaaatgcaattctatttcagacattatgcttgttttccactaaaaacaaggtgtagtactcatgaaaagtcaaattctcacttatgtcatcctgcaccttggtagacatacctgcacttaggttacctttggtcgtaacctagtgcgcaaccgagttcaatcaccacaagatggtgaattacttcatcagaatcaagaaattagcttagtgatgcactactatcaccttgacactcaaaatatattaagaacaagataaaaaaagttataggcattgaggttgaagttggatttcaacctgggtgccaatatgtcaacatggttgccgattgttgaacaccttacagtgattcagccaaatctcgctcgttgcaactcagatttatgcaattccaaatgcattggaaaactctttaaggatatttcaacgccaatctaatagtcatattgaaattttgaagatagtatcaaagcattagaaaacgatctgatctctcaaattgacgatcaccatccaaaaatcaagatgagcgatctcaacctttaataaatggtatggcatccacaaatggtcttatatttactcaaaatgaatattcccaacatttcctaatatttttaatattttattattattttaagagacctccattcctataaataggaggctcttcgagttaatttttcacattctacattcactcaacaagccaaagcttctctctttaaattctgagtattcatgatcttttctgattttcaagctttctaagtctgctcttgtaaagcttctagatttttcgtagttctcttatttctttaactcttatcacttattcgacgatatagtgttggccatttttcagtgtcgacactatgaaataaaaaaagaagagttttagttatgtatttttaaggataaagtatagaagttgataagagtgctctaagcaattttatgtaaaacttagcttattttctatttacccaaaaacatggtgatgttgacatcaatgtttgacatctgacaagaaagaaaacatcctggagttgagtagtcctgagtcatggcagttgacctgggacggtccctagccctgcaccaaggttgactatgggaacttcaaaatgggtgtttggatctcgctaagttgtttctaactcactatctttcagtattatgtaccacgaaaacaagaaaatgcaaatccaagcattggaagttgagaatacacaaaacagcacctcgaaagtcaacccaagtgcccagcacccaggttgacattccaactagggttttagtttttgggtccgtcttagtgcaaattgttgggttttatgcc

SEQ ID NO: 51970 - DNA, 922 bp, Cannabis sativa
actttcagcataatccaatcttgtccagtccagtccaatccttttcagtccaatccagtccaatcctgcgtaccaaacgggcccttggtttattgtcacaatacaacaaagtgatctttctattctatccacaatgcgcaacccgatgacaaattttatcagccatataacatggttggatgcctcataatatgcaacaaattctgttaccatagtaacaatttaagcccaaacccaaaaaaggtcattgatagaggcagaagtaatacacacatatgaatatatgtgtatatatttacgcaactcaatgaaatatatattcaacatgcaaaataataaaatgcttaaccaaataaatttataacaaagttaatttcaaatcgaaagtgtataaaaatctatttttcttgccttatgtaaatatttatattttgttagtgatattcataaaaaaataataaaaaagaagagagaaaattctttgaaactaattttggggagtaccacccctttaaaacaatttagtgtttaatttattctgttcatgtgttgtgtggaaagtagtagtggcaagagaaataggtcattatcaatattaatattgctagttaatctttgggggagttaattgagcttgtaagtaatcctagatgaattaaggtgtttaggatattgtgagccaaagatactaccttttatactaccctaacttaagccaacattacaagctatataaagtcatattgataacaggtgcagtgttaatagcccattttggggagtaccttttatcctaccctaacttaagccaacattacaagctatgtcatagtgtttcaattttaaatgcattattttagctaaggctaattagtaatttttttccttgaactttaacatgtactaaatcatgttccctgaa

SEQ ID NO: 51971 - DNA, 996 bp, Cannabis sativa
agctggggaagaaacaatagcaggatagctgataacagtttctgcattaactcgagtaggagcagatgaatctgactgagaactatgggcagtaggttcagtggagacttgtggctcagaaggagcaataactggtgctggtgtgtcctgcaattggggcaactgagcagcaggaacatcaggaacagaagctgctacatcatgtgaggaaggacctgcaacaaaatcagatggctggctgggaagccagttagtaacagaaatagcatgttgactatgatcaggtgaatgagtatctaataaagcatgttggtcaacataaggtgctggaatagtggtgacaggtgtggaaatagatctgagaagatcagctgaagtgtaaacagttttaggatgaggacaagtgggaataatagctgaaactaatggaataggaggctgagaagttgaggtgggattcagatcagtcttgtgctcatagggaaaagagaattcatcaaataccacatccctagtgatatagagtctcccattagtaacaagacacttataacccttgtgatttagactgtagcctagaaaagtgcaaggtgcagatctaaattcaagcttatgcttgttataaggtctgacattagggaagcatttacaaccaaaggttttgaatgttgtgtagtcgggtttggtgttaaataacacttccaagggagatctatttttcagtaaaggagtaggaagtctgttgtgtatgtacacaacagtcctaaaggcctcatcccaaaatttgagaggaagagaggcttgagctaagagagtgaggccattttccacagtatgcctatgctttctctcagctaagccattttgttgatgtgttgtaggacaaggatgtctatgatgaataccattttcagttaggtagctagtgaatgacctaaattcccctccccaatctgtctgtaggactttgagagacctaccaagctgaagttcagc

SEQ ID NO: 51972 - DNA, 726 bp, Cannabis sativa
gtatttcgatccttaaattatagtgcatatatgtttgattaattccgcactttatacttaaacatatatatttcagtttgtacatataaatgtctaacaacgagtgcattttaatcttacccttggaatttctgttgttgttcttacatagatcatttctaattttaatggttttttgaaagaaaaaaaaaacaaaaaataaataaataccaaatataatacttatctaattatcaaaactaacttgatacattataattgatattctcattttgccttttgagatttctcattttgctggtggaattttaataagaccagtcaataaaaattcacatacttatatagagaggagatatgagattcccttccactaaaatctaataagatggattgactagccagtttcagattttagaagttgttataacttaatttggacataatatatacaccaaataatgcatttttttagctagggaaaattattgaacaagggattatatatatgttttaaaaaagactataattaactgaactatactggctcatataagcctttacttaattatattatatgtttttctgtgagccaaaagtacttaacaaatttgtagtgaggtttctgattttcgaagacaaagaacacgaatagcaattaatgtaagattatataattaatagatattttgtttggaatcatattaaattatggctttaattaat

SEQ ID NO: 51973 - DNA, 1750 bp, Cannabis sativa
  modified_base (1690)..(1696): a, c, t, g, unknown or other
aaggtggtcctggaggataacaacaccccccacagctggaagaggcaaatgaccagcggcaagcggaaacagtggaaaaaattaacaaatggaaacgtaaatcacaccaatccaacactataatggtcatttggacgagaaaataactcagatggagaagtccaatgctctcaagaccaattaagaaagaacatgaaagacatagaagtgattacagaagcagagcacttcgtgcaactccaaaaagacgtgtcatcgcccctgcaacacctaaaagttctccagcacaaaccagggaagcagaaaaacaatagatgatctagagcaagttgttggccctagaagcaaaaagtcatatgggaataagcagtgaatgggaaggatccactcattctctatttggaaaccacatcctgcgggtagaagcaccacagcagtatgttgcaccaaaactcctagagtatgatggaacaggtgatctctcagaatatgaatgccaatttgaacaaaagatgcttacaatttcagttcctttggaagacttaaaagccataaagtgtaagatgtttactcaaggtttgagggcccctgccttgccgtggtttcataaccttacttcgggcacaataaatttgtatcatgaattaattttgaaattacaaatgagctttgcaataagtgtcaaatcaacaaaggtagatacatatctgatgttgatccatcaagcgccagatgaactactcaaaaaaatcataaacaggtttagcagagagtatgtaagcatcccaaaatgtacagactcaatcacgatgaaggtattaatgcaagggttagttcacgagtctaaactaaagaaagccataatactagaaccaggattatctttgataagagctctaattatggcacgagtgtacgtagcattggaagttgaaggaaagcgacacgcagaggaggtatcaagagaaacgtttgtcttggaagattcctttcttttcgagacaaaggagagagcaccaacagcacgccctcaatgaagaaatgaaacacgtcaatttggagataggggaataagagtggcaactacggctaacatggcgcaagtcaggcaaacagggagtcggcgaaataaggaggaactcccacgaatgaccatacactaactgaattaatgcggcgtctgaggggaataaaagaaacaaggtggccaccaaaaatgtctacgacccaaagaagaaggataagggtcggtattatgcttttcacagagaacacaggcatgcaacctgtgagtgcaggcaaatgaagctcgaagtaaataggttggtgaatggaggttttttctgagatggcttggcagcaaattcggcattgcatgcccaacaaaggcatgaaaagattcaaaactagtctcccctatataaaaaagactatgaacgtgatttctagcggatcggacttaaatggatttttagtccaagctttagcgactcacactcaccgaattcactctaaaatcaatgataataatagacaatgaggggccagttgggctttgtgccctaagtaaaaaactatttcaatgtgatcttttatattcatttctcaataaagaaatagatttattttcattacttattttatgtgttatttatttcatgtgatcatttatttgatttataaattcatnnnnnnncttatcacattgatattcttgtttgttgtgttatcaacatagtggaaagtaatc

SEQ ID NO: 51974 - DNA, 1728 bp, Cannabis sativa
tgtgggtaacctattgattaagaacactcttgtatggaaggcatgccgccaatatgtaaaatctaacccagattgagctaagattgtatgtcccatttttgttatgtgcatgtgtttgtgctctactctcccattttgttcactagtttttgggcatggatgctgaaaaatgccttgattcattagaaattttgtaaatgatcgatattctcctccccaatcagcctttaacttttttttataggtaagttgaatttttttccaccatggctttgaacttaataaacacttcaaaggcttgtgactttaagacaagtgggtaaatccaagtatagcgattgtagtcattaagaaagtgtacataataattaaagtcatctttggagttaatgtgtgagggtcccacatatcggtgtgtatgagttcaagaggttgaaaggctcttaaagataatttaggaaagggttgtttgtgacttttgcccaattgataggcatcacagaatctaagttgttgaatggtgcctgagtgagaaacaaaaggtgaaattttgcttaggacagcgggagagggtgtcctaacttattgtgccatgtcttgatgtcattaagatgactagtgtgaaaaatagtaaggctacagagagattggtcaataataatatctttattgatatgagtgaaattacaatgagaatcacttgttacattgtacaaattcaattggctgttacagaccatagccgaaggattacaatcattggacaaagactattttcagttgtttgattgggatttgttgagcactcttctagaacatacataccatctttaagagttcccttaagcaacaccttcccaatgtgtttgtccttgacaaagcagtatgatttttgaaattcaagaaacacatagttatcattagttagttgagaaacactaactaaattcttggttatagtaggaacatgaagaactgaattgagtttaagaggacatgaattaagagaaggtaatgtggctaaacaaacttttgagataacaagtttcttaccatctccaacagcaagacctttaggcctagagtatgcagtggaggagtctagattctctatgccatttgtcacatgattggtggcacctatgtccatgaaccatcctgaatcactgccaaagtttggtaggaacaatgtggcaaaggcctgtggatcataatcaaactcgtgttcagtcaggtaagcacgcggagaagggttggtggaatttccagattggccattggttccaagttttgttgtgacccgagttttgtcaaatttgtagtgacaggcaggtgtggtgtgtccatatcaaaggcagagttgacataaggggcgattatgatgattgggaccatgaaagcccccacggcctctattcttgaggccctgaggaggacgatagccattggtttttgatcctgtgaaggctacattggcttgaagtttcatagtgagatctgtcatggagttgtggtgttcaagatggctgtcatgcaagagaagaagagattggacttcttcaaaggtaagacggtcattgtgcatggtgatgctagagataactgaatcaaattcaagtccaagaccattgagcaactgaagagtagtgtcttgatcagatattggagagcctgctacagttagagagtcgataatggattataatttatcaacatagtcagatatag

SEQ ID NO: 51975 - DNA, 534 bp, Cannabis sativa
ttttttatagtttttatttttttttaaaaaaaaaaatgacgattatagtgttcgaggttgtcgattgcgactgtttggagtagataacggttaggctcatcgcagggattgaagagctacaatttttaggttttaataatttttttttatttgttatcctgttcatattttttggattttttattgctttttgggtttgactatgtaattttcgaatttgtagtcacttgactactatgtgtatttgtctattttatgttcgtattggtctttttttaatagaaaagatttttataatgtaaatcaatagtataattttagatctttgcgttatgtacttcaagatctcatggtttcgagtcttatataaagtttattggtgtgtacagccaccacttgcggtggagctccagtgagatttgaatttttttttttgtggtctcggttctaaatcaagacatatagtgcaaacatgaattgcacacccgtaagtatcagattaaaaaccgataccaatgtccaaaagtctcggtt

SEQ ID NO: 51976 - DNA, 1174 bp, Cannabis sativa
acacaatgaaatatcaattgtgagaaatttgttttaatctagaggtaggtttttaaagcttgcatatgttcaccactattgtcggaggaatttagacaacaccaaaaagtaaacaaacaataaatattcaaaagaaaaacaacgagcactctgcttagaacagcgactattcaaaagagactacccaaacgaaagaagaaatggaaaaataaatgaacacaagggagtatagtggttcagtcagatcacggtcttcttagtccactgttaaaaatgatttctacttagtttattcatgttggatcactcttttacatataaaacaagtgtccttttagttacacataactaaccggttatagaaccattttataattaataataatattaaattaaaataaacgtaaaggaattaatgaagaatagcttaaatatgttctaataagtgcagcaacgtatgcgacctatagggtgcgagttgtctgttcatattctcgcacaagcccgcatgttttgggtgcgttctatttttctaaggagggttgaagagcctcgtgctagggtgtctgcgttttatttgagtcgcatatatgacaccccatatgcatcgacaacatgagacacgtgagtctctatcaagttatcgcacacgcattgttgtttagactagtcgttatgtaaagaaatgatctttacttagtcgtaggagaaggctacctagtcatcgcatatgtctcggtacatgcgcgacttgtataaacccttcttggtcctgcttatcttattctatgctaagcatagtatgcgactagactttgtcaaggtcgcatcatcttgcaagtttggttcaaacgaggtcaattctcgaagagtcattaattaacaactcttccatcccttgaggattggatccacttgtttacacctttcggagggcctttggactaacgttttaaaaaaaatcaactcatattgttttttcctaatttacagttgtgtagaaaaaattacttctttactatttttttatactatttactaattttattatttttaaatatttgatttatttttttttttttttgaaatttgggcaagcccacgtaatatcctatttcaagagcaagaaattaaacacccactttttttttttatttttcattatttttaagct

SEQ ID NO: 51977 - DNA, 900 bp, Cannabis sativa
tcatttgaggcattgtttaaaaaggtctttgccccaatgcaagctttgccaaacaaaagaggggatatgacatttgccatcttctaagaaggtggttcacagataatacttggctttaaaaagctttgctaaaagcaacgaaggattggagtgaatacgccatgcctacttagcaagcatcgcttgattgaaggagtctattattcaaaaccccaacccacatgtgatctttgacttgtagaggaaataccatttcttctagtgtattttgctttccccatcatttgagccccaccaaaacttagccatttctttctccacgaatttgaaaaaactcgtaaggagattgaaaatcgacatagcatacaagggaatgggttggatgaaaactttgaggaggatctctttacctcctttggaaaagatctttcctttccattttgtaaggtaagcccgaatcatgtccttaagggggttgaaagagtgcttctttgatctcccaaaacattggggcaagccgagatatttatgaaggctgttgaaaagggggatgcctaagtagtcctagacaagggttgggtaagtaagacttgtgttgggtgagaaaacgatcgaagacttggtgaagttaacaagctaccaagagatcttctcatacaaagagagggtatccttgatatcattacaagcctggatattagaattacagacaagaatgctatcatcggcaaataagagatgggagatcttaggggcattcctagtaagcttgatccctgcaaagcaatctttttcctccacctgcttgagaagtaaggaaagtccttcaaagcaaaggaggaaaaggtaaggaaagatgggattcccttgtcttatgcctctagagggggtgacacaccc

SEQ ID NO: 51978 - DNA, 1197 bp, Cannabis sativa
tattcggtaactgtaagattagtttgttaatttggtatattagtaaaaattgcccttgttattaggcaatagtggtgtccaacaccttttagaggtaacaccttacaattaatttagcgatattttctaaaaattattttcttaaattatatgaaacttgctacttaattatactaataacaatataacacctcaaaaggaactagttactaatagtgtattttagcaattctcataaaaaaaaatattattagaaaaatatataaataaagaataaaatggaatactttttttgacttttttataattaattcagtaccttaatgtatacacaaacaattaatgaaattattcgttttaacagccatatatataaaaatatatgtttttttatattatatattttgatattttttttgaaagaatattataatttaattagttagagaaactttatatcaaatttctaaaaatgtcaaccatattaaattaaaaaaaaaatcatatacttaaatttatagaatgacattcaaaaataaaaaataaaattataggcatgagaatataaactagccatatgtcatgtgtgttatgcatgtgtccagtaataaacatataattaacatcaaattaattaatagatctctagctatcatttaaaggattattatagaaattaaaacacctaatatttcattaaattattaattatgttatattattatgtaatgaattgttatctaatttatttattaatgaaattttttatttttctcaaagtaataataataatttcattaaataaacacaaaaacttttatgcatcaacataaaaaaagtatcgtgaaattttaaggcgcacctcctaaaatgagtgtgccaatgcacattttttgtgttttcggtattcagattgttttaagcttagttttttttcttcttttttttgtttatataatagtatataaaaaatttaaaataatttaatatggcgaaaagattcaaacaattttattgtatacgtgattttattttttattttttatgcatataacataagttgtttaaatcatatattttgtattttaaattattctaaattttttaaaacttttgtgaatatcttaaacaagtacgatatgtaaactttgaggagtaaaaaaacactttgtaaaaaaaaaaacacaatactatgaa

SEQ ID NO: 51979 - DNA, 1704 bp, Cannabis sativa
taaaataaaatgatatactacacagtaaaatttatataccaaataacaaaaaaaaaacataaaacttacaataaaaaaatgtatatcataacaacaaataaaaataaatatatatatagcatgctaataaaattatatgtcacaccaacaaaagtacaataaaaaaataaattaacattgtttaaaaataatattaccgtataataaaaaatatatatatcattcaccttaacatatatactaataataataataaaaatatattactaatatatatatactataccaatcaaattatataccacaattaaaatatagaatttttagaaattttatcccttgaacttacgataatattgattctgctccctaaaatatacaacttgttaagaatctccctaaatttttacatttacaaaattttaatccttctgttaggttccttcctattattctatttaaatgctgacgtttctttgtaaatcaacaattttgcctactaaactttgacaactattaaatcatacccttcaaaataaaaatgagaaaaaatcaatatttttttaataaatcttaaaaaattaatttaaatatttaaaaaatcattttgaatgagtaagaaaattataaaagaaagtttaagcagtttcaactcttgctaaatactctgtagccagtttgcttctttaaaagcctcaatagttaccataaactctgattctgtagtagatagagcaaccacttgttgttgttgtaacatccagcttatgcagctcttgtttatggcaaatatgtaaatcttctagtatctttgttagaagcataatctgcatcaacatatccagttttgaacactttctcttccttgtaggttcaattttagggcaatgctcatttgagagcttaaagtgtctagccatttctataattttttggaatatctcaaaaaaaaagtatgcattttgttgttaattcaagtataactagttctaagattgacacggtttgttactatcacataagaagggctagcatcctaaataaatgcttaacttttgcaattgagaataaagttaaggaaatgtatctatctataggcgatggccaatgtatctatccataggcgatagcaagctatttgactattttggagttgaatggagtagagttggatacctctcatttatatagttttccattactaaaaactgacattattaaatgtcaagtaatgggatactgaaggatctgatgtgccatctaagtttttgttggattctcctctcgagagattgagattatctaaatatgaattggcaagttctaatgttcattatcaattacaaagtttaagcctcaagttcttgaaaattatattattgcatgttgtacaaattaaagttgaagtaataaatcttgaatctttgtagtggaaggtaatcccttggacggtataaatttctcttctttgcaagaaaattagaaataatcattatgtagagtttactttgaaaacaatcaccttgaaagctctcatttcaaatatttctctaattgagaatttggctttgagcaactgccgttcattagagtcggagcaccttaaggtggcgtttggttgggaggaatgaaaatacaggaatgggaatggaataaaatttaaaatgtacaaaaaaaattgataaataaaccattaaatttttt

SEQ ID NO: 51980 - DNA, 639 bp, Cannabis sativa
agaattaaatagaaataaatttttagttttatagttaaatctacgtagtttacgactctagttacttttatttctatgagtgttttgagtacaaattttggcagggattttgcatacagaatttgatcgttcttttttcattatattcaccgctatttgtaggagtatgatagaagttatttaatcttatcgtgggttttcctatgttttacttgttttactaatatgcgagaatataataaccacttgcttttttgaaattataaatgaactagtgcttagacttagtcaaaagcatacttttctgttgtcttcttctcgaaaaagcttatcaaaagaaccataaatcgagtgcaagcttctttgaagcagacttgatgggcaaatcaatactaaccatcttttttaaaaagtgtgaagaaacaaatttggtattgaaaaagaaaaaatattattttaaggtaaaagaatgtattgttttgggctataaagtttctcacaaagatattgaggtgtgttaatacaaaaccaaattaggaattttattatattctgtcactgttgcataacagaatttaatttgttattttccttttcttggtttttgtctttctgtaatgagagtatttgtacctctat

SEQ ID NO: 51981 - DNA, 1015 bp, Cannabis sativa
  modified_base (862)..(871): a, c, t, g, unknown or other
tacgaggatagaatgtaataccaatcacagacttgatattttcttattatattggataggggtactagcaaaaacagaattttgattctttattcaagcacttgtcttttgtaagtgaataatgtgaatgtacttatggtgcatttctctctctccttaacaatttttcatattcttgtagtttactagtttggaagtagctcatatcttgtgttgtcatgcatttagttcgtttattaaaactttaagtttgtgtttttgtaaggtcgttgctgtgatgcctttcatttcatggtaaatgatgtatattttccttttttcactggtggccattttgagtaaacatactgctccaatcatccagttttgattatattttcattcgtatactggtgagggccgtgaggctaaattgctatgtctatattcttttaatatgagcaagatgctgcttattataggacacaaaatcctttactaggttgggatcttgcaaaaagattgaattgggtataaatttaagcctatttgcccaattcaaattttttgcaagaccccaacatggtcaagaatttcgtatcctataataagcaaatgtcatattttatctaataaaaaatctgaaatatgatatttacaaagtggaataaaagtttgcaaagtggaattgggtataaatttaaaagggaaattttatttctaatacttaaaaaaatactttctaacaaaatttagactccaaattaatttatacaattaaatgttattgttttcaatttctacccaaaataccctccctatcattttccttctttctcttctccactttctcttcctcttcctcgcaccaccgagaccaacnnnnnnnnnncaccgagaccacccaaccaccaccaccaaacctcctttcctccaccaccgaacctccttatctactcaaaaacccagaagaaacccacaggcccaagactggtcggacctccatagcactcaagcatcaaaaaacccagaggcc

SEQ ID NO: 51982 - DNA, 1681 bp, Cannabis sativa
gaataataaacacattagcctcagccttgagctcctcctccatggcctttttctcatcctccaacctgcaaagaagggtccggagaccctctctttcttcttgaagacttgtaatgtccagagacaaagaatcaatatcagcttcaagttgctcggttgatggcgtctcttgcagttccttggtcggctcgacaacttttgtctcggccgctagaagtttcttattgacctctcccagctctatccgcacatctccaagttgaacccgcgcatcctcgacatcctttttggccaagtccacttctattcgtattgtgttagagatggcaaggttcttagcagtagtcgacttagctcaggaataggcgtaggccatcttcaaaccagtctttgcggaaaaaggcattaaaatccaaactagtcaaagaggaataaaggaaaaatgtttgaaaagacttaccctcgaaagttctttcaagacttctcccataacaagctccaaagacaagtcattatccgccccagccaactgttcgttcacctctgggaccaaccagctcacatagtggttgagcatgtctctgcctcttttggtctccgtatgcaatattaaaggtgcggtaggagccttgacttgttccgtcccgcttctgatcagctcggatccacccttcgcttgctcaggttcgtcagaactccctccttgagaacctttcgccttagtaaccttcgaggtaggagggtccacagcagcttgttcttaagaaagatcaatgacctcaccagttggtgctttctctttggacgtagtctagacttctttgccagaaaggataagcccgagcttccccacactcttttcttgagtgcctcgatcatcttctgagacatttttgcacgaaataaaaaaaatacagtcagaagaagatacaaaatatgcgaaggatgaaaatcaagaaaaataaatgcaagatgaactactctacatgctggcaggagcatctgcccgaacaagcacagatggggcgtcatcatctgaagagtcttcttgcttttccaggaagacttttccctttccctctgcaggggtggatgttcgagcaggtggatcaggctctctgatccgaatagtatgttcgatgaacctctgtccagttgggagggttttcttcttcttgagcggcctaacctgcttagaatattcttgagcctccttctcctgctcagaatattcctgagcatactacttggctcctgcatcatccttcaacttagcctcacgcttaagttgaatgagctccttctcttgctcaacttcctcagcctgaccagccctagacttcttcttcctccccttcacaggctagggtataaagtctgccgaataaagcttgtacttcacaaagttgtccttcgaggtcaacaaagtgatgttccaagcagcattcggcaatcagagaatcttttgagccctgtccctaagtgccagtgtaagaggaagacgacaatatattgggatctattgaaatcgagtataggtggaatccattccttccacgaagtaatactcgtcaacgaaacctccaatcttgctaacatccttgtccatagtgccggtcagccacttgaagtctggctgagagaagtagaagttgttggatatattttactaggatctaga

SEQ ID NO: 51983 - DNA, 627 bp, Cannabis sativa
gggtgagattgaagcagttgttattgctactggtgtgcgcacattctttgggaaagctgctcatttagtggacagtactaatcaagttggtcactttcaaaaggtaaagagtgtctttcttttctcatggtgaataaacttcatgtcaagttagtttgaatggttactcacaaattttcaccattgttgaaatgtttgatcaggttttgacagctattggtaacttctgcatctgctcaattgcaataggaagtgcgatcgaagccattgggatggcaattcaacatagatcatacagagatggtgttgacaatattttggttctcctcattggtggtatcccaattgctatgccaacagtattgtctgtaaccatggctattggatctcaccgtctttcgcaacaaggcgctatcaccaagagaatgacagcaattgaagagatggcaggaatggatgttctttgcagtgataaaactggaactcttactcttaacaaacttacagtagataagtgtttgattgaggtgagtaactatgctcaaactaagtatttatagaagaaaataatttgataatttgagcctttgttataatcaatgaattgcataattctaggtgttcaag

SEQ ID NO: 51984 - DNA, 1214 bp, Cannabis sativa
cacatgaagaatatcttgcaatactaaagaatgattaggaaaacgagtgcttactgaaccagaaccaatttttcgaatagggatggaagagccattacctactactactttagcctttcctttgtaatcggcagcattaggaagctgatcagtatcattggtcatatgatgtgtggcacccgaatccaaataccaagctgtggagttgtcaaaagtggtgtttgattcagagataagggcctggggagtctcagtattgggagggttagaggaggaattgttgttgttgttgcctgtgtaggtaatatcaaaccggtggtaacatttgacagcaatgtgtccagcacggccacacagctgacaaacaggtctggtgccacggcctcctctgtttgtggaattgaaccttcctcctctattagcccctctgaaaccacgatgaggatatgaacctctggtactagccatgttggcttgaacattgtgcaaagagtcggtggtatgttgctgaatcctcatttcttgactttgcaacatgaattgcacttcttgcagagatagagggtcgattcttgaggttaaattgacgacaacagcttcgtactcggatcctaaaccaccaaggatgtataagaccagatcatcgtcagagattggttggcctgctgcagcaagctgatctgcaaattgcttcattttgagaataaattcctcaatcgagagagatcccttcttggttgtttgaagcagatttcgtaattgcagtaatcttgctcgagatctggttgcaaacagctgagcaaaggtggtccaaatctcatgggatgtattgcaattgatgacatgaccaagcatatgttcagtgacagaattcatgagccaatgcatcaagaaatgatcaaaacgcatccaattttgaaaagcagggttgatagtgttacctgcaagaaattcacgaggttgagggagatggccaagaatgtagccatcaagatcgtaggctctgaccgcagcaagaaccagagatcgccatattgtgtaattggatcggtcaaggcgaatgttcagggggaggagatgattgttggggaggggaaattgattttgagcttcaggaacaggatctgcagctctagcttgttgctgttctactctttctccttcaggaggttctactctagtgccatgactcgacatggctctgataccatgta

SEQ ID NO: 51985 - DNA, 2098 bp, Cannabis sativa
tgctatccaaagggaccatgaactgaggtcccagattgaagaaaggaaaataagaagtgatgcggcttatgaaggggccaaaagaaaagagaaagctcttctggaagaaaaactccgccaagaaaaagccaaagccaaagcagaagctgaggtttgttgccttttctcaaattattcatttcttttggtagatgcataaagatggttgttacatttctctattctttcttgtatagtcatatgcacatattcttctagatataatcttagtgcgctttggtattattatcttggttttatgctgttaggactaaaagtattttcagatgcaggcgaagctcagagctgaagaagcaaatagggctgcaatggaagctcaacaaagagcaacaaaagaggctgctgaaagggaggccaatgaagcgtcaagccaggctgctgttcagaaagatgcttcaggactgcaaatgaaagccaaaacaccaaggaatctgaacttggaaaaccgataacatcagcatcagcaggtaatttggctatcaggcaatatatagcaaccttgtaatgatctatagatataatcatttgttcattcatctaaaaatctaccttagccctaggtttcataatgaccagctacgtttgggtattggaaacagttcttttgtattcccctcttcctttatttccaagttgaagcatgctttcaatactccagaaattttctgttatctgatgcataaaaaagggctattggtggcagatgacactactaaagctgcagaagctgcactaaagttggagagggaaagattaaaaaaattggaagacttggataaagaaagcaagacattgggattgaacacgaataaggtttgctccctactttgttattcaaatttcttgtaaaattcttaatctggttcaaatgagattttactggattttgtaaacatggatgttactgtatgttaaatttcttatttatcattccacagttattgcaatgtatgattgtcatttcttaagcatttctcatgctctttttttttttctcaaaattcttttgatgagttaaatatttattttctaacatattgctatttcttttcaggattacgtttgccatgaaaggagtatctctaaattgataagccagattacagggactaatgatgttgtcaagtgagattggattttgcccatcaatttatatctttttatttaacaattagttatctaattggcttattatcatgttacttacctagtggttttgttttctttctagcataaacgagtaattgttttacataatatgttggaaagattttggacttaatgtaacattccttttgcagacaaaaagcatcagaacttgtcaaaattctcaaaaatcctgcttaccctcaatctatcattgctggagcatttgctagaaaggtactttttatttattttggatcagcttctgatctctttgctttatttggtgattgagagagtgaaaacaaaatttgagaatatgtctcttttttcacatacatatatatgatatttggttcttcatatcaaacgctagagatatactttctgagagcagcgtgttgaattttattcggttgtatatataggaatcgtgtcgggattcgggagatcctatgttattctgtagtcatttcatttagtggtttatgtttaaaattgcattgtgataggcaactagaatgcggggtaaagtggttaaataatagaattagttcatagtatatgtgtaattgtagtattgagtactggatatgatgaaatagagtagtatatttggaataggttaaggaggagaggatcatgagaattatattgtaattgagcttttgctattgggagctcattattctagtgtgttctatctctttaatcagtaacaataattatcagagttgcctattttccatttacttccatctctgtttttttttggtctattgatttgaggatcacatccattaggcaagcaagctgctaagcgttctatttgatgctttaaatatggccactgtggctatttaatttcaatttacttgctttgctcggagtg

SEQ ID NO: 51986 - DNA, 1529 bp, Cannabis sativa
  modified_base (1231)..(1232): a, c, t, g, unknown or other
tatggttattgatggattttggttcgaatttgggtaacatttgaaggtataaaaaattagattttttggggttctgggcctttcgccgcggccacagcaaggctcgccgtgacaaggctccagcaggttggagccgtcgcggtgaggacctacggtcaccgcagtgaggacccttgttttctcagtttttgtgtttttctcatttttgccataacttttgactcataactctattttggacgttcttggtattgttggaaagctcgttttgggctcttatatgttaatttataattagagttcaaattatgtatatgtgtgaaaatgaatttaagaatgtgtgactaagattaccgacgcttattcaggaacacctaagggtttagaatctccacatatttagactaacatgtaagacagtaacctagaaaatagagtatagcacagcggcactcatgtatgttatatttatatatgctatgcgagaaaacgagattaggattattaccctaaaattagcggttatgtgatctaggttattattctagagtttaagtgaatatgaatgcaataatgtattgtatatgttaaaataaagaatttggcagttaaagcataatcaggttagactcggtaatcagaaccgagataaactaatctaaggccttattataaatagacgtgtgagcgtaaaatgtaggtttatgtcaaataaacaatagatgcagtggcatcaataattaagtgatattaattagtattaatattattgtttatactgtcttggtaggtcttggctcacgggtgctatattatgcaggaaagggaaaggcagttattgatcagccatgaggtcgagggctttttatggtacattgtacatgtccaagtcaagctagaccacaagggttcggtttaccaggggatatttgtataatctccacttttgtcgcttaggtcggtgtgtactaataacttgtagtattttgaaaaagtttttacggatcttgaaataaaatgtgtacttttggatgtttgtaaagttttcctaattacaaattattatttttaatttgtattttttaaagtttaattatagctcttggctctagttgattctggtttaacgagattagtatatgtttagtcgatgtacgtggcgttttaattgttagggcattacattttggtatcagagcacttaagttttaaacttcttgtagagcgactnnacatgtacaatcattgtcaaagacaagctagactcgtagtgcagtaagtattgagagtaaatgcttaactatttttgtgattaaatatttactgctctttgttttaagctgcatatgagcatctagaagataacatgttacaagaaaagcatgattattaattatattaataaatgtttatgttaaaagaaaaatagtatgtataagttatggttaaggtaattgttgggttttgtgcactaaataaaacccatttcaatataatcagatttacttaataaagatcagaaataacat

SEQ ID NO: 51987 - DNA, 1314 bp, Cannabis sativa
atgaagattcaggatgctcagggaggaaaaggatggtgatccttgatgatgggaggagtattcctttatacggtgaaggatcttgcatagagaatagctttgccttgcttgataaagaagatattcaagagaggaaaagacttgaggaggaagaagcagagtacgtgactaaaaacttagatgggaaaggtgagcccctggataagaaagggagcaacgaggctgcagaggaagaggaggaggtgacacagacttactgccccatcggagttggagtggtgattcagaatagttacaataatttctcagtgaggatgaatgactatgctaaggctccaaaggaaagagcacacacggaaagtgttgcacatatggccaaaattttcaagaaagcttttggagacactatttttgggagcactaaagggtctattccgaagggatccaaaaggaaagcaaaaactagaagaacgaatttgaagcaggttggacctaaagggattcctaaaaccccaatttttggggggaaggatgagggagactcccaaagggtgggggcaaaaaggaagaaaaccagtcatgaaagtagtggtccgaagagtaacatgacacatggaggagagtccagagacaggggaaataattttgaagcacaagaagagggaggttgtcaagagtgtaggaagaggccatgtgtcggggatacaggaatgaggaatgatatagagttacagactgttaagacgtctttggggagtgaggaaggaagctcaaagacccccaacaaagatcaggattttattgtgaccgaggaggcgggcctaatcatgcccccaagtttccatgaggatcctgtcttggaactacagaggcttggggaagcatgctacagtcaaggctctccgtacggtgattcagagtaaaaacccaaatgtagttttccttatgtaaactaaacaattagagaactttatggtgaatctgtggggaaaccttgggtttttttatggtaaggtcgtgtcttcggcatgagcctcgggagaaattaggttattttggaaataaggttggtaggtaaagatcttaagagcggagcgtaatcggatcaaagttttgtttggtgctgacgacccctatcctccctggattggagcctttgtttatgcgcctccgcgtcgtgaagatcgtaagaagttctggactgaatatattgaagaggttgttcactgggattccctatggattttaatgggagacctcaacagtatagtcaacctagaagagaagacggggggcagacagtttactttgtct

SEQ ID NO: 51988 - DNA, 1196 bp, Cannabis sativa
tttttatgccatatatattaaaacctattttcattttcctatattttcgtaaatagcccttcaataagtttctcacttatttttttttcttttaaaaacaacactccctatttttgttaaaaaaaacttataataaatataaaatgtagatcataaactttttgttatttttttttttgaatatttatgaaataatgattggttggagaataataaccaaaacaaattctcaattcaatctcttcacttcgaccacaacaaaaccgatagagatcattcatgaagctagctaatagaaaggaagaaggaagttgttgtgcgtgaaattagcgacggagcaacttgtgaaaaattatatacttttatatatttatatattaaaagtggttatctaacagtattttttggtttaacagaatatactttaaaaataaaaaaatattatgttaaatttaacaatattagtagatttgatcctccagttaactttcaaacatatataaataaaactaaaccctcaaaaccctaactcatttacaccgtgcaacaagagtcaagaccttggccatcatgatctatctttcttataatatttttgttctctttctttgaaaattcttgtagattcttgttcgtcattttaacaaacgttgatcaatcttgatgagttttgtaaatgtgccgattactacagcattgtgactcattttccccaatctgaatcgcaagcgtggttcactcacatagacgatgcccatcgactctctttgcctcataatatggcgcaaagactggtgccaatgctggagccttttccctttttatcatcgaagtcagattttttgcccatatctttccaagaacgatttcttacatattagcatcaaggagaaacactacacagactccataatttggttctctaatgtctagcaaagaaggaagaaccatagaccctaagaaacagaagcttctcatcagtcaacacaaggagaaacacttcactgtcggtgaaatcgtttgcaatataatcatcggcgtctccgacggtctcattgttccattcgccttggctactggtttatccggtgccaatgccacctcatccatcgtcctcactgccggtatctctaaagttgctgccggcgctatctccatgggacttggcaggtactatcaattttttttttttgaaa

SEQ ID NO: 51989 - DNA, 1259 bp, Cannabis sativa
atgaattctctctctgaggctatgttgggacacgttctgcattgtgaatccgctgctgatgtctggactgtctttgcaagtctttttgccactcaatccaaagctcgacagcttcaactccgtttggccattcaaaacacaaagaaaggatctatgagcatcgacgaatacattttgaagatgaaaaaccttgctgattctcttgcggctgctggtcacaaactttctgatcaagaattagctatgtacattcttggaggtgtgggtcatgaatatgaaactgtggtggttctccttacagcacgtgctgatgcccttactcttcaagaagtgcagtacatgcttcaaaatcaagaaatgcgcatcgaacaagctacacctccaatcttggattctgttcaggccaattatgctcaatacaacagaaattcatctggttcaaatcgtcccaatactagcaggggtcaatcaactggccgtggcaataatcaaggccgtggctctcaaaatggaggtcgtggaccctccaatggccgtggacgaggctctcgacctgtttgtcaaatttgtggcaagattgggcatcttgcctataagtgttatcatcgatatgacactgagaatccagcctcttcctctacatctaccaactctggccataatccacaagctcttatctctgattccaacactcctatggaggacaatgggtggtatgtggacagtggtgccacacatcacatgacccccgattctcaaaatctcacctccaccactgattacaaaggcaaagccaagatcacagtgggtaatggctctaaactctcaatctctcatataggccattctagttttaatactactaatccaaataaacaattattactaaatgatgttttacttgctccaaagattacaaagaatctattgagtatttcaaagattactacagataacaatataactcttctttttgattctgatacatgtgtaatcaaggacaagaatacggggcaagctcttcttcagggccatcttaaacacgggctatatcacttggatctctccaaagccaaacacactacttctcagtccaatggtctctcaacacctgctactttcaattgtgtcaagcatcatccacctgcttccttctctgacgccgaaacatggcattatcgacttgggcatgcttccccaagaatattacaagctgttctctctacactaaaatcgaaaacaagatgtaactctttacc

SEQ ID NO: 51990 - DNA, 829 bp, Cannabis sativa
attttttgctatgattaaaaatcgtacatacagtcagaaaaaaattatattatgactaaaaaattatcactaactattttttgtcataataatataccttctaatttctaagttttagaactgatgtaaaaccttaatatctttcttagtcgtggtcaatttattgttgatttaactgtagtctttgactctagtccatttcaaatcatgaagtggttccatttagtccagagaattgtaggatctaactttagtaggagtttttctgtctaaattaatttgtttcttgattatatatataagccagattaacaaatgtcattgtgttagattatatatatatatatatatatatatacacgtttttctagatattaaatgcttataactttgaagaaaatcattttgcatatatattgttttaagtttcttagtctttattgattaagtaactaatggtgaaaattattacttcaggagtaatgcgtgtcaagatgttgttagaaaatgaagaatttacataaaaagccaacttcggtctataagcttgttaagcattccaataataaagttttcttttaaaatttattcatttttttcatttattattggtattattgaaaactttcgatattaaacaatataagctatgaaggaattagctgaatcatgtgccttgtttgatgacaaataattgtagtctttgattctagtccatttctaatcatgaagttttgttggataaattcccatactattgtcccataaataaagttacaaggaaaaataatttagacctctttataaagcctcaacagaccattataac

SEQ ID NO: 51991 - DNA, 946 bp, Cannabis sativa
atatagttttacataaaaatattgcataaaatacaaattaatataatactatacaatataatacagtgtaatacggcgtaccaaacaaacccttaaataaaaaatacaccataaatccattacacaatgttttttctagaaagataaattgaactaatgaagaaatccattgtgttcaggcttttaatttatccattaatataatgattaatatatcttctaatcataatgagtagcttaaataactctctatttcattccagcaaaaataaaataaatgccctctctcagtctctcttggatattgtagccaaaatttaatatgatattttagagttccgtagttgccaagctaatttcatttgaatataagtcagttccctttcataataataataataataataataataataataagaagaataccattttgtttgtactcttaattccgaagggcagagctatttataagctcgggtgcccccctgaattttgtaaacaatattatcattggacaccagtggtgcgcaatactttctataagtgatattttacaattaattaatgatatttttttaaaattattttattgagttatatgagagctgataacagtatgacacagaggagggtgctagataccaataataccttttagcaattctttttttaaagtttatatgtatcatatattgaggtatcttttaggggtattttcagtgcagatgatgcaaattatagctatttttttcaaatcaaaatgcatatgcaatttttataatttctcaaactgcaaccgcatcgcgagatcttaaaaccgcaaaaatcatactatgaaaatgcagtgtggtgcggtacagtttgagtggtttacaccatcatcattatcaaatattataataaaaatttaaaaatcaaactaataaagctttaacaatacaaa

SEQ ID NO: 51992 - DNA, 1000 bp, Cannabis sativa
ttccatataaagtaatatatttgttttacatgtaggcttcttattatatatatatatatatttggtgggtcttgtgtagtgtattcaaaaagaaatggtgtgggttttccttgaattctagtaaagtatgtaagatttgtccaagtgtttttttcttcgctggtttgtcatctcaattgttgaagatattgattactcaaagaattgaggaagagaaaaatattacatacggtatgtcggtgatttgtcccagtcaacatgtgccacattctcactgttcctagtcaaggtgttagttgagttagttaatcattttccacccaagtctaactaaccaataccattgtttgggagaaaaaatgaggttttttttttaacaaagcccacaagaaagaaaaaaactaatgaaatgataatgtaaatgcccatgacacgataccttaaagaaaaactacagaagtcggttggaaagataataaagacaaatcatgagtaactcatatgataaatcttaacttgaaaaggatcgagataaaactaaactcacggtcgagccaaaaaatgccttgaatcagccaaaaccgagataagatttaactcagattcaaactaagccgagataaatcttatctcagaccagatcaagatagatttaactcggattcaaattaaaccaacataagatctaactcgaatcagactaagataagatgtaatgccctaatgtttaggcacgctacaatgatttattacttactgtggagtcctttgctaatcaaaagttttctcaaaaatcgtgtaaagttaaaacttttaaattaaacttttataaatatataaatattcatacaaaatgttggaatctcgtctttaaaatttacaagtattcaaatacactttataggcatgtcgcttcgtgactacaaaatgtaggcccaagtcgtcccgagaccgaactctccaagtctaaccatcctgatatgtacaatcatccccaagc

SEQ ID NO: 51993 - DNA, 2672 bp, Cannabis sativa
tttgtgaaattaacccaataaaaattatatatactatgagcctataggttatagtagtaatgattaaaacttctttttctcaacgaaaaagaaagcacgtctttaattatttcttgatcagtatagataccttcttgttattatctcaaaaatcatcatatttaaatagaaaatctatacatcaaagattcaaaagtggtcaatgattatgtataagtcaaattaacttggtaaataaattcatacgacagttttttctaatgatttagttgacttattaagaatattctacagtttaaaaagtctttaaaaaaataaaataaaatctagctcctgtagtcaatgaaatgaaaccattgaacaagctttaattggttttcacttcagtcgaaaattttaataatctaataattattttgacttgtaagtcttttgttgggcttgaattgatcatcttctacagtataaattaaactatttagaggaaaaaagaaaccaacttttattagaccatcataattttagtaccactttttttctaattgatttattagtgttattggtacgacacttaatttttttattattagtatattatgttttagagattttcactatctaaaatttgatgatattttatataaatatatatatttacgagctatgttttactatttatgatttttcttttaactaattttttttaagaaacttcgtaaaaggaagctaaaaataataaacaaatatcactataacaaattttacttttaatcataataaaatttgtgattaaaagcaaataagttaagactaattataaatcattacttttacgttatcactaagaggtctatgaataaaggtattagtcacaaaaattataatttattctctcaaactaaattagtgacaatttgtatctatgttttgatcacaagtaactttttgttataactaaaaatcacatttaatcacaaaattatattgtaactaagagattgtcactaaaaataggttttttttctttttaatttgtagtataaaacagtatgaaaacaacgaacaaacaacgtagtatatttttttttaaaagaactaaggatagttcattgctgtaaataattgggaatcacaataggggatccctccctgttaaagtagccattacaatgacttttctctctagcccatttggctaatgcatcaaagccatattgtcttggggagaaataaaaaggaagttacaatcatcaaacaaattacacctgttcagtacctcctaagccaaaggtttcaaaatccacatcgggggacaaattttttccttcaacgcatcaatcagcaccttcgcatccgaagcatcagcaaacgctatgaatctcctctgcccagccaactgcattgcccactgaattgctaaaagttctacttcagccgcagacgaggcccttacattctttgcaaactacatagttttgttatttcgtctgtctagcatacccaccgctaaacctagtaccctccttccaagaagcatccgatacacacaacacatccgttgaattgcagattgtactcccaaccaaaccagttggtgttcttctacctatagccgcgttagcctccatcaacgctaaggactcggagtatcttctcaagatggagttcctaacctgtgtaatatcaaccaaacctcccttgaacaagtattcattcctagttttctaaataccttcaaacaggcagcccgcaaaggataggaaactatcagattgctctcttagaagtctcgccaacatccaatcgagcctttccttcactgaatttccaccgcccacccccacacaaattggaaaagggctgctaaaccataaggcccgcgcacaatgacaatcccagaacacatgaacaacggactctacttctatatcacacaacggacaagacttatcccttacaaagcccagtctatctctagttggaaggcagcccgtaattactcgccatagcataaccgaatgcctatagtgcagcttctgactctacaccttcttccaaaagtatctatattcggtctgtacacttgagtagcctcatagcctctcttcacagtgaatttcccgtcagtcgcctccttccaaacgatcatgtccttattctcgcatggtaatcgagcaatttttctaattctttcacccaatgtatctccaaacatttccttaaagtttgggaacctcggccttacttgatccataaggttgataaagtcgcagtaatcaagccatggaatccaaggttgtttctaaatatcaactgtgtcacctctacataccaaggtcatgcctcctttgcgaatcacatctctagaattcagaattcctttccaaaaggctgaatctttacctttgacttttgtactccaaaacaaagccttcttgcaatatttttccgagagacacttgacccaaggcctttcaatttgtgaaaccatctgccaggccagtttggctaaaagggccttgttcatatcctcaagctttctaaaccccagacctccgttaagagtagtagtacaaagtcgatcccaccccaccagggccatgaagcattccttctctgtatcccctgtccactagaatctcctaattactctgtcaatttctcgacagcta

SEQ ID NO: 51994 - DNA, 3013 bp, Cannabis sativa
atgattccatgagtcataagaaatctgtaaacaattggttgtcaaactatttgccattatctgagacgattttgtgcaggagtccaaaccgacatattatattcttcaccacaaagtccaatacttttttagatgtaattgttgccaaaggctcgacttccgtccactttgtaaaataatcaactgcgaccactgcatattgtacttgtccaattaagtctattcctcaaatagcaaaaggccaaggactttgcatctgaattagctcgttgggcggtgcacggggtatttttgaaaatctttggcatttgtcacatttctttacataggcctttcaatcttccatcatggtcggccaaaaatatccttgccttagtattttctttgataggctttgccctattgcgtggttaccacagaatccatcatgtactttggataggagccgtgcaacttctttttttgttacacatctaagtaatggcatggagaatcctcttctatacattacaccttccactatgatgtaccgtacaactttcctcatcattttctgagcttcatttctatcatttggaagttctccagtattgaggtaggctgctataggtgtcatccagttcggtgctgtgtctatcatttcgatttattccacaaaattgatgctaggttcttctaagaattgaatagggactagattgaccttattagttactgtgctgcttgcagcagttgtgttttcttctcttggaatttgctgagggtgtaacccttgaattatgcgagcaggtcatgtatcttgcttacataagctatcattttctctccccaggcctcgtaccatcctgaaacatgatttactaccaattgcgaattactacagacctcaatatatttagcatgcatctcctgagcaagttttaagccagcaatgaaggcttcatactctgcttccttattggaagctttgaatccaaatttgactaccccgtgcagatgtttccccctaggtgtgacaagggcaattcccgcaccaaacagttgatctgtagccgacccatctacgtgcaatttccaggtaggtctgtcttcgttgttgttcaacagggactcttgcattagctccgggttgtcccttatgctgctttcttctttgcatgtgcactcaactacaaagtctactaaggcctatcctttgactgttgttcagggttgaaagattatttcgtactgacccaactctaccgcccatttaagtaaccatccagaagcgccaggtttttacaatacttggtgtaatggttggttggtctatacccgaacaggatgagcttggaaataaggccttaacttccttgttgcaaagattaggcaataagtaagcttttctatcaaaggataccctccctcagcttcaacgagtcttttactgatatagaagactggatgttggacgttgttctcttctcttatcagcacgacacttacaacgtattctgtaacaaccaagtatattcctaattcttcttcatccagtggtttggagagtacgggaggctttacaagttgtctttttaattcttgaaaggcgttctcgcattcctccgtccattcaaatttcttgttacctcgaaggatgttgaaaaaaggaacacatttgtctattgactttgaaacaaatctactgagtgggctatccaactagttaagctttcgacttccttagtttttgttgacgatttcatattcaggagagcttgtatttattctggattggcctcgataccctgagcattaacaataaaaccaagaaacttacccgagctgactccaaagaagaactttaaaggattgagcttcatgttgtagtttctgaggattttgaagcattcatctaagtcctctatatgcccccagccttcttggatttgacgagcatatcatccatatacctccatatttcgtccaatctgatctttaaacattttattcaccagcctctggtaggtagctccagcattctttagaccaaacggcataactttgtaatagtacagacccatatctatttggaaacttgtatgttcttggtatggtggatgcattttgattttattataccctgaataggcatccatcaagctcaggatctcgtgctcggttgttgcatacacgagatgatctattcttgggagtggaaaacaatccttggggcacgccttgttgagatagataaaatcaatacatacaccccattttttattgggcttgggtgccagtacaaggttagccacccaaaccaggtagaaagcttcaatgatgaacttgttgttacatagtttatctacctcttctttcaacgcttgcgcctgttctttgtccaatagttttcttttttattcatctgggcaaaactttgggtcaatgtttagggtgtgagatattacaaaaggatcaataccgaccatatcctcgtgtgaccaggcaaaaatgtctaggtttgctcttagaaattttattaaagctaattttatttcgagcaacaaacctttgccaattttgagttttctggttgagatatttgggtcaatttctacttcttccatttcgtccaccaaccctacatttgtatttggttccccaagtatgggatccacatctttatcgccgccttgggcgactccctattgggcaatactttttcccttgcctgaactctggccagaggtattttcctttttcaccttagttaggacaaggttgtagcattcccgtgctattctttgattccctttgaggcaccctaccccattctttgttggggacttgactcacaaatgaaaaactaatgtgacagcttttaagtcatatagggccggttggcctaacatgacattgaaagctgacgggacatcaattatcaagaattgtgccatcacagtttgctcctcggagcttgtccaacagtgaggggtagatggatttaccctagaggtgcaacgctttggctaga

SEQ ID NO: 51995 - DNA, 922 bp, Cannabis sativa
tatttttggggttttgaaaaaaatgtcatagtttttttattttgaaaagttttgatttaataataaatttttttaattttttaagtatataaaatcaaatttcccattagaggaggaagtaaatgaaataaagggactaaattataaataaaaaataatttaatattgaaactggcactctattatattaagcatcatcaataatgaggaaataacaatgtttacttttaaaattttacttaatttttcatgattatttaccctttggtaaactctcccttccattctcactaattattacataaccaagaaccacttatcaaatcatgacacaactttcttaacaactcacaaattggtatctatctctctttctctttggatatgattaatgatttgtatttcaatccttatagagtatctcaaatagtgtcctaataatttttgacaaattagaccaaaataaaaaaaaaattacaatataatttacgtattttcaatttactaaataattgtacaaattaagttaaaaatagtaaaattaagtttccgtttatgagttgagagaataaacaaagtgactatgtttgacttatattatatatgcaaaacgcgtaaagtttgagaatcaaattaataaaaataaataaaagtgtttgaaacggcactcatcaaatttctacttacttttccctctcttttatcttattttatttattatttattttttgaaactttattttatttaattttgttgttagaccattttatttttttatttttattttcacacttccgccgtatatctgacaagtccacccacacacacacatgactcaataaaaataccaaaacactcccacgaaattcatttctttattcatttttaaaattcaaaataaaaataaagatatttctacaa

SEQ ID NO: 51996 - DNA, 745 bp, Cannabis sativa
atatataattaataaatattttaagttagaaaaaaattaataataaatatttaaacaaaataaaacttgacacaggaaagaaaaatataattgtgtaatatcatgatatctataattattaaataataaatattgatacgatttcatttcacaatcaaatttatatatatgattatgtactatttataagtcaaataaatatacacaaaattggcaaaatgagtttatgttataagttttgttacgtgtgattattattattgttattattattattattatcaataatattataagttttggttattaattattgtattttaatagtattatatgccaagtagaaaattatttcttgtggattaaaaaaaatcattttaaaaatggaaacaatatattgctttgggttcaagtctttaaaagtgatcatatatatatgaggagaagattaatcatgaatatgacttttacaacaatttattttctatgaaaattttaaaaatgtgttgtgatgatagagttttgacacgtgtgtatataagatatatataaatatatatatttataaaagatgtaatgagataactctttactaactttaagagcatgtcgaagtgatcttacaaagtctaagatagtggattctacgtatactactctttgtttattatatcaaaaggaaaattaaaattaaaaagaaaaaaaattacccactttgaaaaatctggttttgaaagagtcaaaa

SEQ ID NO: 51997 - DNA, 1713 bp, Cannabis sativa
ctgcagtagctttgttatgtatttggactttgatagcagagggctattcttgatttgatgcacttctattgcgagaaagtagatttctttattattgaggagattaacgagtgttggatttcaccattactgttatttgtgattgttatatcatccacataacattaaaatcgttatgtatgaacttggagtgaacttaagcaagggagagttatatgcgtttgatgagaaaaagcccaacttgcccatcaaaccaggctctagtagctagttttagctcacacgaagtcttgtgcagttcgcagaccatgttgttcttcttgtatttgaaagtagggctcaagcattttgctgagaaatgtaacatcaagttgtagactttgatgttcctattttgtgagagggcctaagttagaactattcttgttgatgttggttttacaacgttcaagtgtagcagaaatcaaattcatgaaatccttggcaactagtcttgccttgtatcttgaaatagaactatcaataattcttttaaggttaaaaatcctttcacatctcacaatcttttgatctttgggaatggggacaagataccatgtgctcgtttttcatcaaggtgttgtgatcctaattcatagcatctctccatttacatgtctcaagggtgcaaatgttgagtttggtccattctcatcaagaacctctaaatgggacacctttggcttgtacaagtacatcccatctgtggatcttgttctcatagggtacttgttcatggttggacaaatatttggacccattttgctcatctgtatagtcttgcatttctctgagctgcataggatctcacacatgtagctctacactatattggtgttcttgtgtttgtgagtgatgtgaagaagcttgtcaatttggtgatgttgtaaatgagatgcactattgtaagttctactagtggcatttcttgtttatggtatatctcaaatttcaataatcttcccaattttgtgaaagtataattcattctagatctagattcataaatattttggtcacatgatcttagagcttagttcatattatattttgtaattgtcatatctgcaacatctaagcttaaactctataagatttcatccaattttgaggggtttttcatgttgagtacttttctgcttggcaataagttgatattcttcggtgacaagtattaatatccttagtgcaaggttcatgtatagcatacataacataattttggttgagcaagagtgcagattgatctctatttgaaagacatttcttattatgtctctataaagagataatatgagagttttactaccttgtttaatgtagtaaatagtggtattttgttatcattcatcttttcagggaaacgtgctagcccattacctttatctgtttatgagttaggatatggagacttacctaatgtaaattttgtatttgtgtgtaataataatttatcatctatatgttacttctcatcaatggaagtgtaatcccattattttccaacccaaatctttagtttatcagttgtttggttctttgcaggaccctattgaacctttggagtggcccagaaggtagattcatgtttggctgtagctgtttaagtattattaaccaaataaagttgggtacttatctgtacttttattgaatatagttattacaggagct

SEQ ID NO: 51998 - DNA, 885 bp, Cannabis sativa
ttataaattgaaataaataaaatacattaagataatttaaaaaaaataaaattttaatgatgtattttaaataacttgatatatattgtaatgtaaaattttaaaataaaaaagagaaaatgagcttttggtaaataaataaaaaattaaggtttttgtgatttactttttaagactaaaatacaataattgttgagactgctcaaagattaatcaatgtggggaaccaaaaataaaatcttgattagatatattgtgaatgaaggtagggcaagggtaagtgtaagagatgtcatatcgtagagattgggacttgttagagaaaattcattgatgcctttaagaagtggggaacaccttatattatgggttgggttggagacattaattgaggatgatatcctttcctatctcttttgttttcttctttatcttccattccaacatatatatatttataaattttggcttttcttattgtatctgcccttttaacatcttctaatcctatactaaatatatatgttatgtgggtctcatctatggacccaataatagctaccacattacaataatatcatcccaagaaattgccactctcacttaccttttttatatacacactattaggacatttgggtagttcctttttctcctcacaggagtggtagtgtatctcatttgacaattaaaaaaattataatttaatttttgggagtattgctattaggtattgatgtgatgttttataaatagttaagatattatgttatttattaaatcaaaatgtgtgagactcaatattaaattgcaccaataagaatatgttaccttcttgtagtgcttgccattttaaattgtcttttagcatttctcaatatttta

SEQ ID NO: 51999 - DNA, 786 bp, Cannabis sativa
catccgataacatctaaataagatataaaaataatatgacaatgttagaaaataaagattaatttaaaataaaaacttcaaatatgaataaagattaataatcaaataaaaatttctaaatattgtgctatcattaatacgtaaattaattaaatttgaagttatggattaaaagccattgaatagaatattaattatttcttcttctagtctcttcattgaagttacatgcaaaataacattttatattcattaaaagtagtctatattcacatgtggttgcaacaattttgtaattttgtattctacaaagaactgttactctattagttcttcaacttataaattgaagttttctttattgtgcattaaatttcatgtaaaataaatcatatgtcacattcagtataaaatgattgacaaataaaaaaatgaaggaaataataatataaaaaaattattatataattcatttagtgtaaaataattgacaaaaaattaaaaggaccaacaattttcatacaaccttcttatcaattaaaaatttttagtgttgagaaactcccacattttataaaactctaatacttctctttcaattatctatttggattgttttttaagccataaaaaaatactctatcatagaagaatttgaaataataaagagaccatgaaattaataagtaaagaaaattattaaaaaaactaataggagtagtttaaatataaaataaaataatattacaatagttttaaaataatttagaatattaaatttttaaa

SEQ ID NO: 52000 - DNA, 1369 bp, Cannabis sativa
taattttagtcacaataaatattgtgactaaaaatacatttagtcacaacaaattatgatttttgtgactaatatatatttagttatagtttttttagtcacaatataagaatgattattcataattactcagaaattttttacttttaatcacaaattttattgtgaccaaaagtaaaaaattttatagtgtatatataaatacaaaaattaattatgaatgtatttttttctaaattactttaatattattataaattaatttactctaaaataaaatatattctacagaattaaaaataagagtgctacattcgaaacctatatattgtgtaaattttagtgtaaagttaaagaatgttacttattgcaattagtagaagggctaatcttgtaaggcacgctgacaccacacttgccaggaagtccagcggcgatgttcaggttgatcccggttatgctcttggcagccgactttaggcaattgcaaactgcctttcggtcaacagtggtcttggcctcattgttcagtgatcgaataccgtcgcagcattgcggcagtaaagccccacctatcttaagatagtttatgcacggtttgatacctgtggccacttggccacaggttaaggcatggctcaatggcatggccacaaccaataacaaccaaataactagcttcataactacaaaggtggatcctcccataagtataatattgtgtaaaattaataatgatagtgataatgacacttcaataaagtagctagggttttgtgtttgaaatttgaagttgtggagaattatatatttatagatagtaatttttgtgttgtagtgatgaggttgggactttggaggatatttggtagtggttgtgctttaaagtaaagtttttagtcaaaaatggctaactatactaatttggctctatactcatattttgaacggtgctattgtttttgcgtgtacgtagaatttgtcttttaattattatatgattattctctacttagattaattagtactagttagtaactaattacaacaaagaaaattattaggaaatgtaaaattcatgcaaaagacttgattaaatattttattgtttttgatcctttatcttcgcctttatttattaggtttagatattatttcggtgatcttgaatcattttaaaatagcagtaatatactattttgaggaattcttcctatcaaagaattataccaatatttcttattaatttattataaacatacatatttattctcttaatatcaaattaagctaaaatactatacaaaaattgataatatttttcccaactgttgtccaattttagcattttattatatagagaacaaaa

SEQ ID NO: 52001 - DNA, 1500 bp, Cannabis sativa
atatatatatatatataaaaaactcacaccacacccatacacacccacactccatctctctctctctctttagaaatctcacaccatacccatacacacccccacactctaccaatcgaaccacgcattgttggagctactttcgttcggccaccttacataatggtggagttggttggataaccttcttgggatttatactctaaaagcaagtaattaatagataatatattagagaattatgaaatacaattataagagaaatgttacattaattatagtagtataattattaaatatctaaaaatttcttattcatatggaaaatgtataatcttgtaaggacgtacaagagaattaagattatacgatatgaataaaataagtcgatagacatgtagtaattgtattgtgtataattcgattatgcatgactggatcgatatgtaataaacatctttcattaacatgtcgtttaccatgaaagagttattcatatcacaacaatgaactcctgtttgtattcattgaatttgttgattcactcgttaaaatttttcagagaagatgattcttactatttgataatatgagtggttgggaacatgttatacaatagttgaacctaaattttcctaacgaatcgaatattagttttcttatagtgttaattcttatagtgctaacagttagatccaaatctataataagttatagattaactgttcacattaaattaataggacataaggagtaaagagataattagaagggtaaaacgataatattgacaaactctaattatgaactaataattaaaaggtgaactacttatgttgattatgtcaatggactacaagtaagaattttgtaaatataattccatattattaaaaagtgttatttcatacatatacatagtggagtaataatgaaattaataaactaaattattctattgatgaaatcaataataatcaagtgttattggagcttcaaaatataggtttatagtccacaaatcacctctatacataaggaaaagattttatttaataaataaatttgagtgagaataaatttctatgagaaataaatttttaagggcaaaatagtaatttgtgaaattattattttaaacaattatgaattgtataattaatagtatttaactatttaatttaatcagataaaactatattaatttttttttgaaaaaaaaaaaaacaaaaaaaaaaaacaaaatgtattttgaagataattttctgtcattgtaaacaaatatagcataactacaaaaatggggtaccctgttactagaatttgaaaaaataaaaaacagatatggattcacaatagaattgaaattgattaaacctaatcaaacagatgatttgagttactttgtcatctatcatcaaaacaacaaaattggagtgagagaagacgtaatagctcatcagatcaaaccaacattttggttggtacagtctgaaattt

SEQ ID NO: 52002 - DNA, 1050 bp, Cannabis sativa
agatacgcagcgagctgaaccaccgtgtggtggcagcagagtggactttgtatttctgaccggaaaggatttgagtctgttaaagcgggactcgaggtcattggggagaagagtatcgacaaaaccagagcagttgatggcggagacttgttcaagaacgcaaaggtctcgggtttgggaaatgagttcttccaccgcagaatcgtcggtatctgagaggaaagagaaatcggccatttcaaaggttgtcactgcactgataacttgtaatggagttttgggatccttcttaaatcttagtataaaggttcttcaggggagtagtagtagtaggagagtaacggctacttcatgatatatataatattaattatataataaagtgggtgggtccaatatgtatttataaaataaataataaataataaatatatatagaaggagtttctagaattagagagagcatggaggaggaagtagaagaagaaggcccgatgacgacgtcatctcgtcactattttggagatgaaccgtcctgttccatctccataatcgaggtaatattcatttctagtaactccctatcagccgttaactaaaaaaggtttcaactttgtgtaatttgtgctggttcagaacattaaggaagactatggacaattcgtgtggccttgtagtgtagtcctagccgagtacgtttggcaacaaagattccgcttttctggagcttctgtagttgaggtggtggtgatttcattcctcctttggtcaaaattgaagatataggtagattgtgtatgtgttaaacttgttagatttgcagctaggagctgggacttcattgccgggcttggtggcagccaaagtgggtgcaaatgttactctcactgatcatgccaatggattagaggtacttctgcctgcatttgttacttttcttattatgaatcgtttcatttctcttgattatagatattctagagtctctgtctgtttggttggactgagaagttgtggcaaagagaggggatgggtaatgagattgttgga

SEQ ID NO: 52003 - DNA, 1183 bp, Cannabis sativa
aattagccaagaaatttgtatagtttgataaaaaattttcttttattagaatttcctaatatttgaaattaaaaggcattatgatttatttgttcaaggaattattcattctttaaaaaaaatctaaaaagaataaaaatatattcattccaattttggataaattttaaatcataacaagaaaataatgtcatcgtcaattattttaatgaaataaataaagaaatttaactcgtatggttaaaggatgttgaattatttggaccagaaaagtatggtgaaaaaaaaagttgtttttgaattgggatagagactagaatattattagaaaatagaaagattatatatagggacacgattgtgtcctgttatgtacttttacgaaatgtattccgtggtacattagatgggtctctgggtaagtgtcagggtacgttattattttttaaccctaataatccctagatcaatttcaaccctcagattaaataactctctcatctaacggctgtcgtacatcacagaatacattccgtaaaagtacaatcacagaacaaaatcatgatcctatatatatttatacattgaaattctgtatttcttttaagttttttattggagtggtccacctatgaaaatggcacaaagaaattggaccatttttaaataaaatttataccaaacagcaaacaaaataaaggacgtgtccttttgttcttctacacatacccaattttgatcaacctttgatcatagttttttgagaaatgttaaaaggtcgtttttgtgatgtataatattattattagtgtaatttaatattagacacaatatattatataatattattactggtattaaacgtcacttaatttactttaataaatactataaaaaattattaattaattataatgcgacatttcattgtagtgctaagtaccataacaatactctataatttctttggtaaattcataaacctttttgtcttccaaaataaaataaattattttcatataatcttcataattatcttataattttttaaaatttataaaataccacatgtatactatattgtatataatttaaaatgttacataatcgatataatttatgtgacagccagtagtcccgtgatccgtaagggaaaacaccgggtaagctgtacaatcccaca

SEQ ID NO: 52004 - DNA, 1079 bp, Cannabis sativa
aacaaaaatctgcgttagcaaaccttaaagagagatgttgataactttttcttaaggttccgtaaatttaaaataaattacataattgtaaaatttgggtaagtctatagaacatcccctaaagtaacgtttcggtagacccccaacaaaattttgactttcagaagagttttcagtctatttttttttatgatcgtatactttgtatatatttaggatcacatgtaaactttcaaaaaattattaatagtttataatgccaaaagtaaagtttaaatattttattgaacgcacaaatattttttcttatatgcgttgcaagcaactgtttgaataactttatttttaggtattatactacaattttttttttaaaaaaaaatttataagtgatcctatatagctacaatgttcacgattatataaaaaaagattataataaaaagctctcctagatgctgaaacgatgtggagcctaccaaaatataattttaaagagtagtacatatttttttttttaactttctgtccccactgacaaaattttacgggtccatcattgactacatcattattcctataatttttttaaataattcaaatagcttacaataacaacaatatgattcttatattcatgttttcagcgagtgttcaataaaacattaaacttgctttcgacattataaattatttataattttttaaaaatttacaagatgatattatataactataaaaaaaatattattatgtagaatttttaattaaaaaaatactcttaacatatattttagggtagaagttaaaatagaattttttttaaggagttgaaatagaagattgcccattctatattataaatatacaattacttaaattaatgacccacatcaatcatcaagtagataatcaatcataaagaaatgcaccaaaatactatacttaccttaatctgatgtgattaagtaaaaaatattgacaatagtatttcgatatatattttatggcagtcgattttgtgcccatatgtgcaaaacacggattggaatccattgtacggcaggggggtcccaccg

SEQ ID NO: 52005 - DNA, 1105 bp, Cannabis sativa
  modified_base (424)..(425): a, c, t, g, unknown or other
caatggttatcaaagttgttgctctgtcgcgttgattgccagtcagagcttccacagggcgagaactttcttgttctggtggaggctcatggatgttcacatcctcttctagtgactgaagcatgtgattatcaacaccttcctctctagcgatggggggaggtggatcttttcctacggcatccaactgattaccgtcaaggggaatctcaacatctcggaggcagtgtgagcgtctagggattttgaaatggttatgtgtagagaaaccgctttgccaaaaattgtcgttcccacagacagcgccaaattattgacaatgagaactcgtcaactaagttagtggttggaaaacacaaagttacctcaaaatgtaatgagaataaagaaacaaggatctctgaatattgttttctctattgannttaaaatttgagttacaccaagtgattttcccacccccctctcacatatgtgaggagggtatttataggctctaatgacctagagtacaaggtggtccctaggggacaaaatgttgctttcaagctgtaggccaatggtgctggaggtggccctgcacctcatacctttgtctggtgtcaggtggtccctggttgcaggcttgtggtcctagttatacgagagtggttgctgcgtgcccttggtcggatcctcagaccttaaaggcctgttgtctctgctactcatacctccctacatttagaggttttagaaggcatggttgtatgctttctcttacacgccttttctcttgagtcttcgcccaatgtcatccttgttgatgtgcacctacttctcattttatgtttatagtccccctcgagtaacctctctcacacctgcatacacggctcgcatgcgagcccccatactcacacactccactcgacacacctccccacatgcacacacggctcgcatgcgaacccccacactcacacacaacactcgacacacctccccacatgcacacacggctcccatgtgagcccccacactaacacacaccactcgacacacctctccacatgcacacatgcgagcctccacacccacacacaccactcgacacacctcccca

SEQ ID NO: 52006 - DNA, 1044 bp, Cannabis sativa
  modified_base (987)..(1001): a, c, t, g, unknown or other
ctgcaaccaatgtaagatttcttaaactttatatgtttttttaaattacattgttttagaaattcatatttaagatgttaaaaaacatacaatccaacaccactcagattgaccggcacacttgaattttgaaacgatgtaagagttgtataatgatatgcatatgtgtttacatgtttagcgtgcatgtttatggagcccgttaaattacattgatatgggtatcagtatacgtagagtacaagatcgacgatatcacattagtacaaccagagtatgactagagtaccgagtataggctggtattatggctgatattactgagtatgggcacctaattataatcaggttatatttatgtttatgattatgatattcttattgagtttgtcgactcacagatattgtttgcttgcgtatgtaggggcaaggctaaggttgagcagtcgtgagtgtgagcgaattaggattatacatgtcggggtggttagacctagattgtacgatctttgggacagctggttgtattttgtatagtcgctaggcgaaaacttttgtagtacatattattaatcagttggaaatattttaaactttggatcccagatatatacataaaagttagtttattttaatggtattaataattaagtaaagcttttattattcatgattttcaataaactcgttgattagcaacgaactccataggtgatataaaatcatgataacatgcctaaactagtaggatgttagaattttgtatcagagccgctaggttatcattcgaagatcatcacgacatgtataatcatcatcagagataagctcaaatcacggttcagtaagccttgattgctttaatagtatatcttattagtatgttataataaaaaccttataggaaactgttgggtttcatgccctaaataaaactccattttaatgtaaaatattttattaaacatcaataaagaaacaaaagtnnnnnnnnnnnnnnngtgtatgttttggttcatgttattaattgcttgtctatttgat

SEQ ID NO: 52007 - DNA, 1743 bp, Cannabis sativa
  modified_base (1310)..(1336): a, c, t, g, unknown or other
gctactcggatgctgattgggccagctgccccgatgatcgacgctctactggcggctacaccatcttcttaggaggcaatttaatatcctggtctgcaaaaaaacaagctgttgttgctcgatcgagcacggaaagtgagttccgtgccttagccaatgcaacttctgaaatcaaatggcttgtctcccttctgtctgagcttcaactcaagttacatgaaccaccaatcctttgggttgacaaccaaagtgctgtggccctcgctgccaatcctgtctttcacgcccgcagcaaacatatcgaaatcgatatgcactttgtccgtgatctgattctcgccaacaaacttcatgttcgatatgtgccctccattgatcaagttgcagacctccttaccaaggctctcacaaccgatcgttttcattatctcaagaccaaactcaatgtagttaacactccctttcgtttgaggggggatattagctgatatggttgacagttaatttagtttaggttgttacagaattagttaattctggttagtgtatagtcggttgtatctaaggttgttagacctttctttagcctttcttttcttttctctgctgtaaattgaagactgtaacaaacccattcaatataaatagcagagacttgatcataattaattgatcaagcatttccaattctcagtactgttttctaaactaactggtctctctaatctttcagaaccaacccacctcgatcccaacaaggactccaaacattagccttagccccgttccctgaacccaaaccccgatgcgatcttgacccaaactctagagctcgtacccgcacctgaccccaactacaacttggacctgaccacaaccggacgtgaactccggacccaaatttgaacttcgagtttgactcggattcagacccagacccaaacctgatcccgaaccccatgtttatgtgagagaatatatatatatatatatatatatatatataaatatgttagataaaaaaacaaaagtcatttaaaaatagaaaataatattttgatgttttttatttttaatttcctttaactcaattttttgaaaaaaaatatgccaaacacccagtcctgagttttaaagggataattacacaagacacaaatttttgtaaaaaaattacatttttacgtttaattttttttttaatatttttacggttttccataaaaacaacacgaaaacaataagaaaacaacaagaaaactacgtaaaagtaacatgaaaaatgacatctaaataacatcaaaacaacnnnnnnnnnnnnnnnnnnnnnnnnnnnaaatcaacaacaaattaacaagagtacaacataaaaagcgtattttctataaataaaatcaaaaaatcgtaaaaatatttaaaatttcgtaagccgtatttttgtaattttttgttgttttaatgtatttgtgatataatctcatttttaaaagcaatttttactttttaaaaagtaaaagcagattaaagactgcaaaaccaaacacatattttcttttaaattatcaagaacttatgtagatctgattttcttttttactgtttttaaaatttgtatcaaaagagagaaggcctcaagagaagcctcctctcaatctcactttgttacttattgtaatgaatcgtaactgagattccatttcaaaaccaataaaaaattacctcagcttggtttagcatgactgc

SEQ ID NO: 52008 - DNA, 857 bp, Cannabis sativa
atttagctttataatcgtattattccttgttatttctttatttttgtattgttattttatgatatatgttgctctattttgtgtttagagtggttaatttggtgtttgtaatgtgttgtgttttaattttttttttttgtgttgctttgttttattagtcctaattttgtgattaagagtaaattgttttgcttagtgtgctcttaatattgtgctcgatgattaaccacattttattgaaaaaaaatcttttcattccatcatttgcctcttgttgtgtaattggttcatagtactcgtagtgttcttggcatgagaaaaattgtgatgaaagtgtctttcccaatctcatttacatagcttgtcgaaatctatcttgaaatcctagaacgagttaaattcttaagagagcttaagtctctagaattgtttaatgttttctttgaggtgaaatcctagacaacacttaattaaggttatgatttaggcgatctatagaacatttgagcttttcgagctaactgatatatatttctatccctagtcaccccattgagcttaattgccttcttcattctttaacccatgataagcctccctacacacattattttcctatacctccttaaacaccttgatctatttaggttatgcattaatttgagagaaggtgagaggagtgtgagatttgtaaagtctttggtgccaccatatcatatatttatattcttagtagaaacattgaggacaatgctggatttaagtttgggggagagtgtatgttgtgtttcttgccacttttatatatctatgattgattattgaagagatagagagagggagggagagagagagag

SEQ ID NO: 52009 - DNA, 1431 bp, Cannabis sativa
cgtctctctttctaccttcagccctagaagagaccaagaacaaagttgaagttttcgtctttttacagcaattcaccaaggaaaacagctaggaatcaaatcgaagttgatggaaacagattaaggtgaccctagaatcttactgtttttgaatttagtaggaagtgttgggtttaagtgtagttttctttaattatttttagtatagtatgtgaggtgttagatttcattcttgagctttattttctatagtttgaagttaatttagtgatcatagtagttgtttatagtgggaatgccaagtttgagttttgaaactcaagcttgagcttccatgatggttccttgtctttagtgtaactttgagttatgggtgtttggttatgttctattcatggtattggactaatttgtgaagtttggttaagtttggataggtttagaaggagttaggtttgaaaaccccaaatttgggtgtttctatagagaaaatggtaagccgtttttacagggtactgcaaaaacggtggaccatttttcccaggcaaaaccatataaaatggtgagttgcatggggtgatttttccagcacctagattttgtgttttatcgatatttagggtattatcatgctatttatcgataggaaaacttatagtttcaagtttaagccttagaacggttaaagaaataagttgtttatcgaattatcgttgttgtgacataaggcccgagatcatctagcattttccacttaagttaactggcacgagtgtatttggactagaggtaagaaaaattaattcgtaccacatagcatgtcaagatatgatactattattatcatttgtgaatcaattattattgagaataagatacggtaattaccgtttataagagaatagttattactctattgggttgtctcattaggcaacaatgtgaaagagagtactactctaattaaaactgttgttaggttactcacttgtcggttatctcatcaggtaacgacaatgacatttggaagttggattaagtatcatggttgtcttactaaaaaaataataagaatgaggtaacgactatggtttgtcttattagacaagaacttgaatattaatggatgtttaattacttgagattgtataatttgtgttatactgtaattccttactttgaattagtattgattacatagctagttataagaatattgttgattattgctacatgttatttataagtttgtttttcctacttttcttgttgagtatttgtgactcgcgggtgctttatggtgcaagtaagaaaaactagattgggacagccatgagttagaggtcttccccagcaaatgtacatatcagcttatccgatcagcggtgtcgagtagtcaagtttttcgtttatgtcaactctgaagagtat

SEQ ID NO: 52010 - DNA, 1442 bp, Cannabis sativa
agactagggaaagaaagtatttaggtcctgagttagttcagcagaccagtgaagcaataggcaagatcaaggctcgtatgcttgcttcacaaagcatgtagaaaagttattcagatcctaagcgtagagacactgaatttcagataggagaccatgttatcatgtgagtttcacaaatgaaaggtgtaagacgctttgggaagaagggtaacttgagccttaggttcatagggccttttgagatacttgacaaagtcgggcatgtagcgtatcgactagccttaccaccaacgttgtcacctattcataatgtattccatatttctatcttgaggaaatatctaatggaactgactcatatcttgagttaagaagccctagaactgcaactagatctatcctatgaagaacgatcggttcaaatcctcgataggaaggaaaaagttctttggaacaagaccattgctttagtcaaagtactctggaagaataccaaggtggaagaagccacctgggagttagagtctgacatgagggcttaatatctagagttattcagcttagattttgaggacaaaatccttttaatgggggataattgtaatgactgcatgattatattatggattaataaaggcaattagcattaattattgacattttataattttttatttattgtgagccctattttcataaataggcattagagttgtaatttaattttgaaaattttattaaactctaagtgtattatttagattatatgcaaaatttataattcttatgatttgctcggcgatgatggaaaatatgatggatggccaactgagtcacatgggttagtttagaaccttttactagcgagatgttcgtaagatgatacttgaaatatcaggattaggcgggtttattattttggaccattttatccctaagccattttaccatttaggttattatgtgagggcattttaggtattttgcctaaaaggagttagttttgtttttactgaagttgtggattattccactaaacattatttagcaaagtaatattagattaattcattttaggaaaatcataagaaaaatcaactcatcctttgtcctctctctctctccacttcggctccaagaaaccaaaggaaactagtggaatttttcatcatttctcatagatttttagtgattcttaacagtaattgaaggagtaataaaaggtaaatcttagaatcttttctctttgaacttaagaagctttttaatttggttgagcgtgcaagttttagtaattagttctatcttaaccctagctgatcttaggttgttttctgagttttatttaagttgtttgtagcttattagggatagatttatgggttaaatgtggtgttgaccaagtttgagttcaagaacttaaacttggttcaacaatggta

SEQ ID NO: 52011 - DNA, 1729 bp, Cannabis sativa
tcacacagcccaagttcttgatgcagagaaaattcttgatgatttattggaaaaagaagaattatattggcaccaaagagctagagttgattggatcaaaagtggtgattctaatactaagtttttccactctagagctaaggcaagatataaaaataataagattcaatctctaatctccagtgatggtcgagttctctactctgaaactgactttgctacagaagcggcatcttacttttccaatttattcactacttcgagtgtagacagtgaagctttatcaactacaatcatagctattaatcctactattacagaggaaatgaatacgatgttgctggcgggttttactcgttctgatgtagatgaagcactccattcaatggccccggataaatcacctggaattgatggtatgtctgccatgttttttcagcgtcattgggattttgatggttcccaagtttcggattgtgttctccaaattttaaatcatggggcagatattataaactcagcacttatcactctaattccgaaagtggatcagcctcaacagattggtgactatcgaccgatcagtttgtgttcagtcctttataagcttgtctccaaagccattgtcaatcgttttaagagagttttacctgctgctatctcccaaaatcagagtgcttttctacccggaaggcttatcacggataatgttcttttagctttcgaacttgtccatcgccttaagaataaaaaaagaggacgacaaagctatgctgctttaaagctcgatatgagcaaagctttcgatcaggtggagtgggtctttttgcaagaggtgatgctcaaaatgggttttgatatgaattgggtggaacttataatgcggtgtgtctcctcttcttcactctctttcaacattaacggtgctgtgactggtttggttaccccccagaggggtctacgtcaggtccttatcgccttatttgtttctgatttgttctgaaggtctctcagctttactccggatggaagaaaatttaggcaatcttaaaggcttatctatatctcggggtgccccatcggttactcatcttttgttcgccgatgatagtttgttattttgtcaagctcatgactcttcctgtcaagctattaggcgtgtattggatgtgtatcatcgcgcttcagggcagcttctcaacaccgacaaaacggttatgtctttctctccaaatgtgaatgtggaattgaaagctagttttaacaacgtgttgggtatgcccatttgtgatcttcatgaaaagtatcttggtcttccgtcttatgccggtagaggaaaatccaaactttttagtaacattaaagaccgaatttggaagctcttaaactcttggcatgcaaaactcttctccattggtagtagggaagttcttcttaaagtagtggtgcaatctatacctacttatgtgatgagttgtttcagtttacctaagaagttttgcaaacaacttgaagccatgatggcaaatttctggtggggctctaccacaaataagtcaaaaattcattggaagaaatggagcatgttgtgtcaatctaaagatgagggaggcttgggttttcgatcttttcttcactttaatcaagctttactagctaaacaggcttggagaattttagaggaccctcactctttgttggctcgagttttaaaagctcgctactttaa

SEQ ID NO: 52012 - DNA, 1147 bp, Cannabis sativa
tatataaagtctaagactaaagtcactctaagagaatattagtctccttcggccaattaagctctcaaaataagaaaattcctcaaatatttaacaatgattttggtcttttatttttcttttctgtgttttgccaaaaaaaatattgtgttttatacaacaaataaatgtatcattgataattgataactgagttgtattgataacatcatgattattactatacataaatacgagccatttacatactactaatgacttgttttttacttagtataatttttttttttttttttttttttagtcacaataatttatgattaaaaaaaaaatataactaattataaattatcattttacattgtgactaaaaaatcaattgtactatgttaacattattagtcacaaaaattacaatattttattgtgactaaaagtctaaaactcctataaaaaaattgtgactaaaactaaattagtgataacttgtatctaaatactatgttttagtcaccagtaactttttattgtgactaaaagtcatatttagtcacaaaaatttatattgtaactaaaaaatttatacttttttgtggtgttataatgaaataataaaccaaatgacaagaaagagaaaattgagggattttgggccacattttaaaattatgctatatttactaatatttactagtatgagtaattttatcactaagaacattcgtccgccaaaaatttaaaattaattataaataaatgtgtttttagttataacaaataagttaaattggtaataatttatatttaaataatattttttagggtcatgtaatttttttattacgattaaaagtgatattaatttatatgttacaatttaaaaaattatattgtaactaaatagttgttactaaatgataacaatttattttttattattttgttaatgatatttatttagttatgtcatatataattttaagtgaaatcatatatatcacttttaattatatgattcattattattatatattattgtgtataaaatatatgtaacaaattagtgtcacaatcattattttaccataaatacactccaaaactagtttaagtcaaacgtagacttagatctggactccggattcag

SEQ ID NO: 52013 - DNA, 1051 bp, Cannabis sativa
  modified_base (43)..(43): a, c, t, g, unknown or other
aatgaaattaaataaaagtccttacatctaacaatctcaatanttcaggggaaatttttaacggccagaaaaattcaagggacataattatttggtacacgttaaagtttaggaggtaaaaatcctaattagctaacatcaaatatggtatttgaaaacctaatttatatatatggcatattaaataccataaaaagacctaaaaataataataaaaaaaaataccttataaattggtcaaacttaaaagtgtcatatttaacataagaacttttaaaatcctataataagtgtaattttctcataaatttagcacatactaaaatgaagtaaatgtagtacaaaatataacataaataaattaaattttaccgtacaatacatattactttttttgaaacttattattgtagttaataattttttatatttttataaataaaatttattttacccctaatacattattagagcacaattattaaatgtgccaaatataatattaatttatttttaagttaaatttagtacaaattttacaccatcatcattagagatagtttaatgcatatttttagctaaactagagaagaaagtaaaattaggatgaacaattgaaggtgcgttttataagcattgttgtaggacggttgtggcggtgccggattatcttagatcaattagcacctcttcttaattttcaattaaacataattaaagaaaagtgaacaattaatggttttgttgcggacccaccatgaataaacagatagaaagacagactatgatgacttttccaaccaggcctctcctctattctctctttttgtttatgctctctcgtgttgagtatcattaatcatcattgcccttgcttatggatccctttattttatttaattataaaaatcaaaataaatatttaactaggaacatacatttgtaagtgcagggtcactggggtacaacttatggcatatggaatatatcattgcccttacaattaatgtgctttttatgtttttattttataagatcttgaatcaagaaa

SEQ ID NO: 52014 - DNA, 2109 bp, Cannabis sativa
aatagctttttatcagtcaaggtttgatggttttaaaccatctagtacttttttttttttttttgaaatagaaaaaaaaatactggtttatttatatattgcaaggtatatacaacaatatttattcatatattgcaagaagcttcaaagacttaaaaagttttaagaaagttaacatgaatgaatttgaagatattgaagttagagaggaaataaaaacttatcaagaaatgctaagctgtcaagaagaatatcaggagatggattaaaaatggtgatgttaacaccaatttatttcataacaacattaaaaaatgaaaggaggaaaaaatagtgtctatgttattactagtgaaacatgttaatggatggataatagtactattcatgtaaaaaaaaggctttcattgatttctatttaaaactcttggcgttctataaatagaaaatggaaggaaggtcttgcagaaagttgtgaaacaagggttagttgtgactgtaacacaagcttaattagagtttattactaccttattcaaaggaataaacaaaagaagctttattttctatccgtaattccaatgtctcgtggcatgatggctatagtagtcgatttttcaagagtagttgggacattgttggtgaagatttcacaaaggcaatcagcttagtgctttaattagggaggttattaaaagagattaattctactattttaaccattattctaatagtaaatatccaagtcatgttagtgatttcagaccaatttcatgttgcaatgtggtctatataaaacaatcactaaagccatatatgcaataggctaagaattgtgtttcctagtatatataattgctgaaaatcaggaaggttttttccatggccgatttatttctcataatatcataatttgtcagggcctagttcaaaattatagtagaagtaataatgcttcttcatgcatgataaaaatagatcttaaaaaagcatatgacacattaaattgggagtttatagaggagatgatggatgtttagaatttcccaattagtttatcatattgataatgaagtgtatattacttcccctgtattctctattctgattaatggtgaagtgaatggatattttgaatctaagagtggactaaggcaaggcaatctcatgtctctacttttatttgtcttaggaatggagtacctaactaggatactcaataaagtagcacaagaatttgaatttagatttcatccgagatgcttagaattgacgaacacacatttgtaaactcattcctagtcaattattagatgaatcaatatttatttcttaaaaatatatttatttcttttgtgactcatatttttggattattttcagctttctggagcaagtcccttggtagtcagatcaaactttaaatctccccaaccttatgaacagaatcaagtagttttgtatctccgttaatgaacggtttacctttttagagatggtcatcatgagattccatgttatcttcaaattctctttactgtagtgacataaaatctaatactttttgcacctcatccttcatacttccaaaaaaatattgttaaagaacacttaaacacacatctttctcaggtgacctttgtattttcagtgcatgccttcttattctccttgattgttcatgaacattatttattacttcatgtgcttcatttgttctcacaaaaaaattcaagagaagttcatcgactgaatacaagtcaccatttgaatgtaccatgtttgaattgtcccttgacaaacaaatgaaatttggaactaatccctcctaaaaagtattattagagataatttggtcttctacatcttaaattgttctcaaatacttacaaattctttgcgtaataccagaaaggtcatttcacaaaggttgttgttcaaaaatctccttgtctttttcctctaatagatcaatctctatcagtgtagagcctaaattctgagagccatggtgagcttcaaattttgaactacacttgatgtaactcgatgttatgccttctattgcatgataagagccaagggaaatcttttcaaaaaaaaaaaaaa

SEQ ID NO: 52015 - DNA, 1063 bp, Cannabis sativa
gtaaactatactacattcccgtatttatgaaaaacccccaaaataaaaatatagatataaagcgtcctgatcatctggatcagcttcttaaaggttgggcttttatgggcccattatgagaattatcaggatttataggcaaatctggccgttgttatctaggccacacgagcaataggcccaccaaactaaagaggtaactaggcatatatacctcaagagtgatggaccaactttagctaaaaaaagaggatttataggataatctggcagttattatgtaactctttagctaaaatagccttttgagaatacaataacaataagttctcaaatttacaagtattgccaaagaacttaacccctaattcataggatagtgttttgagaattacattttacttttcattttttgagtttacaatgaattatacacttgggttgcctcatgaagttcagcccacaaaagagaagatatgttgactaggcagatcagatacgattggattagtcgaaatcgaaatcgtgtactataattatggacataatgcttgctttctgttttagtaagtttctccatttagcttgataagatattttgtcaagacttgagaagcaattattttcttatctgtccacaggaattaaaagagaaaccagactgatcttctaagaatacgttgtcttactcttctggcatcacggtactagactggcttccgaaataaacgagctctaaatgggtctgacccactttatcttctttaagaactcactagtgcacttttgctgctgaatttggtcaaatacgcgtataacaatattgatacataaatataagaggaaattagatggtatatacctcttttaagttgttgtgtttagtttttaccctctttttctatatttttcatttctatcctttttttcaacaactctaccaattgtgtctctatcatttaaagatactgactttccattcaactctaacttgtgtagctgtgagggtataatcggtaataaagttataaaggtgggtatatttcaattgaatttaaaataa

SEQ ID NO: 52016 - DNA, 1556 bp, Cannabis sativa
ttaactcaagaacaaggaaaaaggttcattttcttatagctcttacaaaaatatctctgaatatcaattcttacacaatatctctcaactagaatgtttgcgactcttttgtccagtgaatatgcatcactatttatagggctatgagcttggagaggaagtattttccttctcgttacaattgatataagtacaaagattgcatagtaaatgcagaatacactgatggtgggatttggaccgcttgccatatctctgtaatctgatccccaagttataggaattctcttgatgactcacgatgagaaagctgaattcgctagctaagtgtttgtcgttctgtgcgggttgctgattgtttcatcttgagcatgcatacaaggtatcctgttcggcctgtatcttgcaagcagatacccggagtcgattccacgtgtcaccattgtgcgatgcaacgtcagagtgcgaaaattgggataaaatataaatgagataaaaaaaaatcatgagcgtgactttccataaagaaataaaaaattgaaaagtattacatcttaaaatttttaagaaccaaacacacatctaaccgaatcagatgaattaagtgcaaaatagtgattcaaaagaaaacaaatgatattaataggtttaaatctgaatgaatcagatcagttatatcactaagtgcaaacaaatgcaccctaaaagaatgaaaaactaaatcaatgtaataaaagaaaatacaaccaagtattaattgtgataattaattttataatttggacatccttaaataatatttcataacatttttattaaaaattaatttattaagaaaagctaagacttttgataagttaattttgaaattagaataatttatttacttcctaatttacttacaaaatatacatatatatattttaatgatatcaaaaaactttaaagagagcttctttaactttatatcatagttattcttttttttttttgaaacagtatatcatagttattcaaaccattaaaataagtcaaaaattttgtttatcttatattctgagctttaaacaaaaataaaagcttaactacttaagtgaacgagaacataatataatgtagcacaaattaagatgttttattttttattttcaaataatgcatacactttctcattaatagaggatatattcatccattactacaattacaaataaactgtgtagacgtagttttttccagaaaattaataaaatgaaaagctaaagtgttcaaatatttgcgtttattgaaattaatatttaatggcagtaattttataaaagattgtatatagagtatacctaattgctatagctatggtattaatatttggtcgcagggtggaaaggaatggggatatggcatcggttattagaaaataaccaacaccgtagtgacatgaaaatgttaatacgtgtgtcttatggcatcggttatttttaataactgatgacaaagggtttatataaccctttcagttatcctccccaaaaaccgctcctaaccccccccccccc

SEQ ID NO: 52017 - DNA, 1210 bp, Cannabis sativa
gatttcttgatttcaagaatgccctacaccaactcaaggttagttcaaaacgacaaggttaaaattgaccaagaattaaaacatcaattaatcaaacgacaaagaaatcaagtcgtttcctcctacacgacaaattaatcatttagaccaaaacgatttgtcgttctcctagaaaaaaaaaaccaaggcaattgagctaaccctagctcagaaatacccttagaaccttcaagttttcaaactatctctctctccctgcttctcttcgaatgaaccctagaaaccagatctccttctcgatcaaactagatcgatctaaccaattcctttccccagaaatttatctcaaacgcatacacacaacagatcaaacattaaacagtaaagagaagtaagaaaaaacaaacacaagaatcatagaggtttgtcctaaatccaggggtacgtccccttttgagctcaccttgaagaacgatctcagatctgcactataaatggagaatattacatcaggtgagaaatccgagtcacaaatcgactggtatttcagatctttctctcttctctctcttctgtgtattttttttctttttgattctcactaactctctctttcttttctttgcatgtacactctgaaacaatcaacacgagagcatctctctctagcctgggtcttctcacttctaggttctctcaactaagagctttgtaagtctttctgttcacgttttatagtaccagatctagtagtagatgagtaacataatttctgttgcaaaacagaaattcggttaggtctagctagttgcagtttgttgtgtctggtgagtgagtaaagtcacaagccttttatgtgtattttatcctttctgtaaaactgtaaaacaagtgattcaggggggatctaatttaacagtttgaagtaaaatagagaaaataaagtttttgtgatatatattttgaaggacagagtaaagaagctaatgagagtactgtaaaggtttaaaattgatctccatcaaacgctctaaaagcttacatatcgtaatttatccctacatttagcttaatgaacagtgttacgctaaacatatttatatattttttaaactcattctataattagtaaacagactattgtttatagaaatttgagaaaaaatatatataaatattaattgaataataaaattatatcaaataattt

SEQ ID NO: 52018 - DNA, 807 bp, Cannabis sativa
aaaaactttgatccaatgcctattctgaacataggatgtttttacttatacaaattgtctatttgttccttgtaaagagctaccactttgtcccgacgaattttcatggtaggagtcattagaccgccgtcgatctgcaatagacgagtcaaatcagcaaatcgaaatttggaaacaaaagatttcttttcttatttttatcattaaaaatcactgaaaaaatcatcaccgtaaagggctcgtccaccacaaggatcggtccaatttggaacgaacacgctgaagtcctacgaaaagcaagcatacattaagtaaacactcattcaacaaaaaatgcttaaccgaaaccaaagatcaattcttttttatagaacataagaatccacacacacaatcgaataaggaacaaggatctcatatttcgattcgaggaaaaatgcaaaagaagaaagatattattttaccgttttcgtaattcgttgtatattaagttctttaaattctcctgacttagttcagtggcattagaatctacaatagataacacttttgctaacagtaaagcttcttccttgttaggaacgattatagctccaaggcgtcgttgatcctgcatgagttaacgacgcaattcaatatttaaaactaatacatttacatggtgaaatcgaaaccagagctgttgatctttacctggccaatgacaacaatttgctgaattacgggacttgtcaatgcagcttcttcgagctcaacaggttcgacattttcgcctaatttctcgaaaataatttaatcagttcttgc

SEQ ID NO: 52019 - DNA, 852 bp, Cannabis sativa
aaaatattaattatttttttaaaatagttgtgcttagatatttttcgataccacacgtgtgaagcacgtgagactccactagtatttattaaatattggtacaaattaatggtccaaaaagggaaaatgagaaaatgtcagtgtcccagtagtgatttcccaaaattgccaaccaaatgaccattatcggattgggttgtttatagaaaatcttagtaggccccttaagattaagtaaagaagatttgataacatttcaaaataaataaataaataaacaagatttgatattgtcataactcatgactaaaacagaagaaaaagaaaaagaagtggtagttggtagatttcaagtcctttgagagatgtggtatttttctgtataataagaaattatgtgtcattcattgagctacaatgtaatataagttaaacatgtaagttattaactaaacgatacccaattgataagacgacaaataccaaattccagttatggactgctaatttcctaattaataatttatatcagatgaaaaaaataatcaacaaaattaaagaggtatttgaattaatgcatttttttcttgagtagtttatgaacgcgaattggtatatttcaaaatatctgttaaatgtggtataaaataatgaaagttggttttgggaacacgtggtcgatctgaattaccaaaattaccctagtcactcagtagtggaaaatttgaattaatatgcttaaattatttaataatttttcctctaaatacaaagttagtaaaattagtcatggggagttctatttacaccccacaaaatgataagtacactcattattaaaaaaaatataaa

SEQ ID NO: 52020 - DNA, 1967 bp, Cannabis sativa
cccgaccccaatgttacctttgaggcaaaactatcgagtctaaggttaggtctattagggcctacgttggtggcatcctgaagtcttgcagcattaagcatcagaaaacgtgcattataaggtctgtggcacctgaggagttcaactattttccctcagaaagaatgatacgcgaggattgtagtggacctagcacgagtaaccctcgggtgttagagcttagagcctccaacatatccaggctggggcggcccttccccttagggattactttaaggagtattgcaactagctcgggcctatcccattccagttgaaccctatctcatacatgatccttgtgagcctcaaggttctataccatatcttatgctgggagttccctactccgttggagatagcctgcttttactctgtcaaagcagttcctgcaaggaagaacgctgcgagaggcttctactatcttggaacttatattggtgatcgtaagatcatagttagatcgcccaacaagacagattttaaagaagacttcttctagacgacgggcctatctccaataaacacaactattttttgcattattcgtaagttcccctcctcattaaaccaactataaaaacattaacttttagtagttgcttactgaacttttatctatttacagcggttcctcaaagaccttgtttctacccctgagatagccgagcatcgcaaaaccgagctgagtctgccttatgggttgcgagctgtagatttcttgctaaacgagcagaacctaaagaacgttggcctccttgcttcagatgaatatacttgcgattacaaaatacccaagtatacttcatggcaaaaggtccctgtcccagacgaagtgaaaagtgaagacttcgtggctcacgcacaatatctcgagagattccctcttctggtagatggaagatcccgaggtaatcaatgtgggtggtcacccacagtgcttagggtcaaacataataccttagtctattttcatgatagtcggtataattttttcacttagaaccctttcctcattgatcgcatttcccataggtttgatagttggtgcttaaaagctccatgttcaaattagatgactagctcattctatgggattgccaagcagtatggaaccatgttagatagagcaggtcacatagattcaagctgggaattagatccactaaacccttatgacatatttatgatcacaggatctagagagtttaatgaatattatagtcctccctcgtcatcctttgaagaatatggtaaccttcttaagtgggagttcttccccattctcacttacttattttgtctaagtgttaatgaatttttcttgtctcgtagatatggatgtagacttgcagaatatgttcaaaagtccttccctagctgacaagaaatctaagaagagggttgcccaagccggtgaggcctcaggttctaccaaacaaccgaaaaggaccaagaccatggccaaccagaagaaatccttgagccagcttaccattgaggctgctaagtctgccgagagaaggaatgatgtctttgctgcagggaatgtcgagggacaacttactaggtcggtgcaccaagtgaagttctctggttctcgtccagagatggttctcctcgagccttcctatccactacccctcgaggtaggaactaaagggtcgcgacttagatcgaagcatgccaccaacagttggcgcaacctcttgacacttggatccagcgactggcatctcgctgttcgagatagcactgacgacctagtcaaaagaagttatgagcttttacatcaggtcaattaccttggcatcttgttcccacttttcattatttttctctttttattaagttcagtttgtcttctcttcgtaggcttgttttctcgtctacaccacacatcatctgtaataccctagaattaagaa

SEQ ID NO: 52021 - DNA, 2582 bp, Cannabis sativa
ggatattttgttcatgctcttggtctctcgcttcttctctagctcttacttttctcctaaatcttgacgcatctcatgagttgatttggtgcactcagccacgaagtctgcaagggcttaaccctttatggttattcttagttagaatgtgatcttgaactggccaagctcaattgcccatttaagtagtcggcctgatgcttcaggtttctgcaaaacctaccacagccgttgattagtgtacacctttatggggtgtgcctggaagtaaggcctcagctttttggaagtcggggcgaagctgtaggtcagcttctccatgagtgggtatcgacttttggtgtcgattagccttttgtagatgtagtatagaaggtgttgtacaccgtcttcttctcttgtgaggacatcactcacaacatgttctgtaactactaggtatatgcctagctcttcattgtttaggggtttagacaacaccggtggttgagccaattatttcttcagctactggaatgcattttcacattcctctgtccactcaaattttttgttgcatctgagaatgttgaagaagggtacacatttgtctgtggacttagacacaaatctgcttagtgcggcaatgcatcctgttaggctttgtacttccttgacagttgtgggcgacttcatgtcttaaaaggcttggatcttgtttgggtttggttctattcacctggcgttgactatcaagccaaggaattttcttgagcttacaccaaaaaatcatttgagggggttgagcttcatgttagagttgtaaaggactttaaagcactcacataggtcctccacatggccctttcctttttggacttgataagcatgtcatccacatacaccttcatgttgcgggcgatgagatctgtgaacatcatgttcaccaacttttgatatgtggcccttgtgttcctcagcccgatgggcataactttgtagcagtaaaggcctaggtccatcatgaagctcgtgtgttcctgatctggttgatacatctttatttgattataacctgaatacacgtctatgaaactcgagatttcatggccatctgtggcatctacgagttggtcaattctgggaagtggaaagtagccttttggacatactttattcaaggttgtgaagtggatgcctactctccactttttgttgggtttaggcacgaacacatggttggacacccactacgggcagaatgcctctattatgaagtcattggctctcagcttttcgacctcatctttgagcgcttgggtgcactccttatccaccagtcgccatttttgctgaacaacccggatgcttggatcaatattgagcgcatgggtcatcacagaggggtcaattccatccatgtctacatgtgaccatgcaaaaaggtccaggtttggtctcaaagattctatcagcaccaatttagtttctaaagccaggcctttttcgatctttaatctttctgtttgaaaagtgggatcaacctccacttcttctagttcttgtacaagtctgaagcttcctgcaggatccccaaagcgaggatctatgtctatgtcctcgccttgggctacacttcattacccgtggctgggctagttttctgggattttggcagacatcttctctcttttggccttggatagggccaagttgtaacagtgtcaggtagactgcttgtcacccctcaaacataccaccccatgccttgttggaaatttgaggaataggctatatatagatgtcaccaccttcaagtcattgagcgtcggtcagcctatcattgcgttgaaagttgagggaacatcaattacaacaaactatgccatcagtgttctgatagttggattttctccaaatgtgatgggtaatctgaagtacccgacaggtgcaatgccttaaccaaaaaaagccatatatcacttggttgcaaggcactgggtcagtgagtcggagccccatcttttcatatgttgacttgaaaagaatgttggaggagtctccatcgtcaacaatacatcttgctacggtcatgctcttgatttgtacagtaatgaccaggggtcattgagtaggaaattgaccgaagcaccatcttcttcggtgaaggagattgtgggctctataggcttttgttgcttagagcttcggtcttcaacacctaggatatcacttttgggctcgtgatggagtgtccgagcatagtgctccctagccttactggtctcacctgcaatatggggtccgccaatgaggacccctaggtgtcctgctataggtggtcgcatgggatctgcgttctaggctccttgcgccagggtttgatcatcttacacataacaatgcaggtggggcttgttacgccttatgaggtatttaatctccctcttcagtctttggcacacattggtgtcatggctgaagtcgttgtgatatttgttgaagtttgacatgtccctctttttgtcatctcctttctaaaaggaacgagctttcattatgggactgttccctgagtagccatgaagatggcctcaggcttc

SEQ ID NO: 52022 - DNA, 634 bp, Cannabis sativa
aaataaaaaaaaaaaaaaaaacatcaaacaagtacaaaaaaaaaataaaagaaccctattattgattaataaaaatatctaacaaaacgatcaactttagcgctaacaaatcgtacaatcagttgtaccatgcactgacggacttaaaaatatttaatttttttaaattaattattatagactaaaatagtaaaaaaaaaccccataaaattaagtaaatttaataaaagtaattataatataagtataaatatttttaattataaataagctcttacaaagtaaaaattataggtcccgcactaataccatggaccataagccaataaaaatataaaaatctctcagattatcaaatttattgttattagtttaactatattttattcttaaaactttttttcttatttctatatttccttttttaatagataattcctttttaacatatgctaatttttaatatcaaataaaatatatattaaaaaatcacaataaaaaaaattattctatatattatttttaatatttttttttatttctacagtataagttgttttattggttgttgtatgggttgtgaagtagatttaaattacaaattatgtttctctgtatatttttctataaatat

SEQ ID NO: 52023 - DNA, 1753 bp, Cannabis sativa
gattcattgatttttctatatatagatagatatttaatgcagatgcaatgaaggatatgcggagcacatgcttatacttattttatttttattttttttttaataaacattgctattttttttattgaggaaaagcgtctatatcatagattcaaataaattagacctctcggtcgttacacagaatattgttaagtacaactgaaaccggaatagacccaaatacctgatgagcaaacgcccatctagccacattatgagtggcaaaattacaagttctaataaacattactattagacgatagtaatgtttagtactttttaaatatatcgttttgcgattaattagtaatattttttaaatattattataataaattatatgaaatcttatatttaattaatcaataacgacaggtgcccctatcataagctataataattttaattaatctgatatggcaaacaaataaagtggcattctcttttttgatgtatatgtgtaattaatcatatattaaatatatatctttattatttttaaattattgtatggttgggattcattgactataatagtagatagaaaagtagggggcaaaaaaaataaaaagtaggggcaaattgttaacagatttattttgagggggcaaattataaaattatatattatcatatttacttatatatataatgtatataattatgatttttaaataatagactaatttttttttaaaaaaaataataaaataagttgatgtggagaaatttttattttcttagtttgaattttttttttgtcgaaaaatacgtacttcaataaaatatttgatattagttttttagttattttatatatttttttatatattagttttatcggtgtttttagttgagtgttatagtttatttaaggttattgtgaggttaatttctcatttaagttattttctttttttttttttgaaaaaaattatatttttataattttaaaactttaaaattatatttttgtaaataaaaattttagactgtaaaattataaataaatcaaagctaagaaattattttttgaaaaataaagctgtccatgattttttttttttttttatatttttatctttttatataatacatatatatatttgtcaaagtattcatttgtcgaaaccaaaaaaagtatatattatcaatacttaggtgacgattgattggaggaataaaattatatgaataggaataaaaataagaattaaatggaatcaaatttaaaataaataaaaaaattataaaaaaaattattaaattatttcttatcttgcattataattgtcattcattttatttaaaaatatagaataatcattctactaaaataatagaacgtcattccaatacttcataatataaccaaacaaaatatatatacatatatttatatttttcattctattctattttattaatgattttaatatataaaaataaaatcttaaaaaaaaaaagattttatttttgtgccatatatataaaagataagattttatttttgtaccatatataaaagataagattttatgtttatatataacagctcatataaatatttcacaaataaattttctactgtcatgcatcacatcatgtcttttgttatttagctatcatttatttcatttgtattttctataaattaataaaagattagagtgcctcatatatgacaattaccaataaatttcatcatcaa

SEQ ID NO: 52024 - DNA, 1083 bp, Cannabis sativa
atgaaatgaaacagatgaagcatgatttatggaaaccatcagcacaaaagccagaagattaacacctgaacttctattatactctaaaatttattttcacatatataccagcagcaatcaactatatatatatatagatatatatatacaagcacacattatactactccaaaatctctttactatataacaaaaacatacataaatacgctctagtcatgaatggaatgtgaaaactaaattagattgagaaatacaacaaagagagccaaaagtctcagatttccacacaaaatatgagaaaaataaaataacttttgtttaaagtctccctcacttttccttttatgaaatttccgtcccattatctgaaactccaaacattaaataataaatttccccaactttttttttccttttccctacaaatattcatactctaaacatggcctaactataatgatctcttcctcgtgaatgatattaactgaacaggatcggcaaaagtaaaaggcttacccatgaacgattagttagaacatattcaaacatatcaagattgcagcatgacatatgcaatgtcttccaaatcctttttattggtggtcaaattccccaggaaaacaacaaacaatgatgtcttcatctgcatatctaattcagttaacaccaacaaatcatagtaagtgagattggaagcataaaaaaaaagcacaatcatagtaaggtaagtacatacttacaatagattggaagttgttcaaaaatatgaaagcttacgagtacgagtacagacattcatctacagtacacagaatttttttcaaatgtccattttcgaataaattgttcatatttattacagtgatcacattcgattttccactctaacaataaaaaaaatataatattaaataaattaagtctatttaatcctaaaatttaaatttttataaattttaacatatatactaaatgatattattaaaattttttcttaaactattaagattgttacatttaaaaaattttgttcaattttactaaaaaaaatctaacgtgagtaatttttttttttttttt

SEQ ID NO: 52025 - DNA, 951 bp, Cannabis sativa
acacatcaattagttggttatcattccccctcaaatgaaaaggggaagatacaaccttgagtttgtctctcaagtattgaaatcggtcttttggcgatgatttggtgaggatgtcaccgacctgatcaacggagggcacatatctaaccaaaactttattgttgatgatttgatcacgaacaaaatgttgatcaatttcaatatgtttgcagcgagtgtgaaatacagggttagatgcaagagcagcaaccccttggttgtccacccatatggttggaacatcagctagcacaacctgtaactcggtgaagagagagtgaaaccatttaagttcttctgctgtgttcgtccagtcagcatcagagtgtgcttcaatagacaaacgagttgatggtgaaataaacagaccatgagataaagtgcctattaagtatcgaggcaatcttttataagcttcccaatgaacattagttggagcatgaataaattgggatagcttgttgataatgaatgccacatcctggtctggttaatgtcaaatattctggtagcctatgcttagtagccaaataggctttaggcttgtaaatacctctcatggatctagtaaccatagagtgagttctagggagtgtagcatcaacattcgaatcaaatgaaactatttgtgcagggtgttgcatagatatctctctaatgtgttcaacattgtttggtacagggaaacctgttgcaaatgagtgtgaatttgttgtgtcttgattcaagagatcaacaggtgtaagagatggagctgaaatagatgaagcaatttgtattgctggaacttctgcaggagcaaaagctgtttgtgcaggtgctagtggcgtaggtgttgctaaaacatctgaaatagttggtgcaacatgagtatcaatagcaactctggcagctgttgcaataggtgtgtta

SEQ ID NO: 52026 - DNA, 764 bp, Cannabis sativa
acttagtaattttttgcaaagggagtgaggattctatttttgagataaaagaagctttggatgattttagcaaaacttcaggttcggccatcaattttgaaaatttgcaaatttattttggcggtgttgctcatccgtcttctattgcccgaagtatcaagttaaaggttggagagtttcctcttaaatacttagggatccctctaagactgacggaatggaggctggaggactgtggtttaatcttgaaaaagatgaaacagaggcttcattcttgggccaaaaagcacctttctttagctggcataattcagctaattcaaactaccttgattggcttaaggaactgcaggatgagagtgtttcttttgcctcaaagtgtgataaaagaaattgagaagttatggcaaggcttcttatggggtttgaaagagaatagaactaaaattcacttgaaaaactgggaaaaggtgtgccttccgaaagcttacggcggtcttggtttcaaagacggctcaaaatggaacaaagcttctcttgctagattcatttgggatttaattaatacaaaagaccttctttgggttaaatggatcaactcgatttatcttaaagggaaggatttttgaaattataatttacaggtggactcgagctggtattggaggaaattatgccgaataagaaaagattttagcagggttgacataatggttgctggacaaggaggaatcttcagagctaataagctttataactcctct

SEQ ID NO: 52027 - DNA, 1442 bp, Cannabis sativa
tttttttttttttgagaaattactatttcccctctataatagagataaaatagagacagagtcgatcctagactatgatgggctaggttgcgcttaagactcacccattttaagatctcaaataaaaaaaatatctcttaaaaaataataactttttaaaatactatttatttttatattaagtgtccaatttttttagtttttaagattcatttcaactcaagccgcgtgaatagagattaaaaaaataataaagattgagatgttaattgattaagacagtacatttaatatttttgttcttcccctcaatttattccattgacatagtaacaaaaaagaaaatcagattgaatttttatagttttattagataagaaatttaatcattacattctataattcagatatcaatttcttaaatcatccaataggctgctaaaagatcctatatatatatacatactatatataatgaatatataatgaaagaattgaccaatataaactgagaaatttatataatcttgaccattgagaataatatgagactgaagaatataaatgcaaataaaggcactacattataagaagtagaagaagaagaagaagttcctttaaaaacctttctcttcttatttgttcttctacatttcttacccaacttcaaatctccaaagtagaaatgaactccaggatctctcatttcaactttactctcagacaaaactgagttgttagctccttgaatgttgttgtttatgtaaatattaatgcaacaacagccatcatgggaccccgatccattgcctcggtgcagcgaaaacgatgcacccgtgttcttcccttcgaggttgatatgttcggagaattcggggccagtttccgagaacatttctgaaacttgttgttcttgtttggaatgaaagagtttctttcttgaatagtaaaaactgtgtttatgaatggggttctttgcttgtactatgagtttggtatatatgttttactttatctatgatatgactaataatatccctcttgcctttttctttaaattcctaaaatcaaaagctatactcttacattgactgaaattcttcttttttttggatcaattccattacctttttacacggtttttattggaataattataattataggtctgaaaacactgaagccctcttagaatctgctattttacttacaaagttagctattcctattcctaaatttagaagattaaaattttgggtaaggtatcccgagctagttcggtcgctctccctagttcgtaggcacacataactcgtgatgttgctcgtaatccttgaaaattgtacaccaatcacttgaagaggacacaagatgtcaagaacgactgcctaaatatgtgaataatataagataatttgaaactaaccatttgatataaatat

SEQ ID NO: 52028 - DNA, 1633 bp, Cannabis sativa
gtgttctatgttatatacaaatagatcttgggtttattattaatttttctaacaatatcttccttaatttagataaaaacaagtctatatatatcctttaaaagaattatttcggtacactttttatctgtttcagcatcaaaaatagtttcttagtcaattttttttttttatagttgtattctttgtagttatttagaactaccttttaatttttaaaaaattatgaatagttcacaccacaactaccttttaatttttaaaacattataaatagttcacactgcaactaccaccacagaaaccatcgccaccacaaccaccaccacgaaaaccatcaccatcgcaaccacccactgcagaatccatcaccaacgcaactacaataactgcacaagccataaattgaaatacaaattttagattgtaatttttcacacaaacccaaacataaacacaaattcatatctaaaatgattacccattaagtcaattagtccacattaatgacacacgacattatttttagtaactggttccatggcattaaaactcaaactaaaatgttacgagctcaaataccatagaaccgagaggaaattgtaaaagataaaaataatcctaagagtaaataagtaatttcaagagataaaaatgataaaaagagctgatgttgtaatatattaggacataaaaaaaaacacattgtttcactaaagaaaagaagtagagcaggatgcttaaagacagaaaagtaaatctctgaataagagacaaatagagcagagctcggaaaggagaaaaacataaaagattgaatgcacgtggacaaatcgagaaaagagaaggaagcgggcattccttctcacctataaatagaagatcccatcattcaaaaagcatacagattcttgatcacaccagactagccaaaacactgttggaatacacccttaaattcacacttgagctcaggaagcaggtgacccagacctgattgatagaattgagaagaaagttgtgtaaaccgattgataatgtattcgactagctcgaatttcgtgtaaggaattcaaagtcttaataacaatttattgttgatccaattttcaacatcaatactctataataaatttatttgtactaaaatatgtttaggtatttatcatacattactaaaaataaaatatttaaaataattatattaaattaaataaataatatttaaatatttaattttatttagaaaatattttatatttattagatatttaaaattttcacaattttatgttagcaaatcacataaactagagttttttctttttttaaacagcctagagtttcttcgatacttttttttcttacaagtgacaaagaataatttgaaaatgccaaatgtgtaaaaattcatattttaaaataaaaataataaataatagcataaataataaaattttgtaaatttttatatatttgtaattataatgaattgaattataatatattatcattataatcaaaattgtatcaagacattttaaaagggaaatttgttgaaatatacttaaaaatttagactattcttttaatatactacctttaaataaatactctaaatattctccaaaca

SEQ ID NO: 52029 - DNA, 2555 bp, Cannabis sativa
tatacatcgcatactttttgcgaaaaccaaattattaaatactttctcatatatcttctttgtttacattacttatttccagccagctattcatcaaaaattacattacttatttctaagttctcacatttgaaacaattcaaattcaaagtttaatatcataattaaaatcaaggctgataatttttaaattctaacttttttagagaacaattaagagtgaagagcttattttaaaacactagcagaatgattaaattggtaaggaaataagcatacctaaatcatcacttcgaagtgaatctttaagaagatatatatttctcaaatgatacccattgagttaaaaattgtagcaaatccggtaatgaacatggaaaatttcaagacttttattgccctaaaattttcttattttgttaaaaatattgactcattatttttactgaatttgaataaacaattaatgacataatttatagattcatggttagagcaataatacatgtgttcttctcaactctctggaccagcagtgcgaaacaaattattcttcatttcgctctctaagactctaacaatctcataagttcactcgaaacataagcttttttttaaagaaaaaacaaagcatcaaaactgtttcactgtattttcaattgttagttttcaaaatcgtgttaaaaataagagaattttgtgttattagttaagaaataagcaacattttttatagactagtcaacatagccgttcgtatggttgttataaatattaaattaatttagcatgtaattttttcttttcatatttttgaataagaggtatgaatgattaaaaaattacaatctaattttgaaaagtaataaatatgagtgtgtcatctcattctttttatacttttttgaactttataaatacacaatataattttgtatataatttacatatttgtttaaagattacaaataataatatataataaaaaaaaagttttagcattacacaatcaacaatgtttgagttgtgtttttgaatgaaagatggcaaaatattacatagaatagtgtcgaatattcagctattgcattgttcttaattgatcattaatagattatacatatcgactattactatctctaaaaatctatttatatatgcataattttaaaattatttttatataatataatatgcacaattttgatttaattaattaatataatatatatagttttagtttaattaattaatctattattattaccattatcaaaattaattaatatcaaaataattttcctcactttaattaatctatttaattttacttgttaaaggaaaataaacaagttttcttatattaattcttattagttttaggaaactaatttgatgtaatttttttctataaatagtgaaattatttcagtatttagggacacgaaattagagagagatacaataatcataaattcaagagagaaatattcaaaaatcattataagagcttccaagagagatcaataacttcttgcatctcttctcacaagtcaatacaagaaaaaaaaaaaagagtaggctattatcatatcatcacgggatcaaacttctataaaaatctcggtgttctctttgctttattttgatcattattatcattattgttatttaattatttcaaatcgctttaattgactcattgtcattggttaaaaataaaatcaacatgaaaatatgggaaatagcttggaagttaaatatcccttacaaactgcatcaacttatttggcgtgctcttagtggttgtttggctactaaagtgtaactagcaactaaacatgttccacttgaacatcgttgccctttgtgcaatcaagatgcagagactatttttcatcttcttgttctttgtccctttgccaagtcttgctagcagcgatcgctgctgagctttggtggtgttgctggtgccaatttctaggactaatttggacgaattctgcaatagcaatcgacatcagggtgagaagatttggccatggttctttgggcaattatgcatgctcaaaatgaagtggtttagcagaattacttcaacaacataagttattctattggcaagagtggtccttaatcaatagaaaaatactcatttaaggagattgaggtctttatttattcctaacgggtcagatattagactagagtattagacgaaatcgattattaatacgattaaggcaaatgttgatggagaaatcttttcacaaggtaaatatgggcggctggtgtggcttgtaatgactccgatcaacttattgaagcttttaccgtctatcatttttggttgtgtagatgcagctagaaagggtggtttagagtgcagctcgaaactcattggttgttgtttagggtgtcactgtgtatatggatatgccttcttcttttggtcagcttgtgttggaatgtagatcattattggtctctttactttttgtcaactaatgttttgttaaacattttataaataagtttgtgtattgttttgtttg

SEQ ID NO: 52030 - DNA, 1510 bp, Cannabis sativa
  modified_base (180)..(182): a, c, t, g, unknown or other
tagatacaagttgtcactaatatagttttagtcacaacaagtactgtgactaaaaatacattttgtcacaaaattataatttttatgactaatatttttggccacaaatcttttaataataacaacataagaatgataatttatataattagtgacaacattttcacttttagtcacaannnttattgtgactaaaaataaaaatttttgtagtactttttctttaagtatgaaataatatttatttaatcaatttcttatattatttttttaatatattttacaataaaattataatttcttaatttatcaatcattataagtaaaatctcttacattctttacttatatctacacatatattactaaaactaacaaatttcatgaaaaattgatgaaggtatgctcgctggccatagagtacattggctctgagcaacacctaaagtgctaataattataaatggaagcatatatatatatatctattaattagtgtaatttaatattcaatttcactcttaccaaatatatatattcatgaatctcacatttttttaattaataatattaattatgtatagtgttacagattttaaaatttcaaataacaataattttgatgaaagagggagagaattaatgtacctgaaagagacagctaaaataaaagttatagcaggaatgagattgctcatggcagaagcgaacgttgctgatgttacatttaaactttgaatgtataaattttgtaccaatgatcccctgtattaaatttatattagattgtgtttcatttttttcttttacaatgtagataagagttgcacatcttctgaaataagtattcgttcaacttctttttagtaggaaaaaaaattaaattgaaggtacacaatttggaagaaagatcactatctctaagaatatgactatttatatatagatatagagttatggtatagggtgctaataatcattctaattattttttttaattgtcttattttttttattttttaataagtttataaatatcgtttattaatatttaaaaacaatacaaaaaataattaatagttaaataaaattattaaaatttcaaatatatttacgtatggccgcataaaaaattaactagaaaattgaagcaataaaaaaattaaaaaaatatcctaattaagtaaaccatataaatctccatctacatattataaccctaacattaaacgtatatatatacaatatttgcaacaaaccctaactcaatttatataaatttattgatcattgatcattaatatttgatataggcttctccatcaccatctatctattatataaagatatacgtataagcttcatcatatataagtatagggtaatactatggtaaaacctagcaaaaatttcctaccggtaaggaatttttttttttaccgttaattttagatcttgtggttattatgatgtaaggtatatactcttactataggactgcttgtataca

SEQ ID NO: 52031 - DNA, 945 bp, Cannabis sativa
atttgtaccattaaagaaaatacagggtttattttatcatttaacaaaataaatggttcaattagtaacttttgcaaaacacaaagtctaaaatggtatttagccccctaaaaaaggtagataaagaataagaaatgaagtccaattgtagctatggacaccattgctttaataggagtgctaaatatgccactataagctttcaagagactgcaaccgaaaacaaagatgaaaattagtacatcctagcttctaaattacgttatcactattcattattcataaagagattaaactttttttctagtgtagcacaatgttattccatatttgtaataatttaggggacttggttcgaactcatccctttataaagaggttaaactttaataagctttcatgttaataagctttcattctctctcattttttttcaaaagattctgctttctatttctacacttttggagccaaactgttttgactcttacaagaccagaaatgctataagtactcaccaactctgtatattcttcccttaagaaaaaaaaaacactctgtatatgctgctctacaaactttttctatgataaattggtttgtgcttttacattgagttgtaataacactattacaagtagattctcaaactagaatgcacaaatagattctatatgaacttagaatcatgtacaaataagcttgtcagcctattcaagttcatatcaatgtggaattaagacaaaatatttaaaaagagatacaagaacaccaaaaaatgtaatcacttttctagtgtaccaaaggaaaacaaacatacccaggtaaaagtttaaactaaagttggaggggtgcgccaagcccatgcagtagtgcaatacataggcgacacttaagagtcccaatagcaagctaatgtgatggactcttccccttaaaaaatta

SEQ ID NO: 52032 - DNA, 1978 bp, Cannabis sativa
ttaatgaagctcttgctgaatgtagtctacatgatttagagctgtgtggttatccttacacttgggagaaaagtcgtggtactgtggattgggtggaggttcgtattgaccgcgccttggttaatcaagcttggttagatttctttccttttgctaaactttacaatcttgaaatttctatgtccggtcattgccctatccatttggttactaacaacaatatggtgattgcaaataatcggagttttcattttgaaaactcttggttgaaagattcgttgtgtttaaagatcattcaagattgttggagtgttgatcccatgaagtcaattattgaaaaaaatagttggttgtggggaggtgttgatggagtggggaaaggattactcgggaaattttgctaaaagagtaaaagattgtaagttggaggtgaagaggtggaagaaaggcagggatgcgatctctgttgagaattataaacttgcttcgggtaaacttgttgaagtgttgctgcagaaagaattgttttggaagcagagaagtaaacaaccctggttgtgtgaaggtgataataactcgaagtactttcatgctgttgctacaacaagaagaagaaataactcaattcaaaaactgcgtgatgatgctgggaattgggtcgactggcagaatggccttcccacggtgataactgcttatttttcttagcttttttcagcttcagcagccgacatttgtggtgttatgcagtctattccagctgcaatttcgaatgatcacaacctgcaattgctggaaccggttatggaggatgagattaggcgtgcactctttcaaatgcatccggataaatctttgggtcccaatggaatgacttctggcttttatcaaaaaagttggaacattgttggtggggatattgttaagttggtccagaatttttttgtctcaggttcctttccaagagacttaaataagactaacattgtgcttattcctaagaagaaacagccccaagtgatgaatgatcttagaccaatatcattgtgtaatgtggtatataagattatttctaaggtgttggcgattagaattaaacaagtgctgccttttgtcatatcggataaccaaagtgcttttattccgggtcgtttgatttcagataatattacaattgcttttgaaatcatgcattatctgaaaaggaaaagaagtggcaaggagggttatatggctcttaaactggacatgagtaaggcctatgatcggtttgaatggtcgtatattgaaaacacgatgctgcgtatggggtttaataatcattgggtgcaactcatcatgttttgtgttacaacaatatcatacaatgtcacccatggtgcgtttactatgggtcctattaatccgagtaaaggtttgcgcaaggtgatccgctctctccgtttctctttttgatttgtgcggagggtctttcatatttactaaaatattatgagaggcatcatcttttgactgggtgtcgtgtggcgagaggagctcctatggtctctcatatgctctttgcggatgatagctatgtgtactgtaaagctaatgaaagggaagctcaaaatgttatacgcttgctgcattcctatgcacttgcttctagacaacaagttaactttgccaagtcttctgttttctttagcaagaacactacgactgatgtgagtaacagaatgtgtggtctaatggggttgagagaggcatcagatgatagcttttatttgggtcttccttgtattatgggtagaaacaagaacgccattctagggttcttgaaggagaagatgaggaagagaatttttagttggggaaactaagtttctttctaaagcgggcaaggaagtgttaattaagtcggttgctcaagcattgcctagctatgctatgagcgtttttcttttgacccaagagatttgttcgagtcttgaag

SEQ ID NO: 52033 - DNA, 1857 bp, Cannabis sativa
  modified_base (1037)..(1041): a, c, t, g, unknown or other
  modified_base (1821)..(1828): a, c, t, g, unknown or other
attaccgatttaattacaatttattgtcaaatattaaatattcaattgaatcgaatcaaatgttggatgtaatatttaaaaattcaatacattttatatctaattgaactaattaatatttttatttaatttgcataagtaattaaattttatgttgttatatataaagtataaatttatatattaaaattaatactaaaattttattttaatttttttttgaattggatggatccaattcaatctaatacatagtgaatctaaaatatttgatgaattcgatccgatctaaaaaaaaaaatattatgtttaaaatattagataaacgtgaatggatagaaccgatccaatctaatatttaattgatgttagatcaattagataactgaaattaattgaatcagatcgcatggtaaaattaaacattcaatatataaattgattggatctaaataaatttaaaaatattgaatgtggtccaataaaatgaggatcgagaaaaatgagtcttaattttaatttattttttataagtaaaaattgtattgaattttattactttttttttttttgtggctggattggtattaaaaattgtttattcttaatattttggataatttttataataattataagagggaaatttgttacatttttgttttttatgttgtaatttgttgctttaagtaactaagttatggttccttccaaaaaaaataataagtactaagttatggatgaataaataggtggccattcgtatgtggggattgttttagtgtagtgtgaagattttaaatgtaaaatttaaattaatccgacttatatttgtaaaatctaaatttatttgacctatattaattgtgttgaaattaaaattcaattcaacccatttaatttgtttatataaaaaattacttttaactttgttaacttaacaattgattaatatgttataataaatgttgcgaattatggggttccatctcaaaattaattagcaatgagtggagtaacccatgttcttatatatnnnnnaattctctaccatttattcgatgtgggacattgtccacaatatttcccctcaagatgatagctattttttcaatcttgaaccgtatcagagtggacatgatcactatctttataggtgcggtgataccatgttaagaatcacggggttccatctcaaaaccaattggcaatgagtggagtagaccatattcttatatatggctcaattctctaccatttattccatgtgggacattgtccacaataataaatttaacatgtttatgatgcttttgtgatacatttataagcaattttgacatatttatgtcttatttaacttaaaaagttatttacatgtaataaatataatgtggtataattcctctaaaataaaagatctccgaaaaaaaatcttgtggaaagctagatatcgtccgaaaagagtatggaagtctagcttgtccacttcgaaagttattcatttatggaaagttagatgtcatttagaaggacgttctcgaaagtctaacttgtccatctggaaagttagtcttccttcgaaaagaagttttgtataactagttgttcccttctggaagggagtctcagatagtccactccaactgtcgctattcttatccagcaagtcccttcagcgtacgcttcggttcatcttccaggaagcatccagataagcatttcatcttccaggaagcatacaactcatccaaaagcattttaacttgagttgacgtggaagcattttaaaattgatttcttaattttaccacaaataannnnnnnnatttattctaccaataaataataattgat

SEQ ID NO: 52034 - DNA, 605 bp, Cannabis sativa
ataaaatggattacattgaaatggagttttatttaagacataaaactcaacaatcagtgggtatgcggttgagaccccgttcccctattgttggctttttttattaaaagtgtgaggcttgaatttcgcctttgagtatgcgactcaatacttttgcatgccatccactgaagtttctagcctttgattcttccagcggaggtcgtttatctcctcttcatagtagggagtttgtgagcttgagctaatcgagtacactcgcgtctcctttttgggtccacgtcttgaagtgtgaaggtcttgtgtcacagatggtggatggtgtcacaccagagatggccttcttggcgattgaatacttccattgacggggttagaattgatgtcgttatcaagtcatattgtgttaggtaggggtgttcattggatcacattcaatggatttggacccaactgatccaattcaattatttattggatattgaattttgtcatctgatctaatccaatctaattaagtcatctgatctaatccaatccaatagatatattgaattggatcggtttcaaccattggatgaattgattggttttctattggattg

SEQ ID NO: 52035 - DNA, 1438 bp, Cannabis sativa
tttatgggtagtatggcggcatctacgagcttgtcattatctgagatgtttgatgcccatgtgccgtcgacattgtttaatatgtcttctacccatgtggtgtcaacaacttctgcaatgtgcactgcccatattactacccttgtcatgtcgacatcatctaaaaagtctgcgacatctatgatatgttttatgtcggcatcatttgtggtatccgtgactgtgacacctgagatgtttgaggggattgcatgatcatcatcttcatcattactcgcgaactatttggcgattgtaacatcatttgcatgaatgaatggagcatctgatattgttgaaattgagccatctgttcatgggttaaaggtgcaaaatgaagggacatgaggatgttgtagcagttgatgaaacaaaagaggagtctgctgcaactgctaatgttgaaaacccattggttgaaaagatagaccaaatccatcttcaagcatatgaaaacgagatggtaatgggtacgttggagctgcatcagccatcttaacatccacttttgcatgtttttcaggtaaaagtttttaagagaatatctgaacttgtctttccaactaacctattgtttgttaagattctcatgatgtatctaaatctcatcaattggtgcagaatcaaaagcactagaatgactgtcataattagtcttcatttgttcctattttaagaataagttagaaaccaataagcttacaattatttgaatatatatatgtaaaagtaattaattaatataatcttacctagtcatttgtggcatattcgctgataaaggtgttttgccactactgcaatattgaactttagaggctgttatttttgcgggaaattaaaataaaagatgacatagggttgttaatttgttgaagggttgtaaacctcttatggcatcagttttttggaaataactgatgccataggaacgtgataataatgacatgtgtgtccttatgccgtcgattatttctaaataacctacgacataaggggtttataatcctccctagctcttcatcttcctcattcgatcaactaacccaaaaaccttcaaactagagaaattccaaactctctccgccaaccaccacgttaatcacccctcatttcactattttttcaccatttcgactcattttttaaaatcttctatatttcatacccaaaactatttacctaaaaagatcacattttaggggtattaccggcagtattattactggcagaaaatacccgcctctattaatagggtattaccggcggaataggcattccaatagtaataactattaaatatataaataaataatattttattttaaatatattaataccggcggattggtattaataccggcagaatcctgcctctaaaaaagagggcggtaaaata

SEQ ID NO: 52036 - DNA, 913 bp, Cannabis sativa
cattcaattttaacatgactcatatatttcgtgtcaaaaaatttcaactctgacctgtttcattgtgttctcatgtcaacttatcatattcatgtatcgattatacttatatcttaccattgattaatatagtatagcatataaaaaaagtaatttattataaattatcaatataatgaataaaactcttaatattaactataaaaatagttttttttttcaaatttatatatttatttatgaaaataaatattactttaattttaagaatatattagatataaacgaatcaatttgtgtcacatgtgttaattctaatccaacctaagtaattaattatatcgttctggtttgacttaattttagcctgtgtctagacatagtgattagaaatactcatgaatttacgatgcaaatatttgcaaactgcacaggaatctccttgaaccaggataactcatcgtctaaccgaagggcatgctttgtcaaaccatgaattgctaaataaagtgagcaacatgagacaaaattacccctaaaatttagataataaagctataacgtcctcaaacaacacaccaaaatagctagaacttcaacttgtaacatcgcaaactacacaacaactcattaacatatcaaaatgttccacaaaatatctaccaaacaaaataagataaagaaaagtggattaacccctaaagatgatattaaaaactaataaaaaaaatctcaatagtaaaaagatgacaactctcaaataaattatatctaaaaaatttatcggcaaagtctctataacagtaggccctccacaaaaaacgacctacaaaataataacaaaactctattatcacacaatttaatgaaaaaatatataatgtgaataaagattgtaaaacaattcatataa

SEQ ID NO: 52037 - DNA, 902 bp, Cannabis sativa
tttagtatgtagtgtaaaattctcatatttttatttataaaagtatagttttaaaattggaaaattacccatcatataccatcttttttttattcaaatttacagttttaaaatatgacatatcttgcatcgcaattttaatgttgtgtcttatgaattggttaagcatgcttttataatagataatgaactttatatgatttatcagattttaatattatcgatcgatttgagcgtatatgcagaaatctttttcattattactgcagcatctaaaattttgttgtttttttttactttttcaaaagtatttttcaattactttgacaaatgataaataatcaaatatttactttttcataaaaaaaaaaaaaattattatatatcatattattttgaatatattttagttatttttaaaatacatttcagtaacttttaaatttattagtattacaaactactatttttaatttaaaaaaaaaatgaaaaaatatatcatggacgtttaaatcagccatgactttcaattgtgaattatatatttctaacaaaaaaattgtgaattatataaacattttaatgaactaaaaaaaagttagaaataactttacaactattacaaataatgcatatttttagagaccaattagttatgatgttattcgaactttcttccatggccaacaacttagatagatgaagatattcaagctcggcatgaataagattagtagagatttctaagtgggtgaatcatggtcatcattgtcttaactccctatgactaaaaagatcattagatgaaattgtaagttcatgttaagctaatggtttcaatttttgaaatattttctaagctattttaacttgcacctttcaacccccttgcctagtctcaa

SEQ ID NO: 52038 - DNA, 889 bp, Cannabis sativa
acaacaatatttgcagaaagtcatagcctacatttggtatttataacaaaaatagcaacaagtatcactacttctacttcttattcttcttctttgtttgaacaataaacaattcattgaaaaaccataatgtatgtatacagctttttttgaaaattataagaacctttttcaaactagataataagttttcaatccaccaaaggaacaatattgcacacaaaaaatgatgagaaacatgacatagtttagactagggacacttagaaaattaaaaatcaaacttatagatccatattgttataaaaaatacaaagatttccataaataaatcagtcctaacactgaagtcatggttaaaatatgaaagggggcaacaacaattgagaaaaaaagaatatactaaaacataacacttttatataggcgcatgtctattgtttcagacttatataaaacatgcataaatgtaacctattttgtatttttgacatgcacatcgtcatgaatataaaacaattaggatcgtagtcagtcaatgtgccaaaaatccgaaaacatatagttttgaatggagctgaacatcggtcggtttggtcaatttttttctatataaaaatccaaaattcagttttcggtctgaattggtccaattcgaaaaccaaccgaccaatccagaacctattttaaaactgacatttttgaacatcggtttggtcggtttaaatcgcctaaactgaacttcttttctttttttttaaaaaaaaaaaatatgatccgatttattctataaacacattattttacattttacaactataaacatacaaattaattgttcaaaaactaattatcttattcttttaactttaacattaataaaataata

SEQ ID NO: 52039 - DNA, 1376 bp, Cannabis sativa
cattaagaaaatagaaataaaaggtttgttaggtgacctttttgtttcttatttttttaaatttcacttaacaaaatcttgtaatttgttcacagtttatgattaattaatcaaaaagttgattatataattgttacggaacaataccaaagtaaataatattgttcatttttctattctcggaaaaatataattattttttaattctaaattctaaatcttcaaagacactttgtgttcctattataatttatattctattacgattaagttttttaaggaaaaaagaaaacattagaaattgaacgttaataattattattgtagtagtactactctagttctttattaaaagaataaatattaattatgtatatacttttcctttctatatatatatatataatatatataaagaggtatttatattcagtaattatcacttttgttgtgttgttgcaaaacgactgtatacagaagtaaagaaatgtgcttgaatgacttagccaaaaaaaaaaagtaatgtgcttgaatatttaacttgtaagtgtttctgaaaatgacatttattccatcaacgtttttggacaatctatatatgattttcctttttttgttggaacaagaccataggtgtgttacggaggcccaagtggctggcccaattactttggacccaagttatgcaaaactaaaggaaaacttacaaaaatactagatttgacccaatttttacaaaaatactaccacacagcaaaaataactttttatgctgccttgggacttttttttcttttatactgtaaacactgaaaataaaaaatgaggtctccatcttctacacccaccgacagaaccacaacagtaacactagaacaaccgaaaagaaaccattaaatctggtgagatgaagcagaaacattaaaaccattaatattggggctgtcatggtttttctaatgttgtttttgggttgttctactattgtttcgtatgtttaacaaatgttggttttaaattacacatgttaaaccaaccactaaatatttatttgaggtaaagaatgaaagaatcatggaaagtaatacacttaccttccattaaagtggtgaaatctagaagacaaaaaaaaaaggatggaagctggctagaaaaaaaaaaaaaacaacataacaaatgcagtaatgtgggaaactgggacacaacaagagaacatacaggaggagacatcaaaaatgaaaagaaggagaacaactaaaaaacaacagtggaacaacaaaagaaaactgaacatatattaaagtatatgatattgaagaaaataaattacatacaaatttcattatttccctattgctattaaaaatagagcagta

SEQ ID NO: 52040 - DNA, 1346 bp, Cannabis sativa
gtgatattaacactattcccacccatttcattccctgctccgtctacatacaccttccaagtgggtacaatcatttttgtagcatcggtgtttatctcaattttgttacattcaacgatgaagtctgttagagcatgccccttgattgaaatacgagggacatattggatgtcaaattggctcaaccccatggcccatttgagcaattgtccagaagatttgggtttttggaccacttggcgaagcaggtggttagtgaagacttttactttatgagcataaaagtaagggtgtagttttcgagacgagacaagaaaataaaaggccaacttttcaattagtgggtattggatctcgacacctatcattctcttactaacatagtaaataggatttgtggcttgtcttcctcccaaatcagtgtcgcactgatggtgttttctgaaactgccaagtaaaggtatagatcttccccttttataggtttggacaagattggggtcttggacatatgttcctttaggctctggaatgctacttcacactcgttagtccattcaaatttttgacttttttctcaaaatgttgaagaaagggatgcacttattcgttgatctagagatgaagcgactcaaaactgctactttctcagttagactttgcacatctttgtgcttctttggagatgacatgtctaataaggcatgtatctttttaggattggcctctatcccttgttggctaagatgaagcccaaaaacttacctgatttgacaccaaaatgtacatttacttattatgatttcctgttctttttaaatcgcaaaattaaaattagtcaagaatgtaatctcaccaagtatacggattttttcaaaaactaaatgaaattttcaaaccatgctatctacttacttttaaagtgactcacatttagaaaaattaactcaaacaacacaaaaacacaattaaaaaaaaaaaaaaaaaaaaaaaaaacctaaactaaactaaacaactaaataatcagacaaacaacaaaatttaaaattaagtccttcccccaaactaaaatatcacattgttcccaatatgacataaacccaaggagagaaagacttacctgataaccatgccacatcaacaagtggttaacgcccataataatcgtcaagcaagacaacttattgaaagttgttgttgtaatttccttcaagcttggcatgagatgatgagtttggaccaaaagcaatgccaacaacacaagactttggatgatgagcttggggagaagcctttcgtagcttgtagaggatataatatggtgggaatggtgttaatggaaaata

SEQ ID NO: 52041 - DNA, 913 bp, Cannabis sativa
gtagtttccaagtcagtctgatgtaattcttcaagagacttgagcttcatggagagttcctcgatatactctcgagcctcccggaggtccttcctgcctgaggcgataatatcatctttagcctttagcgcctcttggtggtcccgctccatgagagtcttctctgccagagcatcatttcatagggtctccatctgatcctccgaatccctgaccttcctcatggccctgtccatgccacccaactccaaaatggtgaacccttggtcgatcaaggtcttggaaagtcggtcggcctctgcagcaatctggcaacaaagagaaacaaggttaggacttcaaaaagtaagattaacaaggagggccttgaaaaaaaatatttactgagtattggcaacactcatatcctggatttgatagacggggttagaggaagcgcaggcgaacgatgccaggcttgggcccacaaaatgctgaaaatagtcggtcatgggatcgagactcaagtcctatatctccctggtatactcacctcataagggcccaccttgagcctcccttacccacttcttcaaggcctcaacctcagcatcacccttggacagttcatccaccgcgtaattttgtttggcgatatgaagctggaccctctcctcgtcaggatgagcgggggtcaaaagaatgctaggaggggcaggaaagtcatcaggcttagctgggatcccgaagtcagtgctgggaccgggggtggcaactcgcttaggcttcttagaagactcaaactcagatacaacacccttttgttttcggtcaagtggaagaactttttcttcctcttcttcaatgagaaccacctccttgttcctaggaacttccttggcaggtgcccctgaagtcacattttctctaggat

SEQ ID NO: 52042 - DNA, 1337 bp, Cannabis sativa
  modified_base (1305)..(1311): a, c, t, g, unknown or other
tattgtaatagcggatattgctatctaatgaattactttatttcaaaaaaaaaaaaaggaagaccaaatttaactatttcactaaacacgtactctaataaacatacaatttgtaaaataattaaaattaagcaaaaattacaatggcctaaaataacatacacacttatctatttttatttttttattttttttaaaaaaagatagtatttatttattttaataagatagtattatttgagttaggaaattagcaaatgagaacaaaagagtagagtggagtgaggcccacaacacaagatggaagaggtcaaagggggttgggttaggtccaagtttgacaactcaaattgtgatattggaagaacttattagtgaaaaaggtgtaaccactaaaagtggtattgacatgtactaatcacgtcagcccactcataaagttgttatctttgggtttggaaagaagtcatacattagatggagacaaacacaaacaaaacacaacaaaaaagaaatggttcaataattataactttttcctcaacaattactcacacgagaccgcaattatcgctagaaaaaaattgtgttcaaagttgatgcgttttttttttttttttttttaaaggtgagtgagatatgattctattgcatgaagaagtttgaacataataccaatagtatatgcttcttgatagttccacaatcatagcccatgctaaggcttgactttactattcattcgatctgtccatgaccaaattccttttctttttctgtcaaattgatctttcaatggttttaagacgttatagttttattgtctaaatttttaggtgcagttttgtcttaagtggctcacaattagaattttttaactcatggtttggcaaaacatgctttcggttagacgatgaactattctaaatcgaggagcttccagcgccaattgtagtttgttgcattgttaaaaaaaaaataatcctcaatgcaaaattataaaaaaagacaactactatcctcaaatggaattcatctatcatagtaaatgtccaaagactcctaaataaatatatgcaatgggttgtttatatcggatgtcccttgaaggtggtctcaagttattttgtttaatttttcgagataacttggtcttatataagttgctttacttgtagtgactcatattttgactttgtatatctttggctagacaattagtttgttgactagaaatttttcgcatcgacgattgtcacagtgtaattcatattactctctaaaaatatatatatctttatatannnnnnntgtctatctaacggcaattcttggtt

SEQ ID NO: 52043 - DNA, 1052 bp, Cannabis sativa
acaactcttccataacatagttgtctttagtgatgcggagctagatcgtttccttgtcgggatgggcaggggtcaagttgatgcctagaggggcaggatactcgtcaatctcagaaagaatccctgaatcgacactggggtcggcggtgtcgaccctcttcaacttctttgaagattttagctcagaggcgtcgcttttacattttcggtcaaggttagggagcacctcttcttcttcttcatcgatcaaaaccacctcctggttcctaatagcttcaatagaaggtcccgttggagtcatagtcactcgagggtgcatcgacatgtctgactcggggctgtgagtctgggcaagggcgtacagaggatcctccatgggtttcgcttttcaaaataagcaaaaggtcagggtaacaaaaaaaaattacaagtgcaagtatagttcagcgagactaatcctaccctggtgatctaattcagtcctagcaaattcataaattaaaaagctagtgtcgtcatctcttaaaaagctatttgaaggaataaaccaactcaaattcatgtaggaggaatgatccaaaaggattggtacgggaggaccagagcccatccaggaccgacccaagaaatgacttaaattggagaaataaaaacccttggcattatcgccccaccgggaatggggcatccgaaagctatatagtcttttatcaaattccactggccttaagttagcgtaagtctggacaaaaggaacgagatgaatattcaaaggagacttacaaactctggaggtatttgcgacaagggacccagagtttggaaccaggaatgcaaacttaggccggactggagttttttctttccctgcctccttttgggaaaccctcccggaggcagcctgaaggagagcatacccgagctcttgctcccttttgtatctatacttgttatatttatcttttgcggatgaaataatgtctgccctgagtgccttttcactcccaagattttggatgttgggacagaagaccttagacaagttgaagtca

SEQ ID NO: 52044 - DNA, 1317 bp, Cannabis sativa
aaaaaaaatattaagagtagtttttaaaatttttttaagtttatattttttttaataatggggtgtatttataattttatagggtacaaataaaagttcccaaaaattaattagattggagtaaaggagatgtaaagttacaattttgtccctgatcttatttcttctaaaaatgaaaaatgctttgtggaagtagttgtaaatgtaattgtgatgtacattattataagggaaataatatatatatatatattttttaataatcacgttttgataaaaaattaaaaaaaaatatataatgtttaagaaataatataatttctcaaaaaaaaaaaaagaagaaacaatataaaggaaataaatcttttttaaacagaaaaaaataaaaataaatacataaaaaataataatgatgaaaataaataaatatagaaacacaataataatgaaggaaataaataaatacatgatcatgcttcattcacattattaaatagacatggatgttgtctcaaacaaaatccttaagtttttttgtaaggaaccaaacccttaagtttttttttttttgttgataagtaaccaaacccttaagttaatacacaaaaataagaataaaattatgatcaaacaggattctcatttttttttttttttttgtaagatgatccatttttattaaagctatacaaggactaattcaatgagtttccaaaatattttttaaaataaataataacaagaatatgagagagacgacactagctcaatgccaattggaaacagtcctagatattaaattttggttgccataatgccatttgtaagtgacaattatcattaatttgaaacttttttttttgtatataaaacaatttgaaaatatatttaccattagaaagaagtggtcatgaacaacttttttttggttttattgccttagcttaaaaatatatttgagacaaatagatcaaaattatatttaaatatgtgtgtattattttatatcaaactatatgttcccacacatattagttggtaaaaatctaatcaaaactagattatattactaaagcaattgtattgttaaaatgcgcggaagtatttgtcagaagtattcgaatattttgattcatctatttttacttcaaaataaataaataaattactattgtcaacttcctgttataatttcttagtcaacctccacgcctaaaaatacataacggaatattatttttttaattttttttacgacggtgttcgttatgcttataacatcatttgtaacgccctaatgctaaggcacgctacagt

SEQ ID NO: 52045 - DNA, 787 bp, Cannabis sativa
ataaagtgattatgttattgagcatttttagtaggtagaaggagtgagcactgaattacacatgttgaaggattaagattaatgttgatgaaatgtttgagagtaaaaacaatatagttttggttgggttgctcgaaataatgatggccatctggtggaggctaagaatggtagaggcttggcatggttagtctggtgcttgcacaagctcttggagtgaaagaaactttgagttggctacaatgtcggtttttagattgggtgggcctcaggaaaaataaaattattggtccctttattttaaaaatgtgtagtattttcgaaaaatatacaaaaaaatatgtatattttaaaggaaaaaatctttttttttgggctctagactgagtgggccttaggcgtaagtctagcccgccttagtcgaagcccaactttggttggctgaaggataacaaaggggtgatgtggtagttgaaacaaatattatggttattgttcaaagttctgttcgtatgacttttgctttggtttttgtattatataccgagtgtcaagagattgtctgttttatataatattgttttatgttgtaaagtgttcagctaatcaaattgctcaccacttggctagactatctcatttcaatactgattgcagctttagtgactactacttttattgctttgcttgatataactgatcagaaagattctataataagaaaaaaaaaattacagaaaattacatatatatatttatatcattccataaaaataaaatatatatt

SEQ ID NO: 52046 - DNA, 1597 bp, Cannabis sativa
  modified_base (663)..(663): a, c, t, g, unknown or other
ctatgttaagaaatgtgataaatggcagagattttttaaaataccccgtccaccgcccaatgagctaactaagatgcagagtccttggccttttgctatttgggaaatagacctgatcaaacaattgtccaaaggtaagggcggtgtatagtatgtagtagtcgaagttgattatttgtacaaaatggacagaagtcgagcccttggcgacaattacatctaaagaagtactggactttgtggtgaagaatataagatgtcggttcggactcccgcacaaaatcgtccaagacaatggcaaacagtttgattgccaattgtttacagacttctgtatgactcgtgggatcataaaaagtttctccgtagtagcacaccactactagaaaattgggttttagtgatacacattgagtcactctaaaactatatagtgatacttcaacgcgcgtcacttatgagtgtgagtggaaagacagtatttagtgacacttcacacctatcactgaacccttttactataggcatatagagtcaggttttgtcagattgaaaagataacagccacacgcatgaagtgttagtatatcttttttttaaaaaaaaatttttattaatatttttggaaatatagtgaaacacaaaaagtgccactatattaanatttttctacaaaaaataatatttaattattttaattcaaattgtatatattataaataataatttatattaattatatacaaatacaattaaatataataataataattttatttaagtaaataatattttgtataaatcatttggccaaaatcaccagagtttacaatgatgcaaatacaaaaaatgtacacaataaatctgtatactcgagtaaaactgaggccaccattgttcttgcaaacaagaacaatttttcatgaacagaaaaactaaaacttcaatatctccataaataatttctcgctgtaacaagatttttggcatgtaaaaacctaaaaaatatacaaagaaaaagaagaagaaatagatctggttgttggtgtaggtttgatcttcatgaatggcgactcgtctattgatccatggcagagagaaaaagagattggaggaagaagagcacaacttgggtctcatctagtgatccacggaggtgagaggaagctaaccaaaacccatctagcgtgattgagcaccattaatcctcgcacgattccaatcgcacctgaccagaactcatctcgtcgttgcatccacgcaggcgagaggaagttgtgcagcaacattatctgccaagagaaagaaagaagaggcgagaagaagagagagaggagaagaggttttttaggaaagagaaagaggggttcaaatcccaatttatttatttttttattcataaatatttatattttaagtcagtttttatggagaaaaagaagctaagattatagaaaaccatgccacattttagtattttatatttttttttaatgattacaacttattattaattatttttttaaaaaaaataaaagggtgtatggtgacacgctatgcgtgtgagcaaatttgtttgccaacgcgttatgcgtgt

SEQ ID NO: 52047 - DNA, 848 bp, Cannabis sativa
tatatcatcatttttacattttgcaagatttggtataaataatatttagaataattatataaaacaatattttttataaatttttttatatttttacatttaaagattttttttttacatttttatagtattctataaaaatacaagaaaattacatgaaagtaacaaaaaaaaaataatatacaaatagcaaaaaatcaacaataaaataataagagtacaacataaaaatataccaaaacactgtaaattatgtaaataaaatcgtaaaaatattaaaaatttcgtgaaactgtattattttcgtatttgttgtaattttttttgttgttgtttctgttgtagtattattttttttttaaaattatcccaataatattactcaaataatgttaaataggttacaaaattcattgaaagcatattgggtaagaaaataagtacagaataacaaacataaaacttgcatagaatttccctaaaaaaaacttgcatagaatcgtaagttttgtcctctaacatcaattttcactgagcattgatatttgataccttaaggtgcccaacacttaactgactgatgtgacatcctataattagttaattaaaagtgatttgggtctatgttgacggctcaaacatagattaacaattgaaaagggattttttcataactaaccaagaaagaccaaaataattacaaaaataagattgtacagaattttaaagattttacatggattatataattttttttttttttacaaaaagtacagactattaattcacattgttgtgtttcatgttttttttattgttgtttgtatgttcttttcatagaaacccgt

SEQ ID NO: 52048 - DNA, 1499 bp, Cannabis sativa
aaaataatttccaacaattagtcctatctcaaaggaagtatacactacaactcctagaagataatggatacatagggagcaagcccacgaaaacaccaatggacccaagaatcaagcttaatgatcaccagggagaacttcttgaaaacccttctccatatcaacaacttgttggcaaattactttacctaactctttttaggcctgatgtaacctttgttgtcaacattctaagtcagtttatgtcttcaccacacacacctcacgtgcaatctgtgcatcacttgctctgttacttaaaaggaagccctggctaaggtcttctctactatgcatcttcatctctacaacttcgagaattttctgatttagattgggccttctgccttgtcaccagacaatgcattttccttagagactgtttaatcttcttggagaaccaagaaacaacctacaatctctcgaagctctgctgagcaatgacaaaacttaatattcaggataattttttgtgattattttttaatgatatttttcgttgtattggccattgggtagatggtggtatgatttcataatttataaagtaaaaattacacaatatatgggaaaaactgaagactttacttttttatggcacatttttttaatgcatttgtattatagatttttagcaatttttatatttttatggattatttttatgccatatttttgtaaaaataaactaaagtaccatattttatagttttttcttatcattctcctgtcttcttcctggtcaatctaaagcctgcaaccacatcgtccgccctagatttgtatttagaaatagtaagtagatgagatatccagatggtatagttgggcgagatgagttatagacgccggaaactcgccggagaaatcgttgtaggagagacagttactttttcagctcaaggctcggagctgagttagtgcggtgagtgactcgaatgagatgcagagattggggttctctaagatgtggttggaaactgtgcggttgatgtaggagacgccagagaggctacagatggaagtagagttccaatcggagaggttgttcaatctattccaattacatctcttccttcctttcttcttatccttttcaactcacctgaacctctccgactcaattcctctctgcctctgctttaatcttcctcaattgtttactcaaaaattggtagtggctatgcatcgccaaacttttccctgcaaactcgaccaaaggtacattcttcgaccatattatgtaaaattgtttaattgtgttttgtatgttgaacgaaatattctctctgtatgtatgtatatatatatattgatgtatgtggtttttagatgaagtccatcttttttagtggtctatttattatgcagagtaatttataatagtttttaagtaatgtagaataattaatatttgattgacatgtacaatatatatagattaagtattaaattttgtg

SEQ ID NO: 52049 - DNA, 1436 bp, Cannabis sativa
ttacccggtgttttcccttacggatcacgggactactgactgtcacagatagcactactattaaggatggaactgggccttaccttagggctaggtatctgctagatgtcaacaaatccattaggaggggaatacatactcgcttcataaagatgggtagagagtttactaagtggttagataaatatgaaagattacctgatttctgtttttattgtgggaagctagaccatactaagaagtattgtcatgcatacctccaaaaatgtgatgagtctcttgttcctctccattgcccttatgataggttgctctttggtaaagagaagtcttcttaaaagcctttgcctttccagtatcctcatgctcctgctatcaccatagttgaccttgatcttgttgattttcctcatgaaggtcaagttatgaaccctttcctcactcaatctgttagttttacacccttgcttaactcaaatgtagcttcactttctagtttgagtgcacctaagaactcacctagtgttatgattcccaccccaattaacccaaatttctctggaagtcaatcggtttgtctcacctccgttgtcactaattctactcttgtcagtgatagtcatgcctctgttactcatgagatggtccatgctgcatattctttggctgcagccattccaagtttagaccttggacaaaattgtagtgttaaccaggctgctgctgtggaagccccacgacttgattctcaagtgaaggggaaggggctggcttgtgcctctggagtgaaaaggccatgtttccaacccttttaagctcatgttggtggttctctacgttccatgctcaagagagctcgaattggggaatctgattctcatggtgtctctcctgctgaagaatttgaacaggcgggtgttgcggagcacacccgcccagaaaaatgaatcttatgagttggaatgcttgaggtttgaggagtcctcgagcattcaatcggctctcccagttggtcaagaatcatcggccaaatgttcttttttgatggagacaaggttgaaggctttttctgtggataagtttagaaaggctttagggtttatgtttgtgtttgaagtctcaagacaatattttggtgggggacttcttcttttgtggggggctgatgttaatattactattttgaactcttattctaatcatatcgattgtatagtgaattttaatgataatatatggcactttacttgtttttatggttcccctgttagttcttttaagcatgttacttgaaaattattgtgtgatttgtattatactgctcctaatcttccctggctggtcatgggagactttaatagttattttgtatagttgtgacaaaattgggaataataaccttgataatcccactatgactctgtttgcaaattttc

SEQ ID NO: 52050 - DNA, 1892 bp, Cannabis sativa
tgggtgtaagggcccaataaaggcttgaagcggtgacgttacagcatcaaagtcgatttgtcttataagataaatatttgtttatgtaatgtttgaatacgcattgcataaatgtttataatggatgataagtttgttggttatgcaatgttgtgatttctagtgttatgtgttgtttgtatttcatttgcttttcttgctgagtctttgtgactcacgggtgcttcgtggtgcaggtaaaagagaaagaaaaagggccaggcatgagttagaggtctaccggcgatgtacatatcaaccacaatgtctcgacttctagtggagattatctatccttttgattatatttttgaaatataactctattttgtaaattcggttttgaattaagttgtaaaagtttataaacatgggatcctcgtatttagcagtattttgtataaaagctatgtttttagtttaatctaaaagttttaaattataccgcacttttcttaagctaatagattaactataaattaatttgtaaaagcacacacgtggtgtccctatgggtcagggcattacacatataaggacctattgagcttgcatactaattcaacacctttctcttccacttgaaacccaggtggttgcttcatgtatatctcttcatctggaaatccacccagaaaggtagttttaacattaagttgttcaacttcaaactccatttgagttgccaaagacaacatcaatcttatcatctcgtattttaccataggtgagaagatttcagtgtagtcaattccttctacttgagggaaacccttagccaccaaccagactttgaatcgtcctggttcattcttattgatttcctctttcaccttgataatccatttacactccataattttttttctctggattcggcacaactacccaagtcttattctttcagagtgaaaccatctcctcatccatggtctggagccatttagacttatttccacttgaaattgcctcttcgtaacttccgaactcttcgatttcagtttgttgtaccacttacctcaacaaatctttttggagggtgaatctctattcacgttctatcacgcgtcaattgataaccttccagacctacctgtccagatccttcagaaacatctatttggtcttcgttatctttcggctctccaccagctttcgtctgtgcaccatcttctagctcctcatagattcttgctgcaaactctctttttgatgtttcgtttcgaattccatttccatgcgtgtagtgttcttatttccaggctttcctacatcacatgaagatacactaccttttccgactgtcaagggggatattctaattcattgaaaaccacatttctagcaattactacttttggtctacccttcttggaaatgcatattctataacccttggtagctaaggcataacctaggatagttctgttgggatttataccctaaaagtaagtaattaatggataatatattagagaatataattattaaatatctaaaaattccttattcatatggagaatgtataatcttgtaagaatgtacaagagaattaagattatacgatatgaataaaacaagctggtagtgtattaaagtattgagaatctttaatatggaattgctaagtacagtttactatacactatactactagtatgtgtgattttaattcggatcacatgtgtagatggacatgtagtaaagatactgtgtataattacattatgcatgactgggctgatatgtaataaacatctttcattaacttgttgtttaccatgaaaatagtttatcttatcacaatgatgatcattagtagatcagcctaaatcctgagtatacatgaactc

SEQ ID NO: 52051 - DNA, 2869 bp, Cannabis sativa
  modified_base (591)..(596): a, c, t, g, unknown or other
agaagtccttggaaggaacttgctgaaacatatatgcaattttaatgcttaaatagttggacgattctattccttaaatttaggatttaaattatggctgtgaaatgccattgccatagtctctttcctattattattgtttatgctaagattaaaatggttggaacttggagagctaaattaaacaagttccatcttgaaccggcttctattatctgctgtgtatggaacattgtcaattaaccatgtgtaatagtgttaattgaaattatggtattttataaaatctttgaattattgttagggctgcaagaacttgggggtgcggttgatctatgatcatatcttgcaatttggccttcttatatcgtgtgtttagagttgtcattaacatgttgatctcataagtaaacaaactagatataataatgtgtcatattttggattataaactcgatactatgtaaacttttaaaatttaaaattttaatcaatatttggattatactattatgtgttaaagagcttttatttttgtttaaattattaattcttgaaaaattattatcaaatttgcaattatttgttgtnnnnnntatatatataggaatggtaaaagagatatcgtgtcgggtcgggtcaatgctgagttgagctcgactcggtccgattgacattcctatataattatattttgctctttataattatttattattgttaattttttttagaaaattatatgaaaaataataaataaaaattattttgaacatttaaaaagaaaaaaaatattaaattattaatatattttttaaaaaaataatcattattgtaaaaaaaaaattgtcacaatccattcctacgtcaaccaaacaaagtaatcttcatattcctaggcatcatcataatattactgcacataaccaaacacactaatgttgctttcctaggtttataatttccttcattactctcccagcaatgttaaacctattcccatgaaatgaaacctacataccaaacgaaagttcagcagtaaggaacaggatgaagaggtaggagacaggggcggctagggcttcaccaagttaagatgttaatattccaggcaaataaaacacacagttttgagggatgttaactttccctcagtgtaaagacaagggtaacccacggtaaacttaaaactccactcaaaaaaattaaaaatgcataccaaacataggttagacttagtgatcccattcccgagtaaggaaaactgtgtaccaaaaataatttgggctttacacacatatttgggcctactactttcttccccaacccctaacagccaaccctaacccagttcgattgactctctctcccacacgcaaccattctcaagctctggtggaccattcaggcaaacgctactctgctccggaggtaaagtgtaaccacgggccaagctttttttttttaatgaaattatttctctcttctcaccttattctcattcagtgttactattctttttccttggtttgcttgagtatttcaatctccatatatattatgatttttatctttatattaataaaatttgatattgatttaatgaataactgatactgatttagtaattttttatactgtttcaatttattcttatttgtttttttgtttcaatatttattcttatgtttgatctccatattctgtttttttttgttagttattactatatattaatgattctttgaatgaataataaaacagtagtttatataatcagtgaatatagtctatgatactaaatttatagtatgatttggttttgttcatttactactgttttgatattgtaatttgctgagtttgtattttttttttcctagtatgatggacaagttctttgtaatgttaatatctaagtctacctgacataatggtatgaattggtaaaacttcctactttacctaagacatacaacatcttgcaatcaagtaatagtctagaccctttttcttatattctacaaatactgttcttcttctcctttcactttttaactaaattgcttgaaaatcttcaattttatatatttctgtgttattttcctaagacctgtcttatatactctttgtaagtgttagttatcattattatttaatttttaagtgggtttgatatgatttactttgttgcaattttgtttgaatcttagtttgggtacttgttgataaaatcaaagattcaagtcctatgctagtcaattttaaagcattagatttacttggtacatttgtttttcagaaactgaatcgactgatattgataatatgcatgtattatagctttgtattttgttattcatattggtgtgttttgcaattttgtattttatattttggattgagattgatgaaagagctttgttttctcttccttggtttgcttcctttatagtctcaattctacctttctacaagtggtagtagcaaagatgtggagactcatacccaaaaagttgtactggcttccagccagaagcgccacgcccaaccctacagctgatgctcgcacaagcattaagtattgcagtatgcaaacccagagctcggttaaagaaatttgcaacattctcacgcagaagaactggaagttccttatggactcatcatacatacccaataagctaaacccagaactaattcgctccgttattcgccataataggttggttgagccgaaacgcctccttgacttttttatatggtccgaaaccaaagtgggtacttcacaggatttggaggtgttgtcttttcttgccatttcccttagcaactcaggtttctttttgccttcctgtgatattatcga

SEQ ID NO: 52052 - DNA, 1022 bp, Cannabis sativa
ccgaataacaaaacaagaaaactacattaatttaaacttaacttaaattattacacagtgaaatattttgttaaaaaattaatataaaaatgatcataatcataataataaattaaagaagtttttttatttttacactttaaaatatatatattttttaattttttttgtatttttatagaaattcatatataaactcatatagcaattaatggataaacttaaatcgcaatcaaaatctatatagcaacccacaaactattaaagcaacccaaattaaaaaatactatatgaggtaattcttctaaattaaataatgaatatatattttttatttatttttgtttgaggggatttttttaaaatacgcaccatcttgaacaacataactcaattatttttttgaacaaaacaaattatcaactcaattataggattgctctatttcattattaatttatcatagcgtgccaactaccaaatatttaataaaattaaatcttattattttattcacactttaatttcttcactaaataatttttttattaggggattcactaaatattatatgcttatcttttaagcaatctaattttattcgcacgtgatgagtgaaaatatacattataataagattattataatatctcatctgctgtccatatgattcacgatttatattttatagggtaaaatagttgaatggaagtgatttaatccaattgaaattgattcaattcaattcaattaccaaatattatatatttaattataattgaattaaattagagcttaaaaattagattctagtagattagattaattattagatatcgatcctaaaatctaattaaaaactgatattaaattatatttaatatataataaagaagttgtttatacttatttatatataataaaaattattaaaaaataaaatatatatatactttaattatatttttttggttgttttttttatgttgaatttatatcacttaattgttttgtgtatttat

SEQ ID NO: 52053 - DNA, 1031 bp, Cannabis sativa
ctctgaaaccccttgagttcttgaattctgaaggcttaggggtaaatctttttcgtgtttctagatggaggatacatgtaattctaagatagttttagcccagttgttacaggcccaatcgtgggcccaaacaatataatggactagatgctttatcgaagtcaagactctggatgttgagtagatgactcatacaagcaagataaacctctaacaccgtgtgcatcccgatagccccaagccaatcttctggatgagtagtgaacaaacatcaagatattcggttatgtattacattcattaattattagatctcacaatatcagaccttaattctcaggatcatatcagagaatcatatcttctgaatatggaaataaagtaatattgtcaatggagaatttatgtgtctttattatcaacaaaagtaggacatggttgtctaattatcaacatgatgtggcatccatgtcagtagaatataaatgcctcatggctaggcttcaccaaatgagcccaaagttaatgtattatctatatttaccccattagtgggcaaggtttacatatcagagatctagcactataaatataagaaaacttattcatggaaatggttagaatctcatttcttgagtgctcaggcaaactctagggttcaaatacttgataagacacttgtgtaaatcaaaagggcttttctagtcttatcataataatagggaaacttacaaaaatactagattttgactcaatctttataaaaatattgccacatggcaaatataacttttatactgccttgggactttttttttttcttttatactataaataccgaaaataaaaaatgaggtcttcatcttccacatccacagacagaaccaccacatcaccaccagaatagtcagaacagaaccattaaatctagtgagatgaagcagaaacattaaaaccattaatattggggctatcatggtttttctaatgttatttctgtccactattattttgtatgtttaacaaatgtt

SEQ ID NO: 52054 - DNA, 1591 bp, Cannabis sativa
tcaagaggggtgttaaagagcttaaattatttgtctaaaccctaaaggaaagaaaaatagagggaaggaaaaattatgaaagatagaaaatagagaagaaagaaaagaaaatgtgtatcccttctattgtttggtaactagggaagaaagaaaatagtggtaaaagtaaaattactatttgataatttcatatttatttttttaaaaatgaatttgaaggataaataagtgtttatccaaaattttggtttgatggcgtggacactatttttgacacgtggcatgaaagaaacgcagtattacctgcacactagaggcactcaggtaagtactaagattcatcaaagtcgtttttgaatgctatcctttaacaaaaaggttatcatgaccctaaaacaatgaactataaagttgaggatgtcaacatggacatcctagggcttaacttgggaccaacatcagtgcagggcgcccgtgttgacatcatgtgcgccatctcgcatcagtttcggttgccaacaacttcctaggggcaatctacttagcgattttcttaagaaaaaaaaaaccaatccgaactcaaatgcgaattgacgaaaggctacttcaatctaggaaacagtcggaaactcgagagggtccatagggccctcttatctcttccttctccgagctcgcgttctggaagaaggagaagaaggaaccgagaagaaagtatcagcaacaaccggttttattacgggacagctcatgatgttcatatcgatctattatgtgcctctgcatctagcattgggtagacctcatacaataactgtcctagctctaccctatcttttgtttcatttcttctggaacaatcacaaacacttttttgattatggatctactaacagaaattcaatgcgtaatcttagcattacatgtgtattcctgaataatctcatttttcaattattcaaccatttcattttaccaagttcaatgttagtcagattagtcaacatttatatgtttcgatgcaacaacaagatgttatttgtaacaagtagttttgttggttggttaattggtcacattttattcatgaaatgggttggattggtattagtctggatacagcaaaataattctattagatctaatgtacttattagatctaataagtaccttgtggcagaattgagaaattttatggctcgaatctttagtattctcttatttattacctgtatctactatttaggcagaataccgtcacccattgttactaagaaactgaaagcaaccttagaaacggaagaaacagatgtagaaatagaaacaacttcagaaacgaaggggactaaacaggaacaagggggatccaccgaagaagatccttctccttcccttttttcggaagaaaaggaggatccggacaaaatcgatgaaacggaagagatacgagtgaatggaaaggaaaaaacaaaagatgaattccaagttaaagagacacaatataaaaataaacccgtttatgaaacttattatctggatgtggatcggaatcaagaaaattcgaagttagaaatattgaacgaaaaaaaag

SEQ ID NO: 52055 - DNA, 988 bp, Cannabis sativa
  modified_base (940)..(963): a, c, t, g, unknown or other
tcttggaatttcaccaagaaatcctaccgtttcagtgttgcattgtccatcaatttccaactagtttcacaatctaagaagggaaatcaccgaaacaacaactatatttcaacgtgttaaacaatttaagcatcaagaccaatccagcaaatagttttaattaataagatttgggtattatttttatattacagcaaaattatattcatatattcaagtgatacctacaatttcgaattagattatattgagagctcgtaatcaacactctatcaacttatttttaattctatgcaacattaaaacaagtattttaatttgaagggattggatttttttaatgatgtttcttagtcgcttctttatgtgattggctttctcagatcaaatcgttgttggattgttgtttctttgaatgatttattcgtattctttttgatgatcggattttgtaagattttaatagcttatttgttgattttccgaatgtaaaaccacagtaccttgcttttcaagggatttttataccatgtactgaaattttcaactttttttttttttttttattataatgagacggaattttgtttttccaaaaatgttgtattttttttttaaaatagttttttttttttgagcataatactgtgtaagttttatactgtgtaatgtgttaagttttcactattgttgtacgatcattttttaattgttctactattgtttttaactgttccattttgttgttttactgttattttataaaaagacaatatttttttataaaaaattctgtataaaagtaaaattataaatttttgtccaaaatttaatatttttgtaaaaatcttgttttatacagtgaaggagagcaaggagagtaataggtattaattattgggtcgtataatagtttaaattgggaaatttacaaaaatannnnnnnnnnnnnnnnnnnnnnnnaaaatactgtcacacggaaattttt

SEQ ID NO: 52056 - DNA, 1110 bp, Cannabis sativa
gccttgtgtctaatcatgctaagtatctggggttgcctagctttgtgggaagaaggaaaaaggaggtctttgaagtcatcaaggataaagtttggaataaactcaaagggtggaaggcttcgatgttctcccaagcggggcgtgaaatccttataaaggctattgtgcaagccattccgagttatacaatgagctgctttcgtcttcccaagaagctcatcaaaaagcttcacactttggcagccaacttttggtggggggacaccaaggaaaataagaaacttcattgggggtcttgggataaactttgcaagcctaaggaacaaggaggtcttgggtttcggagcctaactgaattcaaccaagcgtatttggcaaaataagggtgggggcttatccaaaatcctcactccttattagctcgagttttgaagaatagctattatcctactatgtccttcatggaggcttggtgtccatcgggttcctcatgtatatggaaaggaatctattggggtaggaagattttgaaggaaggggctcgatggagggttggaaatggaagagattcagatttgtgggaggacaaatggttaccccgaccttctggggctatgctcactcaaaacctcggagttgaaccccacacaaagctccatcatttcatcacaacagatgggcaatggcacatggaaaaggtcaaacaacattttcataaatgatgttccttggattcaaggaattctgattgacgtgtatgttgaggattctttgagttggccttatactccgaatggccaatacatagtcaaaagtggatatcgagttggaagggaaataaatctccatccaactaggtgttctaacatggaagaaatccacaaatggtggaagatgatgtggagtatgcaactgccccctcggatgaaactgttaagatggagagtttgtcataattggctgcagcgaaaacaaatctcatccatagaggtatgcatgtaaatcctatatgtgagtcatgtggaaacaatgctgaaactctaactcatgtattgtggagttgtgctaccactaaagtggtgtaggaactcattccttggtataagaagt

SEQ ID NO: 52057 - DNA, 993 bp, Cannabis sativa
ataaaaatagagattgaaaataattgatctctcttatagcttaaaataaggctctttataactacaccaaataatatttgttatatttgttatttttttaatattttatttacatactaataattttttttcacaattttgggtctttagtgttcgggggctcgagacatacgcctagcttgcctaccctcagagccagccctaattggttgttcatatatctttaaatgaagctaattagaccctaaggaagttaagaaaggaatgttttcaatttttaatctaaagatcccagtatctaatggctatggctcaaagttcttcaaagtcatgtggaaagatttggagaaagagttcacaagtgctatatccagaaatttttttcagaatggcattaccccaaatcagttaaataagactcttttgatgctcgttacaaaagttgataacccttccaaggtcattgattattatcgtccaatcacttattgcaacacggtgtacaaatgcatatccaaaataatgtgttcaaggctggccggagtcttacttattttggtaagtgataatcaaagtgtgtgttattaaaaatgtttctcgaagataaaaattaatttgagtaaagcttatgatacaattgcctagaattgtttagaacagcttttgaaagagtaccatttacctactcaatttgttaattgggttatgacttgtgtgtggagctcaacatatcttctagttatgaatgagaaggggcagttcaaagggaaaaaaagggttgaaacagggagatctaatctcgtctcttttatttgtcctagtcatggaatatttgacttgaatactaaagagacaatctaggaatgaaatgttcagatttcacccattatgaaaaagcctcaagctggctttgctttgcaaattattttatactattttttttaaaggtaaaccagtttcgattaattgcattgcagaagctcaatttacatc

SEQ ID NO: 52058 - DNA, 1393 bp, Cannabis sativa
ttttttttttttttgattttatagtttcgaatagcttacaaaaattatgtttaaagttttttgaaggtaagttggaatattaattaagaactctgtattccgtaattataatgaatatcattaaaaaagaatttgaaaaaatatattcatatgtagaagctgattaaaaaattataattaacactcttaaaaatatttatgttaaagctatggaaaaatttggatatgattattatatatttgaaaaatattttatattaatttttttaaaataatactattgcatttttgaacttgcaattatgtaataattcactaacataatgtaaaacttcttatttttttgaaatatgaacatagaaatatatattagtaaaacaataaaattacttgactatgtacatatatatataacaaggaaacaaattgcatgtgcgactgtattttgtttagttttaactaaatcataaaactatatcatatttccaattttcatatttttgatgtatctttttttttgttagtacgagtaactatattttactaattttttttaattgattagagattaattagagaatttttttaattgataaatctatatatatataaaaaaaaataattaaacacacttttgacgtacattatttttttatctcctgattattcaaaatcattccatctgtatatgacataattaaaagtaagacatatcacaaaaccaaatatagttgaaattatgctctttggacaataaacttatatatatatatatattcatatagcttcagtgatcataataattagtataatatggcgattaacttgtttgattaactctggtatttggagtctcttgattttgagtcatcttataacacacctccttctcttcaacaacaatcagactgctggcctcttgtaactggaaagagtgagacatatataaaaatagtattgactaatatttgagtgctaatattaattaccacaactcaaaactttctcctacttgtaattaataatattgaaaccaattgtttgataaatctagaaacaatgttctacgttttaaaaaaataaaataaaataaaataaaaggcagtgctcactacttaattatagagctacttaattgtatatacactcttatctactcttgcgaaacagtactactcacatctatatatatagatgatttatcaaacagtactactcacatatatatacactcttatttatatatacccttcaaccataatcaataaaacatttacagctcgtttggaacgtcgtgttaaatcgtattgtattgtattatattgaattggattgtatatatcatatttttatataataatatattaaactttaatttatactaaaatattat

SEQ ID NO: 52059 - DNA, 980 bp, Cannabis sativa
  modified_base (50)..(56): a, c, t, g, unknown or other
agatgtttgttttaatctataggtagacactttaagcttgcatatgttcnnnnnnnttagaggaaaatctttatggcagtctatataccttctcctctagtatataaatatgtatagatacattctaaattatgaatattacatactcataactgggtattagtaagaaaatttaaatttttatatacttaattttgtcatctaacataaggattcgcttagctcatatcgtatttaataataaataactttatatttaaataaaataatatattgtattaattattatgaacataacttttaatacaataaattatattatttaatatatacatctctaaattcttaaatatttattcgcaaaatagtttgaaaaattgtgaacaaatcctaatttattatgataaaatatagagaatataattatcacatgctcactgtggagtatggcctagcaaagctgtatttaatcattatagatttatagtacatatgattttaagaacagtgacatttcacagatttattagtctatcactcaattattcgtggattttcataatagattaataataaaaggtttacgtgtctcaccataattcaaagagacaaaatgagtccaacacaataatactattaaagaaaatacgatgcacataattttctaacttttatctttagttgaaatttttcatattcaggataaaatactattttagactatatattaattctaagaaatcaccaattctttttttttttttttttattattttactatataacaattcactcaagcccaagttggttcaaactttttacctctaatcctaaaactttctctcctttaatcctagagattgcgactcaatttctctataatcttaagcctgagaaagtttcagaaaaatgagtattaaaattaagggtcgaaaaataattatgcaaaacacatcattttaaaataggattaatccttt

SEQ ID NO: 52060 - DNA, 568 bp, Cannabis sativa
tttgaaccaacaagtgaacctaatcagaccttttagtaagagtgatgtgaagaatgccctttttagtattcactcttctaagagtcctggtttggatggatttgggtcgggatttttcaagaagctttggaaggatattggggaagatatttctacagctgttctgggtttctttcatgatggaaggttgccaaaaagtctaaatgaaacggtgattttgattatccccaaggttgtgaatcctttgtctgcaagtgattacaggcccattgcctgctgcaatacaatctataagtgtatctcgaaaataatctgctcgagactctcggaggtgctccctgccctagtccaaagcaaccaaggggcttttgtgaagaacaggcttcttgctcacaacatcatgattttccaagatctcctaaagggttactcgaggaaaaatatttcagcaagatgcattatgaagattgatttaagcaagacttatgacactgttgactggcagtttgttgaagatctcctaaactctctatgctttccttctagatgttcgaaattattttaccag

SEQ ID NO: 52061 - DNA, 934 bp, Cannabis sativa
caaacctaatcgttaaatttaacagaatattctttatttttaagtatattctgttaaaccaagaattgacgttagataggcacttttaatatgataaattaattaatgatgaggtaaccaccaggtacattattattttttattttgttctacaaaatatcgataatatatcgatactatgtcgacaaaattcaagatgcaagaatctcaaatacaaaccttaacctctacaaaatatcgacaaatctcaacatgaaagaatcacaaaacattggcctttacattaataaaaaatatcgacaaaacaccatcgtacgataataagaagaaatacaatcactcttgcaatttgaaacaacaaaaggtttgttagggaagaatactcaaaaaatataaaaaactaaaaattaagaaatttaatataatcgacaacctatcaacatcccatcgatattccatcgacaagacgtgtcatgatttcgagcagtgagaaaaattgtcaaagtgtcgatattctattgatataatgtcttgacattgaagcagtttgagacactcaacaaaattgtcagcatattatcgatatcatatcgataaagattagcctcgagaacctatcaaaagccttcgagaaaggtcttccttgaccttgggacatctgcttcgagaaccattcgagaacttatcgataatcagtcgagaaaaatacaaatacagaatactctgaagaaaaaaaaaaaagagatctaattttggcaaaaattctacgaacaatcctataaatctaccgaaatacattatacttttacaattatttaacaaatatttttaaaaaaagacctaccggcccatttgtaaagaccgcatatgattaataccttgaattattaaataattagggtttatgtatgagattttattattaataataata

SEQ ID NO: 52062 - DNA, 1101 bp, Cannabis sativa
tattttttgaaatggtacaaaatagtaccttgagtttaatttttcgataattttctttttaatataatcaacttgaagatgatttctagcaccaacagatgcagaaaatatacttattcttatcataacaattttagatcgagttattattaacttttattttgacaaaaaatcagttaaggatactattttatatcattttagaaaatacagtacctaatttatcatttaccaaaacgaaaaatcaaattagtaacttttgcaaaataagatctaaaataatatttatcttaaaaagtgtaaaaaagtgtacgatcataagagagaggaaaattttatttttattgtttttaaggaatgtttgaaaaaataatattgacttctttttttccttttttaggaaagttattttatggaaaaattttaaaaagaaattaaaaaatataaaaaacggtataaggtaattgattatctccttgtgataactcgttacgtgacatttggtaacacttttttaatcagttttctgtttttaaaatttaaaaattaaaatatttttcaaaaatatgttttataaaactctttttacttttcaatttttttattgagaatcaaaattttaaaaacaaaaagaaaaagtcactttcaatatgtttttaaacaattttttttcttaatcaatattttggactccaaccgaacccggacccaaatccacccccacaacccaggtgctgaactcggcttttgactcgaaccgaaatccagccccggacttagactcgacttaaataaaatcaaaaaataaaaatgaaaataaactttacaggacacacttttattttatgtttttaaagttaaaaaataaaagtacttacaaaacgcatttttgttttttaaaaacaaaaaattttactttcactttatgattaaaaaattaaaaaataaaaatattatcaaacggattcatataaataactttatacatacggtggttgtgttcaggaattggataaggataataagaatgcaagacttgcagactattttgatgtgatatcaggaacaagcactggtggtcttattgccacaatgatatca

SEQ ID NO: 52063 - DNA, 774 bp, Cannabis sativa
caggatcgtttacctcgttatgcaattgggccctgctgcaaggattgcgtcgctcgtgatcctcctcttgtggcacttcatagttggagtttcgtgcgacttgttccctctgcattagttgattcaagtcgagtccctcttatcccgtcatgtgttctctggggtgtgattagttcatcgcctagtattcgttaccaggggttatttgaatgtgtggttggtgctcgtagaggacgtcggttcctgacccttccattgatttcagcctgtagagcctgcatttgatcttgtaaggcagtatactgggctgtggtcaattggatgataccttcagacacaacagcacgcgtgataggcgagaactgccccgcaatggctgctagtgtagatgtttctcgaacatgagcggcagtttcaaggaataagctgagaggagtaacggttctccatcccactccttcgttgatggcatcgacaggtgtcgttccattacgtgggagtggaacattcatttttccaacattgattgatctagtgttgttatctccattcgtcaggtttccagccatgatgatttttctccaaaatcaacagaatatttctttcccacagacggcagcaaatgttgttagaggaatttagacaacaccaagataaataatattttataaatataaacagaaaatgtgcgagtactcaacctagaatggcaagtattcaagctatggataaacagacgtactggaaatgtaaaggacacaagaaaatatagtt

SEQ ID NO: 52064 - DNA, 672 bp, Cannabis sativa
ttacagttttattttggggggttttgaaggccataaattcagataaagttttccatagcaaaggccatccccaatacaaagtttttggccgatctcaaagatttgtaactgagccaaactatgaagaaatgaatctgatgatcaagacgaggaagaattaataggaaataggaattgagcctaaaatggaattctttattgattgtctaaaactgatctaatacaaagagagtaaaactgaaaacaagttgtaacaggaaactgttacaagtaaccacttgaaacaaaataaaatcaacaactaaagctagcataaacaataataatattattttaattctccccctaagatgaaatgtatatattttttaccttcatcctagataaaagttcatgaaaaacagtagggtaaagatattaactaagtataccagcaaacaaattgccactattcacatccaaccctaaaactctcctcgaatgctctggcgaaaccacctctccacccttctgatcatcctcttcaaaaccggccactcgaatccctttccgttttgttgagaatcatgaggttccatctcaaaaccaattggatatatgggctatttttgctaagatgatggctattttttgctcatcaatcttgaaccgtatcagagtggacatggtcac

SEQ ID NO: 52065 - DNA, 681 bp, Cannabis sativa
ttttcttaatctatattttggactttaacctcaaactggattttgggaccccgaccccaacgaaaattcgagccccgacccctgcccaaacccgaacctaaaggcagactccgaccccaaacctaaccccagtcccagatgctgggcctaaaactggactcgaaatccgatcccagacttgaaccccagccccgaccccaatcccagacctagagcccagccccaaccatggctccggaccccagacccaagttaaataaaattaggattgttcataaagtattcgatctgatccaatccgtaaaatgtggatatccacacttgtgtggattggattagattaaaaaatttaaaatccgcacttgtacggattggatgttgtttgacctcaaaaagtaaccgatccaatccaatccgcacttaattatatatttaaaaaaattataatatacataatataatattaatttctaataataatatataatataatctgaccttttatcaacaaaaaacaaatctaaacctaatatcgtttcactttcttctctttctcctagagccgctttcatctcctaccaccagtcctgatcttgagcccttgccgaccagtctagatcttcagtcggcagtctacttcagtcgtcttaacagcgaccgtctcctcagtcacctgtgaaa

SEQ ID NO: 52066 - DNA, 994 bp, Cannabis sativa
gagaagtgatgcaactcgcctcaaaatataggcctgcaacttttgtcttattcctagttttttgggaagacttactagtagtgggagacggattactagtagcagattcttctatgtcaacgggattgttgttgcacgatattatttcgggtcccacaattctctttttgttcttgaaaattcataaaaacaaaaaagaagttaggactcgagaaggtaactttagcaagaaggggattacatgtttttcttacaaaatgtgacatggcctattaaaagaagaaaatacattctcacaaaaacttgcctttattacatttagtagagcccgtgtgtaatcctaaagttatggaaaaacagacgaaattacccatgcgacttcatgttcaacaacattcaacctctgcttacatggcacatagcgcgctcatggagatgaccattgacactaatgatagcgtagcactggtccaccataaaaatttatgaatttcatgtgatgacaaagtgcgctaataatgagacgttatttggggtcctcggccatgaggatttccacatgttgacgtaggggtattcaacaaagtttacaaaccgcctaatccgaataaactgtccaaaccaaaccgaataaaccaacaaaaaataaaacccaaaataatacaataaaaatctaaaccgcccaacgaatatattgagtggtttacaaattattctaaatcgtccaattaacctgaataaaccgaattaaaccgatttatatatatatatttttaataaaagtgtatatactatattacataagttacatttattagttaaactattttgtatttaaagtttggacattttagtgtttaacttaaacttagactttctagttaataattttttttttgtatttggatattgaagttaaagtttaaaatctataccatattattaattttttttatttattttattcaataattttatgtttactcaattatat

SEQ ID NO: 52067 - DNA, 1553 bp, Cannabis sativa
aaataataaaatatgtatatattaatttgcttctggcagtattaatatacgtaaaatctatattcattgaaatactattttatgtccattcattctcttcagagtgcgattttagaataatttaaatataaaatagaattaaatcgtatagtgatttatttataaacaggtcacattctattcaataatcaatataattttactttgattataagtgtgtctgttctaaaagtacgtgaccactgttctttaattccacacataaaagttttattctattcactttgactttgattatgtgtggtatttcattttcttgttgttttcaatttattttgaaaatattttagtaataagtaatgttcttgattatttaaaattattacattcaccttaagaaatgacattgagcaagtagaacatgaatataactttcttaaaaacttgttacttgttcatccataaaaatataaaaaattattcagtaatttcttttacaatattttaaagaatatataaatatatttttttacataatcttcaatatgtacgcaaaatcttatttttttttataatatctattcaatatgtcatacaaaataaattttataatttctaatatacatattgtaagtaataacaatacatatatataataacatgatcaatatatagaatatgaacactttttaaaattaaatgaattcaatttctatcattctctatagaaaataataatgaacaagaaatacctgtcttgtgtctttaaataagattagtcatgtttattgttattcctatactttgatgtttaatggaattttcttaaaattcttttgggcattcaaaatccactatataatttcatcagtaataattatttcaataattctttagttatattcacaaaaatacaatatttttgataaagataatttacttcaagaaatgtttgcttaaatttatatggatattagattgcttttcattgtcatcaaagaataaaataacatatgtatgaatatgcatttatttcttttattatatttagtcaattatacacgtttgtataatcttcaagatatatgtaggattttattgaggattacataaagattttatcgaggatacacaattttctaaatatatgcctaatttatatatattttctctatcatatcataagcacaaattatataaaatatattataaatattgtaaataataagaacatatataaatatatgaatttaaaaataaatatataagaataagaatatatacacatattataatacatagataacaagaaaaagaaaagaaaagtaaaagagttcttgaaattatttcagttagatgagcacataaatatatatttagtttataatgattttaaaataactcaagaactttaaaaaaaaataaaaaaaaaataggctaattaggatatttacccgttgaactttgacatataccaaatcatgctccttgaacttttaaggtcgttaaaaatgctccctgaattattgagattgttgcatttaaggactttt

SEQ ID NO: 52068 - DNA, 1460 bp, Cannabis sativa
tgcaacggcaagtaccgtctcaactaaaatagataatccaagtggttcaaacaccaaaagaaaagatgactcgagagaatcatcttaaaataaaatgaaacaaaaaaaagcacgacaaatatgtttcaatttacccagtatacaccgagttgaatgaaactcgtgaaaacatttttctcgcaaatgaaaacagggttacattctacaaacctgagccaatgagacatgccagacataaacgagattcaatgaaattttgtcgatttcataaagatatagggcatactactgaagagtgtcgacaaccaaaagatgagatagagagtctaatctcttgttgatatttcagacaatatgtaaaaatcaagggaacgagccaaactagcccaatcaccctaataacccggataaccatagattgcaacctcctcctgttgagggtgaggatatattggtcattttgggagggccccatctcgctagaaacaataaaaatacccaaaaaaagatatatcaatgaaataaagaacaaaaaaacgacgtttgctccagaaccactaaaaaaagcaaagacagatgaacctccgattatattctcggaggaagatacaaagcatgtgcgatatctgcatgtcgatcctctcgtcattacagttcagctcgtcaacaaaagagtaaaaaagagtgttggtggctaacgggagttccatgactatcctttacaaggatacattcaagaaaatgggattaaaagatgcgaagttaaagcctttcatggtaagcttatgtggattcacaggtgatagtgttgccagctacggcatcgttgaacttccattaattgtaggagagccaccattatcaacggtgctaaagtaggagttcttagctgttgatcttccatcaatttataatatattgatgggtcgctctgcattgattggactagcggcagtaagttcaatcaaacactgatcactaaagttcccaacgcaagtaggagtaggtgtaggacgaggcgaccaattgttggctcgtgaatgttattgcctaaaacttcaaaatagaagagccaatcatcaattgatggtagtcataaaagaagaaggcgagaaggatgatgacgatctagatcctagagtccaagacgagaataacaagctcaaacccattaaagaactggaagaggttattttagatccaaataatcccacgaaatgtttgtatatttggaagaatttggatgaaaaactaaaatagcagtcaattgattttttgaaggcaaaacaggaccaattctgtaataccctaagattaagaaaatggattagcggaccctaactagttaaatgtgtattattgtggaataatattattatataatttattatatgtgaattaaccttgtatatgacatgttaatgttggaaatattttatcaggatctagatttactacca

SEQ ID NO: 52069 - DNA, 773 bp, Cannabis sativa
gttgttgtctgtgggataatcacagactggtgtattatgaatggtaatacttgggagaaccacttgagaaaaagggtcaacattagaaaaatcagtgttaagtttgtgaaagggaaagacattctcatgaaaaacaacattacgagaaataaaaaactgattagtattgatatcatataatttgtaccctttaattccttgagggtaacccatgaatatacaagtgcgagcacgtggagaaaacttagtcctatgagcagataatgtcgaggcaaatgcaagacaaccgaaggatctaaggtgattgtaatctggtttttcttgaaaaagacattcgtatggagttttatttttgagtaatggtgttggaattctgtttatcaagaaaacagcagcaagtatactttcattccagaattttatagggagtttagcttgaaaatacaaggcacgggccacattgagcagatgctgatgctttctttcaacaactgcattctgttctggtgtttccacacatgtgaattcatgtatgatgccatgttgggcaaatagatctttgaaaacaagttctggggcgttgtctgatctgaaagctttgaaaatacacctgaattgagtctgtacataagctaaaaactgaggaataatagtgttagcatcagatttatgttgcataagataaatccaagtaaacctagagtgatcatccacaagagtgagaaaatatctatgatttgtgtgagattttatgtgataaggtccccaaacat

SEQ ID NO: 52070 - DNA, 1068 bp, Cannabis sativa
tagaattggcccggccgaaaaccaacttcatcggaactggagatcaacatgaaataaagaatcctaaaaaattttagcacgatcaattaacctaatcaaaaagtcataccacgataggcaacaaaaactcaaaatccaattttgacaacaaaaatctgtggtaaaatacgtttaataatttagaagaatttcgatcatcatatagaaaccgttcaattcatattttaactacattaaaaaaaacatccatatctcaactaaaagaccatcaggtgtgtgtttcttaaatcaaaaatattctcctattaataatacaataatatgttaactgtttagatggtttttttaatcgtttttcaattgtgatatgatatacgaaatacttacactttcatttcttttagaaaaatactagaataaaaattaaaaaattgatgatgactatgttgatcatgaagaaagtttgtttagcttgtttaaatagtgttacatttttttaatgttattgcaacgttgtttacacttgttctccacaaacaatttgttaattgtatatattacatgcattcatcaatcatataattcgaatatcatttgaaaaaggatatatatatatattatatatttatatatgctaattagagagttggaatgctagaatcaatgacatcattactaaaatcactcaaagtaatgtatgttgggatgaaaacaagcaatatactcaacatgaagtgagtgggaaatttctggaaaacagttgcaaatatacaaatttattggataaaatatttttgcaattagaatgcaacagagaaacaattaactttctaatccagtattaagttaaagaaagataccaccgctgaaaaattactaatgatgcaagcctgaacttttacatgcaattgaagttaaaagaattaaacatcacaagctatttattgtgtgtaaacagatttgaaaacacaacaattatgacaacaactcgtttccctttttttaacaacaacaaattcgacttttatccaaccaatactacaatacaactatttgaggaaggagaag

SEQ ID NO: 52071 - DNA, 714 bp, Cannabis sativa
ctaattagtaaaattctaaagtaatttttttcttacatttgggaaatagaatagatttagcataatttaaataaagttaaatagcaacataagtattcaaagttttagatttgtaagtgatataaatttaataatttttttaacggcaaaaatatctaatatttgtaaagtaattttcctcaagttgcttcaatacatacttcgttattgtgttaaacaaggcacgtataagacctagattttaaatcatttgagtctgaacggaacattatattattagtttcttctaaatcttctataataaattcaaaacgaaattgtacatacattaagtattcataccgttaaaaaaattattagatttatactacttacaaacttaaaatttaaagtatttatgtcactatttatcctttaaataatattggaaaggaatcacttttcaactcattttggtttttgtttaagaaagacaaatcctatctcaacatgaattacaattccaaaagaataagttcttcaattataaacaccaaaccaaagaagtgaatggatcctctttaggaaaactcattccattccaatcaatcaaacataatcttagttaaattttgatcggaaaacaaagtaagaaaatgtaaggaaaaaattatggaatataaaaaataataatgaaaaaactatttctaagggatgaaaagaaaggtaagaaaa

SEQ ID NO: 52072 - DNA, 1346 bp, Cannabis sativa
  modified_base (884)..(886): a, c, t, g, unknown or other
  modified_base (1290)..(1306): a, c, t, g, unknown or other
ccatttaataaaggttataattgtaatttcaatctatttggatggaaattatttaatgatatggaaattaattacaatttctaatttgtgtacaactaataaaaaaattcagagaaaatgatttttcaacccagaaaataatttataaaggaaaaaaaaatcaaattttaaagcattagtgaaaggaagacgaggtgctagagtgtccatagaaaaaagttgagaaaaagtggttagggttattcgtgtttgtttttatggtccatatgaaaaaagaagtggattttatgttaaatatatatatatattagttaaatctaatatgaactataagcttaagatctcaacatgattacataaaataaatctaaactataagttaaaagaattttacttcttgatgcctatcatggtattctcaattcctttcgtatattttatcaatcaaccaatccaggtgctatgaacttgatgaagacttcatgccagagtcttccaaatcaatcatcaacattctggataagagtgggcttacatgatcaattagatgaatgaatttttttatcacaacgtgtgctcaattcatgagacattgtgaactgagatgagggaaaaaacacctttctctagagagagaatgaggcgtgtaggatgagagatagaggggagtcaaccaaagctttttggttcttgagttgttatttttcaactctcaattatatcgtatataatgacttgaaacttaactgttacgtattatgtatatatcatattgttaacccagaaattgatcttggtgacgtggacatcaatatttgacagatggcaagaaagaaaacatctcagagttgagtagtctcgagtcatagtagtcgacctgggannngtccctagccctgcgcccaagttgactttgagaactctagaatgggtgcttagattccgccaagttatgttcaactcaatatctttcagtattttgtaccataaatacatgaagcatccaagtccaaggcctgagagctgaaaatacacaaaacaacaccacaaaaatcaacccaggcgcctagggtttcacctagtgcctatgttgacaacctaactagggtttcagtttcaaggaccttcttagtgcaaatggttcaaactttgtactgggacatgaactaaacatatcacgaacaaatttgaggcatcaaaattagattcggagaacttttacttttgagtactcggagcaccaaatgcctcaggtgttaatttttagggttcatatcagagtcgcagtgnnnnnnnnnnnnnnnnnatttaataataaaaatttgttgaatctgatatgaaccata

SEQ ID NO: 52073 - DNA, 1120 bp, Cannabis sativa
agaaacattgttgacagacattgacccttctaatgacaaacattcggaccttctcatcaacgatatcagttcacgtgcatagacttgttccaaatgagagaggcttaggcccaaccacttgcttgaaacttcatttctggaaagagaggaatattctccaatagatatatggtatctctccaatttttcagaaaacaaaccctcaggcaaaacatgttcaggcggtacatataaatgtaaggctgtcaacctttgcatactctttatctcaataagactggcatttcttattccgccttcttcatcaataatctgatcccatcctttaaattcacgaggaagatagagctcttccatctgtgtcaaatttgaaatgacattcgcctctatcactcttaaataagaacagcctcgtagatccagcacttgcaaacgccgcaattctcctagttcttttggtagtcgcctaatggaaaaagactcagacagatcaagagcttttaaattctttaactcaccaatcactgctatgtcttccagagaagaattacacagacataatgtttggagattttgaagagaagcaaaagacgaaggtaatgatctctggcgtgtaccattcataaccaaaactttaagcagcccagtttgcttaaaaaattcatctggaatagattccaaagtaaacccactggataaaagaagcaattctaaactaggacattccaattctgaaggaagattatcaaaatcgtcataatcaagaaaggaaattgctttagatgctttaagtctttcatcttcatacataacaatgttactcatcatcctatgcccatgttcttcctttgcaatgtttaggcaaacatctcgaatgacatcgtgcatcttcactctactttcactccaactccaaccatccaacaaaagacaatgagatttcaatttaacaaccaacgaattcaccctgtttcttgcttcactcactgttctgattccttgaagcaagttccaacccatgctgtatctgttaggaatgcagcttcgaattgttgcctcatgcaacctgagttcttggacagaactctaactcagtaaccaaaaccagaaaacagagtaa

SEQ ID NO: 52074 - DNA, 784 bp, Cannabis sativa
  modified_base (701)..(730): a, c, t, g, unknown or other
tatgagaagaggtatttctggtggccagaagaagcgtttaacaataggtacgtgtctatgctctattacttgattccaaatttaaatctaattacaaataagtggactaccataggatcttaattaatataaatttatttattatactttttccatttgatgtatttctcttatatatgatggtgctatttctaactaatgttcttttggttcgttattaattttgactagatgctttgattaagctataataatatattgtaccttgtggtatcaattgaagtcctacatccaataatcaagaattgccttaatataagtgttccacactttttgggtagaattcaaaagcaaataagtttaagcccaaagtaaataaaatcataccaactatgtttatatatagaaaaatttataaattaattcattttatattatttttttttgaataatactttatattacttaattatattatatgtacataaaaaattatttataatttattataaattttattaaagaaatactacaaaaatctgatacttttaataacaattttttagtcataatataatttttttttgactaaatgagtcacaacaaaatattacttgtgactaaaatatattctttagttacaagttgtccctaatttagttttagtcaaaacaagaattgtaactaaaaatacatttagnnnnnnnnnnnnnnnnnnnnnnnnnnnnnnacttttagccacggactttttagtcacatgcataggaatgataatttataatta

SEQ ID NO: 52075 - DNA, 1069 bp, Cannabis sativa
ttcactttcttttctctctctcttcatcttcatctttcttattcttattctttcttctttcttctcatctattctatattattttataacaagttacaatttcaataatattttggctagtagtgcaataattctatttataggcagttatgcactttagggccgaactaatcctaacccgataagagtttatttatacttagctcccttattgagttgattacaagtaaatgaataagggtgatccaatattacactttttaggcccagtgggctagcccaaggcttttttggtatgttgcagtaattctatatatatcgatggtgattggtgtgcacgtgagtcatcattaggagttcttggaaaaaattgggtcagagtagtgcttgtgcaaatctccaagaatattgtacattttgatcacaatcctctcttcaagttggtagataagtttaactaccgagttccttgagatgatgtccaaaagatgacttgtctgtctcgatccccatagatggttaatctaggttcttcctagttggtaagtgttcccaaacatgtcctccaagctcacctctaagggaaaatatgtaacactctactagtttaggtataaggatcatcttttgaatatccaagggcttgagcttgctccattgataaactattcgcgtcatcttggcatctatcataagagtgaggccctcaacacaacttacatatcactagagccttttgcacttgaataatcatcttggttaaggcttctacttggacggttaacttagtaattgcatcaatttcatgtaaacctgctactctcttcggttggcttctctcatttggccatttttgattattcatggccatctcctcaagtaaaccataagcctcgttagtacttttcctcataaatatcccccagaagcggcatctacttgtgtgcaggtattagcagtcatcccttagtaaaagttgtggacttgcatccacttctcaatctcgtgatgaggacactttctaatcaggtttttgaatatctctcatgcttcattaagagactcattg

SEQ ID NO: 52076 - DNA, 717 bp, Cannabis sativa
gcaagccatggcatatgatggaatggcttgaacaaccgattttagaaggacttctttgccacctttggaaaaaaatttggagttccatttatttaaatgagaccagacacgatcgttaatgtaattgaatgcatcttttttagatcgtccaaaagtttgaggaaggcccaaatatttttccatagtttcacgaataggaatgccaagaagcgaagcgattgtatgctggagctcaggggcagtattcggagagaaatataatgccgatttagcaaagttaactagctgtccagacgcacggctataatcgtgaagaatgttttggatagatgtcgtagcttcaatggaggctgagctaaagaggaggctatcatcagcgaagaagagatgtgagatagtgggggctcgccgagctattttaatgccaagggagtggctgcgaggctggcgctgttgagttttgtggtggatgagtgatgaaagcccctcagagcatagaagaaacaagtatggggaaagcgggtcgccttggcgaatgcctcgggtaggcttaacttgtccaagaacttgttggttaatggagaaggaaaaagtggcagtggagatacaagccatgatcagattgatgaagcgctgaggaaacaagtatctttccataactttacgaatgaatacccattcaacccgatcaaaggctttggccatatctagctttaa

SEQ ID NO: 52077 - DNA, 744 bp, Cannabis sativa
gtcatcgttttactgagagcgatgctcccattgctcttcatgcctttgtattagcggatgtttctgtctaataaagattattttcattcaaaaaaagaaaatcatataaaaaagtccaatattttaatttctccttaggcccctcgaaagcttgaaaagcttgagaaggccacacgcattcaagattatataaattatacaaatttatgaggtcataatgttattattaatgtagttattaagatagacatatcttatactctttaataagaatatattgttttatttttttactaaacttaagtatcaaacttttcttgatcatgatggtgttagaagtagtggctatcgagagcgttttgggggtgatgaaaaaaaaaaaatccaaacagttcgtaaaatacaactaagaagtttattttgatttttgaaaaatctcactaaattctttagtaaagtcattttttttttaaaaaaataaaataatattagcataattaatagtatgcattgtatatttattaatttattttaatttcatacatctttattatttaacaagttaaaaataaaaaataaatacttttataaatgaaaacaaaagtgataatcttatctaaaaaaaattccattcataaatacttttataaatattattttttggaattttcaagctcttgaattttctctctatataactaaactattaatcgtatatcaattacacaagtttgaccgaaattc

SEQ ID NO: 52078 - DNA, 858 bp, Cannabis sativa
  modified_base (464)..(469): a, c, t, g, unknown or other
cctaaatagattctgataaatatgtcttgatccactactaccaatgagaataagacatatacatatataatatgttaatatcatgctttgtgattcgtgtttaggtatatttttagatcaaagtaatctatcatgtctcgagtaagacatgccaacactgaaagggaaatttgaattattgacataaaataacacggttaatagttatagttttttttttttttaatttcggattaaaccttcttaattattatttcacttacattgaatctcttaaatttaaagtttagtagtaaaattatccaaactactagtttattagtaaatttaaagcgtcatatatatttttcatagttaattaattaattgccaacatatactactcatatatgtacagtctaaacacttttatattgctacacttaatattattatttacaaattataaaaaattatttcaaaannnnnnatattttttatttttaaaattttagtcaattttaaaataaatttttaaataataatattatgtgtactaatataaatgtgttacgtgtattaaagtgtatacataaataatctataataacagttaacatgacactttaatttattaacactttaataatttagaaaattttaccataaaaatttaaatttaaaaaattaaatacaggttcaccaaccataaactcattattatatatcataatccaattaactacacataatttataatattgtatccgaaatggaatataatatatatacacattaattatatcaccaatcttaaatcaaatgaggagggggagatcacatatttcgtatatgtatttatgagtcagtagttatcca

SEQ ID NO: 52079 - DNA, 977 bp, Cannabis sativa
aatctaacaatctcaatagttcggggggaatttttaacggccaaaaaaattcatggggcatgatttagtacatgtcaaacttcaatgaaaaaaattactaattagtctatccataaattggcatgataatgtgattgtggaatcaaattttctattccaaatttctcatgttcccaacgtcagttaaagggtggggcagtaggggtagtaggggcacacgctcaaggcccccacttaagctcaaaaactctttaacaaaaaggtatcaaatttttttttttaaaaaataattttttttttattttactataatttattaaaaatatatattatttttttaaaagaaatactgaattttattttttaagatattacatttaatattttgttaaaaaaaaagactcaattatattttcaaaatactaaatttaagatttttactattatatattaaaaaacataaatgatttcatataaaaaaaaaatccaattaatttatttggtacaagaccttcaattatagcttgaaataaaagaagataatatattaattaggtgatatataaaaccaaattaaactcagttctttgctccaagacagtaaaaactagttaatgatttggttttatatatatcctaattaagatataatcttcttctcatttaactactaagtatttatataacttgtaataaattttcttctaatatcctgcaataaaacaatcttccttattcagcatatataattttgcttccctctcagttttagttttttgttacatgctgtcgtaacaatacaaagcataccatgagaatttgagaaaagagataaacacaataaaaattacagataaacctgtgacaataaaaaccacggtaaatctttcacactaaaaaatgatcatgtgaaaaataaaaaccaccctaaattttccactatgataataatgggcacataatattatattctcaaa

SEQ ID NO: 52080 - DNA, 1014 bp, Cannabis sativa
ttgagatgatgaatttaaagataattcttcaatttggctactatgcaaaaaaaaattgagaaaaatgaatattgcattgggcggaactgatatgaaaagatattttacatgtcacaagaactatacagctcagtagttccttacccttatatagctctagtattgttaacaactaaaaattaatttaaatttacaatcgctctttgttataatattcaaaataagaatcggttagatttgatgaaccacatgtcaaacgaccacatggacaaatctataccatgagaatgccatagatgccttgctatggataaagaatgatagaagcaaattaaaaggacctcaaactgaaatgcaccacaaattatagaactagtccaaattaatcagttcacaccatgaaagcattaccttttacagcaccagactgcctttccaactctaattgctcaatcttatccagtaacaactgcttctctttgtttgttctgtccagctccctcatggcctttaggcgttgtttgttcaagtacaaaatatctatacataaaagcaaatgtaccatatacattaatcttaataaaatgttgtgtttaagagtcacaatttcaagaagaaatatttatcaaagtaaactcttagttgcattaaagacttactctgctgagcttctttgaatagttgccaaacctcagtatgcttcttcgcctcaccattcgaagacttcacatcatttcaaatccaacaatgaaacggaaaaaatcaagagccaaattaaaaattaaacagaaaaacaaaagctaaatataaaatataaatgtaaaaataacttcaatgaaataataaaaataataataaataagtaaaatttgatcgatttgcatttcgtagcaagtagcaaccaacaactgtattagtagcatacctcagaaatttctgcatttccaggaccttccaacctaaagatgcgcgcacacataaaaatttcttattaaagacttacaaatacagaaa

SEQ ID NO: 52081 - DNA, 713 bp, Cannabis sativa
gacaaacattaagtgattcacctccggggcctcccttgaaattttgatcccatggatgtttccccgaacttgagacctttcaagcattctagaaagcacatcattacagaggagaaacagatagggagaaatggggtcaccttgcctcagccccctcccaggatacatcttcttttgaggtttcccatttagcaacactgaataagaaacagtgacaatacattgcattatcaacttcacaacttccgtattgaaaccgtggttttccaaaactctttgcaaaaatatccactctatacgatcataggctttatgcatgtcaatcttgatagccacaagacctcccctccctttctttttcttgatcgtatgcacaatctcctgagttagaatagaagcctcagctatccaacgccccaggatgaacgcagattggtagggggacaccaatcgatctaacaccaacttcaatcgttgcgagatgatacgacttataattttgtaaaaaaaattacatagggcaattagtctaaaacgatccaccgtcttcggattgtctcctttaggaatcagacagagaaaagtgtggttcacattcccactcattacacccgttctgaagaactcttgcacaaaagacatcacatcagatctcacaatctcccaacatcgtcgaaaaaaacatcccaagaaaccatccggtcccggcgcct

SEQ ID NO: 52082 - DNA, 1158 bp, Cannabis sativa
  modified_base (31)..(32): a, c, t, g, unknown or other
tccttactcttacactcgttagtgctctctnnaaatctcacccaacacatctcgaaaaatagtgtaatatcacagggacgaagccaagagcattatgtttatgtatcacttttctattagaaacattgagagaaaaagtagttctcaagcaataataatcattttaatcgcaatagtaaaaatctcacatttctaataataacacgaacagatgtaaaaatttaactaattttatcataatacctttaagttagattattattaaattttatttcgacaaaaaattagttcatgattctatttgtacaattttaaaaaatacaagctttattttatcatttacaaaatataacgtctaaaataatatttacgtttaatgatatattccaagaatagaatattccgttcaaagctgaaagaaaatatattttttctaccttttataatagaatagtagtatgtttaaagccgtggttttattgtagttcttgttggtaatttaattgttgtttttaatgatgatcaaagttttgacagttttatatatgttgttttgggttagctctaatttttaaaatctatttttggacttattagaggtcccatcttaaatacaaagaggttaagtttgtgcttagggcaaaaaataaaataaaatattcttttaaaattatgtatttttttactaattttaaaagatatgacaattattttctaaatgagggctctagaaatttttcttttcctataacatactatatttcaaggccggcctacataattattagcatgttttgacatgaatgtagaaatttttataactttgtcattcttcaaagtttgttgtcgtttcatacgtgttttgcatgggattatgagttgaatgttttttgtttttttaagcaaaaaagttaaatgttttttattgattatttattttgttttagagtataaaaaatgagtaaatcttttttgaaaaatataaatttgcttaaattagtatattatctgccattgataaactatcaatatactatcgataaaccatcgataatatagtacatcaataatatcgatagtaggctgtaggagtgtatatcaattggtttagtcgggttattgtaatgaccgctttagtaatttggattagtaaaggca

SEQ ID NO: 52083 - DNA, 945 bp, Cannabis sativa
  modified_base (904)..(919): a, c, t, g, unknown or other
gactcaagtcgtgaatgttgtgtttaagtggctcagctacaaagcttgggccctccaatttgacaactggctgagtgcaataactgtcaagactatgagaatgaaagaagatattattgctgcaacacttgtagcaactatctacaacatctagttaaattagaacaattgtgtatataatggctttagtcatacaattactcatgttactaaagaaatccaaaaaattattaaatgtagatgctgacgcgattttcgtcaactaatctaagaagatagtaaaaataaagaggattgtgatgaattaagatggtattatatcatgtagtgttatatttctaattatattatatgtccttttttaaatagtactatatgtttacattgtttagtgtagatttttatgtgcatataaatatacatttaataatataaataaaagtttaatataatattttataaaaatatgatatacaccataatttaataaaataagatgtgtttatatatataatcatatttaatatggtgtatgaaataaacacttacaaaatcatataaattattattttaagaccacagtataaattatataaattactatatataatataatgtaatgtgtgatgtgctaaataaatacttaaaaaattatataaattaatattttaagactataatgtataactcgatcacacaaacaaaacaggtgctcttaactagtatatatatatatgcataaatatatatatctttatatataaaaagtggctatctaatcatttttgttagtttaataaaatatactttaaaaataaaagaatattctgttaaatttaacgggattagtagaattggtttaataaatatatataaatattaatattatttattttagattaannnnnnnnnnnnnnnntattaatatattatttataatattat

SEQ ID NO: 52084 - DNA, 4305 bp, Cannabis sativa
caacaatctcaatagttcagaggcataatttggtacatgtcaaagttcaggggacaaaaatcctaattagtctatattttatagtaaatttaatctaatttttagcatggccgaatttgacacacctctattttttctaaatgacctaaagtataagtatagcaatacaatatagattataggtataggttttaagagattattataagtgagagtttagcatgtggataataaataaattaaaaaaaaaaaatgaaagataagagtttgagttaagtagacatggtgatgcgtcatcacccaaatccattcatactgcctatttggcgctaatccaaattctgtgcctaactaactcacaaacctctctctctctctctctctctctctctctacttatacattacaatcataataatcatcaacgtcttcattttcagttttgactccgtttcaatcctactcaattctacccaatctaattctactacccatgatcgctcggaggctatgtcagaggtgggctaccgtctccgccgcccgccgctgcctttcttcttccgtatctcgaggtcctctgtccctgcatacccatctctctcaccacaagctctgtcctccagttcttcggttctctgaggtgggttttgttttcttagtttgattgtattgcatttacgaaattttgtgttgtggagggaattgggatttgggtattagtttacgaaattgccttaaagctttcagattgaaccatatttttaaattttcattgattcttgtgcaaaattgggtattgcccaattgaattttagtaagattataggggaagaacattacggtcattatagttttgttttgcctgaatttgttgctgggagcataactgaagccgagtagcaaactgatgttattcacctctaatttcattttcaacttttatagctcaggatttcacattttgtaaagaggagttgctattcaactcttgatgtgcctgatgttaaagcagttggtgtagttgaagttccattggcacagactggtgaaggcattgctgaatgtgaactcctcaaatggtttgtaaaagaggtgagtgattatggtgcttgttaatttgttgtcttgacttttggtggtgctgttgttgttaatggttaaagcttgttcagtgtttgcctcaaaaacactctcttttttcccagattcgttcattttagtcgttgtgactgaaaatgttttaatggacatgctgctctgctagacaaaaagtgacaatggagactatgaaacatgtctagaaataaatcaataaaaagatggtctaattgaattcttttaagaaaatttcatttcaaatcaaaatagttatgttgggagggacatatctatcaatgtttgactaacagacttaagtttcttcatccttaatgatcgagataatttcatgtaattgaaatgagaagtatcttttgaattatgattaattgttcatgatctggatgatgtgtatctttagtaaaatttaattttgtaatgacctagtgctttgttagagaattcgaggaacttagatattcatattttttttttttgcagggggatcaagttgaagaatttcaaccactatgtgaagttcagagtgacaaagcaaccattgaaataactagtcgttacgaaggaagagtagctgagatgttttataatccaggtgacattgtaaaggtgagtagaactacctgagcctgactgacatcaataaatagatttttcttagttttttattattattattattattgcaacatatttatctgaaatatttatcattcaatccaatataaagaggatgaaacttctttctctttgttatttttactttttatattttcttatatgttgtttaagcttaaatgaaaatgcaggttggagaaacactcttaaaaatgcttgttgaagatctctcagttccaacacagaaaagtgaggatataaagagtgctgagtctattcagtggatagagtctgagcagaacaaacaaagtatcggtggagttatatctacaccggctgttagggaccttgcaaagcaatatgacattaatataaatgatgttattggcactggtaaaaatggcagagtgctaaaagatgatatcctcaagtatgctgtagaaaagggtcagatagaagattcatctgcctcttcaagttctgattctgagcacacgttgggtgaatctgaaagtcatgcagatgcagcagatggaatcggaccaaactacgaggataagatagttaccctgaggtaaatattgggtggagatatgtttttcaaaagctttaagatgtgtagatgcaaatgttatcagtgtacgttagaatcaatttaatttgttcatttttggttgtttcaggggattccaacgtaaaatggtacagtctatgagcatggcagcaagagttcctcatttccattatgttgaagatataaattgtgatgcacttgtgaagctgaaagactctttcaaatacaataactctgatctaaaaatcaagtacactttccttccaatattgataaaatcactttcattggccttgagtaagtatccttcggtgaatagttgctttattgaggactcacttgaagtcatttttaaaggtttgtcgacttattgctgcccaatccatgaaactaatatctaatgtgcaaaagtagaagttaacaatgctcattgttgctctaaattattatacaggttcccacaacataggagttgctatggctacacaatacggtctagtcgtgccaaacataaaaaatgttcagtccctttccatcatggaggttagttcaatgtgatttccacccgctttttgtaccgagtagtataagatgactttgtcagatgaaagcaagtcaatgccattaaaagtattagcttgaagatttcaggatttgaaaatagtactgctctagaatttttttccctgatgtgaggtattatctatttgtttagataacaaaggaactttctaggttacaacaactagccactgataacaagcttagtccaaaagatatatctggtggaacaataactttgagcaatattggtgcaattggtggaaagtacggctcccctcttcttaacttgccagaggtttgcatcattgctattggaagaattcaaaaggttccacagtttgctgatggtggaaatgtataccctgcatcagtaatgatggtgagtgttttaactttttttacttgttcaaaaggaacttgtgccaataatataaaaacaaaatgcactcgaatccatcttaaaatttgagcattttaacttccactgttccattccacaccttgaatcctaaccgatttgagttaatctcaatgtattgatgaataagatgagataacctttactcacataaccatgatttggttttgattttgttgttttggtcaggctaatataggtgcagatcatagagtactggatggagcaactgtggctagattttgcaacgagtggaaaaagctaattgagaatccggagctgcttacattgtacttaagatgattgatatataaacaaaaaactgaattggaatataaagttcaaatgatatctaattttaattttaataataaaataaaattaaaagtaagtttttgcaatgcataacatgtggcttttttgataatcttgggttgttgattctgctataaaattctactccaaactgtattaatattgtttagccccatgatttggatccaaatcctctatctcattattgtgtcctattttgtgtctcatttaaataaaaattgccacgtgtctctcatatttattatccactaaatcatgcttggccaaaaaagaaaaaaattgatggagctttctatttttatttttgtcttttttttaatggtattctagcattttttttttttaaaaaaaaatctaattacttacagtaatatataatttttcaacaaaattttcaataccattcatacaaaaaaaattaatttagaagaattgctacaattttgcttcctaaacttttaacaatactgattttattctttgaaatatacgatttgttaatgaatgcttgtatgaaatgtgtaataattcaaacatatacatgatataactatatgatcgaaatatatcccgtcattgtttttttgagcttcaatcccacacaagctttggatctccaattccaaataaataaaaaatttataaaaaaaaattcggaatttttccccttttttttttt

SEQ ID NO: 52085 - DNA, 1494 bp, Cannabis sativa
ggctgtaacatatggctgggacatgcagtaaattgacataaataatgccttcttgaatggggacttagatgagattgtctacatgcatcaacctcaaggctttgaggatcccaatttccctactcatgtttgtcaacttaagaaggctttatacagtctcaagcaagcacctcgggcatggtatgacaagttaaaaacaactctattatcatgggggttcaccaactctgtatctgacagcagtttatttttcagcaatacaaatggttatcttctcctagttttggtctatgctgacgatattctaatagcaggtgctaatcctaaagatatccagcaggttattaagaatctacaagcacaatttgctctcaaaatactgggaaccgtgagctattttctgggttttcaagctcacagaattggttagcaactcctattatcccagtcccaatatgctatggatatcttgaaaagagctaatatggacacatccaaatcttgtaccacacctttcagcccagggtacaaactttacacatctgatagtgcaccatttcatgatcccactttacaccgaagcatcataggctccctacagtatcttactatgacaagaccagacttggctttctcagtaaataaactgagccaatttatgcaacatccaaccgaggctcattggaatgcttgcaaacgagtacttcggtatatcaagggaactgttgacttaggtattgtttttaaactagcaacatgtctcacactcgaagcattttctgatgcggattgggcctgcaatttggatgatcgaaagtctaccactgggttctgtgttaaactaggaggcaacttaatctcatgggggtccaggaaacaaaaatcagtggccaggtctagcactgaatcagagtatagatctctctccaatactgctactgaagtaggttggactatctctgtgctagctgaattgggcattaaggctgctggcacaccagttatctggtgtgacaatcaaggggctcaacagcttgcctcaaacccagtttttcactcaagaacaaaacacattgaagtagatgttcactatgtgagagaactggttactgaaggaagattgaatgttagctatataccaactgaagaacaaccagccgatttattcaccaaagcttgaacacttcccaagtttaattttttatgtcacaaactgtcactggggactccccagtcgagtttgaggggggatgttgataatgtaactgaaagtggttagttaggttgttcttatatctgttatattacctaattttctgttagttagttattcagttggtgctctattgagctgtgtataaatactagtcctgtaacacttattattcattcaatacaacaacaactttcttctttctcttctttactctgttcttactaaatcaactatgttgatgatgatttcttgttgttgttgcttgatcatctggatca

SEQ ID NO: 52086 - DNA, 802 bp, Cannabis sativa
acatagtaataccaaagtatagttagaaccatataaaaataaaaggcaaatacctgatagttatataaatatatataaaagacttcaaattaccaaaatattaccactgatctataatcccaaatcatcagtagatttaaatattcattgcaaaatacaataacgatatgaaaggaatattatcatcaaaatcacaaaacaaatctgaaaaaaaaaaatattcgtaatcacaatttaaaaataatagccaaaccatgtgggcaaaaatgttggattgacatgaatccgaaggtatactttaaattcaatgtcaaatctgaaactcatctacgatctctatttccgacccaagccacaaaccagtttgtcctctctatgtaaagcttgatgtcgtcttaccaaatcctatatgtacagaaaataacaataatttcacacgatttttttaataatcaaacaataaagtaattaatggtaatcaaagtaaattctaaattctattttttttttttttgagatgaaattctagattgattataagtaaagtcaaaattctatatgattttttttttaaaatgaataattctatatatatagttagttttaaaatatttaagaaaaaaaaatttaaatatgttacgtttttaattttgacatattttttatttttattataattaattaatattgatatattgatagatttttcttaattaattaataattaatatttatttaagaaaaaaatatttaaatatgttacgtttttagttttcaaatattttttgtttttattataatt

SEQ ID NO: 52087 - DNA, 1257 bp, Cannabis sativa
cgattaaggggactttgtgtttttttatttgatttcttaattttgtgttttttttttttgttgattgcaaagtacacatgattatttttggttttggttggttcttgatttgattttttattgaaattattttgtattttcatgttgattgtatattttgatatggtgtatgagattagctaggtatccttgctagtatgttggttaataattacttcaccatatattataggttcaaatataacaagaatttaggttcaaacttttttaatttgagaaaattacagtatatacttctttcaacttgatgttttaaatttttaccatctctttcaaaatctattatgtttatatcttttttaaatcattctaccaattttactcctattatttcatgataattttcattattttctaatcaaaattttgttctaaattttctacagacgtacacaattatttacaaagaactcaaatttattatgtttgaaattatgttttaattatgtgagtgtgtgaggataatttgagtacaatactcataagaaaatgtatatttaaattaaattttatttggagataagtttagttaatgtataaaaaaaaaatgtatatttttcaacttttccttttcatttagggaaatttgattttttatacttaaaaatgttcaattttttttttaaaccaatacattttacactataaaaaatatgacacttttttcaaaaccccaaaaatacccccctctatctactctctctctctctctctctcggaccgaacaaaaaaaaatgcacatggtccgatggtcggaccacatggtccgatggggtccgattggttggatgattcataaaattaaaggtatattttattttataaaattaatattgttttaccacacctaataattttctttagacaaaaaaaaagttcacttactatttttattaaataaaactattgtttaattttaggattaatttatgatattctatatatttttctataattttaatgattttttataagttaaattacatttttatcaacttttttaatattatttggatagtgaaggtccaacattttcctactttgagtatttttactgaaaaaagaaagaaaaaaagaaggaaaaagtttagatatttaaattttatgatcaaccaactctgactctgagtatgtttgcctctaaaaaaaattagacattttaattaacaattgaaaacataatcaataaagagtaaa

SEQ ID NO: 52088 - DNA, 1169 bp, Cannabis sativa
ccatattatatcaacttttgaaattaatgacaagtacaatgctgcttcagtcaaagataatgatccaaacttaggtcatgagcaacatacaaataaaagataatcagatgaagttgtcactagtgctgaagttaaaccaactcatccaatgatcacaagggctaaggttaggatttttaagcctaaaacttacattggatagtcaaaatggacatgtatcactaaagaaccaaattcagtggaggaggcatttgctattcgtgaatggagagatgccatggacacagaaaataaggccttaatcagaacaaaccaaggatactggcgcgaagaacacctggtatgtacattcttggggaacaaatgggtctacaaaattaaaaggaatggagatgggagtttccaactatgcaaaacatggctagtagctaaagggtttaaacaaagggctagactcaattttgggtagactttcagtgcgattatcaaaccctcaacagtcagaatagtgcttacaatcgttgtttcacaatcatgggatgtacggcaacttgacataaacattgccttccttaatggtcactaatttaggatatatatatatacatggagcagccacaaggatttgaagacaaaaataaacctaattatgtgtgaaaattgatcaagtcaacttatggtctaagacaagcgccaagggtatggtttgataagcttagagtaacattactcggctggaacttcaaaaactccagagctgactcctctttgtttgattataagtcagaccatcatgctatgcttgtgctaatttatgtggatgacattataataacagggaatgatttcaagatgatgcagcagttcattctgaaactaaatcaactatttgccttaaaagatctcagtcccttcattattttctcaggatagaagttcatcgggatgaaataagaatgtacctaaactagcgaaagtacattgaggatctcttgaagaaaatgaatatgcttcacctaaagccttgtcctacaccgatggccactggaaaaaccttatccatcttggacggtgaacctttaaagtttccaattaaggatagaagtatcattgaaggactataatatctaactcatactcaacttgacataagctttgctgtaaacaaa

SEQ ID NO: 52089 - DNA, 1493 bp, Cannabis sativa
accaaacgccaccataatttttttgctttttttttttttttaagttttgagatgggtagatttaattttttttgtctaaatttattaatttttactagtgcagtgattgtttctgtactaactctaacctcttaaattttaatgtctaccaaattatgccaccgaactttaacatgtacaaaatcatgccactgaacttttatccacgtcaaacttccattaataaaactaaacaaaaattcttaaatccaataattttaatatataattcggaaaatttttaagagtctacaaaattcagagactaaattttatccaggtcaaacttctagtaaaactgaacaaaattttttaaataaaataatctcaataaataattcaagaaatttttttatcaattcataagatacatgttaatttattattagtgtatagaaaaggtaggtatatatgcaattggcttatatgtatatacatggtggggctactttcattaattactatgtacatttatagctgaatatttctatatggagtgtttgacctgtcaaaaaaaatctactggctttgaaaattcaatgatagatcacagaagatttctaatttatttccctatataagggtagctgagatatatagtttatatatgcataatacatatgtatagtacttctgtgaagtaattaatccattataattatatatagtttttcattataattatatattgatcgattgattaccatggctcagaccaacatactctcaacatttctgctcattgggttgcttgttatggcaaccattgaaaaaacaggtatacttctcttcttcccaagaggtttctatgttcaatatacacagataaattgcaactcaatatatgtatatatatatatattatattggcacgatggtaatgtagttacgttcgggatatctcgaagaaagttttgacattttattacgattttgaaattaggattcaaacagtttattgcatatataaaaagacttttgaatcttttactttgatattttaaattattcgaaattttatgaaactttatacatgaaatgtgatatataaaagtagtgattaaaaacaaatatgtttactactataggatatagttatttgttctaagcaaatgattatagaaatatatataatagtttgctaattaatgataatctttccaaacaattactctaagtaaatgattaatgaaaatgaatagtttgctttataatatattcatatgtatatttatagattatatatataaaaaggatgagtaattaatcaagcaatgtatctatatgtagggtacaattattattactttcttatttttgtaacatttaatatattaattaagaataattgaaattatatttacttggttaatttattatagatatctaaccttaaataacattaattaattaaattacattatattgtgttacaatttcaggagcccaaattg

SEQ ID NO: 52090 - DNA, 2333 bp, Cannabis sativa
tgactcccacccaagccccacacctggccccacatcctgggcctcaacccgtactgaaccctagaccttagaccttggactcctaacccctgaacccgagctagaccctgaaccggacccaaactccgacccgaacctgaacccggacccaaatcagaccccggaccctggacccttgactcccacatagacctcaaaccagcctcaagctctaaccctaacctaaacccgaacctagacccagatggtcctcgccctagccccagacccagacgtgaccccgaatctcaacccggaccaagaccttggaccccggaccccgaaccccaacccagacccggacccagatccagaccaggacttggacctagactcgaacatggacctcgattctcgaccctaaactcgtacccgtcatcgaacctaacttgacattacctggatcaaaacccaaacccagcctcaacatatccccaaacccaactccggacaccggtccctggaccccaaatcccgacctaaacccaaacccagactcaaacgcagccctagtcctggaccggacccgaccccagacctcaactcagacccagacccggtcttagtcccggaccggacttgaccccccagacctggaccttggacaccagaccctagacctcagaccccgacccgaacccaaacctagacctggatcaagagtcggacgtagactcgaacctaaacttacatcccggcatcgaacctaacccaaatccggacctaatatcggactcgaacccaagccttgggcctggacccggacttggacctagaccctgacctaaacccagactctaaccttgactccgaaaccttagccccagacctagggtttagggatggggtctgggttcgactcgatgtttgaggcatggtgctagagatgggatccgagtctagggtcagagttgtggtcaagtattatggtaaatatattataattttatacaacctattaacactatatatgtaaataacaaatatagttttgcatcaaataatacagtaaaacctctatccaagaatacatttgggaccaagcaaattatattctaattgagaggttataactaaatagagttaccttaaaaaaaatcaaaataccaaaacatatcaatataacaacaataataataaacaatcattaatactatatcataataaaattacttttgagtaaatataatatttatacatgtattacaattcataataaaattataattttaatgtgtaactagttacaatttagatgttatttttatttataattaactcaaattgagacttaattttttataacaaattagaagttattcttaaatagaatattcttagataaaaattttatatgtactatatggaatacaatgtaatacattataatacaaatacgatataccaaacaattaaactccaacagcatatataaagaaaggtacattcatccataatgaaataaaaagaaacatataatacacatatgttttcccaacttcgatcaaacattggatgtttaaacttgaatttggttatttcttagtcaaagaaacaaccaagtttacatggttccaattttcattagcaagagattcgatgaccttttgtgtaaaccgatgaaacaaatcatccatgacactttttccaaattgtttggacagaataggctccataactgctctcatgtaaccacaaacaaattttcctctgttgagtaatttatgatcaataatgtcatcatcatcaatattattattgatattgtttgtatcatcatcccatgcaatttcgtaaacttctagcttctctaaccagaaagatccttcttcttcaatcacctctcttacttccttggcagttggactatacattggtacgttgaagttgtccacacttttctcttcaattattccctacaatatttatgtataaataaattgacacacattttatttattacaagagatatttattgcggtatttataagcatacaaagatctcgatttattgattttttttaagcgacatataagtacctaatattacttttaccagcatagttcgttgctactgcgctagtaaaagtaaattttaacgcattttacaaattgcgctggcgaaaaggtcaaattttttcgagcgtacatttgcagtggctacaatctaatttttactagcgcaattacgtgctgggaaaagtcatttttgccagcgcttttcattttgtgctgacaaatattctaataccaacgttgatttgccaacctcttttgccaaacacatcagaagt

SEQ ID NO: 52091 - DNA, 1492 bp, Cannabis sativa
  modified_base (798)..(799): a, c, t, g, unknown or other
  modified_base (1441)..(1445): a, c, t, g, unknown or other
gggtttggattgagtagggtttctgggcaaataagttacaaatttttggaatttttttttttctactttgaataaaaactttagggtttattttgaatctatttgtggtagagttgagtggtggatggtgggtggtgggtggtgggcatggtggtgagggaaatcaaaagagagagaaagagatgagtttaggaagaagaaagtagaaaaaagaatgtagactaatcaaaacatgccatgtgtaacttctgtacaacgtaacagtccactttggtccaaagtggaatcaagaagtgttgaccaaaacaattgtggaggttgggaactttagccataatttttctaatctgaagggtttgatcatgttaaacttaaaagttcagaaaatttggctgcaaattacctatcttgttattgttattgttactattataactattattattatcaaattctttaacatgtcatcatatttgaaatgttgtgatgtcaagctgtgtttaattttatatatttttgtttgtgttgtgttaatttgtaactttatgttgtattgtgtctaaatttatattttattatgtcgggtcacacttgtacgtttttggctcatttgttccaggctcgtgttgactcacaatgcacaaaccgtaagcactaactgtgtattatgtaaacgaaattgagatgcatgagattatcataggaaaatttgactttttatacatttattatattaaaattattttcctagacctaaactaactcatattagtagaataggctaacatttcataaaanncaattctacccctcccatttcaaacacctagctctcttttttcctctcttctctctctcgctctctaaactcaccctaaggacacgactcacaacccaccacccacaatctcgatcatttctctccacaaccattacgaccacaaaactaacgaattctccatcaacaacgacttctctattgacaatgttgtcaaaagaataaattgtataattaatgtttgttatttgtgagtagatgttagatttaggataaaaaacggtcggatctgagtttcggacagaaaactggtttttttggccaggctagatggtggtctgatggtggctcgatgcctttatattgttaaaatgagtaaagattgaagataaaggttcgatggtggtcctatgatggctcgatattatggtccgatggtagccgatgtctccctaacgagcttaatgaatttagtttaacatctataaatgtaaattatggtctgatggtagtctgatgctactattttcttatgtacaaaaatataaaaaaatgaaaaaatgagtagcatcagaccaccatcgggctaaccggatcaccatcggactcccatcagaccaccatcagtatggatggaaatggggagtatggatggtgaagttnnnnnagaagagaagagaagagagaaggggataatgtgtatgaatataaagt

SEQ ID NO: 52092 - DNA, 1266 bp, Cannabis sativa
  modified_base (1217)..(1220): a, c, t, g, unknown or other
ctgaatacacgtgtcctttaaagaggagtctggtctcgagtttctaggtgagagaaatctcactataacaggtacaaaccgcgatctgtgatgaaagatgcatgctcttggtctggttcatacatcggaatttggttgtaccccaagtatgcatccatgaaactaaggagctcgtgacctgcggtagcatcaacaagttggtagttgctcagtaaagggtaattttccttaggacacactttatttaaatatgtgcaatcaatgcatgtgcgccatgagtcatttgactatggccgaagaacgaggtttgctaacaagtttgggtagaatgactcccttatgaagctgcatgcggaaaggcgatcaacttcttccttaagtgatcggatacctcgcacttctgggtcaatcttcaatcgatgacacatgacctgcggtgatattccgaccatgtctgaatgtttccatgcgaaaatatacagattctgcttgaaaaaagtgataagcttttctcactgttgaaaggttagtttagaaccaaattttaaaactttattatgattgaagggatcgattggtacctcaattgttcattctgtagcctttgcagtgtttgtataatcgaggactctcatatccaaatctagtttttcaacatgcgatatctcctcaattctaaaaatttcctatcaaggagggggttcttcaagtaaatatataacatttacagatttcttcttttctgcgagcttcaatgctatgttatagcattcccttgaatccaattggactcctcgcacagatcccacacccactggggtagggactttcatagtaagatgatcaatagaggttactatcttcatatatttcaaaattgcacgacctattaccacgttgtatgctgagtattggtcgattactacaaaatcagccattgactttgcagtgataggtgcggttcccagagtaattggcagcttgatcattctttttagtgcgattttatctccagtaaaacccatacatgctcgaggttactggtcgcaagtctttctcatgcaaccccatttttttttcaagcctggaaattgaggagattaactgaactcccgttgtcctctaaaactcgatgcacattatctcctccaatatttgtgatgattatcacgagtacataagtttggggatagtgtacctgttgggttttatgcccnnnntaaaactctttacaatctgattatttatcaatataagaaatttgaa

SEQ ID NO: 52093 - DNA, 3247 bp, Cannabis sativa
gttctccacatttcaagactcagtgtattttgctctttcatatgtaaaggagttgggatttttttatattgttttttgcactatttttcttcttattgttctttgtatgctatttggcttgtgtttttttttttttttttatttaagaaaataacaattatttgttcatatgactctagttgtcatcagaattaaatttgtttagtttgggatttgaattattattgttgatttgatttaattttgaataaaatggtcaaaatgagaatctcattagtgttattgagtttctttttattttttcttttattttgttaatgataataaaagtagcaaataccaattattgggattctttctttgtttcttgataaatttggaaatttcgtaatgctttattgttggatgatttgttacttaaatcaatcttttcttttcctgtattgtttgatgatttgtttttctttattttttgaaacagttgatgatttgttactcaaatcaattttactttccgatttgttacttaaatcaatctctttaatatcttttctttcctttttttttatatatatatttaagataaaattcccagttataataattaaaaaagaaaagcttttcttttttcctgaattcgatttcttcccaattatttttttttcattaattctctaaaatatatatatatatataaaacattttctttctaatttttaatgtactctttttcttttgcggtaattgttttattaatttcttcccaattaaaaaccatttttcattaattctactactaaaaatataagcattttttcagatacttttatttcacaatttctactactaatgtttgctcaaccatataaaaaagagcaaaacaaattcagtaacactagtaaaaaaacaaaacaaaaacaaaagaaaaaaagcaagcagatagatcaaaatatttgataattcatctaaaagagcttttaaattttaagaaaaaaaaagagccaaaatattacttgtccaaaacaatcctctggaaaataaaaaactcaccaccaaagtcggtagcagcaattaaaaacgttccagaaccataaaaaaaaacactacttatatttaataataaggaaaaacttaataaaaactctaaaaatcataaggttaaatcagagcttagtcgacttcctccatcttgctgccctcagcatcagcttccgcatcctcaagtggtggcatctcagcatcggtctcgacagcgtcctcgtcgatgctcaaaccgagcttaagcatcctgtggattctgtttccgaaggtgttcgggtcatcgagactgaacccggaagtgaggagtgaggtctcgaagaggagcagcacaaggtccttgacagacttgtcgttcttgtcgacatcggctctcttccttagctcgtccatgattgggttttcggggttgatctccattgtcttcttgcttgacatgtatccagccatgctgttgtctctcaatgcttgagctttcatgatcctttccatgttggcggtccagccatactcgccggtaactaaacagcatggggagtccaccacacggtcggagacaacaaccttttcaactctgtcacccaatacatccttgatgaccttgcataagccttcgaatttctccttcaattcctccttctttgctttctcgtcctcgttctcttcgagtttcaaaccctcctttgttgctgagactagcttcttgccctcgaattccttgagctgaccaactgcgtactcatcaatggcgtcaaccatgtaaagaacttcgtatcccttcttcttcaacttctcgaggaatggggagttttcgacggccttcttgctctcaccggtgatgtagtagatgtcgctctggccttccttcattctggttacgtagtccttgagactggtcaactcatcaccactcttggttgagtggtatctcaacaactcggcgagcttggtcttgttctgagaatcctcgtggataccgagcttgaggttcttggagaatgactcgtagaacttgttgtagtcttccttgttctcagcaatctcgaagaacatatcgatacatttcttcaccaaattcttacggataaccttcaagatcttgttctgttgcaacatttctcttgaaatgttcaaaggaagatcctcggaatcaacaatacccttaacgaagctgagatactcaggaatgatctcctcacagttgtccatgatgaaaactcttcggacgtatagcttgatgttgttgggtttcttcctggtgtcgaaaagatcgaaaggtgctctcttgggaacaaagaggacagctttgaattccaattgaccttcaactgagaaatgcttcacagaaagatgctcctcccaatcattagtcaaactcttgtagaaagcagcatactcttccttggtaatttcctcaggcttcctcatccagattggcttttgcttgttaaccaacgaccattcatgtgaaacttccttgatcttcttcttcttcttctcttccttttctttctcctcatcaacatcctcaacctttccttcctcatccttcttgtcctcctcatcttcatcatcagagatttccttctcagtggttttctcaacccatagagaaattgggtaactgatgaactcagaatgcttcttgatcaaatccttcaacctacgttcctccaaatactcaagctgatcttccttaaggtgaagagtgatcttagtacctctaccaagaacttcaccggaagtatctctggtaacagtgaatgatccaccggcttgtgattcccacacgtactgttcatcatcattgtgcttggtggtcacaataaccttctcggcaacaaggtaagctgagtaaaacccaacaccgaattgtccaatcatactaacatcagcaccagctgccaatgcctccatgaactccttggttccagatcttgcgatcgttccaagattgttaaccaagtctacacaaaaaacacaatccaaagttaaacaacaattacagatcaaacagtacttttcaccaaacacaattcaaagtaataatacataccagccttggtcattccaataccactgtcaatgattgacaaggtgttgttagttttgtcaggcacgatatggataaagagctctggttgaccatctagcttgctcttatcagtcaaactctcgaaacggatcttgtcaagagcctgtaattaca

SEQ ID NO: 52094 - DNA, 1850 bp, Cannabis sativa
ccaatggatttttgaaccatctttgtttgaactccaccaaaagtttgccatcatggattccaattgattacaaaaagtagctggtaaacggaaacaactcattgcatatgtaggaatcgactggaccacaactttcaaaagcacctcctttcaaccaactgagaatagtttttcattccatgcatgtagtttttgccaaatgcgttccttgacatcactaaacatctcctttttatcacgctctgaaaaagcagggagtccaaggtaacgttcgttacattcacttattggcattcctagtgtttgatggaagatattttttgctgcttgagtagtgttaggtgagaaggacataactgacttcgttgttatgttatttatattttaaatttacggttattaaacaagttttaattaattatttaatttaattatatcatgatgcttattcaagattattttgtaatttgaattttcttttttgataagtttgtaatttgaatttagtagtttgtttgtgtgtaattttgtaacttgctttgtaccatgtatggtagtatattttatttggttaatgtgacttgctttgtaccatatatagaagtttgccatatatggtgatttgttgtgggtctttcctaataatgagttgagatagcactgacatcagttcctctccacaaatatcaaagataaatttttcttcataaaataatattttggattgttttttaacatttaaataaaatttcttcttttaatttaatattactattaagaagtgagttattaatttgatatattttctatatataagtatttttcatttcactcacttcatcattctaagagataagaacttgaaaaagataaattttattataattttatttcttaaatagtttactatatttacttgatttgatactagtttaagatatttaatttcgattgtctagtttttcggggacatcttatgtatgttgcaatattaatgttgtggctcataaatcggtttaacacacccttcaaatagatagtaattttctttttatggaagaaatctcttcactttgacttttggtattttttctataaactataacggttactcttacaaaaaaaatatggtaacattgagtgtatgaaaattttctagatatatgaacattttttttttaagaatgatatagacaagagttataaatttttgtatcatcacgggaaaaaattagaattccaggtgagggaccatctaagaaggaaaagtatgttaatttagattatgaagaatatcacattacataaataattgacgatgcacaatatgaatccaatgttgatttagtaaaacttcaaattattttagcaaaggctaaaaagtctatttatcgtaattgtaataggtttactaaattatcggtacatgctattttatacattatgaaagctaaaaataggtggagtgatcaaagttttatggaagtactagctttcttaggatacaatttggaaagaaatggacgaaaataggatgagcaaaattcattggtaacaaatatcgtcaacaaccttatgaattacaatgtggatattatgttataaagtatatcaaaaatctcattactgtgccaaattcataggattacttaaactatttgataaataatatttatctacaagtttatattttaaatacattttttataagaaattaatgttttctatttttttgttttacaatttacaagtgaattgtcgtacaaaaacaatgagatcaaagcaatacatgataagtgaacaaattttgtgatgtctctcttacatgcttgattatggttatttttttt

SEQ ID NO: 52095 - DNA, 1664 bp, Cannabis sativa
tattgagtgaggagggaaatcaactattagcatttagaggaaagatcaggtgtgatggattgtgcagctgcatcatcagagaaagaacttgttaaagcttgatttgccttagcttttcctttgtcttgtttcttcttgtctccatagctaggtggaaaaccgtgaatgaaaaagcatttgtaacctagatggccaagtttgccacaattagaacaagaaggttgagacttcttgtttcttgggagattggaagagggaggtctgacagaggaagcaaggggaagattatattggatccaaaggtgcgtcggtgttcctcttgaatgatcatggcaaagacccttgacaaatttggaataggctcattgagcaagattgaggcacaaacaaatgcgtatgattcatttaaaccagtcatgaactgaagggcctgattctgggtgttatagtcaagaaagtgtttcattgcaccacaggtgcaagttgtattcggttgaaattctttgcactcatcccatacgaagttcaatttggtgaaataaaaagtgacagaatggtcaccttgttgcaatttagtaagcttagtttgcaattgaaagatttaagggccatttccctcattgaatcgttcggctagattttgccacatatcaacagcaagatcaaagtacatgatactttgagcaatttcaaatgaaacaatgttaactagccatgacataaccgagttgttacaatgaagccaagaattgagagtgttattacttgcatcaggtcgtggaagagattcatcaattaaggagattttgttctttgctgccaaattcatggtgatgtcgctcttctatgattgaaagttggcagcgttaaggacggtggagacaagaactaagccagggtgatcacttgaactgaaaaagaaagggttggatacatcattgttggcattgtgatcgagataagatcgtcgagtttgagttgctatttgctcgtcaattcttggagattgatgatcaacatcgttagtgtggtctaagatctggatcctaaaggattggttcgtcaagctgctgccaaagaactgacaagtggagctaaagtaacatcaggaggaacatctaatgagatattttcattcatagatggaggaacatcatcttgagatcttgttgaaggtctttccatggaagttgtgggcaaattttcttctgataccatatgagagaaacacaatacgagctgagagatcactatgtctcattcaattgaattaaaaggtctgaatacaagggccatatatataggcatttacaagagttggttaaagaagaaaccagcgtaacaacctaactgaaaaagagaagtcctaatagaaaaagactaactgataactaactgtaagactaactggtaacgaactctaataatatttagtttatttttttgacacattcttacaatgataagatttttcgttttttaattgacacgatgagcagtagtagattttggcatattaattatatattatccattacacaaaaatacgattgcacaaaatttaaatattgttataatttttaagattttatttacaaaatgaacgatcttttgatgtatttttatgttgtactcttattattttatttttattgcattttttt

SEQ ID NO: 52096 - DNA, 1255 bp, Cannabis sativa
ataatagatcgaaactaattggaacgacttcggggctaaagtctctctctcagttggtggataatataataattaattaaaataatatttaattattttattttttctctgtgacatctaatcgcacagtccgtggattcgccgttggattgcagttgaaccgacttattcctcaatcgacgaatgtaatttattaaaggattaattgctgcgaaacttttaatagtttaattttacttgcgtttaacctttaaaatacaaattttgacggcaaaatttattattttgtcctttccatttgtttttgacagttaattgttaaggtggctatccacatgtacattgagtattgtccacgtagatacaatatacattaatattagcccacataaataaatatttaaaaataaaaaataaaataaattaaaataaaaaaaatcattttttcatttttccttttttttatcttttttttccttttttcctttttttgcttgttttcttacagattctctatcttctctcctccccctctgtatacttcgacgacggaccagggccgccccacaccagactagaccgtcgagtgccccatcaagctctctagctcgctctatctctctccctcatgaactctccggccacacgactgtgaaacaaaaccgtcgtcgaactcctcctctttcccgtgcttcctttctctctatctctcgcactctctttctttctctctatcactgtgaagcaaaagttgcgatggtggtagttttttgatctagggtttggagcacagatctaacggaggaacttgatctattctactagaggagctcgatctgatggaggagcccaaatctggggtttggacttctccttctttgttttcttgacatgttaagttgtggtgtgtggtggtttcatatttaggttttttttttgggtatgatttagatgtgaaagatagattgaggtggaagtggtggtggctttggttgtttaggtacagtatgaagatgattgagaaaatgaatgaaataagaaagaaaaaaattggaaaaacacaatcataataagagagatagagagagagagagggtggttgtcaagtgaggaagaaagagaaagagaatttttaattgggttatttgcggtaaaaccctctaaagtatgcaggtttttgcaactaaccccctaatctaaaattttggtggtaaaacctcctaaacccagcttctgttagcagttagccatttcc

SEQ ID NO: 52097 - DNA, 984 bp, Cannabis sativa
aacatggttgaccagaataataatgtaacggtctcctcgcaactgaacccaatccacacaacaagattaaactagaaaactcctctatcaaaccctagaatttctgtccagcattgaacctgtagtgtttgcaatgaaagtgatttaaataattgatacttataacaactcgaaagcttgaacacacaactaactctaatggttttaaaaatatttaaaaatcggtcatcaatataaacaattatggttggtagtgtggaaaatgcagttttttttttttttacattggggagggaggattcgaacttaggacctcctctttgtgaggagaaatgtgaaactactaggctatgtcaatgaccatgaaaagtgcagtttaattactatgttactatgcatgcatacttcaagttcaatgttgaccgagcagaaaaaacttgaagccaggcattcaagcatgtctaatcactgtcttttcttgaaataaataatattggtcctgtatgaaatggtcaataaatagtatttgacatacgaagaaaattatttcaagaagagacagtaacgcatacacaacagaaaaaaaaaaatctcatctccgcacagctattataactagataaagagcttcaagaatcttaaaaaaatacagtcattacaacatgagtggaaatctagttataccaaataccaatttctagaaaaacatttactctgctcatttcagttaagttaacaacactatcagtagtgatctaacattctactcccatggaatcccattaccttgcaaacttcgatccgagaaaagaaatctaaataaactttaacttgatagaggaaaactaatcacaatgagtaaacttacaaatgaacaaaaccaaagccccggtgctcagttgatcctattaaaaagaaaaaacagagagagaaggattaacaacattcctcatgattgagcacaagtatcacaaactcttctat

SEQ ID NO: 52098 - DNA, 777 bp, Cannabis sativa
cccatccaacagacatcttcatccacctcgagagcatacttagctaaaccatgtgcagcttggttagcatttctcttaacatgagaaacaggtactcctgagaaaaagaataaaagataactaaaatcaactattaagtcattaaaactagagagattccttgatgaagaatttagggccgaagaaacacgcaaagcatctgtttctatatgcgtaattagaagttgtaattgcagcgcccaattaagactatgaaagagcgatttagcctccatctcatcagatctaaaacatccttggattggtttagagatagcgattataacgtttccatgatgatctctgacaatcgcaccacacccaggattttcaattctgcactaacagaagcatcgacattcaattttagtccttgattggtaggtggtgtccatggagtagctctgaaatgttgctgatttgttgcagccgtgtctgcatgctggaacgttgctgatctgttgcaccagcaggagaaatactggtgcaggaagagagttgttggtttttcaatctgtgccgaacaaatttctccaggtgcgagttggcaaatgttgcaatgattaggctggatcgtgacacacctccatgaatcactttatttcgctcatgccagatagcccacattgtacatacaatcaattcaaaatatggttttgagtgaattgaagataaatgtattaagtaatcaccattgtgcatattttgtgcatgtacatggtctatggtgaactttgt

SEQ ID NO: 52099 - DNA, 1234 bp, Cannabis sativa
  modified_base (910)..(933): a, c, t, g, unknown or other
  modified_base (1168)..(1176): a, c, t, g, unknown or other
ttattataaactaataatttttgtaatctcaccataacaacaatcaagtgcgtacatttttgtaactaaataatttgaattgttttgttagttgattgatcgatcgtgagctcatcatcaccataatcaaactacataattatgtgacagggacttcctaggcatattattacatataataacagttatgtcaatgtattaagtattatttaacccaactaattaatattacatgtatataatttgaaagcagccactaaatgactaattaatacttaaaatatgaagaattttcaaaatgacttttttgtatgttttatttacaattttactgacttaaaatttttctacaaaaatatacttttaaagtttgaaaattataaaaatcatttttttagcaaaaagtaaaaaatataactgaaaacaaggagaaatcaattttatatcaactataaatataatataaaataacaaaacataaactggaaatttaacatcataacaattatatcataacaattataaggcaactataaaataactaaaaatatggtttattatttttactgacaaattatttttgttaataaaaaaattttaaagcatacaaataaaaaatttgtatattgatgtattttataatttttttaaaattttcattctattatataattttgtcttaaaataatcataaggcagcattcacgtaaacactgtagatatgaaaaaactactatggatattgtagatcaatgcaattgcaaatagagaagaaaaaaagaatagtaacatatttttttaaaagaaaaaatagaaaagaaagggaaatttacatggtatactaatttttgacatttttttacaaaaatactgtcaggcggtatcttttacttttttactgtattttttnnnnnnnnnnnnnnnnnnnnnnnntgtgttaagttttcactggtattttactagtgttttttagttttttttattgttgttttgagttgttctgttttgtgattataaaaacacaatatttttgaaaaaaaattcgtgtgacaatatttttgtaaaacttaatccaaattttagtatttttgtaagttttctaaaaaaaatcttataagttgtagttaacttaggaggaaattatattctataccctttttatattgtnnnnnnnnntttttaccttcttttttaaaatctatcatttttacctctttttttaaacattgtacca

SEQ ID NO: 52100 - DNA, 706 bp, Cannabis sativa
attgttatttttaatattaggagtttgttcaattttaatatttttaaaatttatattcatttttctcaaatttttaaaacttcaaatatttttttaaaaaaattaatattggtttttatagttaagtgttagttactatatatgaagataaattatatatatagctattgatacctaattatttatatgactaaaaaggtaaattttcattaagatcattgattaaaattaaatcattcactatattatacatgcataattatattttaatactttgataagatcatcaaaccgctcacaccacataaatcgtacgtctgcactgcatcgtactttataaaaaatacagttttaaatcttttgcagtatggttgtagtttgcatttttatcaaattgcgcggtgcgtttttaaatttaataattgtggtttaaatcctactgcactgtatattataaagttatcaatttttaaaatatgattttcattttttttctaaaagaacaaatacatatgtaatatatgtgtataatatattattttctagagacaattcaatataatgaatagtatatatgttatgatgttaaaactttaataagatatttgttttttgtattgttaaaattttattagattgatttttaaatttttattataatgttggataataaagataactgctcaaaccgcaccaaatttttacg

SEQ ID NO: 52101 - DNA, 975 bp, Cannabis sativa
acataggttgttaaataaatgtgtccacatagtttggttaattctttttcataatgtataatttaaaaataaaatcacacaatatctgcaggtcatcatttagtgaaattgatttgacctaagactgtaaaaaccctgacgtactttattgaaaattaacttatttaataaattgtattcagttattccaaattttacaagaaaaatgtcaattaataatggatacgtgtataaaattattacaactactcagaaataatttttttaataaaatcccacaatatctgcaggtcatcatttagtgaaattgatttgatctaagactaaaaacgctgacgtactttattgaaaatttacttaattaataatttgtatttaataattccaatttttacaagaactagctcaattaataatggatacgtgtaaaatattagtacaagttgtcagaaattaatttttttaggttttgttggaatattattttcccatcaattcatatcagtaggatgtactagctagtttcaaaacataaaaagtacaaatttaaatattataacacaaacccgtgaaggaaaatatgacaaaaattaatgttttaatttaaaatcaaatctcataatatccaaatatgcagtaaagaggtgatgcctgattgaaagtttgatgggacgtacactatataaacattgaagtacgttattgtaagtctttttaacttattgaaatagagaaggtccactttatgacttaccttcaaatacgttctttggaaaaataaatctacattattgttgggttaatatgaatgaaactttggttaccattgtttattatttatttttcttttttagaaagagggctacactacatatgatgtgacatatatatatttaaaacaaatgaaagtacatgtttataataaaataataatttctacatttaaagtaaaaaaaaatcctttaaagtataagt

SEQ ID NO: 52102 - DNA, 1029 bp, Cannabis sativa
gaacaagggggcctctaggtgaatcagttttcaacagattgtgactcatacacgatttaagagacaatgtgaatcacataaggagacatgatggaaatttcatccctcctaaggttcaactaattaatgtggacaagtacttgctcggtaaagttctagggggtccacaggtgacacagatcggccaacaggcaagccaagttaatctagtggtgcaagcccaaatagatcaactcaacagccttgtacaaagcctgactgatccaaaactcactaacctagagcttgaacaaacaaaaggttaaccactttcacccgaaattaacaccctcaatcttttgcacaagtttaagatgcccacatggaagacgtatataggaagagaagatccactctgtcacatcatgtattttgagatgcaaatggatctacaagccgtaaagggtgatgtacggtgtagaatctttctagtcaccttggcagagaatgcccagcagtggtacttcaagttagccgtaggaaaatttagttcatggaactattttatgttagagtttcatgctcagttctcctcttctaggaaactccaaactcacttaaagacctagttgaagtaaaaaaatgctagggatactttaagagactacatcagtaggtttacgactaaaacaacaaaattcaaagcgtgaggaggcaatgttaaggtttatgccctgaaaagcttgttaagatatttttgattatttataagagttgaacactttgatatatacatgaatgttaaattattaatatttaatattaaataatttatatataattatcaaaaaatttattattcatacatgaggttgtgacttgtagttctatagagaattaagatcacttagccatgaataaaacggtcagcaacatattaatgtttgggaatctttaatcaacagttgctagtgcggtgaactaatgcttgttattaggtgcaagtaatctcaattcggattactggtgtagcatgacatctaagtgaag

SEQ ID NO: 52103 - DNA, 1468 bp, Cannabis sativa
tctttgatcaaagttcttaatcctgaaatgattaagttttagcttaaatatattacatgtgttctttaacttgttcgttatagctaactatttggatcagcccaatacttgcatcttaagaaaatggtagttcaattgagtgggagcgctaatcatagacatagaagttaaagcttctataactagttagaagtgaaatgatgattttcttagagcttggcttaacgacataaatgaaagagctcttatttcattaattatattagtttactgaaatatcatttataagaagctaagtggtttaatgataaaattcattggaggataaaacagtaaatttattcatactcaatgtaaaacatctatagaggatctttgattatttagattgaaataatgaataatttatagcacatctattcttggtgaatagagcgttctatgtaattagaagtgcaattccgaatctatagtggagttaggagaaagtaataagatagagaatttacttggtaaattctaaaactatttatcgagagcttggttacataggcccatggtctctgcattaactggaataatactatcctgtagtctcaattaattgatttatttaatcatttaggattctaaataatgactatgtcttatttgtaaattttaccaaggaatggcataattgaaaagaaaagagaatttaatgtttatttgttaattaagagaccttggaaggtctaattaataaatatttaaatgataatcttatttgataattaattataattattaaatagataaaactagtatttaaataactaaaacagaaaatagcattattaaagaaagataagtttgcttcattaagaaagcaaaataataacaaaaatctaacgcataagccttatagggatttcagccatgagggattattttaagttattggatctttcaaattagcacattaagttctaaccctatacctaatgaattcctataaatagaacataatgatccttgattcttagaacacctttcagactctctcttgtcttgcaaactgaatcaaaaagatagcatattattttctatctatattttcaaaattttcttgagtttttgtcacaaaaatttgtggtttttggtgttgagtaattgcctacacatttcaaagcaatactcaatatagtgaagaagattgtgtaattcaaatttgttagtccaagatatatttctaagagagggtgaattgaaaatttaactaatttcgataaattaaaatttttaacacaaaactatgcgattaaactcttaatcaaataaatacaagtaatgtagtaagcaataatatatagcaaataattaaatttgtaaagtaaaaaattacaaactctcaattttcacaaaattcagtaaaattaaaccacttacgtgcttggtcttcatggatgtagctttgagattaataata

SEQ ID NO: 52104 - DNA, 952 bp, Cannabis sativa
ctctctctctctctctttcactcacgtgattcctcaattattaaacacttagtctattttctcatctcacttgttcagaatctgtaacaattagttatcaccattgcaacattcaaagagagctatagttagaaattataaggttaaagcctgtaatatgcatagtattatctctaattaatacaactaaaagaaaagtagatcattacctgccaaataaggggaccgaacctctataaattgttgtctcaatttctttatttgctatcacaatttacacgtggtgattatcaataatgaataaggatcactttcagttgaccaaatctgaggtcaacataatgcacgaaacattagtgactaaatgattaatgactacatggctttctctattttctaatttcttgaatttctatttttatgggcttttttttttttttgctccaatctctcattattgattttatttactatcttcttctaaaaattattaggacttttttcagttttaaccaaaaaaaaacaatattacaaaaatacttctagttggccaaataaacaaatatacagcccaaataaaaaaaaattacacaaataccacgtacacataccttcaacctaggatccatgcttcctaagaaactatcacgcaacaacccaacgcaaccgaaatgaaaattcaaccagagagagaaccaccattaattctggcgacttcacttgagaagatgaccagaatcaatcaaaatagaggctatttcgaattcatgagaaaaagtgtagaaaaactactacaaaactaaaattaaaccggaaatccagtttaatttttataaaaccaaagtcctaacttcaattttctgttcaatgaaaggcagatatcaaaaagttgaactagagttcccaaacaatccaactcaagtataatccaaaaaaattacatcaatactat

SEQ ID NO: 52105 - DNA, 755 bp, Cannabis sativa
tcaacatcagggtataggaagtgccctacaaacaaactaaaatccaattaatgaatatagtggggaaacaaagaccattaagaagatcagaaacaaacagccagtcaacaatatcgtaagtcttgcttaaatcgatcttcataaagcatctagaagaggtcatttcaatggaaatgagtcaattttcattccagtgcttcctttggttgcattttaaagtatttgaatgacatttcaatagaatgaccttttaaccattttagtagattaagtattccattttaaaatgaagtgaaagatcattccaatgcaagatgagaaaaaaaattactaattattttataaatttttttaatgcattttgaattttattttatttcattcttattcctattctcattagtcatttctattcttatttctgtgtccttcctaatgtatattgttcattttttttatctgatgtgaagcaatttgagagtttagacagaaaatataattttatagatagtgttataagtacaaaaatgaactccaaataaagcacaaactaatttatcatagaaaaataaaagttttattcttactctaatgggttaaggaatagaaagaagaatcctttgaaaaagaagaagaagaaaaaagaatggaagcttattaaaagtacaatctgtttatgaatagtgataacataatttagaagcttggatgtactaattattatcatttgttttgggttgcagcagtgtcttgaa

SEQ ID NO: 52106 - DNA, 708 bp, Cannabis sativa
ccccaattgtccagttgcagcacgaatgggcacaattatttctaagggacccaatggttagctctcatttcgcatgtaatttactctattagtgggctctgagcaaaaaccctaggtgggtcatgggcatgtccatacctaccccttgcctacaaatacccttctatttccatacgaagtggggatcacaacctaaatagtcgaagctctgccaatattgctctaagtcttctttttaaaaaaaaaaccaagagcacagagttagggtttacagctaaatactgtaaacacatcaaatacgctattaaaggctaatagactattaacacctaaaccacataaaaatctctatctctttattttctgcaatttattatttttttagttctcaaatatgtagtttttaaaaatcttggtaaacaagagtcatctcaacaactagatgtcaatcaatggttaagagcatcccataatgaatatttcatatttttttataaaatttattaatattttaaaagaactccttgcctataaaagaaaagtctcactagcttacttttcacattctgctaagtctccataaggtcagagcatctccctctaatttttctctctaaaaatttgagatctctccttagataattctcgtgagcaataaaaacttaaagtagatgtagctccataaccgtcacttgattgaactactat

SEQ ID NO: 52107 - DNA, 1084 bp, Cannabis sativa
cctccataccagcaaaatcagcactagaatctgaaacttgcgggtgagcagatgcttcaaccgaggagggagaagcactttggatattagtagcacgacatcgtttgagagtttttcgaagagaaagattatcaaactgtctcttaaaagtcttgttgggattagtattctcctgatcaataaaatcatccatgtcatccaaaggggaagaaggctgatgagagataatggttgtagcgatagccttgccagccctttttgaagagaaatccatagtaatatcctggcactttgtttcgtggtaaagagtggtagttggagggtatgtggcaaagtatgatttgtagagaaagtgccaatgtcaggagtataaacatctttaagatgaacaacagcagaaccactggagacaggtagagtgtcaataacaggccttgtagagtttgcatcagtaataggaaaattatgtattgcagcagtaggcacatgtgtagtcacaactacaggcactgggggattggtgatggatgcggtcggagtagttatttgagtaagaacagaggaggcaatgggagtttggttactctgatctgtgttagaggattccccatataagagtggagtcgggtgagagagaggtctgttgtttaactgtgggagagtagcagtaatggtagatcgagccaaacgtgtcaagagaggccaagcgcttcctttggagaaatccgatctgtaccgatcataactagaagtaggcaaaggagcacccttgagagttggtctgtaagccagttcagactcaatcccattatccatattttcgagatgcacaacacacttgttaaaacatgtccaattcgtccacactccatacagtaattcggaagacgttcataacggaattccacccaaaataacaaattaataaggacaataaaaatagaaaaaatgacaaatcagtttaaataaggataataaactgatcataaatacttatttattaataagaataataaatactattgtaacttattgtaacttattttgatatcaataacttttttatcgaataactataaccaaa

SEQ ID NO: 52108 - DNA, 913 bp, Cannabis sativa
  modified_base (753)..(754): a, c, t, g, unknown or other
attatatagccattaatatttgaactgatattttatgctaattattcgagagtcacaaccctttttccttctattcgagagtaatatataggtaaattttgattatatgaggacaacaacaatccaaggatgagcttctatatcagcaagttagctatggaaacaccaaagggatcaaatccctttgccgagaaggtgcacgcctcgaggtaaaccactaaattcaattcatatgttgaggaagaacgatcaaagcttgtttttttattaacgatgaattttggattgggtgtgtgctcagtgggttgatagagatggaaaaacccctctcattcttgcttcaatgaatccggagctattcaatgtagcaaaaactttgattgaacttggggccaatgtcaatgcttatcgtgctggtatgataagcccttaaaaatccctccttttttgtttgatgttgtattcttgaatttgtgaaaaaggaacagttataatgaattaatggttattgaaaagagaatgttttatgagattggtttaaccaatttttttattttctttctctgggaataagatatgagatttaattctaaactttatttgaaatttttgcttcaaagttccaccactactaatacctcctcaacctccacaaggaggaccctgtcagagaatgcttcctactcctcattgtataaatatgataatttggatttcattttctaaatagacccctctctatttatatttatnnataaaatgtatatttatttacacagtgttatattttctttgatttaaattagagagcttataatatattctttcactggtcatagtgaattaattgtatgaccaagaaggaagtatctccaaggccttttttttttgtattttcaattaactttttcaa

SEQ ID NO: 52109 - DNA, 1681 bp, Cannabis sativa
gtgtgagacttcaagcaatccttctcttctaggaaggagcgttgaagacacattgaacccccagtgatctttcacacacggaaaaacttacgtgctcacgagaatcatgttgaattttatgtggcagacttcgtcttccgtgaagaaaggctaaagtcgcactaaaattcaagcaatgatttcacgctaaaagaccaaagggcatgaaacatcactgggcgtgtgacagacgtaaaaactacatgcttgcgagaatcatgttgaattttatgtggcaaactttggcttctataaataaaggttaaggtcccactaaaatccatgcgatgattttacattaaagaccaaagggtgtgaaacatcattgggcgtgtgacagacttcaagcagtccttctctttcaagaaggagggttgaagacgtatcgaacccctagtgatcattcacgcacgcaaaaactacatgcttgtgagaatcatgttgaattttatgtggcaaactttgcttcaatgaagaaaggctaaagtcgcactgaaattcaagcgataatttcacgttaaaagaccaaagggtttgaaacatcactaggcgtgtgaaaaacttcaagtagtccttctcttttggaaaagagggttgaagacgtatcaaagcctcggtgatctttgttgcatgcaaaaactacattcttgtgagaatcatgttgaattttatgtggcagactttgacatccgtgaagaaaggctaaagtctcactaaaattcaagcgatgattttgtgttacaaagtgaaacatcactgggcgtgtgatagactttaagttgtccttctcttccatgaatgattgttgaagatgtatcgaacccccaacgatctttcacgcacccaaaaactacgtgcttacaagaatcatgttgaattttatgtggaaaactttggcttccatgaagaaaggctaaggttgcactaaaattcaagtgaccattttgctttagaaaataaattggtgtgaaacatcacgggcgtgtgatagacttcaagcagtccttctcttttgggaagaagggttgaagatgtgttgaatccccagtgatcattcacgcacgcaaaaactacatgcttgtgagaagcatgttgaattttatgtggcagactttggcttccgtggaaaaaggctaaagtcccactaaaattcaagcgatgatttcacgttaaaagaccaaagggtgtgaaagatcactgggtgtgtgacagacttcaagcagtccttctcttctaggaaggaaggttgaagatgtatcgaacccccaatgatctttcacgcacgcaaaaactacatgctcgcgagaatcatgttgaattttacatggcagactttggtttctgtgaagaaaggctaaaatcgtactaaaattcaagcaatacttttccattaaaagaccaaagggtgtgaaacatcaatgggcgtgtgacagaattcaagcagtccttctcttccaaaaaagagggttgaagatatattgaacccccagtgatctttcacgcacttaaaaactacattctcgcgagaatcatgttcataattatgtggcagactttggcttccgtgcagaaaggctaaaactgcactaaaatccaagcgataattttgcgttaaaaaacaaaagggtgtgaaacatcactg

SEQ ID NO: 52110 - DNA, 2014 bp, Cannabis sativa
cattcctacattttcttttcataatacacttgttactgatgctaactcatctcctggttgtgctaatggtgctcctcctatacttatgcttaaccaaaatgttgccccaaccaatcaagcatcaatacctgtcccaccaccatctatacaaccagaaatttcacccagtaacccagcaactacacaccagcaacctactattccatcacccatacctgacttgactgtatcttccctaccactgcccacttcctcaattacagatgctactgtaatgctacagaagtccacaaattcctctattccaccagataatgtccctgctacagcaccaatttccagcatcatcaatcgggttcatcacatgaaaactcggtctcaaagtggcatttacaaacctaaggcatacatggcaacaagacatcctttacaagaatctctcttcccaactgaacctagaacaactcagcaagccctcaaggatcccaaatggcttcaatcaatgcaaagagaaaacacagccttgatcaaatcccacacttggactcttgttccctaccatccggatatgcatgtcattgacaacaagtgggtgtaccgaatcaaactcaatgctgatggttctctaaataactacaagtcaagattagttgctaaaggatacttgcaaacacctggaatagattatgaggagacatttagtcctgtggttaaacctgttacggttagaacagtcctatctcttgctgttacttcaaattggccagtcaaacaattagatgttagtaatgcattcttaaatggtgacttacatgaaactgtgtacatgagacaacccaaaggttttgaagaccccaccaaacctaatcatgtttgtcatcttcgcaaggctatctatgggttaaagcaagctcctagagcttggaatgaaaagctaaggactactttgttgcaatggggatttcacgcatcacgatctgacacctctctgtttgtctatggttcagcttcggatttgatcattttactagtgtatgttgatgacatactagtaaccggccctaattcagctcttatttcgaagttaattactgatctcaatacttcctttgccttaaaagatctcgggtccatccattactttcttggcattgaaatttatcgagattctgggggaatgtatctttcccaaagtaaatatatttctgatcttctctctagattgcagcttgatggagtcaaaagttgtcccaatccagctagttcacatcagaaattgtctctcaatgatggtgaaccatttcaggatccaactctctacagaagtaccctcggtgctctccaataccttactctaactcggcctgatgtagctttcatcatcaacaagcttagtcaatttattcatgctcctactgttacacattggactgcttgtaaaaggttactccgctatcttaaagggacgatctctgatggattacttcttcgacctgctgcatcaatggaaatttcagcatattctgatgccgattgggctagtgccattgatgacaggaaatccacggggggttatgtaatttttcttggtggcaaccttgtatcttggtctgctaaaaagcaaaatgtggtagcaaggtcgagtactgaaagtgagtttagaagtttggcaaatactgctgcagaaataaaatggctggttcatttgctttctgagttacaggtttctcttcatcattccccaattatttgggttgataatcaaggagctgctgctcttgcagctaatcccatctttcatgcaaggtccaaacatatcgagattgatctccactttgttcgagatcaaatcatggccaaggaactctcggttcggtatgttccagcagttgaccaagtggctgattcacttacaaaggcactgaccactgatcggtttctctatctcaaagacaaactaaaaatggctgaaaccccttttcgtttgaggggggatattagacactaaaccgtt

SEQ ID NO: 52111 - DNA, 1018 bp, Cannabis sativa
ttagtatattatctatgcgattatttgataaataattagtaaattataccataaataacaaaactatacggttttcttattttgatttgaaaaataatcttataccttacctttttttggtgtaaatttctctctcttttttttttttatcaagaaagattttcatcaatcaaattggtttttaatttctctattcccttttatacagtgcattactacgaccaatcaccaacaaaaggtatatcatctgaaattaaaagtatgttctcttgaattagtttgttttatattctcttttatacagtgcatgtgtattattagtatattaaacttatataaaacaattttacagctgacacacataacgtacaccattagtgaattataaagtgtgtgatacagagatgaacttcaattcaaacttcaattactaattgacacactataatatattctcaagaaaaatatatgtatataggaaaatccttaggtgagagcatcatctttgctctcacccatgaggacattttttaaacctttgatttttaatctaatggtaataatttgttgtagtttatttgattatcatgaggtatcacacatagaatttttattatttatttttaattttcttataatctaggcatgatttgcttttttttttacctttctaaaaaatgattaattgtatgtcggtatatttactttgttgttgttttttatttttgttcgtttattggatgtgtacgatggaattggtcttatgtttgttgaatttttgagaaatgaacggccaattcattatgcttcaatttgtttgggatttatgtttttttttttcttttctttaacagccatgatttgtgctcttggttaaagatatatgaaatattgaaaatcgttattaaccaatatagtcttcttataagaagatgagagagagatggatcaaacctataagaggggtggcgttggtgggtgaggtatgatgctggagatgatgatggctatagatttt

SEQ ID NO: 52112 - DNA, 1043 bp, Cannabis sativa
tttgcagggagagtttggtttctcatcaattctgtattgatggctatccattcttattggtgtcaaataatgattctttcaaaaaaagttgtgaataagatggaatctatatgtcagagttttttgtggaatggaagccatgccctctcaggttcaatagcagttgcttggagctcagtttgtcaacctaaatcggctgggggcctaagttttaagagcatcacagattggaatctagcaattatgttcaagtatgtttgggctattgtaaaaaaagaagacaatttatgggtgaaatggatgcataatgtgtacatcaaggaggaaagtttgtggtcctacagggccacaccaacaaccagctggtattggcacaagctggtagccataaaagataaaacatcaagcagttttgatgtatcccaggtgcaaaatgacaggtacaaagtggcagagggatataaggctattcggcctattgctactaaagttaaatgtgattcaattgtttggagtaggttaaacattcccaagcatagtttctttctgtgactttctatcactacaagaaaacctagttttaccggcgcaattggtcaattgcgccagtaaaagttgtcagaataaatgaaatgctgaacttccaatttgattcagcaataacttttaccggcgcaattgggcgctggcaaaaggtactcaataccggcgtattattacatatgcgccggtaaaagatcaacaatgaaccgccaaatggcgcgagcacatttccactttgtaaggcttttgccggcgcataattacgctggtaaaagctagcaaatttttggttggaatcttgaccgcccacgtatgcgccggtaaaagtgtttaacgaaacggggcattttggtttagggttatatgaccacttttaccggtgcaattcaatgcgccagtaaaagtgttcatatgacctgccccttcgagcagcagaccccatttccttttttttttcctctcaaactctccttcagccctctctctcaatctcactcatt

SEQ ID NO: 52113 - DNA, 930 bp, Cannabis sativa
ttaatgataataataataaaattaacacttataatctcactaatctatatttaaatattccggtcgctacaattatctccccattaaaaggatttcgtccttgaaatataacttgaacaaccctggatgttgagtcctcatgtaagacaccaattcccaagtggcttcttccactttactatttctctagagcacttcaaccaatgctatgattttgcttcgaaggactttctcttttctatcaagaatttgcacttgttgttcatcataagacaggtctggttgtaattccaatgcttcaaagctcaagatatgtataggttcagacacatacttccttaacatggaaacatgaaatacattatgtaccgctaacaatgatggaggcaaggctagtctataagcaacttgtcaaatcttctcaagtatttcaaaagttcctatgaatctaggactcaacttgcctttctttccgaagcgcccgattccttttagtggtgatacacgcaggaagatatggtctcccgactgaaatgtaatatctcggcgcttgggatctgcataactcttctgcctgctccgcgaagcaagcattcacactttaatcttatgtattgcctcatttgtcttttggaccaactcagggcctaaatatttcatttcttctgtttcatcccaacgaattggggagtgacattttctaccatataatagctcataggaagccattcctatggtactttggtaactattattgtaagagaactcaatcagaggcaaatatttactccatgaaccccaaaatccataacacaagctcacaggaggtcttcaagtatttgaattgttcgcttagactgcccgtcgttttgaggatgaaaggtcgtactgaacttcaaactagtgcccatggccttttgtaaactcacc

SEQ ID NO: 52114 - DNA, 2359 bp, Cannabis sativa
atctcgctataggaagacacgctcctggtactttcaccaatcagcttcagacatcttttagtgagatttatagtcttgacgagtcagtcctcttgagcagaagctgacattcaaattatggtaactgttgaagtactccttgtattaagaactgcgattgtcaagacgaagcgttgtaccttcaagcgaagaagcgacgaggcgtacattatcaacctcatagagataggggaaaagctccagctcgatatcaaggtcattggtactgagttcctgtcaagacatcccagaacgttgtgatttaaaaagtatttaatacacgattatcttgacccaataaaagtagattaatcacaactgtgtgatattcaaataataaccgcatttgtattacgtaatataatcaaacctcacgatttcaagggataattgttgtaaagattacagtcaactctgtaattaactgcctgactatgtaattataaatagaggcaagttagactacaaaagggaggaaaaaattcataagaaaaaaagggtccaagaacattatcagaaatctaataagattgacttgtggagtatgcagaattttaactgcaagatcacgtaaaaaaccttcgtgttcatcattttctttttatttctttactatttttatatttccgtgcaagtttatcactattcaggctcaaatttggtttatgaaaatctgcgttaacaattatgaaattcaaatgttacttttgattctgctcatcttttttgatgatggtaaaaaatatatatatttcccacatattaaaatgattacattaaagagtagattgcagcgatgtaatttttaagaccaaaaaaattataaatgtagtaaaaaaaaaaactttttaaattaaaaaaataaaattaaaagataaatattttaatattaattgttttttaataaatattaaatgttctacaacacgtgtcgaaaaagatgaaagaatttgatggcatgaaaaaaaaataagagtattattatatacatgatgatatgtattgaaagagaaaaaaaaaaaaatggtcagtagacatgcattgagagagagaaaaataaaatgtgaagaaagaaaaaaaaaaaaaaattaatgtgtgcttcagtgtaacattgaagaaaataaatacattttttttcaaaagtaaatacattttttatcgatgcacgttatagtaaaattaaagaaagaatcgatgtatatgttaattaattgaccaataatattgtgataattaattttcaatttttgtctcttttttcataattataacatttatcattattattgtatccaaatcacgacacatatgacacatatgacatactacaaatttgtaatatacagtgtcatgaatacatatcttgtaactttggtggcatgtaatgattctatttatttatttttattgttgcatttaaaagtattgtaatactatttgaatgaacttttaattattttgttggaaaaattatttcattttgaaataaaaaaaaaggactatattcataaaagatgggaacaatttactaattttttataatgcaatttaaattttatttcattggatttttatttttatttttattccaatttctactattcatatatttttatttcttctaaacaaatacaactttcgtttttgttgtttaattcttctttcattttttctttctaaatcaacagtaatagttatatttacaacctaacagctccaaatattggcctaaaattaatatcacatcaatacaaaaagtatcattctatcaaaaagtgtatctggccttttcactttcttaggccaaatcacaatttaatctatttttgatgtcgtgtttgatatatacaatgtgtaatagtaagaatagcaatcattccaaagcacacattaagatgatacactatcacagccaatgctaatgcaaaaaaacttgctttcaacacaacaatggcaacaatttagtacctgaagatacctaaccactttttaatttcaactaggcatcttttactataacaacaattaaagagaagatgctctacatcttcatcatactttccacaaaccatacaacatggatcttcacaagtattattgaatcgatatagtcttacttttgtctgcaaccgatcgatccaatacagcccaccaagtataaatctatgtttcggagaattgaatctatcctatacttggccataccaaaaaactttattatcttcttttattattttgctccccttgcagaaaaaatattaacaacataactaacgtcaaaactgaaaaaccgtgtttttgcaaatgtcagttgtatata

SEQ ID NO: 52115 - DNA, 2406 bp, Cannabis sativa
ccacaacattagttcaagattttggtgatgataactcatggtatgctgatacgggagccacggctcatgtcacttttgatgccaccaatcttgacagccaacacacttataatggtactgaaactttggccgtgggtgatggtaagaagttgttaatttctcatattggtcattctacaatcccttctactaatccctcttgccctcttcaattaaagtctgtgttacaagtaccttccataactaagaatctcgtaagtgtatctaagcttgttgatgataatgacatatttcttgaatttcacaaacattgctgttttgttaaggacaagcaaaccggggcacctctcctcaaaggaaagcgtaaagctggtctgtatatgctcaacaatgattcagagatttccaactcagcactacaatgtcatcttactacaacatctttttttgatgaacactatccctgtactgataacatacaacactctcacaataatagtgctcttgtttcatgtaatccatctttcatgaataaagatagtagttctatttccaattcagcagcctttactgctacttcgtcatgtactgatattaatatatggcattgtaaacttggacatccctctttagccacattaaccaaattacttcctcaaatacctcacactggttcgattaaaacattaaagttttgcacagcctgtcaacaaggaaaaaatcacagacttccctttcccatttccaccagtcgtgccagtcaaccactagaacttattcatactgatttgtgggggccctctcatattcagtccaaagatgggtttaaatactatattcattttattgatgattatagtaggtttacttggatttatcctttgtctttaaaatcacaagctcttgatatgtttctgcaattcaaaagtatggtagagaaacaatttggtttaccaattaaagctgttcaagctgatggaggtggtgagtacaaaccatttaagagattcctcagtgaccaaggtattttattctctcatccatgtccccatacacatgaggaacatggtagggctgaacgaaaacatacacacattgtggaaatcggcctcactctactagcacaaagcaatcttgatttctcttactggtggcatgcattccaatatgcaactttcactatcaacaggctccctactgctattttaggcaacatcagcccttttgaatgtctatttgcctccccacctgattacacaataatgagaccatttgggtgcgcttgctttccacatcttaggccttatcactctcacaagatgcaattcaggtctgagcaatgtttattccttggctactcttcctaccataaaggctatttatgtgaaaatgctcaaggaaggatttatatagcaagaaatgttgtatttaatgaggctcattacccaggtgctttctcatctacatcttcccaacaggtacttaactctcccattactgctcctactgccacatttaccacttataatgacttccttaatcctaatactactactacatgtcctactggttttgtccacaatggtactgagacaattacatctcacccgagccttatacctgaccatgccccaccaccttctgcatctccacttgagcctattcatcattcatcatctccacttcccacaccagcaactaccactgcaacaccatcacataattcccctattaatatcccaccaacaatatatcctaccctcttaccacccacaaacacaactacacctccatctattgctgtacccagttctacacctgttgatccatcacagattgccccaccggttttagaagattttcctcagattccctctaccagaacacatccaatgcaaacccgatcccaaagtggcattttcaaaccaaagtcttacttggccactaaacacccacttccccaagccttactaccatctgaaccaaggaacctcaaagaagccctccaacaccctaaatggcttgcttccatgaactctgaaattgggtcactcaaacgtgctggtacatggacacttagaccctatgaacctggtatgcatgttatttctaacaagtgggttcatcgaatcaagctcaatgctgatggctcattagatcgctataaatccagacttgtcgcaaaaggatttttacagacaccaggaattgattatgctgagaccttctctcctgttgtaaaaccagtgacagtacgcactgtgttatcccttgttgtttctcaccaatggccagtcaagcaactcgatgttagtaatgcattccttaatgaaatctcactaaaaccgtgtatatgagccagccaccaggcttcattgattttgagaaaccgactcatgtttgctt

SEQ ID NO: 52116 - DNA, 2458 bp, Cannabis sativa
  modified_base (998)..(1000): a, c, t, g, unknown or other
tcaaaggacaggccttatcaaacttaggagtgcacaggcaaagaagaaagcatttcaaagtataacctggagccaatacaagaatcctggccaaacaataatgaagacagacctacatggaaattaaacgtaggtgggtttgctacatatcaaatgtttggtgcagggattgcccttgtcacatctgggggtgaacacctgcacggggcagtcaaatttggattcaaagcttccaacaatgaagcagagtacgaacccctcattgctctccttgttggattgtggtctctagggttaagatgctcgcacgggcccataaaccctaatttgggcaaacttgggtgtgtgagtcctaacaccaaatggttgaccaatgtttttgagtctcctagaggtgccatgggaccctcaagtaggatgtcttaacgtatttaatatgtgagtcttggtcaaagtcgtagggttaactttagtgttttcaaggtactcttggcttgtgggcccttgtgcaagagtagccatttttttttgtttgcaaaaattggatataacatttgcctccaaaagtattttcttgtaagccttcaagtaattcttttgcacttgtcccaaggcttgcacaaaaaatacttctttgtagagtgcatgaatattacttctcttttgaagatgtgtgcatgggcacgaagaatgtccttaatggttgtgaagaggtttgaatgggcacgaccaatgcttttaattgttgtgaagagacatgcatgggcacaactaatgtccttggaattgtatgtgtgaagtttttaaatcacacgacttctccttagaatgtaagctgagttatatttcatatctcatgtggtagtcgagtagagttacgcctcttgcttgattttgagagttttgcaaggtttgaaactttttgcttaagtttttcaattcagagtagagttatatccctttctcaaactcatccttgagtagagttaaatctcttnnncaagttggttggcaagtaaggtctgccgtgaactgagttgaattctcttgttttacacttttttgttgtggattgttgttgggacccacatatgtggatttgtatatgtccacttgtcaaggattgcctattagttaggactaacaagtctttctcacatctttggaactttttaagtatatataacttaatttattctgtatcttggcgactttggaacttaagtttaatatattttttggtgctcattttatttgatgcttattatctttgtaacatgtgattctaaagataacattaattgttgccaatggtggcttgcgtgttgctagttcgagcaagttgtcggcatgggacttaactctttgggtactcaattttagcacgcgacctacttgtcaaagtctcaaatataggtcattcaagatgtctttgttaagcaaaattttttaagttatggttccttggatcgccctcacttgtcttttatctcatctatatactgactttgccccctgtccgaggagaaattttgaaaaaatattcatggaaaaaattttaaaatcccacacacttaaagtgacgtatcagtaatgactctgagatttgtatttttttgttacaagcacagttttatgtaggctcttttacccccaagtgttcataggttaagtattatcatattttactctttggtgggtttggcataataggaaaatatctggctactgtagcactcttatagatgtgagtttagctatttacattatagaaaataaaggtaatagtttaataactaaaagttaaaaagagagtgtctttgtaaaaataaggcaaaaaaactcaagaaatgctaaatgccttctggctccattggtggagtttcaattagttgacatgtcctccttgaaaattttgttgtgcataatgggtaagtgtcttgttaggactagagtcttaatttcatctttgaggtttcaacactcattggttgtgtggctgatgtcttatggtattgacagtatcttgaggcatctctcttggcttgatcatgccttatgggtttaggaactcgatgttcattcaccacatagatggcctcttgggtttttatcaacttggtgtagattaaatacataaggtgataagggccatcactcttactcttcttaggacttgagtcctcaccatctatgccttctcttttactgttgttgaaagagttagtagccatagttgccttagtaagttctagcagtgctaatgcaacttgagtaggctacaaggattggagagggaggttgtttgatattctttcctcttcaatgttgatgtatttttgtgtctacttcatgaatttgtcaatggtgcatgtgctctttctttgaaggttgttccaaaatatggaaccatggccaacacctgccactagtgccattagtcttacactatcattga

SEQ ID NO: 52117 - DNA, 1518 bp, Cannabis sativa
gccaagtacttctttggggtactcttaaaggagggttgtataacctggatctctctaaggtcttgcctgtttcccctacttctgcaacttctcaccttcttggcgcactaggagctttcaattgcatcaagaacacacaaattgctaccaataactctcagctttttggcattagagagttggtcacccctcatctagagtcctaaaaattgttgtaaatacgctttgtcctcaaataaaatgttcagacatttctttttgtgaagcctgttaaattggcaaacttttttgtaccaaagacaagttcaattttttagcttgttcatttagatgtatggggtccttcattctacaattcaatggaaggtttcaagtattatgttagttttattgataattactctaaatatacttggatttttcctatgacaattaaacatcaagtcaccactattttcagacaatttaatgtctatgttgagagatgttttcaaataaaaataaaagctcttcaaactgtttgggggtaaatatggacctttaaaacctttgttataggatcttggaattgagttcaagcacccttgccctcacacacatcaataacagggttgtgcataaaggaacacacatgcatgttgttaatgttggccttacgttgcttgcttaagctgaaatgcctttgagtttctggtgggaagtctttgtctcggccacctatgtcatcaacaggctaccaacacccatcttgcaacataatacaccttatgaggtactctttaatcaaaaactagactatttttttaaagtgtttggttgtgctttttatccccatataagacaatatcaaagtcacaaactttcgtttagaacaacacaatgcctctttttaggatatagcacaacacacaaaggctacaggtgtatgcatccttctggccgtatctatatagctagaacaatcaagtttgataaacacaaatttccctaccactctctctttaaacccctatcaccagtaacaactgtaacccaaacacacaacatatatacacaatacctgctccaatcactcaatcagaaaacaccgtcacaaattaacaagttccctcaaccattcctccatccccattaccaacacatgagcctgttatcaatccctctgaaccttccacaagtcaacctgaaccagcacccttagtcaatactagcccccaaattgctaacacataaactgatcatgaaccaccacccctcatcacccctattccagtttttagtttgcaaattcaccctcttatagatgcctcaaataatacacatcctatgataacaaggttaaagaatggtataatcaaaccaaaggccctcactgctgtctccaaggtttctcttgaacctacatccttcaaggatgtacttcaagatcctctatggtttgctgttatgcaaactgaaatttgtgctcttgtcaagaataaatcttgggttctagttccttatttcccagaaatgact

SEQ ID NO: 52118 - DNA, 1163 bp, Cannabis sativa
acataacactacactaaattcaaaatttatgacgatataatttaaccaatcaaaataaatattatattgaaaatataatattttttaaaaaattgaaaaataaaatgttaagacagtactcaatgtttatttttgacaaataatatctctaaaatatttctaaaatatttcttatagaatgtgaacatacaacaactgcctactatacaaacgatgaagatattatttattataatattttaaaattaatttatatacaaatttaatctatatctttattcttcaagtcaactatgtaatttggatcctaacccattaatcattgtcttttttgataattaatgtcatctgttaataacaaatagatcctaattaattattattttattttcaataataatattaacgtgtccacaattatgtgaacgtacctaattcaattctattatcgttaattaatttcattttcttttctttaaaagatatttttcttttgagaaaaatgaattattccatcaaaaaaaattgaaagccaaaaggatcttgagatcaatataaactgtctaaaatccattgggtagaagatccggccaccaaagagaagttttaatgaaagaacaaatttagttattaacgaatgaacaagagcattactagggttacaataaaaaataaagacataagaaaaaaactttcaaatataatcaatgaaaatagataatactaaactcattgtaatcattttttttttgtttgaaagagagttcaccaaaattaaattattattatatatataagtcattgttatataaaaatcaattacttttggtacatacatatatatatagctatcaataaatggagaagtcgtctttattaaatttttcgaaaattttgacttctcaagtcttcattaaaaaaaagaaatatatattaaataaatatgcacatcttaatttggccaactaatatgattcaaaagcaaaacacgttataacaaactcttgtttctgttaggctatttctagcctatattttggatcaatttatgttcgcttttcgatgttttaagacagaattatgcttgttttttatgttttcaggtttcttggagttatggaggccgcgggatgcaaaagtacaataaaagacaagtggagcca

SEQ ID NO: 52119 - DNA, 901 bp, Cannabis sativa
  modified_base (823)..(849): a, c, t, g, unknown or other
tatatataaatacatatagactctcttggaatgggagatcacgtgggcttgcctaaatttttttaaaaaaaaacaaatattttaaagaaaaaaagtatcacttttagcaattaaatcaaaactttttaaatttttatatatatatgtatatatatttgaaaattagcgtagtaatgcattagataaagaacataactagaccttacggtcattacagagcaggttctcgggcaaggaggagaccggattacatccatacttctggtgggtaaacgctcacttagccacattatgggcaacatagttacattgtctactaatattcataaagttacaactaataaaaggagtggatctcatacaaaaggagacatagttctcaagtgcccaatgggactccttcccattgagagcattgatagctagtctcgagtcactctcaataataataaaatttaaacctaagtcaattgccacagaaatggctgaacaacaggtcactgcttctccgcataaagcatccgaaaagtccaactgagtcgtgtggatccgaatcacctcacccaggttatatatatacatatacataacgtgagttattgcctaaaagtaaaaaaaaaacagtacacagtataaaaaaaatagtaaaaaagtaattttttccgtacaatagtaaaattgaaaaaaaaataagaaaaaagagtatgaggtgtaaatttcccttcatattatattaagtagggattatttcacaaaaaacataaaaataacaaaaaaaacattacaaaaatatagttccacgaaattttaaacatttttacgnnnnnnnnnnnnnnnnnnnnnnnnnnnacggtctttttatgttgtaatcttgttaatttgttgtgattttttgttatct

SEQ ID NO: 52120 - DNA, 983 bp, Cannabis sativa
ttgttgtttcctttaagtaaattaaagaagggagcacacttgtttgttgactgggagatgaacctactaagtctagcaatttgtcctgcgaggctttacacatcttttatttgcaaccactactacaaaaatgggtttcagtcacacacattgagtgactctaaacgttttagtgacacttcactgcgcgtcactaatgtgggtgactggaaaagcaatatttagtgatccttcatagtgggtcactaaacccttctagagtcactcactgagcatcactataggctttcaaagtcacgctttgtcaaattataaaaataaaaccacacactatgcgtgtcactatatccatttatttattttttattaattattttcgtgatatagtgacactctcaagacgccactatatcatttttttttaaaaaaataaataactattttagttcagattatgtaataatttttagccactttaattaattgatattttccttgcagtacaaataaaaattctttcttgttaaaactaaaatagaaaaaagaattgaaaggaaatttctcattttcatttattcttaattacaacctatgcaacaagaaatacaatttgatttttttttatacaagttaatctctcaattgatagatctgtacatgatatgaaatttgataataaactaaaatggtttaaatctagacaaaatttagaatttggaaggcacgatgtcttgcacttggaaatctaatctctggaaggactcttttcttttctagagatctgaaggaaaataataaataacaaaatatcaccataagaagcaaaataaaaattacaaacaataagaatataacattattcaaatctgaaacatagaagatcatcaaagaaatggaaaagaagaactttgtgtcactcaacctagaaaaaaatctttaaaaaaagagagcatctcaccactattatattcatatatatatat

SEQ ID NO: 52121 - DNA, 609 bp, Cannabis sativa
cagaactgaagctatgctaaatggcctacaattggctaaagaagtaggggcccaaagtattgaagtgcacagtgactcccagttagtgataaaccaaatatcttcagaataccaagctaagggttagaaaatttctacttatgtgatgcggtcaagagaattttttcaaagtctcaaaagtcacaacattcatcagctgccccaagacaaaaactcattcgtggatatgttggcaaagttagcaacaggcccagagattgtgtaatacggagtggtacctgtcgaccatttacaaactctgagcattgaaacactgggggaaaaagccataattgatcactccaactcctggataggtctgatctttcaattcataaaatctagagagcttcagactgatagggtttttgccgggaaaatttagtaacaagctctattgtgatattttgcacacgcaaatgcacgtatcgtttacaagtaatagactcaccaagagtgaggtcgatcccacgaggattgtagctaaatatgttaaaattaaacttttacttctatttggttaaataaaaattaggaataggttataactagaaaataataaaaatagtg

SEQ ID NO: 52122 - DNA, 1195 bp, Cannabis sativa
aaaaaaacaacaaatggttaaagttattaaatttgtacatgcatcaattcataaatattgagtcacatttttaagtgcacacatgagcaaatctagaagtagtttagcttcttattttagaattgtatcttctggtcttgcacttaatgaaactgcagggttgcaagtgaaaatagtcctcagaatatagtatgagcatctttgattcttctccaattgtaagagtttaagtagtgttgtcaaggatgctctagaagtagactgtgtccaagcatctcggttgccactttcaattcatttaagaaaaatagatgcaatgagggatacctacagaatataaagttcaattaaacactacataattaaacataaattctctattggattcttcagttgtcttctctaaaaccaaactagcatttttcatctaaatatttttgactgtaaaggttttaccttaaacatacacaaaaggtaaactattttcattaatcatgtagcagtttagagcatctaacatacataaaaggttaaccatattggattctgaaactccaatatacaagctatgaaactaatacaaagcagaatctgcattttcactaatgaaaaaagaaaaaaaaagaactatacatttgtttctgtgtaattagctaagataagacttcaaacaaaaattcactggcctcgcagcctcttcttaccacgttgtagaagctcacccaatgactacaaactcacatcaacatgttcatcatattcaagtccaagttcttcctacaaaattaaccagctatttattaccaaattgccaattgcaaaacacattctcaaaattcaaaacataaacacttaaatggcatgaaaataaccttgaattccttaagattccttggtgagttctcagtaatagcatcccacaaatatgagggcctcgttggctgaggttgcacctgcgatgagcactagactttgcgggtcaaatgtcactttgtttcctcttatttcagacatgaattcaaccattgcccgctgtaacaaaatttcacattgaatttggaaagaaaaataataatgtttagtattcttcttataatttaatataattattttttttgcaagagaagaaaaaagaaagatggatggatggagtatttacatacatgtacccatgtgacagatttgattatttcca

SEQ ID NO: 52123 - DNA, 1003 bp, Cannabis sativa
aaaaaaatgatgataaatattaatgtatagtacatacacatatataaaaaatcaaattcaaattttaatttttgaaatgcttatttgtaattctgttatcttttaacccttgttttgtgggatacttatcttttaagaaatttaaatttaaattactctgtacagtatgttgtatatacgtttttattatattttttatttttggataaactaaattcaatatttttaaaatttgtggtaaattttataactaaaatgttctacatttgtggttaatataggtataatttttaatttaaaaatagattaataaatttttaaatatattctccacaaatatttttaattgggcttttgtgttattggttctaaactaattgggctgaatactacgattctgtcaaaagatattgcattgctgtacatgatctattttcctctggattggtgcaatctggctgagctgatcaatgatggctagaaaatttacacatttcagtaatctatctcacttttaagtttaaataaaatgtgttatttgtgtgttagattagtaaagtaatcatcatcatgtcagccttagtagtgatcatcttcgtgtgaaaatgttgtgcttttattattgtgtgttgtatgttgtgtttgttgatggtttaggttaccgatcaacttattgaatttatgctaattagtaacaagagtagatttcctcctctttcaaaaaaaaaaaataaccctcttatgtgcattagcatattgaatcgtctaaattattgggtgtcttcccaaacaaggaaagacaaagaaagagacatgaaatgacttttacttcctatattctattcgatgaactctagtgtttcaagatatttatatgcactggtattgatctcggtatctaagcaatttgtctgttttagatctggttgaactgaataagaaatataaattgattctatcttgtcttcttattcactctctcatgtgttacttagtattattt

SEQ ID NO: 52124 - DNA, 647 bp, Cannabis sativa
tatgaaaaataaatccgtttaaaataaaaattgaaagcaacttttttttgttttcaaatttccaaattttgattctcattttttttttaatatattttcacttttctaattgaaaaaacaaaaaaatgattaaaagtattatagacggcacccttagcattccttgttattcctagctaactaatttttattgagggcctattattaccctccaccaagattcaaccttgggctcaaggttgaaatgttatcacatctaattgttcccaagaatcttagtaggttggtagattctacaaatgtatgagtccaattccttggtaggtttggtgtgttgattgtcacacttacaacttgttccagttccagttccatgtcatgagacaaagtagctcaaaatgtggagagtgcaatctggtttccaatggccttatgtaaccgtgacatggaaaactagacgtatctctgattttagaggaagttgaagtttgtgttctacactcccaattttctaaccaaggagaaatgattatctctctccaactcttatactaagcttggtcctatttgtgccagtctttttacgtaatttacgacattgctagatcttgtgtttattaggatttcaaatcaggaaaaacaaggca

SEQ ID NO: 52125 - DNA, 1487 bp, Cannabis sativa
tattgaaacaaatttttatttttcttttcgtatactggaacaataattcatttcattttatataacctattattatatttgtcaataaacctactaatttatgtttgttggaacactatattttttcaatacaaagtaaactataatcaaacataatgatatacactaataaacctattagtctatttttcgtatattgacacaataatttattttttgtttcaaataaaatgtgtgcctataaaataacaaactaattagtctattttttcaagttgagacatcaaatttggttgtatatgcaaagtacatgactataacatgtcttacagacttacatagtaaatttggataacaatatatgcacttgtcaaagttttgagtatactatgcctatactcatatattttggcatattgaaataaattttcattctttgtttacatgttagcatttttatataacatatcctattgtatatgttactaaatctattagtttattttgacaattttttatacttctaattttttaaaattattattctgaaaaataaactatttctaatacattctaacagaattaaatttgaaaaagtaaaaaaatagtggcagaaaaaatatgagtgggtgaattaagcaagttttaaaagtgatggatgtgatagacatgaacaatggttacgtatttaaaatttattatttaaatttaaaactaaatatatatatgattatttttcaaaaaaaattagaaaaaaattgaagcacatcccttattgtgatttgccatataaaaagatattaaagaaaataaataacattaaaaatgtgtatcgatcaggtcatgatttctttcgtgaatattcttagcttctagattaaagatcataaataaataaaaaatgtgtagattaaagctaaaaacgtgggtgactaaactaagtccaacaataaaaaacagtatgtaattatgcagaaatgttataatggacatagttaaatgggtcaagttatttttgatattaagatgtaatttaaggtgtctaatgtaattatcccttaatattatacatttccttctttgaggctacgatttctagagattaaattgtcagaagtccacttaaagataaaattgttggctttccactcaaaggaaggcatataatttctcaaataagttttttcattactaaaagtatagttagtgtcattttcttcggattactaagttcattcccatctgcctccacgttttgttttattgtgatttagatcactttttatcgatatatattatatatatgtgtgagattagattaaatattctaactaaattaatatttttgaaatatagtatcaaaatagataaaatataagtaaaaaactaaaatgtttattaacttagaccgcatgagctcaatcaaatagttatctaattgtatgtggacaaactttaaagatagtatcaacaatcacagctattgg

SEQ ID NO: 52126 - DNA, 969 bp, Cannabis sativa
taaacctaactagaaggaaatcctattaaatagaacatgacagactcataacctgagaactcatcattagtctattctatcagaaaatttaaaagagaggctcctctctcaaatttttgagctctcttcttcttctctctctaaattttgtccatatagtgatagagtacacactcactcatatcaagtcaagtactcaatcataatgtgaaagattgtgaagaatctaatacttgaaggagatttaggcttagaacttgttattactatgctacagaacgaaacaagatttagagatctgcgtggaaggagccatataattttactgccaccaatgtaagattttctatagctttatgtgtttattttcattgtattttggaattcatgtttagggtgttattatagaatataatcaacatacttgttagtaaatctagatcctggtaaaataacttctatcaactagcctcagagccatggtaatgattaacattcatgaaatatggatttaaaattataattttgatgatttggatgtgttcatattggtttatatgcttaattgatgaatgtttacaaattttcgacaatatacatatttagttttgtactgggagtattttttctagaaattatataaaaaattaataaaattaggcttttatagaactcaatttggatttttattgaattagttatgattttttgaagtttaaaaataaaatatctaacctagggtacatgtacagagctaagtgcacctcagtcatgattgagcttcaaacaaagctctccaccgaggtttcttagacaaatcctatctgaagcatgcctacgctgaggttcctctcgcacatctcccttgtcacacacgcggggagtatgtaatgcatgctcccttgtgttgccttatttttgtgatattttaagtttcagacattgttttttaatgaaacaaaatttaaa

SEQ ID NO: 52127 - DNA, 637 bp, Cannabis sativa
ttaataaaatttacaattaaattaaaacatattaaaccttaataaaggaaacttaaaactaaaatctccaaatttcttatcttatcatcttcatacccaaccatgaataacaaccagaaaacctaaatctccaaatccccaaatttctcatcatcgtgcgatttatgcccaattgtccccatcctaggttctccatcgccggacccatgaaaaaccagcagaagacatgaagagacgaaaaaccgatcacacccttgttcttcctttcaaccaatcaacccaccattgccgtccaccatcgccgttcagatgtcggagctgcgaagacatggaaacagaccatcatctcatctccaaattaatcattcgctctctctattactctcataggtacgggaatatgtatatacatacgaaggaatgttttcttttgatttctacatattattttattttgttcatttcaacttgtatctatatatctctctatatatatattcattctttacacactacagattacgatttgttaacatttgaatttttggggatgagttgcagaaatattgggttatctcctcacatattttttttgaaatccttctctttcaggtaagtggcattctcaaatatctat

SEQ ID NO: 52128 - DNA, 1492 bp, Cannabis sativa
taatcttatgtgtttgattgagagtgctcatctaaggtgttgttaattatttttcttttcatttgtagtctgtacaacttggattcgagttctcctcactacaaaaaacatctatctttaatgataattttttagtcataaaataaatttttgtgattaattgtgacttttagtcacaacaaaaagttatttgtgaataaaacatagtatttagatacaagttgtcactaatttaaatttagtcacaataagtattgtgactaaaaacaatttagtcacactaaattataatttttgtgatttatacttttagtcacaacataaaaataattatttataattagttacaacttttttatttttgtagtggctccatatttatgatgacgatcaagattgaataaagggctttgtgtattcactcacttgtgtgttcactagttcttgttatgttactcttgttcaagtgtcattttagttctaattgcattctgtttttctagttttggatcaatcttgttatactgttttattgcagaacagtgtgagttcaagtgtgaggtttcaccacaaaaatgaccaagattttctctcttttcttgttatggtgtagtcctaactattttgttttcaccaaaatccaaatcctttgttattatttaggtggtaaagtacaacaatgtccttgtatgaaatgattactactgcatatattatacagatagaaattggttgccaattgtgagtaaaatatttctcttcttccaagttccaaatactgactttgtagtctattctggtactggatttgtcttattcggtctactcacaacagacaaataacaattctatggttccaccaaaaaattattcaaaaagtctgtctttctctctgtcaacacaagtgtctgtgatgacatttttgcccctactccttaatcaatgccttgtttccagccttacattacatgggctctaccacaattttatacttcaaaataatttcttcatgccttttactttttcacttgaaaactgtttcttattccttttaaaacaaatcctttatcaaaagacaatgatctaagagaaataataatcacaatggaaaatgcaagaaaaagggaggaaaaaaattattattcccttgtaatactttcaatctaaaagtggtaattctaagtttccataaatataaaataaataaataaagttttaagtttataggtactataaatttaatatttatttttagcagcataagtatctaatatttataaaactgtaacttttctctaattttgtcggtaaaaattctattttgaatttatttaaaaaacatttagaagtaactgatactacatgtttatatctaaacccaataatctaaaaaggctaattagaatttttgccccctgaactttgacatataccaatttatgccctttgaacttttaaggttgttgaaaataccccctaaactattgagatt

SEQ ID NO: 52129 - DNA, 1691 bp, Cannabis sativa
atatcgtagtctcaattttaatttgtttttattttctttttatgctatttaattacaactcaaaccccccatttaatttctatttgatagtgaataataaattaatcataatccttgttggattgacccgtacttacttttactgaaataattaaaagtattaaaattaaaaaaatagtaattgtatacggcatacgacacgcatcaaatgtcttaaatagacagtggtggtatctttgttcaaacaatactttatcctttcctcaatttatttaattaataaatgtgaaaaataaattatttattataaaaataaataattactattttaacaaaacaaaatatattttttcgaactttcatatataatttctatccctatatctttaaactttcatatacaacttctaaccctattttttttaaacttccatatacaacttttattcctaccattgacagtgtttcaaggtggcaattcgaggaccatgaactataatactaagctccaataaactagattatttatagaatcccatcaaccaaataatctcgtttattatattcatgattattcaactataaatataaaattaaactcttagtaattatagaattatatactgaattttactgttgtgtacatcgatataatcaatgctagagattaaacctccttgtgttggttcgtaattaattttgagtaaattatcgttttacccttctaattacttctttatcctttagtaccgttaattcattagtgaaagtataatttagatccaatctaaatttgcacacaactttcagttctagaattaacatttaaagggatatctaagtgaagatgatgtatataatagagattatatatgagaatgactgataggcatcaaacaaagtaaatcaagattgcttgcaccgaataacaggcatcaatgaaccgcattagcaaccgttgattaaagatattccagtcatccatattcccaatcatcaataggcatcaaacattaattgtagatcatgttcccaatcatccatattattagattcctaaaacagaaattgtaagaatcatcttctctgagaaactttaacgggtgaattaaagaaactaattacaacaggtgttcatgattactcaagattcaaattgatctactattaatcatctttatgatatgaattatgttatggtaaacgacatgtttgataaagaaagtttaattacacatcagtcattgtcatatataatctctattatatacatcatcttcacttagatatcctactgcatcaataatctaaatcaagattgcttgcaccgaataacagacatcaatgaaccgcattagcaaccattgataaaagatttcagaactttaatatgttgctgactattttattcatgactagctaagtgatcttaattctccgcataatacaagtcatagtctcatgtttgaataaaaaaaattccaatatatattataaattatttaatattaaatattaataatttaacatttacgcatacatgaaaatattcatcttatttataaatggaaatatctttacaagttttcagagcataaaccctaacgaactccatcaggataaatggaaatgtcttatttatttaacattatgttcttaatgtttttattttacatgtttttttttttttt

SEQ ID NO: 52130 - DNA, 1289 bp, Cannabis sativa
aggaccaaacacatagatgtgagactccatttcatcagagatacaatcaatgaagggaaggtgaagcttctcaaagttccatctgctgacaatccaacggatatgcttactaaagctcttccctgtgataagtttaagcattgcttgaacatgctttctatctcatctttatgataagtgtctgttaccatcgacattagtagtgaaggtggagaattgttatttttggtttgcctaaactaatgtcatgacagttattataggtagttagttagcctaggtgtcacattctaataggttagttactgttagtttgttgctggcagttaatgttagttactactcttatttttgtaaactcttgttctataaaagggtatgtaactcaattctttaaactgttgtaattgacaccattactgaaataatacaataacagagcattgctcttttgctactgtgttaagtgttctagttttgattaaaacacattttaggttcattcttgtgtggttgattgatgttgaaccgtagtggacttgtgtaacatttggcaaaatcaaaaacactctctttaatttcttttttcaactaacttagagaaattgaaattgatggaaccttttgcatctaattagttcttggttttccaaacatggcagacaatcatcgcaagaaccatagaaaagacatgcttacgaataaaggatagacacgatctagagatctatctcaataatctatcaatgttcctaacctataacgaaatcatgatagacccaaacacacaactatatagtgagaatcaaataataagtgttccacattttcaacatctaaaccacaaatagggtaggagtatcttgacagatgttaaatcccagaagtctctctttagtttgtaatctatcaagcattattgctaaccaaaaagtaactttgtgtttagaaatattaaattaatcccatacctgaccattaccatttcaccttctctccttcaggatgaaaagtcttaattatatccaaacccaatggaatagctgccatttgcaaatttgtgctcggttagaatacattgaattttctctttaactttgacgatttgccgccaataccaactacttttcatggtggatttataactccacccatttccattcctcaaataaatattgttaattaacctttttcacccaaagaatgtcttgtttcattgctacagcccacacatacactactacaaaagatccaatttgcgtcggacaacacatctagccaaaatgatt

SEQ ID NO: 52131 - DNA, 1848 bp, Cannabis sativa
gagtccatgtccatttgtacaattagagatctaatatagctactagtctttcattgtcctattatagatagtctcttcgctctcagcaacatcatgctcctccgactccgggaaaagatctcaaattggacatctaataacaataattataataataaaatgacacgaacttaatatacaggcaaaatacactaccatgttctacctcagaaaattcatcagattgccgaagaaagttcacgtcatcatttgccagcaaaacctcaaatcccaattttattttattttattttctttcaattttgggtgagaatgagcaatcgggacagggtttcataccgtgcaattaacctttacgcaaaagggtgttattaactgtgtcacatacttgcgaacaaagatttcattactacttttatatgggcagttacttacatgctgccacaaaggctcagctctagttaacaagccaccttcaccctaaaagcatatcaaatagcagcagctcattaattacttaataaaagaagagcataaagagacctaccacactagacaaaacaagtgatgaagcaccataacatgcaacttgaatccaggtttataaaggctatccctcaacacaccaaatatgagttccaaaatactcaacaattattttttgtaaaacttgttgagaaactctgaaatctgtcagtaattttatagaaacacacacactctaagagcaggctcggccctgggcataggcgggctaggcctgtgcctagggcccacccagctcaggggtccaatttttttttttttttttttaaaattatacattttttttaccgattttgaaaaatgtcacattttttctaacataagggccaaaaaaaatttttctccctatggctcactttgtttcagggccagccctgtctaagaggctgtttggctttacagtttaaaaactgttttttgtttttaaaaaatgaaaacagtttttaaaaactattaggagtcgtttggcaaaaatttttaaaaactgtttttaaaaaactagaaaacaggaaacatcaaaatgctgtttttaattttcaaaaacaatttttttttttttgtctaacatattatattttatattttgctcacatactcggatcctagacccgaaactagatccggaggggttaatatcatggtatggtgctaaaatattgatatttgtaagaaaaaatctaaaaacagtttttaaaaatttgtgtcaaacactattaaatttttaaaatgataaaaaactgttttctattctcacttttaaaaacacaattttaaaaactgaaaactgaaaacacaaccaaacaatagcatttaaatgtctgaccttaagaatcaagcaaagatcacacaaacagaaaaatgcacctgaaactgttttagcatctccatgtaacagggttaaactagattcatcgatatttctttcggtatccctatgtaactaaattcatgaaaaacttctagaaacccaaaagtaccaaaaacacataaaaaaaatgtgtttatttagtaagtaacaaattttgcaaaataataaatatgacaatccacaaagtaatctggcaacagagttaaagtacatcaacaaagttaaagtaatctcacaatctacaaattttgtatttctataaataaaataaataaaaattattaatcctatcctattataattaaataaattactaccatcagattataaatcaaaggttataaaaatgctttcacatctttattttatttatagaaatacatatataaaaaatataaccaaccctcccatgtacaaagttttttttttttttt

SEQ ID NO: 52132 - DNA, 756 bp, Cannabis sativa
tttcaatgaaatttgaaaaaatctaacacacaatgaaagaaaaaaatgggaaagcgaaaaatcagaaaccactctacttgatctcgaacaatcaatgtagtgtcttagcagttgatccctctacaaaccaaaagtttcgaagaaaaacaaatgtgtctccaatcaacattgagaatgtcatgtttttataaaataaggtgtgccaatttcaacttcaaaagataaatataaagcacctaacataatacattcattttgataatttaatgtaatgcagattgaaatgggcaaataaaaataaatactgaaacagtattaataaataagaattactaataatggttctcccaatgaagagagattaacacctacctaaagtagagagagaacccaagaagcttcatcaactaagtacatacgtgccaccaatattttaattatactatgtaaaatatcttttgagaaactgaataatactctgcagggagaagtagattggattgagatgagagaacctcaattgagtatggcggaatattaatagtgggatgcgataccttgcagttcgcttctttcgttaatataaccgatataagtactattaatattatttattttaaacttaatattaaccgcctaatttaaataagaaataaataaaaaatattagtaagatgcgcgattaaacacctacagttagtttctttcggtaatataaacaaacataactattattatattattatttattttaaa

SEQ ID NO: 52133 - DNA, 3020 bp, Cannabis sativa
aaacaatagtacataatgcacaatgttatttaataatccctttactttagttaaataacatctccaattaaaggttggaaattgttgggaataattgtatataaaagtatgttaagagtgagactagtatagtaacgcatacttattgaatgggaagtgaagctggttcaataagcatgattagcagaaaaggtagtagtacacctaaaaagaataaagaaatataattctcttaatttctgtggaactgattagtttattggtgctcatatagtcatatgttagacatggaaaacaaagcacagcaatatgtgtgtgttgtctttaacacgtgggaaaagcctttgatgtcctttggtaactaacaaccatataaaaaaacttggaaactatgcatttgatgttcatcttcttaaagagttcttcagtaagcaagttcaatacttcaacactaagcagagaaagagaaaaagaatgtacaagtcgaagctgcaggagctttgccacaagaatcaatggggtttaccaaagtacacctctatgagatatgggccagatcataaccctctctttggagcctctgtttgagtcaatggcatttcttttgactctttcgtcgtcttcaaatccaacaaacaagcccataaccatggtgccatgcttgcttttcttcacttcaattctccacctcctggttcactttctttccttctttcttgtgttatataatggtttgtccccaattagtttctttcattaagcatattgattcttattcgattgtgtcatcaatggcataggctgaacatgctgttgcaacacctatggttgaagaaagcaaccagaatcttgatattcgatcgaatgtttctggcttgaaaagtggtaaggagcttcaacttagtaagtttttaaaagctttcttaagctaacttgatttaccatactcagaaactactccaaaaaaaaaataatgataataataattgcttgttaagttaaacaatagctgagattataaaccatatcatttttttttgatggtacttctttggctaatgtgatatgtagaaacatatgtctcttagaagtatcatattgctattaaaaggtcatatgtacctttatatgtggtgaaagattgatatagaataaaaaggattgtaaagattatgctgaaatttgttggctgtaacatccttttgcttttcattatggtttagattcttcaacaataatcaaaaccaacaagggagaacgaagcatcgaagaaaaactggagattctcaagatgcagtcagatgatttgggcatcagtgttggtgatggtgaggagactaaaggtacataatttcaaagtatatgtatatataattctatgttatacagaaaggtaattaggtagtatctattgaagtgaagttatttttgttgggattgtcaatagtttaatttctcgagagtattatgttttagtcctaatattttagatttttcattatctgcaatcatccatagtattcatgtgtttcttattttaaactatcaaagttcatggtgtcaacttctataagttacacaaaattgaactaaagcacattagtctttgttagaaatgttcttttgaacccttaaattttttaagactaatgaaatttcactcatgtatatatataaaactattgtccagtcaagaagcaactgcagaaatatgctagacagagaaatttcggtttgccagtgtacttttgtgaatgtgatcagtgtcctgaggccactcagtttatggcaacagttacagttggtgaccaaatttttgagagctctggatccttcaacacttcgaaagacgctgaaagtgatactgcaaaggttgctttaatgtctttcttaatggaaaactttcaagaggcaagcactccaaagtagctaagagctttttcttttcttcacaaatctttagatgctgcaaagcttggtgttttatagaactgtagttgtatttagttttagtgaagaatgtttagaatgggtttctatattggaattttctttctactgcttcagttacatgttctgcagcatcatatctgtgtggatgaatatatagaaaattgttagtctaatttacttttttccatctacaggacgagtctcgagtttacaagaatctcttgcaagagctagttcagagagaagatttaagcactccagtttataaaactataaaacgtggtgaaccccacaagcctattttctttactagtgtggagctggatggagaaatattccatgggaaagcagcaaaatccaagaaacaagcagagttggatgctgcaagggctgcctatgtcgctcttcaggaacgtaagtccgaaaaaacagttcattctttctaattgattccttttgctgactctaatcttctatgttcaagtgaatcttattttggtagtttgactagttaggatgtagcagctttacaagtaaatcagaaactggaatatacattaaaaaggtaaccaattaccatgaaaatagtaaattatgaaatgaataatgtgtttattttcatgacatctatcttcaggtggatcaattcagaatgtcaacttcacttcctctagtttaggagcacatactcccaaatcaacttggagctcttgtgtggcctatgacttggggcagagtctaaaacaccaatgcattttggttccacatcaacctcagatttatgttgaagctaaagagaagtttggtacattagcagattcagcagaaaccactgtaagcacaatggaagtggacaactcataccctgcaataacatctcatatggtaaatttgagtttatatttttttttttttggtaaattgcggcataaatacttaatgtttcagattttatacacttaaatactaaatgtttacatgggttttttgcactattttttgatagttttgataccttttacgacttttgtgccttttttggcttttgtgccattttatggcttttt

SEQ ID NO: 52134 - DNA, 1209 bp, Cannabis sativa
agagttatagaataccaaggatcttcctcttcacaatatttctactcatataattatagtcgtgctcacgcttccaattataattatcatatttattggaccaaacattctattttttggcattcgcattcttgtacaaagaataatattggaaagcttccttcctgtttctgaattctggtttgataaaataaataatacctttaatagcactaggatttccattgtttaatgaagctagatataatggatacaaatattcaaattagcgatgatcttcttcatttattttttttaatgagtatgaagttagtctttaaagtcaacctttcttaaacagaataatctcaatttttacaactttcaccattacacaattgttcttgacagcttggaagtgaagatcgaggaagaagacaaggaaatctacttcttgaattccttgccagctcaatatgactagttaactgtccctaaaatattgaggaaaggtttcaagaagcaagtcaaaggcttaatactcaagaggaagagatcaacacaagggacatcatccactaaaaggaagaggaagaagtctgagcgtcaaggaaagtgaggtctcaatctagggatcctagaaccaataataaatgctatcactgtggcaaaataggtcatataaaaaaaaaaaaaaaattgttatgaactgaagggaaattgccaagagggtaaagaattgataatcaaaataataaagaataagaaacaatagccaattatggagagcattgtgaagatagagaggtgttcataagacagtctgcaacaaaagcattggtcacaaatgaagtgcctcagaagaatgagtggatcattgattcaggatgcatgtaccttcaacatggcaaacaataaaacttggataagagacctgagagtccaaaaatatggcaaagtgatatttggcaatggctaaacttgtccaattgaaggaattagaaatgccatgttcaaaatgaatgatgggacaatgcaagaaacaacgtgccagaacttgcgcaagaaatttgatgtgaggtgaaaattattgagtcatcttattcccttagccaacgttgccacatgttcatgccaccgtaattgatttcatttttggtgtgttataagaaatgggcatcaatgaggacaaatttcgttggtaaaaaatccctttttcgtcagtattag

SEQ ID NO: 52135 - DNA, 1665 bp, Cannabis sativa
aaaaaaatgaaagagttatgaagagaataaatagaattacttttacaaatagttttttttttttttgtttggtagagataaattcacacctttgagtttgacacctattcatgctttaattgaaagtttttttttagttttattagaagtgataaagtgatatgttatatataaatattaaagatagatatgtaattttttttacatacttaaagatttatttatttattatcattattattgagttatatatatttatggaaaaaaaagtagaaataattaatattggtgaaaaatactttttcattatacgtagggtaatttagaatatttaaatttggtaaataattattagaaaaaaaggtaaaaattaaaaaaaaaattaatatttataaacataataaaaaaaattaaaaaaattagacaattaaaaagagaataaatagaattacttagagtgatttacaaatagtcttttttttttggtagagataaatttacacctttgagtttgacacctattcattctttcattaaaagtttctttagtttaattagtgtttgataaagtgatatgttatatatagatattaaagatagacataaataattttttttatatacttaaacattaaaaatttattaaaaaaatgagaaaattaggaaagaataattagaagcatttgaagtgattttagagtgtaactaccgcctcatacttttcctttatacatatatagatatatagatatatagatatagatttatgttggttgcggttttttatgtgaattctataaaaaaatacaaaaaataaaaaaaacttataaaaataaaaaatgccttttttggaatgggagttaattttggttttgaggattttgattttcatattagagtaaaaccatatatagattattcaaaaaaaaataatggtatttttattttgtatttttttaactataataatactgaagcaatttcgtatttaaattcaatatcccaatagccaattaaaaatcatatgactttcttatcctttgataatcaactcgaatcatcaaattcataatttcgagatctttttttaatgtatctttcatttttctttatacaaaaaacttggaaacaaacaaaccgcgcttctcgtgcgggcggttttttttttcgtttaatgcgaatattttcgtaaagtaattgatgaaaattaacttataaaactatattaaatttcaaattttttaatattttcgatgtatatgtatacatttttattactaacaaatttacctattttttaactcttaataacacaaaaaagaataatagcattatagactttttttaataattttgaacttatataaattttaatttatttagttaattgttgtcatcttcatattttactaacactaaattcaaagtcgtgtaaaactaagtattgattatttttatttatttatttatattattaaatataattagaaaggtgacaaacgataaaaaaaaaaaatagattaatatatttgaaaaaaaattgggtataaattttaagaatactttattttaggaaataattttttatttaaggaaataaaataaataattcattttctgataaataaatattttatattcattaaatctggacaaaatcaatta

SEQ ID NO: 52136 - DNA, 916 bp, Cannabis sativa
ttagcgagctgcacaatacgttaaaaatcacgctaacatgcctatgctagttagggtgttacaacatatctaattcaagccttttcaccaaacttgcttctccgattagaacagtttctccttggagaatatataaaccattgatcttttcatctttcatcactatcagcaaacctttggtgatcctcatgcttctgtgcatggacttgtatctgtaaccttcatcttcatgcgcgcctagggatatgaggttttgtcttaagtccagaatatgccttacgttcatcggaaccttgatgatgccattatactgtttgatggtaatcttttcggttctaatgaccttgcatgaatgatcattttccattagaactttacctccatcaactgatctataatcaaaaaatgattctcgacttggacacatgtgataagtgcatctggagtcaaaaacctactccccgttcattgaagaatctgggattgagaacaattctccatccgtggagcagtcatcactatcctctgtgattgaagaagaatccttcccgtggtgataatgacggttgtccttcctatctccattgtgatatttgttgaagccttgctgttccctgcactttttgcaatatctttgcaagtgtctggaccttccacaaaagtaacacttttgaatttccttctctctagactttgatcttgattgagagtgatggtgtttattcattgaatttactttcttgggtgatctccctcttgccaagaacactctttcctctttgatttttttctccaattgtaattcgaaatcttttgacttgagtgtggcaagaacatcctccaatgtaatcacgtctcttccatacttgatactagccttgacatcttaatattcgattgggagcaatttcaacaa

SEQ ID NO: 52137 - DNA, 863 bp, Cannabis sativa
tttcaaaatataggtcagattgggccgacacgcacgtatttacaactatgctcaaaaaacccaacaaccctttacaatcttgaatcacttggccaaagacagatagcatctaaccattgctcagtatgccttgaatcgccaaaagactatgtttgagaaaagcaatgcgtcttctactaactcaaaaactttcttaattcgcaacgcctttaccagctccaggcactttctactagtgttgtaaatataagcatgactttttgacatggtatgcaattgacatgacccgagaagcacacgcacaactaaacacgaaagcacgacatgatacgatgctacaaattggcacgacaatcccaaaagacacaacacgtaaatacaaataaactagcgtaaaagacatgacttgtcaaattaataaagtctatcatttgaaagtaataataataataataatatatttgtcaatcaattaaaaaaataataaaatttaaatataatattaaagattataattctataattaaaactactaaaaaatataaaactaaaactatatattaattaatttgtagagtgtaaattttttgagtacttaaatatatcacaattctaataattttttatacagtataatttttttgtaaaatattgttgaaaaatttataaaaagtaatagaaattatatataaaaaaattcatataatttaataattagcttattaattataaaaaatatgaaaaaagtaaaccacgaattctatcctgtatataaaaaagggctatcatgtttaagaaaaaaaaataatgtcatattaaaaaaatcaaatcacttcatattttaaaataattttgagatttta

SEQ ID NO: 52138 - DNA, 553 bp, Cannabis sativa
cgtccgccaccactaccgaacccatcaactgaaccactgtcggagtttcgaccacccttgccggagtttcgaccgctagaattcttattattttttctgtttgtaccatttttgtcacgaggattattatgattagaattaccttgagaagtattttggtgattcatactatcatctgaagtttaggaatgggatacaaggacagatgcttgttttgctcgctctaaaatggtggtctcttccaaggcgagtttggaacggcctgtagcaaaaataggtaggcttttcttgttttgcatcacagtgacaaaattagaatattgttctgtcaatccttgtagcattctcaaaaccatactttgataattgacaggagctctgacattggcgagttgatcggcaagacttttgagacgattgcaatacgtatttgtcgtcgaaaaatccgcaagacttgtgttggtgaatgccttattgagatacaaggcccttgagtttttattatcatgaaagagatccgcaacactgtgccaagcatgttcagccgagtcat

SEQ ID NO: 52139 - DNA, 1118 bp, Cannabis sativa
  modified_base (936)..(936): a, c, t, g, unknown or other
acaaaaaaaagtttgtaatttaatttttaatgaaggttaattgtgtaatttacatagtaaggcctaaaattattctcacttttatagaagttatagatatatttgaagttagtttattattctttgctatccttcatttaattttgctatttgttattttagtttcaaaaattttaattttcattacaaaataaaaaataaaataggatattggtacttgataagtcttctttatggaaacgataatcggtattattaggtatatttgcatatttcaatattattgcaaaaaagaaatacattaataaacaaagtggaaggtgccataggtacctatatccccaaactagcatattgaaagaaaatggatccatagataaatatttgcaagtctttttttttttttttttgcatagccaatttcttttttttttttttttgcataaccaatttccttttttttttttttttatttttaatagaatatttcaaaatggcatctaacatttatttttaataaggactgcacctaacaaaggtgcctaatttttgtgaacttttttttaccacatgtgactatttaatgagtactaaattatgaaatatttagttaatttctttgccccgctccaatatataatgctataaatagcataattttctagtcatagtaattcaaaaacaattaggactaaagaaagatgaagtactcaacatttttcttttggtttgtttgcaaaataatattttttttctctcattcaatatccaaatttccatagctaatcctcgagaaaacttccttaaatgcttctcgcaacatattcccaacaatgcagcaaatccaaaactcgtatacactcataatgaccacttgtatatgtctgtcctgaattcaaaaatacgaaatcttagtgttgcccctgattttgcccnatatacgtggaccaaccagataaggacacgtggatcaagcaattcgcaatatttgctaagtctttatgccataaggtaacatctaggatgtagcccccggagaaggtacatggaactctatatgctcccggaagcttatataacgctaaggcatctctgcgaggtgtcaggtttctcctgag

SEQ ID NO: 52140 - DNA, 1453 bp, Cannabis sativa
agagagagagagagagcaagagaaaggggagattaagagagatgaacagacgaaaaaggaaaagaaagaaaaagaagaagaaagaaaggaaaaaaagaaagaaaaaaattatcttatattggaatgaaaccaaaatgaaagttttggaggattttgccaccatttacccacaaaaaaattatcttatattggaatggtttttctttccgtttcaaacaatttttatcttaggacagatcatcttttttgttaaaacaatttaattattacttcgtatttaattaattaagttatttaaaataatcaattagattgtgattggttgatagtaatgaaatagaaaaactttttccacagccattcatatgatcatgtcaaccaatcaaaacatataataattttgtaataatttatttaatttgttgatattgaaatctgtagtggcggaactacttgtatctatggagtggccatggccccctaactttttttttaaaaaaaaatatgcataatatattaataaaattacgataattagattttaattatttgaaaaatgtgataattctcttattgctaagcctaataataaagtgtgaagttgaaattgaaaaagaagcccaaacccaatagcacattcaaattagttatctattttatggtaaaaagtgacaaaaaaaattatttgtataatttatttttgaagagtaattttgtatgatatatatttatatgtctttatatatgtattcttatggtatctaatacaatattaatatgacattttataagtggttagcggtttcttatattatttattaaatcaaaatatttaggactcgatattattttacaccaataacaatatatcactttttatagtacttggcattataaagtgtcctttattatttctcattattttatatatgttgtataaagctaattaactttttatattgatttataaaatactacatattaaaaaaaattaggtgaaaatacattttatttggcccctccttatttcgtcggttccgccactggaaatctggataagtttgattcttgatctcttcaaaatagttgcataacttgttgtgagtgcggtggtagattattactaatcacaagatacatgtgattgcatttgcattacaaatttcctatggggagtttaatcacgagactattctaagtttacaaaacatagctacatatgaccaatgacatttcatgagaattccatgcttttagccaaaagaattaatgagaattataaattggaaaagtttaacaattgataataaatttaattctctcttcttttaaaccaacaagtttttacataaactaaacagttgaaccataggaaaattaaagcaaaaagctatatgtaaatgtaatatgtatgatagcaaagtggcccatatcacattggaccctaagccca

SEQ ID NO: 52141 - DNA, 1351 bp, Cannabis sativa
gaaagaaatcgcattgtccatggttccaaggccaaaccagcagctgttcttgcatcctttgctgacaactacttgacaaacttcagaacagcaaggaacaaatatcatgttgctgatcctctcattcatcaccatccgagaccaccagaagcatctcttccatggcaactgcctgctgctggtgacttgaaactaaatgtggatgccgcggttgatgctactcgtaaaattactggtattggggcagttgttcgtgattctgcaggggttgttcgtgctgccttggccaaaccaataattggcaattttgcttctcatgaaacggaagctaaggctattttctatagtcttaattgggttttacagcttcaaatgccaattgctattgtgaagacagatactctccttgttgccaacgctatccgaaatggctcctctgctcttacttcctatagtgatttaataattgatgtaactagtcttttatcctttttccctcaagtgaatgttgtacatgctaaacgttcggccaatatggttgcgcatactttagctaagtttgctttaggggtggatgagacttgctcatggttggaggatttacctccttctttttactctattattgtaaatgacattccagtttaatttataataacaggtatcttttcctcaaaaaaaaaaaaaaagataataaattgaattcaaaatgtattaaaaaataataataaaatttgaaaattaaaaaaaattgtagatttttcgaaaattaaaagaaagtacacatatattaatatgtatatgtatttttaacataaacttttaatttttttttgctaaattatagcatgttgagaactgataatgtagttaaattattaaaaatatctattatattttacgtaattaatttaacactactatgtacaaaaataggtttttggatcggtcaatgcatcttgtgaaacttgttgactgacacaaaagttaacccccacttttttacttcggttgttaaccgacactgataatatttttttgcatcggttgctactttaacactaaaataaaaattgacgctaaagataattttttttaaaaaaaaaaaaaaaatacaggggtcgaatattgtgttggtttttctcagacgcaccttttagcgtcggttataagatttttgcatcagttatgcattgacgcaaaattttcctcaaatcacaaccaacgctaattttaaaaacatcacagattttaggcctatttcaaaaactcaaaaattaaaacttactacatattaaatttaacctctcatctatgagccagccttaactcaacctctctctctctctct

SEQ ID NO: 52142 - DNA, 644 bp, Cannabis sativa
ttctttcaaggcacatcaaaaacacataaataggcaataaatcagaaaacccacaaaagaacaatcaaaaccttgacataaaaatgattttttcactgagaactcgtcccatgtaaagagtataatacttgggttcagacaaagcctggaaaattgatttggagtcatcattgctatatttaaaataatgtattggggtcaaaagcaatcaacactaatcatgatacagattcaaggtctcaatgttattttacaatcaaattaatataaaacacaaatcattcgccaacaaattaatataaaaggaaacccaacaaattcccatcccaagagaactaatcaatcaccaagaacaaaacacaaatataattttaaacaaacaacttttacccaaaattaaaaagaaaaaaacacacaatattttaaaaagccatgtatacctctgaatttgagtttcctttagtgtgagagagagagctaaggagatgataggttcctctgaaaaaatcaaatcaaatctaaatccaaaaaaaaacacagttagatagagagacacacacataccagacgaattagggggagacacacacacaaactagacgaattaggaagaaaataccagacgaatctaagagatcgatgtc

SEQ ID NO: 52143 - DNA, 764 bp, Cannabis sativa
ataatatttggttattactaatcactattttttatattaaaaagtaaatataattttctttgataaattattttttccactagatcaaaagctatatataatgaaaatagtgtaattgtctttcaccatccattcaatgaatgatgtaaaatttatttaaaaaaattgtaatttttttggaatatactctaatgcacaatagcaattaaaatgaaaattgacataaaagtaattaaatatattttaaaaaataattacggaaatattcattactacaaaaagagggtatttacgacggttgtaaaaatattttttttgggaactgtcgctaaaaaaattaagcgagtgtttaaaactgtaacgtccttatacttaggcgtgctacagtgatttttcaattacagtgccatctttactaatcaaataaattttcttgaaaatcgtgtcaaattaaaactttagatttaattactaaacgtaataaacttttacacatttctttacaaaaaccgggatcccgtatttaaacttttacaaaatatccaaaatatatttagtcaggtcgcacagcgctacaaaataaaactccagatgtcccgagaatgaacactccagggcgcgccgccatgacatatacaacattatcctagctcaaagctcacacatgttcaaccttcgcctttcctttacctacacatgaaagtaaaaccgtgagtcgacagtctcagtaagaaaagtatataacaaataatataataacgact

SEQ ID NO: 52144 - DNA, 1436 bp, Cannabis sativa
tatatatatatatatttggtgacacatacacaataaggcttatacacacatgtatgtacataatataataataatatatattaaataaatatgtataagttagggtatctccattcaatccaaatatgtatagagagaattagcttcgggggccaagttgatatgatataatatgagtctgtctatttcaagatttttctgaaaacaactttataaaagctacgttctttatataagataaaaccacatatataaaatagtaaaaatatcaactatacaatatctgtgttaattgctaagttaattatatttgagaatcgtaataattaaagagaaataatgtataggccaaaattcactgctgtcttctttctcattcttcaatatgcaaatagaacaagaaaaatgctccatcacgtacatgtggaaatgaaagttttactaatttaggtttaatttgtatacatacctttaaaaatacacaaaatactatttgttacgaaaattttaatattttttttcaacatttttgtaattaaaccctaaattaaaaataataattaagaaaattatatgatacaaatttaaatctattgtactatttaattccttttcgttaatttatatttatgattttattgaacataaaagaccatatttaattgaaaattttatatagactaaatatttaaaaaaaaattacaaaaatacattaatatgaagaaaaaaatatatttttacgttttaaatttttttattaacaaaaatacctttttattaaaaaataataaaccgtctttttaattgttttatagtttatttataattatattatagttgtcaaaaaattatttttttgattgttttaattattttatagtttagttataattgatttatagttgttataacattaatttcttatttttttttttagttttttcttattttttttacttaataaaatgtatttttgtaattttaaaattttacaaatatatttttataaataaaaactttagaccataaaattataaataaaatattaatttttttttaaaaaaaattctcctataataataaatgaggtccactataaaaatacgatataaaaaattatatgcgggtgtaattataagtaaatataattttatataacataatttggaggtgcacttttattagttccatatgaattttaaaggccatcaaccatgtccaacactcaagtagtgttatatcattattatgtaattaatattaaatcttttatattttaatttaataacgattataaaaaattgacaacgtataagacgtcatcttatataattatgttggatattattcgtatcgttgtaatacatgcagaaatggataacttataagacctgaaaaagatttttcctaattaatcgactaaaattattgattta

SEQ ID NO: 52145 - DNA, 1280 bp, Cannabis sativa
aaccccctctgcccagctgagtagcgagtacttcaaaacttcttctttttttttttttttttttgcaaggtgaattcaaaacttcttccttagaatcacctagcagtagtataaatgatccaagatccttgattttggttttctgaattgccattgtgccttttactcccataaaattttggttttctgaattgccattgccattttgggtgaattgggtagggttttagtaaattctagactctagacatgagacaaaataaaatcttcccatgagaatatctaatacataacaataaattttaggaggttacctgaataaagagacgatgaagaaaatcttgctcagaagcagcaaaattaggaaatgccttgcttatatcctttaagttcatatatagaaataacaattcaaacaaaatcaaactctattccaaaaaatttctttgcaaaataatcttagttcaaaattacacaaacccaggtcaccaaagtccaagtaaaaccaaaacaggttaccattttccttcaaaaaaaatacctgcttagaacaggcagtgagcaaggaaactacagcgagcttgaaagatttcttcaagtccgactgtctcgacccaattggagaagaacccacttcgtccctgtattccattttacagactgtaaggaaaagaaacaaccattttagcaaccggtattgaagtttggatataatttaggcggttaatatcgaagaataggcacaatagagatgtattacccagaatgcttaagataaatttctgtgaagagagacgaaacagagagtagagagatttttagggaattttccctctccctcctttttttgatgaagaaaaataaattttgaatgagtacaatttttttttcaaatatgttaataatttttttttttttatcttaacaatcttaaaattatatttggaagttagattttggtaaaaaaaaaaaaaaaaaatcttatatttggtatggaaagaaaatttgtataaaaaaaatatttaattcaataaaattttcgtatatatattttttttcctacattattcacaggttcacacttttccttttctcactaaaatttaatatcccaatatagcctaaagggaatttttttttagagaaagagcctaaaaaattttgtttgcagcccataaaagtataagtacacttaatattaaaaaaagaaatttttacatgaaaaatcttttttacacactttattacataattaccctcacacgcctattactacattt

SEQ ID NO: 52146 - DNA, 799 bp, Cannabis sativa
  modified_base (166)..(166): a, c, t, g, unknown or other
catcattagctgcttgttgtttttgttcttgtctagcaagggacttcttaattttctctttttgttattttgaaggctccttgtaagctggttctcgctggactctagcattgtgataaaataacatgtgctcttgcaacttagcaatcgcacttaagatcctacngtcacgatctttaacggacaagctgctaggtacctctgcaatttctaacctccctctggtatgttttgtttgagctggccttcctacgagtataagaaagagaaaaatctcagccagcagtaaataaaaagaagtataaaaatacacgacctacttggatgacaattaaagttcttaattcctagcagtgttaacacgtagaaccacttcaatttccaatcgcccatattgaaaattgcgccctcgattccatttatctctgagttggcccatttgctaaagcagtaaaagccattttcattgccaacaattttaatattgtagaattagttgaaatcttcgatagtgggttctccttgtgcatactccttgtacattgtagagaacctgaggatgatcctataactatttgaggtttattgaaatggtggaatgtcatactgggttaaaatacctttgacaaaatggtcgaaaggaatttcgactccacaacaaagtatgggaatcaagatagttgtgacatcagatttcatgatcttgggattagtaaagagaaggtatggtcgctgcctagccactggctttgtgcaaccagtttgaattagatttagtttcttgaaagaaactaagtct

SEQ ID NO: 52147 - DNA, 1749 bp, Cannabis sativa
  modified_base (307)..(318): a, c, t, g, unknown or other
tagagttggtgaaggattattattgtgagatctaaggccaacgtggttgtcgatgcattgagtagaaaaggccaaagttaaataaatacaatgaagcaaatttcccagtagttagcagatgaaatgacccgatcagatattgataatgctctgcgacagaaaggagtcaaggactagagatcttgaacggaaggagtcattgtattccagtgcaatcaatgtaatatttttttaaacccttatgtgcttatttctttatttttgagaattcatattgacgattttaattcaacatacttgttagtannnnnnnnnnnnggtaaaatattcccaacaacaacaactgccaagaacccattcagcatgatctttgtgctctgaactagtgcaggcatctccaaagcctgaagattcatctcaagccttgatcacaacaaaacaatttccgccagaactctaattatcatccattgcagcattggaatcactgccttaaagactgcttaattttaatatgaaattagcagataattagggcttaattatgagtttagactaatatttatgatttatgaatttatggagatttatttgaattcagggtgtattaattatgctatatatttatatgaaattttacgtttttcatgtttcttgcccaacaacaattgaacgtggcgtttgaccaatagaatcacagttagtatttttgtagtaatgagtcaacttagatagacattaggaatatcaggaatagtcggggtttgggaaataaccaaattacccctaggtgtaaactgcactttttggagtgtgcaagggcaaattggtctttctgccttttttcctcttttgtcctctagcggagttacacatagtgattatctgatttttgttacatttaattagataagcataatttcatttagtggaaattagaatacaaacacaaaaaccatttctctctccaaactctctctctttctcgagctccctagaaaaaagcaagaggataggattttcttcagcaattcagagtaattatagcatcattattgaggtctaatcctagttaagcttcttagctcatccttttgtgatttcttaaatttcaagatagctttctttgcatgtttttagaattagggttctgtggttttgtataatatttgaatttgttttctgtagttgaattattgttatttgagttgatttggagttgtttgatggcctggttgtgtgtttggacaaggtttgagcttcagagctcaaactttggtctttaattgtcatttgagtttctggagttgtttctagtttttattgcttggagtatgtttgttgggatttaattagaagctttggaaggttttgtagcatttgggttcgaattgaagttgtggtggggtttttaggtgtttcctacactaaacaggtcgactggtttagtgggaccgataggagcaggaaatccagttggtccccaagaaacgccacagaatcggtctccagtttgggcaattttgggaaccttagcttttcccgtttttgtgatattttgggtatttccatgttatccatcgatagggaaacttttagtttcaagtttatgtctcccaaaagtgatttagcgtatcactcaccaattctccaaataatgtgatttaagggcctgtaaatcgtcgagcagcagttccactcaagttgactggcatgcttaaattcagaagtgaggtaagattagtataa

SEQ ID NO: 52148 - DNA, 919 bp, Cannabis sativa
ttaatttacaacctttatatatattagaaaataattacaaaaaaatgctctatcttcttttatctccataggggcaattttataattttgtaagatcacctcaaattcataaattaattaaaaaaattatccacggtaattttttgtttatctttcttttaattatatttaatcaaatgataatatctattttattatttaataaaacttaagatgtattaaataattaaaattggtttcaaattcaaacttgaatttaaattcaaaaaccaaaaacagttttatttcaattaaacataattaaaataaaggtaatttaaagataaaatttatttaataaaaaaataaatataaaacgtatagtgcatatagagtatatatgtatatatgcatatacacatacatatatatatagtgaaaagttacgtgcgagtcacgtatactaaattttatgttaggtaaattttatgctaggtattttctattttatttaaaagtgataaattaatattaataattgaaaaaaaaaattgttattagttattaagtgagattattattatgtatatctaaataatataatttataattttgacaattaaaagtaaatattggatgattaaaaaaaaaaaaaagtatatttgtcaattttttggttcagatactaagttgaaaacctaaaactaaaataatcaaataacacatagtcgactctagttacgatttaaccttcaaccttcattttcttcacttgcggtagtccactcgcctcaagcttttctcatgataagttgtaacaaaatatagagacaagtaacttacaaaatatacaaagatgaatggaagttagtaaaagattgaaaggaaaaaaaaaaagggaaatttgaatttgtatgcttgcatttaattaaaatttatc

SEQ ID NO: 52149 - DNA, 1453 bp, Cannabis sativa
tatattgttgtttttatgttgttcagttcgtgatatacttatagtttgtataactattaattgtatttttagcagttcattattttattaatatttgtcatcctaatattttcatgttcatggtaagacttctaatgttgttgacgagttcaagctaccaaagaaaaatattgccaaggtttacatattatttttttattttgtgttgtttgaaatattctctggttgtagttcattcatttaaaaaaaatatttcatagtagaaagttgttttatagtttgtgtaatgttgttttaaatgctataggaatgagattatatttatgatcagaaaaatttattcgttgcaaaagctttgtctataagtaccttcaaaattatccaagagctcaaggttttcttatcacctaagcaacttgaaattttttgaaaattatgatatttttatgttattttgttgttgcttttatgttgttttaatgttattttatagtgattgcagatgttttgtagtatcgtttgctgaatactttattgacatgaaacatattccctctgaattcaatgttgagaaacactgtgataggctgattgtgatgttctacaagtatgtatgctcccatggaagaaatgaataatgttgatagtgatgatgaggctcctcgaaaggacacaaagaagattttgttttagacccaaatttgtttatagttgttatttctagttgatgaagaaagtgttttttttaatagatacacacatttcaatgtagttgttctttttttttttttattttcccgagacttttttatttgttttagtttgattgaaagtgtaattttatgataattgtatttattttttagttaacttttgttgtttagttaacataaattttatacactaaaacaacataaaaagaacctaactacaatacttttttaatcaactaagcaggaatctgttttgcatattgttgattttttctaattatttgttaaaaagaaaagtgagtaattttttttctaaaagaacttattttttcacatagttgttttatgaccatataatattaagcaacatattcacaaaatcaactcttattgattcaaatgttacttttatgtaatatctatattaataattttagtattcatttgtcccaaccatcttttaaacaataaaaaataaaaaaaaaaatataaaacatatgaaataaccaatgaaattatgtttgatcatttaaatgtataagtgcagtagttttatagttgctgaagtgttgtttttcagttttcatttgcaatgttcctacatatttttctgttatgtcctttttgtccacaattggtgcacttgttttgtgtttctcaagtcacagtcagtcttatttgccttggccttctagatttgactctttctataggaggcagcactacgatgtcttggaaaa

SEQ ID NO: 52150 - DNA, 1089 bp, Cannabis sativa
ggctagccgatacgctacctgtccgaccttctcgagtattttgaatagcactatgaacgaagggcttaacttttccctcatcctatagcgctttacacccttcattgttgagactcgtaagaaaacatgttctcctacctgaaattctatgtctatgcgcttaggaccagcataacttttttgcatgatttgcaaagcaagcattcgagccttgattttctttattgcctcactagtccgctatactaactcaggacccaaatatttcctttgttcggtcttatcccaatgaattggaaaaagacatttcctaccatacaacatctcatagggagccatccctattatattctgatagctgttgttgtaggaaaattctatcaaaggcaaatatttactccatgaaccctcaaagtccatagcacaggctcggaacaaatcttatagtatctaaataaccctctcgaactgtccatcagtctaactgtgaaaagttgtactgaacttcaactttgtacccatggttctctaaagaattttccaaaacttagatgtgaacttcaaatctctatccaaaataatggatttcagagccccatgaaggcaaactatctcttttacatacaactacacatactaatccattgtgtaagttgtaacgccttgatacttaggcgcgctatagtaattttccaattaacgtaccacatttgctaatcaaaggattttcctcaaaaatcgtgctaaattaaaactttgaggaactttaaactttataaatttatatatatttatttacatagaccgggatcccgtattttaacttttacaaatattttcaaaatacatttacaaacttgtcacacaacgactacaaaatacaaaccatgatgtcctgagatcgaacactctaggtcgcgtcgtctcgacatgtacaatcaccatccaagctcagagctcactcctgttcagcctttgccttttctttacctacacataaagtagcaattgtaagtcaacagactcagtaagaaaagcatataacaaataatatatcaccgacttatatctaggcgcccatacacctat

SEQ ID NO: 52151 - DNA, 1378 bp, Cannabis sativa
  modified_base (366)..(367): a, c, t, g, unknown or other
  modified_base (549)..(552): a, c, t, g, unknown or other
  modified_base (1115)..(1137): a, c, t, g, unknown or other
  modified_base (1324)..(1330): a, c, t, g, unknown or other
aataaccttttttttttcttttttttttttttatgatatgttcttttttaaaaaagaaaatttacctgataatttttttgtgaatatttttttttaaaggacacattagtggttttgttgttattgtaggaagtttcacgatcatattcaagtagtagagttaagaggaaattagactctataatctttttatattgtcttcttttatttttattctctttttttgaagtctatcatttttactttttttttttaaaaaaatactttacaaattttatccctgttacctcaatatactctccatgtgactcccttatgtcagggtattttgggtacagtatatatagaaagaggtatgtttcaatnnaatataaaattagagataaatttggttaattgataggataaaagaggtattttttttttaataaacccctagagttaatagtagcgctagagtgggctcttattggagcatatttttttgggaaatttatatggtatattaacttttgttatttttttataaaaatactgtcaggcggtatnnnntacttttttactgtgttttttataagtttcatactgctgtatactgtgttaagttttcactggtattttttagttgttctacagttgttttgagttgttctgttttgtgttttagtggtgttttataaaaacatagtatttttgaaaaaatttatgtgtaacagtatttttgtaaaaattaattcaaaattcggtatttttgtaagttactttttttttttgccagtgtgagacagattgtgtggctttatttatacctttggatgtgacttttacaattgggcttacttactctttcttgagtttgtttagttgttatttatgtttctttaagtcaactttatttatctttcattttggaccattgttagaggtttcaacaaatttgatgtttaattttcacaagcgtccctaatgtatgtttactagtcagctattatggttgtaattaccttaacatactctacatatgaataaataacttgtatgattaatgaaaagaaaattttatttacaccctaaaaaatttgaaagacactctcattttaataatttttattttnnnnnnnnnnnnnnnnnnnnnnngtactaagtttttttaacttttttattccaattcatatttttaaagaatatacctatcaaataaaataaattatattttaaatattataaaaaaaattaaaataaaaaattatatatgaaatttgtttagaaaaaaataagaaatatatataaatgctttagaaaaaatatacctatcaaataaaannnnnnnatattttaaatattatgacaaaaacattaaaataaaaaattataaata

SEQ ID NO: 52152 - DNA, 1031 bp, Cannabis sativa
aattagatggttattaaaatttttgattgctcctaactaagatttttgattcaaaaaataaatttgttgtaaattttttttattagattttaaagataaaagtataaattgataaccgaaagggacaaataaaataccaaaactagtacctttttagatgaaactctaaaggtgcactcttcctttcttgagatattcctataattttgcaaagtatttgaaatacgaagcaaaattagaaaaaagtcttaatactccaaactttaaaactgttttcttgtagaaacaaaacaatgtgcaaattgttttacacttttctatgtatagatatgcttttgtaatttatcacattgaagaaaagaatccttactaatctaccattcaagttaatttctgccattaattttttatttgaaaaaaataggaatgctcttaataccatccagatacatttctaaatctcactttaattttatgattttatgtcttacgatatctccacattcaattatttacactattttagaatttaatcttctacatatattactacaaaaaaaacatacaagccctctttatgatttgagaataaaatgaattaatttatgaaataacctaaatttacatgtatttaattattagaatatcctcttatatcagtttctctcttattattgcctcatgaaagtggggtaaaaacaaaacttagttagttattgagaaaataccaattttttgggaataaaatattgataatgacaatctccatcaattgtagataatttagtttatctttgagttgtaccacattcatttgaagtaaaatatttatatgtgagattataaactctttgagaaaaaaaaaaaaaactataaactataataagtgtagcattcctctatcatttaccttcaatactaaaagttgtatccatcactctaagcacatacagagcaagttttaatatttgagaaataaaataggtaatttacgttttaaaaacataacaagagaaaataatacttaaatt

SEQ ID NO: 52153 - DNA, 792 bp, Cannabis sativa
aaaaattcataactcactccaatcaaccccaattcaaaccaaacattccagacctgttctaaacatcctaaagaaatttccgaagcaataaaacacttttacaagcactaaatcaaaatccaccatgtgagagcaaagtttgagctcataagctcaaaccttgaacaaacctcacaaacagctatcaaaacccttcaattcaacataaataaaaataatcaaactccaaaaaacaaactcaaacaccaatagtacacacataactcaaacacccaatttcatgcaaaatctcttcacttaaagtttaagaaaacaatggagactaggtctagaactttaccttgatttggatcactaacacttgatctaacacaatgatttgcagtaagaaaatgctccaaaggctgttggtccttagggttcgaacaagagaaagagagaagatgactttctctcaaattccttttttcttcaatttttcttaattttccaaaaagatcaacattacacttagattattttaacatattgtggccagcttccactctaaaattcagccaccaaatctaagggtaaatgactaaaatacccttccccacaagcataaacaacaaaatggtccaagggtaaaatggtcatttctaaaatctcgactaatcccgacattcctaatgtctaactatatattctcgctacactaaaaatactaggatgtaattctaatagccaaacaccgcattccaatgttgtcgggcaaaacatgcaaaatttatgaaattctaaatatgacat

SEQ ID NO: 52154 - DNA, 770 bp, Cannabis sativa
aaaaataagagatgatttttttgctgggtttatatattaagaggagggaaataaaatttaagatgaaaaaaataaaaatttaaaatctaagatgcatgcagaaaatgaaatttcagatctgaaacgggtgaaattgaagtatgggaatcgccgacggcttaaaactaacagttttactataggaaacgatttagtcgacagttttataaccgttgacaagtccctacacgtgattttttaaggcacgtttaaaaatcgtcgtctatacctcccgacagtttaaaaccgtcagaaatactttattttttctgatagttttaaacactcgcttaatttttttagcgatagttcctcaaacaaaatatttttaaaactatcgcagatatccttttttgtagtagtgatttatatatattaatctatattgtaagagtaataatagtaaaactattattacaagacaagctttgagaggcgatttttctggccctttagaggcagtttttgagaaattcgcaaccgtaggcattgtataggtaactaaaattgtagcgaaggaactgaaggcatagaggacttctatggcgacgtttattacataataatagatgccataggggcttcgctcacgcataaaaaaacccctacgacttctattattataaaataactggagtcatatagattatatatacaagtttagttattgaataaccgaagctttatggcttcaatttatttatttattaatttttgttaatttttttaat

SEQ ID NO: 52155 - DNA, 572 bp, Cannabis sativa
ttgttaagcttactgtacctaactaacttttgctctgttaagttagttatctgtgttattcttgtacaactatgcttgtaactaacctactgtattaatccaccagtatatataataagagatcataaagccaatcgattgattgagcttcaccttttcattccatctgtttttctctctgtccatctcatcttctctcagctcaagaactctgagtttcagagttccttcatggtatcagagcaatgtctgataatggcgatcaaccagcaagaagagccccacctgctgatgaaagaatggctcagcaaaatcctgctgatgcaagaatggctcagcaaaatccacaaatcgaaatacaacctcctcttcccaacaacaatcttttacccttaaccatcagattggatcgatcaaactacaccatatggcgatctcttgctcttgctgctgttcgagcctatgatctagatcggttcattcttggccaaaatccaccaccaccaactcttcttgcaggtaatgttcctaatcccgctcatcaacaatggcttcgttttgaccagttttta

SEQ ID NO: 52156 - DNA, 1385 bp, Cannabis sativa
aatatttgatattataattaaaattaataaatactcaaattttaaaataaccataaaaaccaactttttagaaaaattaatttttcaaatttaaagtctctgaatatctaaaattaattcaagttaataataaaattaataaaaaataattttaatctaattattagatttatattggaaaaataagattctacataaaaatctaccaaaatttgaattttatttcattaaaaaataaattttatttcatgaccgagtgaggaggctgcgagtatggagatactttgtatctattgttgtatctgtgtgttgtacgtagatgatatatattcagattgccaacaagagtgtacaagaaatcaagcacttgaaactccagctaaagacggattttgaaatgaaggatttggatccgattaataagatctttggcatggatataagaagggaaatgcagaaaagactactgtacttaatttagatgagttacatcaaaaaagttctaaataccattgaaatgagtaattctaagggagtgagtactctactttcacaacacttcaaattgactgctactcagatgctgaaagatgagactagaaatcgaagatgttgagagttctatatgctagtgttgttttctccttgatgcatgtcatggtttgtactagaccaaacagagcatatgcactaaatatggtgagtagatttatgggaaacctcagaaaggagcattgggaagccttgaaatggattttgcgttatttgaagggtactaatgagaaggaactagtatttggtatatataaaacaggaatgaagacgtgatgttattaattgttatgtggattatgattatgtagggtgtattgatatgcgaatgtctttgactggatacgtgtttaatactataaatgtactaagcacattgatatcaaatttccttttatacgagaggttatggagaaagaagctgtgaagatttccaagttccaactgagaacaatccttctaatatgataaccaaggtagtgacaagtagtaagtttgagcatttcctaaagctaaatggagtccgctgagctcggaggggctgaggagacaacaacattgaaaataatgacttatcaagtgacttcaacttgaaactaaggtgggcatttgttggttatggttacaagttttttcatccgagatggaagctgttaattcgaagagctgatactagaagcttagcgtggatctggaaagccctatgcggaaggtcttgtagaatccgaaaggtatttctaggtaagtttgtaccgcatatggaatgtttctctcggatagctggtcattagtctcgaggtacactcccaaatagcttactgtcaatcttgaag

SEQ ID NO: 52157 - DNA, 910 bp, Cannabis sativa
ggggtagccattcttatccattcatacaaatgacctaatcagattaagtttttaatctcgtccttcaagttcttgcactcattggtgctatggccaatgtcgttgtggtattcacatctcttgttgggatcccttcgcgaactgctcctatacatgggaggaggctttcggtagtgtgtatttttccttgtgacaaaatatactcgctcctgcatgtccgtgagctccgtgttgcttatactccgtctggttgcgaccttttaacaacctcttgctctgagagctcggaggaggtcctgtcaggcttgcggtaggagcggattgagatggagcttgtccactcatccccgaggggttgttcataggattcccaaactgcgatgatgcgggagccaaggttaggctctgattatatcctggagtagtggagaattgtatgccgctcatttgaggagtggtttggggcatagctcccgagagctgagctccgggtatatatcctcacattccgattggatagtatgcccgtaggccactatttgggcttcttccaaattgatgtactttttaaccctcttctggaaatcttaaagattggctgctccctcctattgtaattcgttccataatggggtccccgtgtggatcccaccttggagaagtgcaagctgttgtccgtcatccaccttcttggtttttgaagcttcctctttgaacctttttataaagttcttcaaggtttctgcgggcaattgctttatgttagtcagagcactgacttcaagattaatttttctcgctacgacaaattgtctccggaagctgacttgcaacttgttccagcagtccactgatcctggatccaactttttgaaccattcctcaacggaaccacttaatgttagcggaa

SEQ ID NO: 52158 - DNA, 907 bp, Cannabis sativa
  modified_base (185)..(188): a, c, t, g, unknown or other
ggtggtgggttcggtgggttcatctttcgagtggggattcgtgggtggtgcgatttcaaacactagagagaaaagggaggaagagagagagagtcaatttaaaaatgaggaggtaaaagtgggtttaggtaaaagtttcccattttcctgttttacaaattatgtatagttttagattaggatannnnttttagtctctaatatgcatataatttcaaatttcccaattttattttaaaataaatcatatatatttaatttatttatttgatgacccaacacacattttatatgtacaattgtgactctaataaatttctaacattaaaaatatttattagaaaaaacagaataaacataattttatgtataattatattgtttaattttaaatttataaaataacagtgtatactgattaatattgtcattaattcatttaattgacaagtgatactgatgtgatttattttattgaaacaatagttcagagagagtatgaaatgaattggtaattaaaataaaataaaaagtaggtatttgtcacattccttaaaacgaactgatgacgacgttattatttgcatcattagagtgttgactatatctatatattaacaccgtaatctattctattgtgtttgttttcaaaacttcagttcttataacccaatgattccatttggcaattgggtttcttcaaaatattgtgcaatatatttacagaaattattcctgttgactcatcttagtcggccgttttaaggtgtataattcaaaattcctgttgaatatttttttttatttctttccgccatagcatttttgatatctttcatttaagtttagttatttttgttatttttttttggtaaggatctcccatttaagtttagttatttttgtt

SEQ ID NO: 52159 - DNA, 997 bp, Cannabis sativa
ttcttctctttcttttacatttttctctttgtaagcctaatttccacccgcactccctctctcttccattctccttctcgcacaacttctacaagtcaccttcggccaccttcaacccaaacgaaccccaaaaccgacttcctaagttcctaaccttacacacccaaccctttagcctccctctaagtcccgagatccaacctttctttgaagtttctctttctcgcctcaacctcgccggatttgattctccttctcctgcaactcttccccgataccaccgcagctggaggggttcactaggttcgttagtgattgtccctgggttcatcgtggtttggtgggtccgtcgcagaagaagaagaaggaatgggggaaggggagatctggttgttccactcgtagaggacttaatagagccttttgaacggaatgagtaaatagctgacaaaagtgagttttggaaggttttaccacaaaaaaatcagtttatgtgattaagtgtcactaattatagaattcaggtagttttgccgctaatatctcccactaaaaattgtcacgtgtacacttgtgtacgttgtggtatgtcattatggcacttgacaaagccttttaaacaggaggggtaaataacaatcagaaatgaaaattggagagttttatcactaaaaaatcgatttatgtggttaactgtcactaatcataaaattaaagtagttttgtcgtaaatatttttttttttattttttattaattaaatatgttatcttggaaaaaaaacattaatatatcattaagtaagtgtttcatctctttttcacatggaaagaaatccattaaactattcagacaaagaaaaaaagactactaaatttaactaaagatgatttgtattaaaaattatttatagttttaatgagaaatatatcactttattgaatggttaaaattaaatacattaggtaggaaattatgtgtagcacatttattttat

SEQ ID NO: 52160 - DNA, 1093 bp, Cannabis sativa
tatacactttgtcctagtagcccacactactctttatgtgtggtggattaatttagaagactacggtgtgagtttctaatcaacccaagaggatacgacttgcaaaaagaatcaaggataccttgatagacatcaagaggtaaatattattttcatctgtttacttttagttttgtatatgcacatatggtgatcttgggcatatgatacaatgataatcagaaacaaactctttcactgcgtacctgatttaagtaaaactaacactacagaccaacatgagtgtttctaacgtgctttgtcctcacccgcagcattcctgagaaaacatcctaagatgtcacccatcttgaaattactccaagtcaagcacgcttaactatggagttctttcgtgttgagctaccaaaaaacaagatgcaccttgttgatataggtgtgaactccaaaaattagtagggttgattatcaagattaatcaacaattattctcggtaagcgagagacatcgaatttaagagtcagtcgaggaatgaccaagttgacacatatggccctaggcccgttaatcccaaaaactagcaatgctaacttctgagattagttaaccgaaaattgagaagattaatgagaacaagctaagatagtcactctagaggggtagcgatgcatgatcccccacatggtttccatgtaagccacttggcatgcatgctcaaacgtcacttcacatgcatacttaagagtcactcggcatgccgctcaatgtcactcaacatgcatgcttaagagtcactcggcatgcatgctcaagagtcactcgacatgcatgctcaatgtcacttggcatgcatgctcaagagtcactcgataggcatgctcaatgtcacttagcatgcatgctcaagagtcactcatcatgtatgctcaagagtcactcaacatgcatgctatatgtcactcgaccatgcatgcttaaaagtcactcggcatgcatgctcaagagtcaatcggcatgcatgctcaatgtcactcaacacacatgctcaagagtcactcgacacgcatgctcaagagtcactcggcacgcatg

SEQ ID NO: 52161 - DNA, 953 bp, Cannabis sativa
acgactttgcagtaggcaatgaaagttatttactatttttgtcacccgcatgtagccaaaattgttttgatcgctgcttccaataaatctcttgttgagctaaaatctcaaagtaattacattgttctgcagaaaaatcatcagtagaaaaagggccagtagccgacttgagatggctcatttttttcttgcttttatttaatctctgtttaaagcttccagtaatttcatatccccattcagttaaaattaaactacacatatgaattttttcagcaagagaaacatgtgtattttcatcccagcagtttttaaccaactgcccacacaaagcctcacggccccatgcgttctcataacgaaacaaacggactggtctgaaatttatagtggggtcgggttcaagcagcaggggtgtatgatcagaggaagtataatcaaaattggacagcttagcttcaagaaaaatagagaaccattcatgagtagcaaaggctctatctaacctgatttcaacatgtgcaggacctcctcttccacgctcccaagtgtactggtaaccaccaagagccaattcatcaagacgacagtcacaaagagcaagattgaagccgttgatgagggtgtcggggtaggggcggcctcctttaacgtcaccgttggaagatgttgttgaaatctccgattacgcaccatgggagagtcgactcagcggcaatatcacggagcaaattccaagttgttgcgcggagtgaacgttggggttcaccataaaagccggtcagcctccatttagcatacccagtgatagaaatctccatatcaatgtgattgttggagtatcctaaaagatgggcttcacttgatatcttccaaaatagtgcaaggcctccttttcttccttgggcttcaacagagaaacaactttcaaagcccaatttgatttttaccct

SEQ ID NO: 52162 - DNA, 1452 bp, Cannabis sativa
ataatatacaatattattagaatcgcatgcatatatgattaagttttgatgtaaagtagattagaattgggattatttcaaaaaaaatacaaacaaaaaaatgcaaaaatacgattgtacggaattttaaatattattacggtatttttatattgttggttttttgttatttctatattattttattgatttgaatgttattttcctattattttcatgtagtttttgttgttttggtgttattttttataaacattgtaaaaatgttaaaaaaattaaacgtaaatgtgtaaaaaaattgtcaaagttagtaatttatgtaaattttcaattagaagggatttgtaattttataaaattttaaaaaataattatttaacatattaaaaagaaaaaacaattaagagattttttttatttatacacttcaattttttgtatttttatacgaaaatacacgggatcaacctaaatcacaatagaaatccacattgcaactcacacagtaactaactaagcaaccctaatcgtaaaataaaaaaaaaaaaaaatagtatataggtgatacccccaattaatttccttaaactcataaaagtgttacattagatattacaaaaataataatatatgtctaaaaatttgacacacacttatgtaatttttctcgaccagctagcttaagtgaagatcgaaaaattattttgtaaataattatcaaaacttggaaaaaatacaaaacaattttaacaataatgtaaaaagaaaaaactccatcttttatatatttttcttctttattgttgcaaaatggtcttataaaatcctttttaatttaaaagacaatcttactttgtcttttcttgcaaaataaccccataaagaattttataatatcaagtgcgtgtgcttggaagattattttacaaattattaattaaaaaattactattatacaaaataatatagataatcccttatcaaagaacctttaacgcatgccaaaaattcaaaaaaaaaaaggaaaaaatcttttagggcaattatgtctttgctatttgagtatttgtatatagagaaatgatgaaagatattatggtctttagtatttttttttattatatcgttattagtataattaagtttattacatctaatataatttaatttaataatttttaaaaaatattattaactaatcatgatactaagtactactggtgctaaataacaatctttttatatatatagtgtgaaagtgaataatatttattataatatatatttacctgtaaaagcaaaaggggatgtgaagaaatatcaatagagtattcaacaatgggaaccaaagccctaagctttggtgaaggcttaaagtcaccaaaatcatcaaccatagagttggtttgagccaccacaaagaggacaccctcaccattacaatcgatctca

SEQ ID NO: 52163 - DNA, 826 bp, Cannabis sativa
  modified_base (112)..(113): a, c, t, g, unknown or other
  modified_base (396)..(397): a, c, t, g, unknown or other
  modified_base (451)..(451): a, c, t, g, unknown or other
gagagagagagagagagggcctgggagggggttcagtagaaaaagaagaagaaagaagaaaaaaaacagtaaaaaatatttttttttctaattttttaattttttttaaatnnttataattattttttaaaaaattaatattacgcgggccactaaaaatttgccacgtgtacaagtgtgtactcgtagaagtccactatgacacttaactgtaatttttggacgaagggatacagagcaaaatggaatgggagtttaggtagttttgtccccaaaaaattaatttttgtggttatgtattaaaaaatttaaagtttaaagccgccaatatccctaaaaaaaatagacttagtttatattttacgttatataagttagagtaatttgcggcataannacctaagtttaacttccagttgcaaataaatacttaagtttaatttttggcggnaataatacctaagttatatttttgaaacttcataggtacctaatcgttaaatgtcaaataattatctacgtgtcattttcttattggcatatttaatttcaaggaaaaaaaaattaatgtcatggaccattcagagattgccacgtggcaatttacttaataattaatagccaggtacctaaagaagttccagaaatataatttaggtattattaccaccaaaaattaaacgtaagtatttatttgcaactgagagttaaacgtaagtatttataccgcaaattactctataagttattattttttctcttttttttttaaaaaaaaaaagttattgaataattattctcaatatatacacatataatatattat

SEQ ID NO: 52164 - DNA, 878 bp, Cannabis sativa
gaaaaaacactctaaaacagcagccacagccagtacaatattgtgtttcaacttttggaataactagatgagccatttatacactattatatatatacacctctaaacccaatactactcaacatcataaaccaaaaccacttctcattctctcaagctcaagctcgattccttgcatttagaaagaaagaaaacataatgggcattccataaagtacctcttcccttagtttagagctgaaaattgtagaagcaaaaagtgtagaatcaaaaccaagaggtgacctgtttgtgagatgttatcttccaataggaagcaacaaaagaaaagtttgaatcgacactaaagaaatccccaccaaaaaggaccaagtttggaatgaaattttctctttggagtgttctgggattgaaagaaaagacagtaaagtaaaaaaagatgaagactttgtttttgaattggacaaatgatctaacacaaaaaaggcaccaacactaaccatgccaccttgagagaccaaagggtaatcagaagcattgaggttgataaaccaatcccacttagaaatctccaaaaggattgacattgcatgaaccgtggtggaaagcatagtgggtcctctgtaagtcaccaagtttgaatttttaacaatccaaatattacccacttagctacacatattatactctaaccccattttccctcataatggtctacacatattatatatatacacatgtgtgaattatttagaatacgctagtgatagtaattgactgaagtttgggaggcacgcacatcttgttcttataaggtaattactaatcaaagtattcaatttatttcttgatttggaacaaaatagtcaaatttaggc

SEQ ID NO: 52165 - DNA, 1420 bp, Cannabis sativa
agttacccaatgtggtagtggcattccaaggattaattgtttttcctttaacactaattcccacgtgacctgttcgtcaacaaggagtctctctcaccaacttggaaaaacccttatgggaggtagttctgcgacaagagcgacaagcttctctacttcattttgacaggttagctctttgttattcctactcaatgcattagcttgcactgttcctccaattttcacgaaccagtgttaaaactattcatgttacttcaggagagagtctcgtagtttttgttgtaagtcatacatagtttcgttgagctgagaaacttgaggatcggcctcttcatagtcatcaatctccatgtgaggctccccaagtgggatctggtcattggagccaggtccgtgaccatttggtaaccttggaggatgagatgctgagttggttctaaggcctactcctggcacctagatgtcaaagtattctcagttcccatctcagcagctgacgtggcccctattttcttaccaattgttggagtccgtctgtgaacacttgtagaatgtgttgcaaccatcttgttagtagctttcttgagttgtggctcttaatgaaagctccaaaatgttgactcagtactctggactagacttctaagacacacctgctcgctagaattcgtatttaagtaactataagagtgagatagcaaacttatagtagttcactcactgtatcacaacagtaatggaactacgtctactccgagtttttatttctcacgagatggtaattatgaaaaaaaatactaagtgtcagaagctccaatttcaagagagagaaactagagagagaagctctaaccttgtgggtaattttttgaacttaaaaaatgagcttatggagctctgcctttataggtgaaggaggcccacaaaaatagtgagaaatacaaataacatgtttttgactgttgatgatcatctaaccgtgaaaattagcttttgatggtgatgggcatttttcggagcctgacaggtcccattgtgtgtaacctagagcttatttttcataactcctttgggggtgaattatgaagacaacttcaaaattatgtttagaatgttatacatgacttgataatgcattgaattatctttgaaatgtaagttgaatcatgtcaatcggtctaaattgagtgagttattgttgttttaatgaaagtagttcatgacttagcgcccagttgacatctaacgcccaggttgacaatccagtgcgcatgttgacatatgacgtcaatctggatgttgggtaagtgtaaaaatgttcaaggtgttgggtttttgccttaaataaaacctatttcaatataaacagatttacttattaataaagatcagaaataacattttatattgcatggtt

SEQ ID NO: 52166 - DNA, 2175 bp, Cannabis sativa
ttaacgtttttatttttctttcctgttaaattttaacagaatattctattatttaacagaatatcctgattaaaaaactattaattatatctcattaatttcacttgtataaatactcataaaatttattgtaactattttttcaaaaattatggtaaattgtaattttatattatttttcacttccattcctgcgattgaatgcaaaagaggtaaactaagtgcaaaatcattttttgggttgttctgatttttgttgctagatatatattttcccatctttaatcctcaatcagatggattttatggatcttattcgtaaccgtcaacaacattagatctcagacttttcctgttgttccataacaacaacagaagaggaaggctatcacttctttctttgatttccagaccggttcgagaaaccggtggagttaattacgacttaaataggtaagtaaaccacaacttttaggaatggaagaattttttatgtttttcttaatcgaattggattgaatttatatttttgttgaaggaatttgggcaatcagactataattgctaaatttaagttttctatttatataaaaatatggaaaaagggaaaattgattgtgtgtgataatcgttgtttggttaggggattgtgtataaagtgcaataatgaaataacaaaataaaaaatgatctgttccatgtaaatcgaaatcgaagccccaaaaagaacgatttgtagatatagaatcaaaatagaaaagatggtttgtcctgtgcatatcgaaatcatcgaaccccaaatcgaagtcgtcgttggatctccctttgatttcctccatctatctatcttagaggaacaagagaaactataatcttcatcatctgttgaggccatattttaaattttttgggcaagcatatcgattaaggtatcgatttaagatgattgagaaaaggtatgtaaaaacttacattactttttctatgtactttacttcttttatttttatttaaacgtgtataataatttgatgagaatgactattaatagtctaaatatatcgttaaaaaaataattatatacttttattttgataaggggagtgatgaagatgattatgaatagtgaacgtggtattgattaattttgtgatatgatagctttttggatattttgaagttaaatagttagttacagtgtcttttttttcattttttttttggatcaaattgaatgtttgtcttcttcatgatgatgaatggaaacttatacttttatatattgagcttggctaaatagcacaaatcccattgtttggacaaaatcctgtaagaagataaatactatgtttgtaggattttttatttttatttttgtgtaacaattaaaatgttgagccttgttgaagcagaagcaaacaaccaatattttctttcgaagatgggaatatatatggaaggtttattagtaagttttgtttgttctttacttgctagaaacttaagaaaatatgttttagttaatgtttctttcgtttctatgcctccgttgtcttagtcacttgggcttcataaaacatattattgaatgttgacctataatgtcaattcaaccctctaatcttacaagcactacaccaaatgctaataagtccatgttatgcattaaatttgagttaatgcagatagcatgtctatttgttgttattggtatgaatggaagcacttttaaaatgtatttggtttaaaatatatttcctcatagcacaaactatttatatagaaatctcatttcaatgtttcagtcaccatacttgtgctttcaattattttattgtttataccataattcatttgtgttttgcatgcattttcattttacaatatggaatgggatattgttcatatatctaggaaatgcaacttccctgcacacaacattgcaaagtgggcggctgtgaacgaccgattggatattgtcaatccgagagatgtagcacagggggtgctagatgattttattgagtggaagccaggagattaagttgtggcagggtgtttctgcttatgtcttgctgttgtttagttggattctgttgttttattttagtttgttcttcagaaattcccgccaatggctgagatgttcagtcgactccctccccctttgtgggg

SEQ ID NO: 52167 - DNA, 927 bp, Cannabis sativa
atcatagggatatggtcaactttggcccctgattgctctgctccaggttgtcctctgccaccggtttcttcatcgaaattcaccatgaattgtcgtagccatttcgagccaattgtgtgattccggcgtcgtggcttcactctcatccactcaccatacggtttgtttactcttccatctggggtatcaaacaacctctcacaataacgatcagaatgtcctataactccacatatgaaacaaaaagtggggacatgttcatatttaaaatttgtatagaactccaccccctcatcgttctgaagcttcaaccgcctctttaacggtttatagacatttagagtgaccctgactcgcagataatcacgccacattcccaggaaattcttcggatccgactcaacaaacttaccaattctattggcaatgtccctagccactgtagcagacataaagccagattgcaggtcatgtaactaaacccacatatcaacttcattaagctgcacaactcttggattttcaccccttttcagccttgtaaacaccagcagagagttattaaaagtccaagggctgcgctcgataaccctttgaatgtcaacctcatggtagaattgaaatagataccgattagtctcgagttctttcacaaacataccacatcccggcagccatagagaggccaacatgtgttgcatcgcatcaaaatctattggtttctctgttaaaaatcgaccaactaagcaccaccgattgtcaacagtactgtcaacaatactgcctttattatatatcaatacatcatcgtcttcatcttctatgtgaaattcagcataaagattttccataccacgtacaacagaactacttgaagccatgaggaagaaaataccaaaaaacaaaaccagaagacaggaatcaaag

SEQ ID NO: 52168 - DNA, 2568 bp, Cannabis sativa
  modified_base (2151)..(2162): a, c, t, g, unknown or other
  modified_base (2263)..(2263): a, c, t, g, unknown or other
gaggtatttcgatcctatattcatatagtgtatatgtttatttattccgcatgttatatacacatacatatattttatattatacatatatatgtctaacataaacctcattaaaaggcataagaagggtatgaaaggtttcttgggactcaaagctaatatggctaaggtctatgatagaattgagtggaatttgtatgtggaatgatgagaaggttgggctttccagaattatgggtttcgttggtgtaccattatatttcctcagtttgatattctattaatgttagtggtaatattgtggggaatattttgccatcctgaggccttcgtcagggtaatctgctgtctccattcttgttcctgatttgtgcagaagatctttcatctatcgttaagaatgagtgttgtgttggaagtattcagggttttccttgtgggagaagagggcatgttatttctcacctattgtttgttaatgatagtttctttttttctttttttggagcctctcatgacagttgtgctcagttttgagaaattttagggtggtacgagtgagcttcaggtcaattggttaacttatctaagtcttctgagtgtttctctcctggtatctctagagggatggaggatgtgttggctaaagttctgggagttcctagagtttcttatcgtgagaagtatctgggtcttccatgatttgttggtcatagtaaatctagtttgttccaatcaattaaagatcaggtttggaacaaattatttagttggaaggctaaatctttctctcttgggggtcaggaagttctccttaaatatgttaattcaagctatcccaacttataccatgaatctcttcacactccggttgaattgattgaagaacttcataagtggtgtgctcaattttagtggggcgaggatgatgataataggaagatgtattgatgcacctaggtcgcactgtgaacattctgtctcgagttaggattccaaaaccttcaacttccctatcttactctttttgaggccatcttaatgtgtctttggttagtgacctcaagcttgagaatggtgagtggaatagagatcttattgatgagattttttaaattgatgaggcccaacagattatggttatcccccagtctcaaaaacgtttggatagattaatctggcactacaattcttcaagtggttacactatcaagagtaggtattggaatgctgtttgattattaagaagatactaagttgattcatcctcaggtccttcttcttggtggaactatttatgtagcatctctatccctcctaaggtaaatatcttaatttggagagcttgccttgattggttccatacatctcataatttgaaattgcataaggtccctacaaattcactttgttctatgtgtggtgttgagattaagacttttttccatgcactttggggttactttagtctctatctattgtgacgctagttgattttgtgattccttcatcttctttgccaagaactaacctttattccttctttaggtagcatgaggttatcctttcaaaggaataaatggaaaaacttttggttctattgatgcgcatacggtatcgttgtaatcattgggtccataattaaaagtaacttaatacgaaaggggttcttggtgttgcagaaaagggcaaaaggaaagctaaagatattgaggatgatgcctccgaaaatgctgcttcttcgagttcaattttgagagctagaatcgaaattgaaccggcaattgagacaattaaagaacaactgagcagacatattcttctatgttctcactgtggagagaagggacatttgaaagaaagatgtcccagacttctgaaccattagaacgaaggtaacgcttttgtttttgaatcatgtgttttagagaatgacaaatccatttggatcgttgattctggatctactaaccatgtttgctcttcattgcagctgcttgaaacttgggattacttaaatccaggggagttgacgatcgaggttgggaatggagaattagtatcggtccaagctagaggaaaagctcgcctcaagtttcagaacaaatttttgattttagacaatattttgtttattttaaattttagtannnnnnnnnnnngtgtttcatgtttacaaacacaatattttcaattgaatttttcgagttctatttgcactatttctcgtaatggcattcaattatgtgttgctcacatggancaagggctttatgttttaagattggatatactaattgcgctcacgaacaaactttaatattgctaaacctggaacctataaaaagcaaaagattgataatataataatgaattgaagcatatctatggcatttacgacttggtcatataggctatcatagacctcaaaggttaaccaaaggtggtccattgaaaaatgtcacctttgggtgaattacgagtttgtgaatcttgcctagaaggtaaaatgactaagcgttctttctctacaaagggagagcgtgccaaagaacctctagggttagt

SEQ ID NO: 52169 - DNA, 1527 bp, Cannabis sativa
taaaacaaagatggtaagtaaaaatattgatataggcatgtagggataaaaccgtaataaaatgtgcaaaataaatttttggtgtaaaaatttctaaaatatttgttactaattaaataaaattaactatttatgccttaaaaaaataacaacttacaaatttgttgagatgatttattgaattgttgcacttgcatgatatacctacaaaaatatatagtaaaataaaattaaataataaaagaaagctcataattttttgaaagagagtgaaattaatgtgatagagaactaaatgtgatatgtttcactctcataaaaaagattaaaggcttccaatgcatgcaaaagaaaaatagacagaagaatattaatattgaaccaataacattaagatttataagcaaaaataaatttaaagaaggaaaacatacacaattatatataacaaacctgatgagtctttgttctccttcaccatagccagtgtttctttcaagctcaaaatctcataaaatatctcaaaaatctcaaatgaaacccacctcaaactaagccataaatgaaaaagaaaagcttcaattatttcacttcccactaaaccaaaccctcttttagtcttggccatacaaccaacataataaaggcagagagagatattcatattgacccttttgatatgctttttaaagaggaagagcatacggtcactaggtgttgctttattaattaagggggtgtttgtttaagttttatttgcatgggaatgtgggaatcacttgtgaaagagaattgttagaaagagaaatgctaaaaggtatcagtggtgcttaacaccctcctatgtgtcaatatcgctattggtccaactaagtatcagatcccatataatttaatataatagcttttagggagtatcgctagccaatcgcaacgtaacatgtcgagaaggtgctaggcaccactggtgcctaatagcaatgctcttgttagaaaatattattggtgcttagtatctttctcggtgttatactactattgatataataaagtatcgggtcccatataacttaagaaaatagtttttatcaattatgaagcgccacctataaaaagtattggacactactggtgtccaatagcaatgctccttgtaaaactgtaaaaattaagttttcatattagagcatctccagtggagtgtcaaacagatggtgtattgctatatttaagtacacttaaaagaaaaactactacgctaatattattttaaaaagtgtgctaaatttgaaatatactaaaagttgtgctaaatttgacacaaaatatattattgtgcaaaattaacccacaataaatattatttttttttttatttagtataatgtcactaattttgatttattggctcttactaaactttacattctttacttatttagtatattaccattatttaaataataaaagactaaaaataataatttttgtatattctcaataaaatactaaatcaccatcaatata

SEQ ID NO: 52170 - DNA, 753 bp, Cannabis sativa
tttttatttgacgctactttgcatcagttgccaactcacgcaaactttaaatgtcaattttcaaccgacgcaaagtagcatcagagagaaatcgacaaaaaatatggaactaaactttttgtgttgatttttactgttgactgacgtgttcactgacgcaaaaagtcaattttgtaatagtaattttagcaattagtgaacaagttaagataattgttagggctagagcccaacttatcaatttgcgtagactaagtaaaagagagcaagatgtaattgagttgttaaacaataagtgagttgtttggtatattgtgtattgttaaatgattgttgaaataaaatattctttctttacttcaaaaaacaaaaaaaaaaaaaaaaaccataaaagagagagttactataatctccattcctccaactctcttcatcgtttctaacctatccatccatcctactccttattctaactaacctctccatccatcatactcatctacattctatctaacctctccatccatcctactcaactccattctatctaatctctccattcatcctattctcccttgctgttaccaaacatatttatattatatagtgatggtttgagaataaatttgtattagttttgtttagaataggtgcatatgtagttaatagtttgatgatgttgataagttggatgattggtgggataaggaagaattatgtagtgttttaatttttatgtgtgtagtaagagag

SEQ ID NO: 52171 - DNA, 815 bp, Cannabis sativa
aaatatataagaagaaaaaaaagaaagataaattaaataagaattttttaattgtttatttcaattgggctaatctttatttataataaatcaatataataaatgaaaatacaactaaatcttaatcataataattaaacatccataataaataataatattttagcattgaaaatataatttagaatagtaggatatgtaagtgtattattagtattattcttattatttatattattattattattattgacaagtattattgttattttcgatagatagaatatgagaaatattaaaaagtactcgcggtgcctagtatcttcctacgtgtcacaattgttattggtgcaattaagtatcaagtccatatagtttaatgtaatagattttagagagtagcgctaaccaatcgttaagtgacatgtctagaatatctacacatactaggaaaaatagataatgcctatagctcaactctatttttaaattatctcaactctatttttaaattattttcaaaatttctaaaaaaacttactatataaatataattatataaatataccaaattaaattatagtcttaggtggtggggtttgattaattaaaggtaatgaaatggaataatttttattttatttgtttattttgtttttgaacaaattttatttgtttattttgttaaatatattttaaagtattagaatatcattccaaatgttattctcattattttactcgaatgattattctattttaaaaaaaaaaatcaattttaatgtaatataagaaaaaagttaatgattttttta

SEQ ID NO: 52172 - DNA, 3172 bp, Cannabis sativa
aattttctacctattttgtgtgctgattcagctgacctattctatttgttcgtttcttctttgtaatattactctttctgtgtttcattgcaatataagttggtttttgaagtcactgtgaaatgtctttcagaaatggatgtcttctacttatttaattttgaatgtaggaaagggctgcaacatgagtttatttattataatagagttcagaatttctacaatgtggaataaaattgtttgcttatctttactttatttattgtcatttgtagatagaattacatccgcctcccataggtgaaggggattcttacaaagctttctgcaaggatctgcggccatctttagattggtcttcaaaatgtggctggactgttcctacttcattggtgcctttctcaatcttatgttttattgcatctacactacatgtgttttctttgcacattttactacttaaattatgatacataattatctttagtacttgtacatgatgaaaaacagccttttatttttggaactctagatatattgcgtgcattgattaatgttgcctagaaaaataatgaaagctaagacatcgataatatatgtgtatggtcattttatatgcatgttctatttccggggaaagaatgttaattacaattgaaattctcacgaagtataattggaagaaggcctatgaagagaaaccaagggccactggaggaatatgaattttttatggtcatatattgtattaagaactttcaaaaactaagtttatagacttgaaagatagagaaaaatgctctacctcaatcatatattacaggcatttatctctttgatttattatacattctttttaacatttattacgcataggttcatataggttttaattgtatctttacttgtcacattttagtggttccgctaattcattatagataatttgtgaacttacaaacatttattacgcatttttggtgattacagaacagtaaacatgatccttgtgctcggatacttaaacctgtcaatcaaggtaagataatagtgggggtgcattattaatatctcttctataactttgtaattcagccactcttgtaaattactaacttctggcctcttgatctaggagtgtgattgctaaagttcccattttatgaatgggatgataatagaatctgtaacacgtttaatagttttcgacttgaatttgtttctgatctatattcacgcgagttcataattttaaggtctaaattttctttatttttggctctgaggtatgttagccctagaggaagctagatctattgcctaaaaatttgaattaccacatctaatttttggaattttatttacttataatgttttctgtcaatatagaggcccacaaaagataccacacactctacacttgtctaaattctgaaagaccagttattattattgttattgtgttttttcacataggaaacaaaagaggtattaataaaaagataataggaaatcatctatataacatcctactatcctagaataccagtaataagtacgtcatactaaaccaacgtatacaaaataagactaactgagttatgattctgctgtaaaacctgcatcctcagctaaacctgtgtcaatccagttgtgactgttgcaggttgttttcattgtatttttggtgctagggaaatatagaggcagaaacactatatgcaaactgatcactcatcaaaatttgcaatggacaagaaatatcatgtgtttgttatcaaatctagacatactgtggatcagatttgttttttgacatttttaccttatatggtttcctttgttttgtttttcaggcagaagttcaaccttgttgtcgcattctgcaagtgaagatacagctgctcttttgggtgttgatgcaacatctcaatcttcattggtttctcatgcttcttctaactcatcacaaccttttgataagttggaagaaaacgaaaagagtgctttgtctctgacaacagaaaaggaggtgcaaacttcggtaacagatgtgaactcagatatggcaaataatggtggtattgggaaaatcggttgtgctgatgatgatttaatttcacatgctaaatctacaccaaatggagtaaggggaactaatgtttctcctatattgaattcactttctgatcagttggaaggaaccgaaacacaacttccgtctactataatagctaatgatatgcatttgccaggaaaagatatgaactcagatacgacagctgatagtggcttggggagaactaattgctctgataatgatgcaaattcacatgttaaatatgcatcagacgaaataggcggaactacaagtggtaaagacagatttgatgatggtggctcctcaaagaagatgagaattgatggaaacattcccccaactttgttgttttccaatacaatggaagctgccattgtgaacttggaagaacttgtaaactgtgtaaaatggatgaagagtagtttacaaaatgatatgccatcatcagatatacgtccttcgtggaaatttttggcacaccatgcttcctcctcaccaaaatgtgcttctctcaactgcaagttaactaaggagttctgaatctatcagaaaaactagggagttttgaaagtggcttttgatgctcgggaagaaaatgattcatgtctcttctgctgacttgctggggatgatcgagctcattgatggtaagattatactatttatgctctttaacatctattgtattagggttggtactgagcactacatgcacttggcgttaaattttgaattgattatcaatcttttctatgttagagattcaatcacaagacgttacaaatgatgatttgctgaacagatcaaatatcagaaattcagaccaccgagtgttaatgaaggaattttgctcaccttggtgttaagcttctttgttgagtaaaagtaaaattcttctgagtcctattgtatgtcatcaatttcgggcttttataatattaataccttacctttagttgcttcaactgtaacgctaaatttcttgcagtgtgggtattgaaaatctaaatataatcattctcatttcctgtataagtatgtcttcattttttatattttgaaattttactt

SEQ ID NO: 52173 - DNA, 1076 bp, Cannabis sativa
atgatgaacgatacggtgatcctcgagacaaagatctttttgtaaatgaatgaagactacatattatttatagaaaaagtaaacatatttccaataaataataataaaatcttttagaaattatgtataaacaattacttatttatgtataacaaaaatggcaacaactaagataagaaaatgctatattctaatacgataactatttcaatgatttttgataagacaatattatctattttttattttcttttatgaaagaattagctaaatggctcagttgaaagctctagtgtgaaagttgaataagatattttaataatttttaataagatattatctattttttttaattatacaataatgtcattttaagagtataaaatattaatatgggaagtttaaatgattttgagttttcatcattatatattaatagtattttggaagattctttttaaattaaattaaatttccttgtaacaaatgtaataaaaatcttttttaaaaaaaagcaatgaaattaaatattaaaacaataccgttgacggaaaaaagtaatgaaatcaaatattaataaaaatctttcaaaaaaaaaaagtaaagaaatcaaatatgtaatgaaatcattattatatttattgtctttcacgaaaaaaagtaatgaaatcatacaataaattttaaacaattatgaaataaaataaatacatttattatttattgtattttgtaatatatatcttttaaattaggaaatcatttatgcagactataaatttttaattgattatattttttatttagtaaaaaatcataattctttaagggtaatttttttcattccatgtttacatatttttttttaaaaaaaattctacaattatattccaaattatatataaatgatcaaataaatatttatttgtatactcttatactaacaaataaatctatctctaaacaatggatgatgaggatgcaaaagagacaaaggatgaggaaggacatgtaaacgaagaattggcccaacctgatattgcacaatggacaatcttgcttcattttttggagat

SEQ ID NO: 52174 - DNA, 2420 bp, Cannabis sativa
agaacttaactatttctagattcatatccattgacctaaggtcaactaagtgttaatgacttagaaagatataacaataagtttatgatgtcttagccaatgtcaatatcggtctaggccgatgtatactccatacatctgatacttgcgtagtttaccaatttattagaaaaagcataccacttatctaaggtgtaagtaaattttatcgctaattatcatgttagtgtaaattcagtgtactgaaatatcatggactaaactttgaaacataaaatcataattattcttcactctctggactacactattatcatgaataactatatcatctggatttaatagaatttatccattaaatatataatcatgaaaatattcttgtgaaccatgcaacatagaatgatttctaatcttttattaatttataaaactgattatattgaattaggttttatttagggcataaaatccaaacaagatccccagaccactggttaccgggatctaactattctcgccactggaccttcgtggtaaggcctgtcctccttttggtaaaagaaggtctgtaatggttcttgaagaatctggttggtcagtcgctgatagaccctccctgatctataaactagtcttccttggagtggatctctgatgagatcctggcctcttctattagttctctaattgaaccgccttattaagtccatggcttctctgttacggtcatccagctccacttggtgagatcaaaggatgtactctttgtcatccatccatcttaggaatttgcactctacagagcgaatacattgtaatcagtagcgcgtggttctattattaggccggcttggcagacgacctctctaagtctggctaacttcaaatcttctctcaagtctacatggagctcaccaatggttggctcgctaactccttgcctcatctctacagcataatattgggggccgagttttattgcgatgcatggggtcagctccacgtggatccttcctttagtgaaaggcgccagtgaagggtcctccctaagaggcatgggccgattgttcaaatccactgggatggttgtgtctaccatgccagattcattgtgcttgctgaaattgcaggattgaccacatttgtagtgttcatggaaattttagtcatgattagaacatggacatcgagatctgaagtcataaggtcttgaggaagacccgatgatgcagatggtgcaactggagctgtccttgttttaaccatggcgtttgattagatatgattttaactcgctctcaatgaaagcacaaaactgttgaccttagaaatcggccaagcgacaatggagtcatattaaactgatgcttgccacgcgttatagaattagaactagataataaataaacacaaggattttcatagaggttcaaccccccgagttagcaagtaatgacctactccccttttagttgtattgatatcaagagataatactattaaaattgctataggtgggatctgatatagctctcttcaggctgaaatgcatgaatcagtaggtaggtctctaatgagagagatgaatccttggaggtctgtgagagaaagggagaaaaatcccatttggcgtctatgagagcgagagaagtggattatggtttcagacttagagctttcttgcttaaaatgagacttaggggtgttaggattgagttaaggttctttatattggagagcttaaaccctatttagcaaataaaataagagatatttacaaattaaattaataaatataaatgaccaaatcttcctttgaatgtagatattttcgtagcatcttaatgggctgtcaaggcccaacttgtagcttggcttgctgtccacagatgaagaatacgcatgaatgtcctacaagggaaaagttggccggtcatacacctacaggatgcaggctagttgaccatacaaggtttgcaggttgaggtcttgtcggtcatgctcaggttgaggatttggcaggtcctattgtccccaggatgtggcaggtcctgttcttgccaggatctggcaggtcatgttcctactagggtttggcaggtcatgttcctcctagctttgttaagagttgactagatctttgcatgtattgggcaaccttagtgatggccagccttagtgatggttagccgccgtagatggaggtcagtccttggaggtggaggtcagcctttagaggtggaagatagcctttagaggtggtggcaagcctttggagatggagaccagcctttgtacaccttttcttgaagagtgaaggctcccttggttgaacagaatttctcttgctcaaaccctggtcggccatacaagctaacttgtttagcctatagactccccttgggtagctagacatg

SEQ ID NO: 52175 - DNA, 4191 bp, Cannabis sativa
tcttctttctttttacttttccgtgtagttaagaaaagtttgacaaattgtgcttcattcctttttaatggacattgtatgcaaattcttcctgggtaatggccatgcgattatccctggaaaatcttttctcaaaatgtctgatgatatatttttgtcttcttattttttttttctttggcgggcaaaaggcaagaaacccctcgtcttacatttttctttgtgtgagtattttgtcaatgtgaatcgttagattcctttcgtcattcatcaggagagggcctcttcccagcagttaggggacccccattctcctttttgacttaatatttgatgtggtggctaactgcttggcttcttatctttcagatgagtgaagttctccatgaccttcataaacatggtttctttgggttcaatgaggaaattcttgagctccattcctcaaactccatgtcaaactccaacgtatccagtgccaaatcctcaacaaaggcgacaaagaagcttgccatggtggaagatgttatgcaaggcccggtcgcttataagaaatactcttgtcgctccaatggttggtaggtcgatgaactccattcaaccttggcctgcggtcatcagctggagaagataatggttgtgaatgggatcaagccgaatggttctggagtctaccaccgtcttcccagggaagaggagacatcgaaccataattataatggttttggagcctggagctagacccatcttatgtccggagccatgttgactctgcaagactacttcatagacttcttagtgtttgttggactcaccccgtaccaatttattacccaagcctaccgcctgcttttaggcctttttattttttattttgctaggggttgggccacccctagccccgctgaaattttatatttttatgaatttctttctgtccctaagaagggtgacaaatttaaagacagtttttataagttacaagctcattcggccaatgaaaccccagtaccctttaattttcaaaagaacgttaaggaatatcatcacgggtttttcttttcttctaggtttaaggcctttgagcgtccgaatttgttaacggaccgggtttgggttcccccgatgcatcacacagcccccactcaactcttcctgaaccacgccaaagtctttgctggctataagaaggaagatttgaatgtgggggatttggcgacgaccgccaactaccggagggccaaactacttttggagagccaatcactcgaggacttcaacttgtccaatatttaccccaacgcttgcaattcgaggaatgaaaggacgctcaaggtcgacattattgtggctgctaaagacaaatataacaagtatagatacaaaaaagaataacagcttcattacgctcgcctccaaagtgcctctgggaggtccaaccaggagaaggcaggaaaggaaaagacgtcaggcaggcctaagttcccttttccagttctaaactccaagatccctggagccagtacctctaaagcatgtaagtcccctttgaatcttcatttctttccttcatctcaagattactcttacttaaggctagtgggttatgacatgaggttgtataagtttcggatgccccatactcggtggggaaataatgcaaaaggtttatatttttcaaatttgagccatttcttgggtcgatctcaaatgggctcttgtcctcatgttcccatccttttggatcatacctactacatgacctcgagttggttccttcctttagatagtttttaagggatgacgacaccaactctttaatttatgaattttctaggacagaattagagcatcagggtaggattagccttccttcctgtattatacttgtatatgtggttcttatgtgctttctttttaaccttttatttattttgaatagcgaaacccaaggataatctggtgaccatgctagccgccactcatagtcttgagtcggaggtgcataatccttcccaagtggtggtgactcccggaggtccgaccgaagaggcgcccaggaaccaagaggcggtgttaattgaggaagaggaggaagaattacccccacttgacaagaaatggaaaggtgtagtttccattctggagccttccaaaaagccaaaacgctctgctacccttgatcctagtgctgactccgggatcccggccgaagttgaacattttcctacccctttagccattctcttaactctagctcatcctgatgaagagtggacccagctctgcattgccaaacacaactatgtcgtggatgagctgtcgaaaggcgatgttgaagctgaggctctaaaaaagtggctaaaggaggttcatgatgggcccttccaaggcgagtacattggggaggtctgggacctaaatcttgatctcatgaccgactggttcaaatggtacttgggcccttctctggaaccctttgctttcgagatggtgagtcattttattgctgacctaactcagctcccgaccaagaggtatgcgacttgcgcctcctccaaccccatctactaaatctaggacatgagcgtagcccttacttccataagtatatattttttgagttttctttttttttttttatttctcttggagatctgacccattcttgctaattgttgtcaaattgctatggaggcagaccgtctttctaagacattaatcgaccaaaggtttgtcgtttcggagttgggtggcatggacggagttttaaggaagcttaggtagatagagagccagatggagactcttcagaatgacactttggcggagaaggccctcagggagcgggatcaggagactctaaaggccaaggatgagaccattcactttagccagaaggaccttctaaatgctcgagaggagatttaaggactcacaactaaactcaaggctcttgaagagttacaaaaaactgacatggaaactataacaggtatgtcggttgagctcaaatagttgcgtgagttccgatatcaaacctagaaggaggccacgaaggctgcgagggatgcattattaactccggtgacctgtaagcattatgtgcagtgcttcgaggatagagtttttatatgctagaaattgaacaagtttaaacctcccctccacttcatgcctgatcccaaggctacggtgactcgcttttgggagaagaataagaagctggagtaggccttggctcagcagatgagtccctgacttcctccaagaattgattaattaaacctcatctttttcatttccttttactactaccccttttaagataatattttaattttttagtttatattatctttcttttttgttaggggagacatttttatagcctttccccgggcttgtctttttttgacaactttcattctaagaaagcacttgtatttattgtctctttttgtttttggttttctcctgcctttgtgtatatttattccttggtaccccctaagtggcttaaaaaaattttaggtcacttagcttaaatttactcgggataatgcatatatcattgttcgctgcaggttaacttaagaaatacatatatgaaattaaataatgaactcctaactattgatagtattttcagagatgatcagcattccaagctcttaggattatggatccgtccatttgcttcaattcataagttccaaagcctaattcatcttcaatttcatacgagccttcccaatttggtccaagtacccccactttgggttcttgggaggctgggaagacccttattaggaccagatcaccaatggcaaatttcttgttcttgactttagaaatcacatgcctaggcatggaaatcacatggtgaatttcctttgaaactggtattgcttgtttctttttctccaagtgattcctaaggtcgtcgtgtttgtcgttaagcttttgtcttaaatcaacagggggtgttttagtttttccttcctctttcctcgggctcttgatacacgaatatgcttttttggtcttcccggtcttgagggccagtgctctctctagggagcctgcccttctgtggaccttttccctttgggaaatcagagcggacctttcgtggatcctaagccttcttattcttttcttggaaagatgtgagatttctctttggac

SEQ ID NO: 52176 - DNA, 1721 bp, Cannabis sativa
  modified_base (1276)..(1288): a, c, t, g, unknown or other
ggtgccaaatactttgcgtttagcaagtgaattcaattctgcttgaatttcttctttccattttggccaatcttttctacattgacattctttgatagatttaggctcaagatcctcgttttcatttacaatttctagcgctacattataagtaaagatattgtcgacaattactttcagttggttccatttttttcctgtaatgacataatttattaagatctcattatttctaatattttcaggtacctgaatctcatcaagagatttgtttatgtcaacatcttcctcgaaatttgcaacctcttcattagggccatcttgattatttgctccttttatttttcgaggatttttgtctttggaaccgactggtctaccgcgtttcaaacgtgctttagaatcattagttaattgtctttctgggactttaattaaaactgtagcattttcagctcgaatatatgatgtttttaattttctttgggtcagtgaatgcatctggtaattgatttacaatatttttttaaatgaattattctttaaacttcaagttcacattgatttgtatgaggatcaaattgaggtaatgattttacattccatataatttccttttctagttgtttcttttcccctccccctaaagctgggaaacttgtctcatcaaaatgacaatcggcaaaacgtgtcgtaaatatagctttagttgttggttcgagatatttaatgatagacggagattcatacccaacatatattcctagcctcctttgaggacccatctttgtttgttgtggtggagaaatcgaaacatatattgtacaaccaaagattcttagatgggaaatatttggctcctgaccaagagcaaattttaatggagagaatttgtgatatgatgttggcctaatgcgtacaagtgctgcaacatgtaaaatagcatgtccccaagctaaaattgggagttttgttctcataagtaatggtcctgcgattaactaaaggcacttaataaatgattccggtagaccattttgtgtatgtacatgagtaacaggatgctctacatatatccctatttatatacaataatcattaaaagcctatgctgtaaattcaacagcattatcatctttattgcataatctcggaattgtgctcgtaatcagattatttgagcaagcaatcttgcaaatgctacattacaagtagataataagcaaacatgtgaccatctagttgatgcatctatcaataccttaaaatatctgannnnnnnnnnnnntgggcaaataggcccacatatgtcgtcctgaattcattcaagaaatccaagggattcaattccaacttttatcggtgatggcttaatgattaactttccttgagaacaagtaacacatgagaactcactggataatagaatcttgtggttcttcaatgaatgaccatatgagttctctattattctacgcatcatgattgaactgggatggcctaactggtcatgctaaataacaaatgaatttttctactttgtaaacttctcgttcaaaataacacgagtttatattgtacttatacgtgtaatatacaaacctgaagacagatcaggtaattttctaatatgcactttttcttgaaacaatagacgtaatgcaaagatactcaaaatgattttcatctattgtctcaatatgatatccattacgacgtat

SEQ ID NO: 52177 - DNA, 1080 bp, Cannabis sativa
taaggtatttaataccataataatatagttctttataattacttaatagtttttcatattaattatttattaaatcaaaatatgtataatccgatattaaaatgtacgtgcaccaataataatttgtcacttctcatagtgcttgagatcacatttctctaccgtatgtggtaatcttaactagtctaataataatagtatattatatatttaggttaatttacagccaaactttcttttgttttagtttctctacactacttaaccccatgatctttatttgtggcaatatatatcctctaaactttactaattttatctatagttggttaaattttactgttaaataataccaattaggactgttaatgtaagcaaatgtgatatgtttttactaatccaaattaattttaattactcaaatattacaaaattattttaaatagttaggatttaacaatgaagtttaaccgacactatttgtaaataaaagtaaaattaaagaggtattgtcaaaaaaaaaaaaaaaaatacaacgggttaagtagtatctacaaatattgaacctaacatttaccctaaactacccaattatttaataatatatgagaagaagaggttatatggtttggtagggtcatgtagggtcacctttaattgtaaaattattattattttttttttgaataatttatagttctgaaaataagatttaaatattttgtttcatcacacgtgattatttttctaataagcaattatttgaactattcaatttattttttaaaaaattcaaattaattttaaatagcaataacatacacaatcataaataaaaatagaaaaacaaatttaaaatctctctatataccaaaaacggatagtagagatctacgaaaacacctattttttcaatataatataggatatttctacaatgcacccctaaaaggatccaccgatgcaaccccctatttgttttcctttagtctaatttttctataatcgtctctacattgtagttatttaaaacaatttataaaattttaagagatttaaacaaatttaacacgttgaaaa

SEQ ID NO: 52178 - DNA, 1071 bp, Cannabis sativa
actcaacattaaattgtaccaataacaatctattacatcttatgatacttaccaccttaacgtaccaattaacatttttcataattattactaagtaaaaagttaaatacaaaagaagttattattactataaatatatataaactataaaggagcaatgtagggtagctatttgcaaattgattttaagagtgagattattgaaacgacacttagctgaagtgtataggtgatcatgacaaaattgggcatttgcctaagttaaaggcctaacttctatatttattgttattattatagaaacagttcggttcaaggtctctacattttttggtacgtagtaggaaaataatagggataattaacatatatttattttattttattgataaggatattgagtactatatattaaatactatttaaatggtaaattaattgaatatgtattcttattttataaatttatatggaaagaataaaatagtttttaatgaattaaataatatatttatgtatggtaatttgttttatttgatatgttttattttacttttgatatgatttgcattaatttttctaattagaaattcgtgatgtccaagtattattcgttaaaatgaatttagttttgatggagtctagattcacaagtctagtctgactaggtagattaggattttgtctgcacagatcaacattttgtctgaacactttccatgtctgttcagaatgaattttttcatttcatgagtttttataaaaaaattattgaatgacttctctttgtattcatactttttgagctcgattttggctgttatttatccctataaatatcacctaaactattaggaaaagaatctatttcttatatttttagaaaatagtgtttcttttgtaaatgatagttgttgtgatattccttggtgaattttgtgtgtttttatgattacttttatgtaaagtaaatttcaaagtgacgaatgcaaagaacagccttcgggagaaggttcatcaaagtatttcatcgaaaggaaacaagcatcttgcattgggaagcaagcatcg

SEQ ID NO: 52179 - DNA, 1311 bp, Cannabis sativa
attatatcttttaaaaaaagtaaaaaatacctaacataaaattagtatacgtgtctcgcacgtaactttttactagtatatatatgtatgtatgtatgttctaataaggtagagattaggcagcttccttagtagtggttcatttaggtgttttgagattgtctttttgtgtagtgtgtgctattttttgctttattactttatcaatggtaaaaattatttataataaataagtaaataaaaaaaataaaaggatatatatttgtttgtttttgactagacttatatgacttctgcattcccatttttgtatacttagagtactatcaataatttttttattctatcatttaaaatacatcaataaattttttttattttttttattttataaaacattttttactatttttttttttattttacaacacacttttatattacaccatatatcagtttttttaaaacacacaaaaactctactttttaaaaattttattatattttattcattcaactttataatatttaaagtaaattacggtaaaaccccgatagtgtcacttcgctagcaattaaccccctaaatttaaattttgacaacaaaaaccccaaacctatatttgaaaaacaaatcacttttctgtcaaggggcacttcaattccaacctggactcgcggctgtcttcagttgggtttcacaacaggaacgatttgagttgagtgggtaaatttgatatttgagtggcaaagagagagattgagagttggtggtggtgatatggaagaagagaaagaagaagcataaagaactacaaatttgaaaaaaaaaaatggaaagaaacaaacatgtaagaagaaagaaaagggaatgaataaaagaaaagaaaaaataattttataattaattttatttttaaaattaatttgtattttaatttaaaattatttttaaataaatatagtatctagaccaatataaatgtatcatgtgtacaatagtgtacaagtgaaaatgtcatttaattacattttgtgtgacgtagcaatagaggttgatttgacacttgttcacttaagccacataggtaaataacggactgagatgaatctaagaagggattgcggcaagaggaccccttatccccacttctttttgttctgagcatatttttctcgggtgttagaaaaagtggctttgcaggaagagtttttcatcaccgatgcaaagttttgaagcttacatacctttgctttgtcgatgacgcgatactctattgtaatgggaatttcaagtctatcatcttattg

SEQ ID NO: 52180 - DNA, 2151 bp, Cannabis sativa
  modified_base (352)..(363): a, c, t, g, unknown or other
  modified_base (730)..(730): a, c, t, g, unknown or other
  modified_base (1085)..(1091): a, c, t, g, unknown or other
  modified_base (1156)..(1165): a, c, t, g, unknown or other
  modified_base (1354)..(1355): a, c, t, g, unknown or other
atattattattaataaaaaaaaaaaaaaaaaacttatacgataagtttatataaataaatatatattataagttatatcagcaaacagcttaacgaaagaatgaataaaactctctttctcctcttttgataaaattttctctttttctatccattttcttttattttcaacctgaaacttagcgatttatgttctggtagtagcaggatagcaaatccttaaagaaggaaagcttaaggtatggtttagttacgttttaagctaaaaacgattgattttatataggagtttcatgaattagaatagttatggagattctgacttcgtagaattgttctttggtacctatgnnnnnnnnnnnnatgtttacttgttgaaattgaggttattttgagttcgaaatcgagttttgaactttttaaagcttagtccgaacgttaatggtgttttttatttaagggctcaattttactttctgttatgcaaggatggtaatatttatggtatatctacgccctgtgaagtgatttggataagttttggtagtgtttcggtgagtgcaaaaattgggatttttgagtttcatagtttttagaaattcttaggagatcagaaatagtatctttgtcataacttttgactcgggtgtccgttttggacgttctatataccatttcgaagcttgcaacgagatttacaatatgttgtatattttagagccaaaatatnagttttattttagtgtatttgtatcgcatggtttggtaggaaattatagattgtcttatatgaatattaagtagtgttttgggataaacactgtggtttatcattgttgtgcataggtccgagatcatcgaggatagttctccacttgggttggccgaaatgtatgaacttggattaaaggtaagaaaattatattgtactgcatagtacgttgtatgtaatacaattattattgcaatgaattgattaatattgagatataattaatattgttatataatgaaaagattaattaactgagtatcgataatgtgatgttattatgcatgttatatatgggctcacctgattaggnnnnnnnattttcttggcgacgtactgggtgtaagtacgagagtcagtgatatatgatgagtaccgagcgtnnnnnnnnnntcacctgattaggtgatgaaatttttctggcgacgtattaggcgtaagtatgggcatcagtgatatatgatgagtactgagcataggtatgggctcacctaattaagtgatgcgattactcctggcgacatgtagatacggcgtcagttatataaaaattgtcgggttatggcatagaatgaaaccgtnntagggtttcctcctggcgacgtgtagatacgggcgtcagtgacatatgataagtaccgggcgtaggtacgagctcgtctgatgaggcgattactcctagcgacatgtagatacagcgtcagtgatacaaaaattgtcaagttatggcatagaatgaaacctttgtagggtttcctcctggcgacgtgtagatactgacgtcagtgacatatgataagtatcgggcgtaggtacgggctcgtcagattaggcgattactcctagcgacgtgtagatacgggcgttagtgacatatgataagtactgggtataagtatgagcttgtctgattatctgatgcaatatattagtgccaagttgtggcatgggctcacctgattagatgatgcaattatataatatatgggtgtaagtttttggcacgggctcacctgattaggtgatgtagttgtgcagcatacggggccaggctatggcacgggcttgcctgattaggcaacacaatacaggattatcagattaaagcatcgacttgcctgattaggcaatgtgatgtaatgaagatggttactttatgaagtaacatatatatgatttatatttttaaatgaatataattcctattattggtagaataattttatatcaccaaatatctgtatattgatacctattcatggaagattccagttgtgatctagatttcattttatgaacaatgtgtaatgttttgattatgattgtgtataaatgataatattcgaataataaactatatgattattattacttttctt

SEQ ID NO: 52181 - DNA, 899 bp, Cannabis sativa
aaacatcagttggaccaggattatgatgaactctcttttttttgaagataatcccttttaacaattcatccaagctttatgaaatgcccacaaaaaggaacatattgctgccaattacaagaataattttattttgctaaattcactttctaatattgtcattttgacaaactaattatacacagttctacttccttacacatctaattatagccaaaaccaatatcaacacattgtttttctaattcaaccatgtccaaaagtttaaagcagaatcagtagaaataaagtagacagcaagtcgtagtagtagtagtaatagaaaactacctaatcacatcaagcttcagcctcaataggcttatctgcaagaagctatttcagtaatgtttattcaaaaattaattagtgatcttttctccagttcagactaatggaatgtaagtagcaaaagaaagttcatgagaacaaagaccgagtcttgttccgttcaagtcgagctttcctctgttgaaattcggaaacatatatcgttacacagttgagaacacctgaaacaattctagaacaacactaccaaaatgaaaaactgcaatggcttaaagaaccaacctcttttttcttgcattccttgtaaacatcaaaatgttcttggcatttgcttttgtcagtgataaattcttcaagacctgcaagtgcagagattgcaccaatcaaagtaaaagtggttttgtacgatctttccttagtatccaacatcaaaggaagattaaacaattcttccaatcaaactgaaacaatgcttaagctcaatatgattcaacattccatcacataaatgttaagccctaactaagagtaccattaccaaattcttttttcagcaaaaaaaaaaaaaa

SEQ ID NO: 52182 - DNA, 804 bp, Cannabis sativa
ctttctttcttttttttttctccactatctttaccatatgagcaaagcaaaccaacttgtaaagtttatatataaaaactttcatttcatttttaattttctggttctgaaatagattggtaaccactttagtgacctccccaaaagaaagtcattttccatgatgtaaaggaatatagtgtgatgtgatcaaaatattgtggcacgtttcatgttctctttgggtggtggttttattttcatctatcaattcaagcaccaaaatttggctgctattcaagttttttttttttgctttgacaggtcaattttatatttatataactaatgattttgctttaggtttcttaggttatctcaaatttagtgaaaagattatttagtatctttgagtttgtttgctaactttctcttatcaagatctgtcagtgtcagagatttaaataaggcttttttcttgaaaatgtaagaacaactttgagattttaaactaatttatctgtgtgagagagagaaaagataagataaagcaccttttatttatttataaactaacatataatatggtgggacaaaccacaagcctggatttgagtttaagtacattgatttctttgaggaattttaataaatgtaagtttaaagtaatatagtaatgttggtggtatcacagaagtgtgtcgctacacttcgtagcgtgttggtcaagtctcaataacacattagaagtgtctgacaataaaattacttaaaaaagataatagaataatatgctattatattaactaggatcatcatgcttta

SEQ ID NO: 52183 - DNA, 1413 bp, Cannabis sativa
tgaatctttattttcttaatgaaaaacaagcttcacatgtattttttttcacaatttatatggaacattctacaatgcacttataaaagaattgtaccgatacatctatatcaatttagtatttgagagatatttttagtccaatttttttctttttatttctttagttgtgtacattataattatttaaaacattctgcaaaattttaagaaattcaaaaaaatttaacacgccgaagataagattcaaacagtctgttgcatgagtgactcttttattttatgtgcgtataaaatataatgtttgaatactactttgtacattgtaaattattttgaatttctcaaaattttacaggtgtcttaaataactataacacttatacgactataaaaaaaattggacaaaaaaattattatggatgccgacacagataggagtacaactgtacatttattttatgagggtgcatatatgctattcaaataataattttaggatatttctacaatgcatcccattacaagaggtgcactgatgcaccctttatttgtttcgacattcagaataattttttagtacaattttttttatatatatttgtgtatgttatagttaattgagatattttataaaattttaagaaatctaaaataatttacaatataaaaagcagtgttcaatcagtctatttcatacacatataaataacataatcacacgtttaacagactgtttaaaccttatttttcggtatgttaaatttatctaatatattcttaaaattttattggatgtcttaaataattgtaacatatacgactatgagaaaaaattagaaaaaaattcttccagatacgaaaaataaataaaaatatatcagtgtaccctttttatatgatacattctaaaatttttcataattttattatataagtgagttaattttgacttaaatagtagtacttataagctatcactagctatccaccgtcctatattaaaatatgataagtctttgttgataattgaaccctccacaccaccctctcaaataattcacttaacttatcattttttatttttatttttattttagcttccaaagtcaaaggaattattttatttatttatataatttaattatttgtttacaattgaagcactaattgagccatatataatccggcatgggacatctttgtttgtttttttttttttttttccatttaaatataaaataaaattaattgtcataatttatcaactcaaatcaaggatcccactagttgaaaaaatatcaataatgttgttacttagtatctaagtcttcatcaatcttaacttttttaattgttttttttcttcttattatttgaaagagaattagtcttgatgatcactatactctt

SEQ ID NO: 52184 - DNA, 1754 bp, Cannabis sativa
gtgtttgtgttgaatttttttttctctgatgtgtgtgtgttttgtgaaggacatggaaacaaggaaggtggtaatgcaagggaaacttaaggatggtttgtaccagctggaaggttttacaacaaagtctgaggatactgttagtcagccatgtgttgagtctttcttttctgttttctgccctttttctggtttagtcgagtcttgttctcaacctactgtttctactagtgttagttcctttacacaaaaagacttatggcatagaaggttgggtcatccttcacctaaagtcttaagtcaagtgttaactgttaacaatgtaagaattccaatgaatgaaactctaatgttttgtgaagcttgtcaatatgggaagtcccatgctctaccatttaaaaattcatctaatcgagccactggtgtccttgatctgattcatacagatctttggggcccctctccaattatgtctaatacaaatctaagatattacatccatttcgttgatgattttagtagacatacttggctttaccctttaaaaaccaagtccgatgctctaggtgcattcattcaattcaaaaacatggttgagaatcaatttgacagaaaaattaagaaattgcaaaccgattgggggggagaataccaatcttttagcaatttggttatagagaatggcattctcttccaacattcatgtccacacacttctgaacaaaatggtcgtgctgaacgaaagcataggcacattgttgaaatgattaaccctccttgctcaagctaacatgcctctcaaatactggtgtgatgcatttcaaacatctgtgtttcttattaacagattacctacacccgtacttggtggcaaatcacctattgaaactctgtttggtaagaagcctgattacaacttccttaaagtatttggctcagcttgttatccctgtcttaggccctattagtcacacaaatttcaacatcattccatcaaatgtgtcaatctaggatatagtgagttccaaaaaggatataaatgtttgagtccaacaggaagagtttatataactcgacatgttgtgtttaatgaaaaggagtttccttttaaaactggtttcctcaataattaccaaaaagagtctgaggttataattcaatctccaaatgcctggtttgaacttccagtgcaacactcgaactcctctcacaccagtcagtccaacaccagtcattccacccactctccttctcttgatcactcactacatggatctgaccttgactctccagctgcttcaaaccattctgagcaagatcaagcagcatcaccatctgaaattccaggctcttcacacacagaccagattgatctctctaacaatctatttgtcgacttggattttgctcgaattgctgctgatagtcaggctgcagatgcacaacataatgcagcagttcatgaacaaagccaaataccagagatagtttcaggagccagccatcccatggttacaagatcaaaattaggggtatttaaacccaaagtgttcactggacagaccagatgggaacatcacttaacagaaccaagatcagttcaagaagccctttctcacaaggggtggaacaaagctatgtcagaagaaaatggtgccttgctcagaaataacacttggattttggttcctagggaagaatggatgaatgttgttggtaataaatgggtatacaagatcaagctgaatgcagat

SEQ ID NO: 52185 - DNA, 979 bp, Cannabis sativa
gaaaatacagttaacaaaatagccaatcttaacttttgcaaaacagaaggtccaaaataatacttatcctaattataaactatattagcatacctctcccaacatattaattagctaaaaaaatatatcaattaaaaaacaaacttgttttaaaaaataatgataatggatcaacaaaagaaataaaagcaagatgttgctttggttttgattgatttcaaatgttaaaaaattgtgtttgtgctaattttaatttttcttatgtgtgtgtttttctgaaattttgagaaaaggaagagattacgaaaaagaatgaatataattttataaaaaaaaaattgtgaaaagaataagataaaggtggtgtgtcattattcacactattaatttataattgacaaaacaaaacatcatcaaattcattaaacttagatttaattaagtattactaatattataaattaattcattattaatatagactgaacgaacttaactaccacaattgtgattttacaataaaaattaattaagctacgtggcatattattagaggtgtaagaggtagttggagctaacggtctattgactattgactaattgtaagtagatttctatttttttttttccaagtcttttgcttatttcttctctaagaagttaccacgacgtggcatatttacatagctccacgctaattactgttttaacgtgtgagtaatgacgtgtagtattgtcggtggagttagtaatgactatgagattgaggagctaggcaagttttagttaataatttttacacttcaattaaatgcgcccttttaaaaagaaaaaaagtatactaacaacttgtcacgattctagtggtggaaattgtataaagccctacatttattccttattcaaaacccaattttcttttttcataataaatcacaccaaatatttttattgaatccaaatgggcttatttggaaac

SEQ ID NO: 52186 - DNA, 1048 bp, Cannabis sativa
tcttggtttcggacagaaacctttgtaatgaggaatccaggggtcccaccagatactcgtagactctccattagcaattaacttgcaagcccctttccgcaagatggaattggctttcacaacactcttccagaaccaagagtcagaatttttgtacctgcaagagagaaaatctttgcccctgagatacttcgctaccagcactttgcaacataaggattggcttccgtttaggatattccacccccattttgataagaaagcttggttcatttctctagttttcctgaagcccagcccgcctaaagatttcggaaggcagagtttatcccaagccttaagatgaagaccatgatttcctttctcgaaaccccaccagaagtcacggaccagtccatcaatccggttgaccattcgagtagagagttttgtggtttgcatagcatacattggcagcgacagacccacaaattttataagagttgaacgctctgcctttgacaaagtttttgccttccagccttggagctttgacgtgaggttgtctaaaataaagttgaaatcagcgtccttttgcctatatctgaaaagaggcagacccaaatattttatgcatccctctgaataatcaatgcccaaagcttcctttatatctcgcctcatttccattggggtgtttttactgaagaaaatggtagtcttaagcttatttacctgttgacccgaccaagagcagaatttttctaggcaactccagaaaccatttgcctcaactaaattagctttacccaccaaaattaaatcatcagcaaagaaaatgtgggatagcaccggtcccccctactcagtttaatccccttgatgagatcccggtcaagggactcggagatcaatcttgatagaacttcagcagcccagatgaaaagataaggggagagggggtctccttgacgaagcccacaagagggattgatgttcccaacctcacccccatttagacagacgttgagggtcgtggttgaaatacattgcgaaatccaaagacaaa

SEQ ID NO: 52187 - DNA, 1560 bp, Cannabis sativa
ttcactacttggtgtgtttcagagatcaaattagcaaggtggattacaaagggttgcgacaaatcactaaagggagtctaaatttgtttaagtcaattgcttttgaaaactttgatacattattaattgatttcattttctaggcgtggccccgtggactaatagtatttgaatgaacactgatatcacgtataattttcttgtatcaagtttataaattctgggctatttatttctggtttgtttatgtaaaattgtattttgcagtgacattacattttgctgttgcagactattacattagtgtttttactaaaatttaatataattattggcttttgtaaaaacttgatttttcaaagacagggggtgtctcttatattcttagttcttatccaatcaagtattctctatgtttgcatggatttgatggttttccaggtggtagatgtcatgctcatcctaataaaaactattcattgtttttagttataaaacatggttttcttaataaaacttaaaattgttgagaaatggtgttcatcttaataaaaactacaataaaaaggattagaagcattttaattaatcgaagcatctttaatgtgattttatgtatgattcttttatgcaattttagtcacattttagctttttaaggggagttaggcttaggaccttcgtaccatgcatgttaccataaacatgttattaattctcattaattgataaagttgtccgatgtagaatataacacattaattataccaattaccaattacttttttttccacatgattaaatatgacaaaaagatgttaatgatagcaacattaattacagtagacaaccattgaaatgttgacgtgctcgtacaaaaaaatgtttttaaaaattaaatcaaagtaatgattggatggagaactttacactagccgatttaataagggttccatttgaaaatctgctgcaaagttatattttatagagtgcagaatatcttgacaagtacttaatggagtatttttatataaaagatctttaaataataattaatgtaaattttcataccatggccacatcgaaaacaagctagattagatggaagcttctcattagtgggcaatcatggtagtgaaatgtttaattttcgaggaaagagataacgtcaaaattttcttccaccaagagatttgaggggtacatataatcgtatatgaggttgaaggaccatcatttttaagtgggagtgctaatgatttaattttgtgtttgttgtggaaagtttggcatagcaggaaccaacttctacattgtggagtcataaactctccaacacagataatcaattatatatggaaatccggattttttcatgcatagcgaatatgtgttattagtggcggagccagcctaacattttagtggaagcaaaaaaaaatttttttttgatgcattaatgaaaaatataatttttattaaaaatatacaaattttacgagaataaaaataaatatatatgtgagaataaaagttaaaaatataaattttgtgaggata

SEQ ID NO: 52188 - DNA, 1559 bp, Cannabis sativa
tatacttccactagtgaattaatggtactaaaagataaagaagtaattagaagggtaaaatagtattttgactaaaactaattatgaaccaacacatgcatggttaataactggaattgattatatcaatggatactatagtaaaactcagtaaatacaattatataattgctaagagtttaattttatatttataatggagtaatcatagaattaataaataagagattattttgttgaagagactcaataaataatttagcttattggagcttagaattataggtccacggtccccaaatcgttaccttgaaacgctgtcaaggttagggataaagagttgtgtaaatatattcggaaaaatctattttaaattggaaaaatagcatttatttattttagtaaaaacaaataatgttttcaaaataattaaataagaaaagacaaaaattgttaagataagatttgtcaagacaagatttgtcaagacaaaagttgttaggacaaaagacaccatccttgtcccaaagataagggtaagcgcctatagtattgttgctatccctatggagtttgtctttttgggttaattcattatttaattaattcgattaggtaaatatctaatttgaaaagtcgttatacatattttaaggttgttgagatattctctcaagtggttgagagattccctcataaatatcaataaccgaatttagttatagatatttatttatttaaacaattaaatatgattttattaaaggagtttaactactataaataggagcctgatttgagatattagaacactcttcttgaacttaaatttttgaaatttagagagaaaaaggaaattaatttttttcttaattgttcttgcttgtgtgttgagagctaaacaagaacaaagcttattcattttatcctaatagtccacactatttcttgtgtgtggtgaaacaatttagaagacattggtgtgagtctaattgtaattttctcatcatctgaattaagggatacaacatatgagaagttttaaggataacctgatagacttcaaaaggtatattctaaacttgtatttttattgttttgatttaatgtacacacatctaaagatccaattggacatggtgcaacgataatcagataatacaaaactctttcgttgcatacctgatttagtaccataaaaactaatagataaaccttcaacatagcatagataagcgtcaagcaaagcttctaaatgagtagttaatgaacatctggatatccaactccgtgtcacagtaatttattattaaatctcgcaatataaggattttatttccaagatcatgtttgagaattatatcttccgaatatagaaataaagcaattatcaatcaagtatttatgtgtctttattatccacaatagtaggacacattttgaccacaatatcaacatgatgtggcatctatatcagtagaatatcaatacctcatgggtcgggcttcactagatggacccaaagttaatatgtaatttgtatttatcccatcagtggg

SEQ ID NO: 52189 - DNA, 690 bp, Cannabis sativa
cctgtacatgctcatgctcaattgacaatgtcaaacctgaaccaccagctgttgtacctgacaccactgttgttgttctagaacaaaatgatcctactattatcaataacactactattgatttgcatgttaccactaacaatgctcctgcagcttcttcagttgctcctgctacttcaacacatcctatgaccactcgattaaaagcaggtattcgaaagcctaaagcttatttggtgttttgggaaccaaaaactatcaaataggctttgcaaaaacctcactggttcaatgccatgtctactgaaaacaagactcttatcagaaacaaaacctgggatcttgttattttaacacctaacagaactcatattggatgcaagtgggtttacagaatcaagtataatgcagatggcagtgtcagtagactaaaggaaagattagttgcaaaggttttcaccaacaagttggctttgatttctctggaacttttagtccagttgtcaaacacatcaccatcagggttgtcttaactattgctgttacaaaagggtgggcaatcagctagacatcaataatgcatttctcaatggtgatcttcaagaggaaatctatatggttcatccacctaggttcgttaaccctcaatttcctgacagagtttttaaactcaacaaggccatttatggt

SEQ ID NO: 52190 - DNA, 1944 bp, Cannabis sativa
  modified_base (58)..(60): a, c, t, g, unknown or other
  modified_base (277)..(280): a, c, t, g, unknown or other
cactgtaaggtttctcaaactttacatgtgtttaatttacattgttttagaaattcannnttaggatgttaaataacatacgtggtagtaaatctatatcctggtaaaatataatccaacatcttgtccaacgtttttatcccaataaacacaaattaatgtgttggtaacagccatgtgatgaaagaatttgattttcaaatgtgatcctcaaaacactataaatagaggtctttggttcacttgtagaaacaacaattttctatcttctaaacannnngctagaaaatattgagaggcttgtttattcccaaaagcattttcattctattccctaagtgttttttatagggagaaataagctttttggacaaaggtgcttaaaccttgttcaagcctttggtgatccccctttgcttacttgtgttcttcttcatcctctattttctatttgttttttgctctcttctcctctctattatatattcatatatataatatataatagagaggagataacggaaatttagactttcctaaactccgaactctttttgattcggaaacaataagtaacatcattaaagggggaaaccaagtggccatggtaaagataggtgggtgtggacgaaagagactaatggtttatttactactaagtctgcttatctggtctaggcttaagagagatcccctgactgcgttgttgcccccgtcctgtagaacaaactctggaactctaaaattttggagaggcataaggtaccctggtggtgtatcctttcaaattccctgcctacctgtgtccttcttgctcagagaattagtattgagaaggtttcttgtcctcgttgtggggcgggtgaggaatcgatggagcaactcttcctctattgttacttcgcgtaccatctttggaggtcttccccttggggagttattccgatttttgaatttggagctcgtgtttggaatttggtaatatttctctggaacttgaacttgaaaggagtggatactgacaagttgttcctatatgcatcgattgtactaaatacgatttggaagacccgaaacgaaaatgtacataacaactccttgagtaacattaagcactctattgattctatctctatttgttacacagattatgcagcttgcatttttgctccagctttggctgttgtgtcccctgtttggtcccctcctccagaagattggattaaaatcaattgtgatgttaaggtatgtagcggatccatgtgtgtggcggctttggcaagggatcatacatggacagttttgtgtgtagaagctaacattctcgatttcgcggatcctctgattggtgaagctatgacatgtcgagtagcattggaatcggttgtgttgaagaaacacctttttgttctgattaagagtgatttggagaaggttattaatgctctgaagggaacttattcaagttggactattgataattacatttttatttgtaatcaactctctaatcggtttttaagttgtaatttctcgtttatttttaaatgttgtaattttgcagcccataatgtggctaggtgggcttttgctcagaatattttgggcatggttgagatctcttctatacttgactatatctttcgtaatgaccgagatgtctaactttttctttatttatatagtacaactctttactttaaaaaaaaaataataagcaaatttttaagatactaggtgaggttagcacgtgcaaatgcacgtgcctgcctctccttactctattttatttatacttttatgtatttaatttttattaaaatttatataatttaatttttacatagtgcaaattacaaaatatgtattttatttcttggtatatcgagataataggtagaagcataaactgaaacattctggagctacaaagatagttattaa

SEQ ID NO: 52191 - DNA, 1629 bp, Cannabis sativa
ttctctcttttctcactaatttttccactctcagtttaatctctaatcatcttcttctccttgattttcatgattcgatccccctggtttggtgttgaacatccgagccctaacccaaggtctccaaaacttacccaatgtaagtctccttcaaccctttaacctcttttggatctgctctgtgtgatttctgatctggagaaaatatttggatttctgttgtatgatctcttctgtgttctgtttgttgctctgtctttttcatactaatctgaagattatttatatatgtgttatagtggaatgcagtaaaacatgagagttagttacaaagtggttaaatactttgtaactaacttaagtgttctgcctaggaatattagaggccgaaggccacctaggaatttattttactgtcttgtaactttctttgtaataaactggttttacagtgtacagggaatgaatggagtttatttcaacatatatgtatagatgtaagtaaaaataaatgattatctctttgtctatattagttggacatgatttttttaataaaaaataataaatcacatatatttgttgtgactattcattttgctaaataattgtaaacatgttttataattttgttttaaagaagtttttttctaatatatattcaggtttaaaattatttccaatgacactttaaaattttatatttagtgtaatttttctcataaaatgtttcaattttcttttttaaaattaaatatttcatttatgaagtaaatatttttataatattaataaaataacattataaaaaagaatataaattttaatgtaatttttagtattgtgattattgaaaaaaaaattagtactaaaatagtattcttttggttttgatttaattctaaatttaagttttggcattggagttgccctaagtaaaaaattagtgggttaattttattgtaatgacatagttgtaataaggtaatattattatgtctagttattaagtataaataaagtaatctcaaagaatgacatttgtcatgaaattataaagagaaggcaaaagagagtacacaagagagtctccttagtactcctcaaataataataattgcttcaatgccaataaaaagcattgtaatattgggtttttagtggtgactgatgatattttaattaacaaactaacacaatactaatgggttaattgtttaaaaaatttatatttttataattatatattgttgaaatgtaagtaatgagtatataattgatatgataaataattaaatagttactttgattttaaaaaggtgaaaaaatatatgcttctcatatcttgaaataatcacattgaaaagtaagtcgcaatagtattattttttaagccaaacaactaatggtgtagttaaaattttattttaaagttggaaataatagagagaatacgattttcggttgtaatttaagttacaataagaatttctatgtagaattttatacaaataaaaaaaaaatcaatttaaaagtgtaaaaataaaaaaacacctatttgttataaatattattaattatgtggatgtccaaatcttttatttattaccattaattgtaattaacatt

SEQ ID NO: 52192 - DNA, 770 bp, Cannabis sativa
atggagattcttcttgctggtggctgcttcctcagtttctagcaaaaatggtggacagtagtggggcttcagcaagtgattcatggtggcttcggagtggagttgctggcgtatgtgaacagaggcggagctgggttgtgttgggttgtgtcggagtcaggcggaggttcgactgaggtgcttcggaggtgggtcgactggaggtaatggggtcgctggcggtgagtgacttgcgtgatggctacggggctcgatttggaggtggtcgaagtgggttctggtatgagttcctgggtggttcgaaggttgttgactgctggaagatgaaggtggctgcttaggtcgtgagtgaggatgatgatgaatgagttggatagggtttgattattgagtcaaaggattgagtattgggcttctgctaactaatccaagaggggcccagtggactaaaaaaagaaaaataagtcccataactaattgattaaatgactgagattgaaaactttgtttattcactcatctgtccttgatccacaagaggcaaaactaagtacaagcccaatgatttgtctgaacagaaaatcataccaaatgattgcctccttaacatttctcacgtgttcctttttatcagaccaacagtcatttaaaccctgatataagaacactcttgctgccaaataaaattgctgaaccattgctatagcaactgggcacaacttttctaccccaaacttaatttctttgcccaaattgaaatttcttcactt

SEQ ID NO: 52193 - DNA, 1031 bp, Cannabis sativa
gttgagtaccctgtgtcttttttggaacccaaacttgcttcccttgatcatttttactctccacattcctacaattatctgtactatgcccaatccctgagttatagcaaaccagaggtatccactcatacttaacccttaactctacctcatgatcatgttcatcaatgaaagttattttatcaggaaagttttgtgccaaactgacctgaattaagactctcggatactgcaatctatctctgtgctttgtgatctcatcgacttgcaaaggttcaccaacttgtgctacaatcttgaaaagagaagtttctccccaatacttgatgtccaacccttgcaactgcacccaagttggcaccgaattcacctcttccttagtaaaatcatctatagcattccatggtttcataaccattggtttcctatcaaaaaatacatacccttgctgcaacactttatctctttgttccaaattctgaaacctaattatgaagatgcctttagcaagcagccccaccttcaccaccatgtccttccataatcttctagcaaagccatcaagaatcgatactggaggattagccccaattacatagcacaccagagatggctgccaatagtgaacttcatcctctatatctgcaaaatctatcttaactttggaagcatttttgacctcaggttgcttggccgaactagcaaaactattatccaggtttcgcacaataccagatcgcaagatcgggggagaaacttttttccctgagtgaacatcttgagtagtacgattagctacactcaaccagtctgagaaatcatgtctgatctcacttcttctctgaaaaatagcttcggtttcctctggtgaataaatcttttccacataccgttcagacccctgttccattgacactttgcactgttccattggattcgcgatttgttcctcctgtaaatcctcctccgagatctccaattcctgtacaccaagcactgcatccatagatctggtcttaataaccctatcc

SEQ ID NO: 52194 - DNA, 1031 bp, Cannabis sativa
caagttgtaaaagaagagatacaatgattttgcttagagatgaatctatggaagtggttattagagtgactcgagacaggacacttattccaggttgtatcaacaagcttgtaaaaactagggtcctcaagccaaatattttcaaacctaaaacgcttattcacaaaattaacagggttaggactagcatgggctaaaacaagttttaagacacgatgattcgaaccataaaaccctaagtggtgtcgactattatgaggataaaggtcactccatgaatccgaaacaatagcccaatccaaacgttcactaacagttttattagtccaagtgaatttattgccaacataaggaaggtggaacatcataaactcactcaaaaaattggtaaagaaagatatattaagttgattaggaagatttccaccaaacttatcactatgaagaagataactattaaaatcacccataattaaccagagcaaattaggagcattataaaaaaggtcatgtaataatttccaagtaaactgtctttgagaactaacaggagaaccataaaaacaagtaaaatgccacatttcattaatattaaagccaacattacagtcaatattattaagggaataattcaaaatattaacataaacttcagccctccacaaaagaagaagtcccccaccaaaatactgcttagggacctcgaaaccacactcaaaacctaaagacctcttaaacctatctaccagaatgaggcttaagcctggtttccatcaaaaaaaaaggatagtgtgtttgtgagtcttaacaaggagggaaagctgattgaatgcttgaggactccccagtccttgagcattccagctcaggagactcatttttttgggcgggtgtgctcagcatcacccacacctgcctgttgaaagtcattagcagagggagaagcttcagaatccttgtcaccagccctagcacgtttgagcatggaacacatggaacttccaacattggcttaagaggtttgaaatgac

SEQ ID NO: 52195 - DNA, 812 bp, Cannabis sativa
tgtggtgcccaactcagctttgcatctgtccttaacataggagtcgctatgcaaataataattacttagggaatagagaaagaaacactctcagtaaatcatccaaataactaataatcaggtctttctatagaaaatggaatcacagcttcagcagtgaatgatagtcagccaagtgtcttaaatagaattaacataaactgatcataaaattcacaaaatgtgataagtgatactaaccataacattgagctaaaattatgcagatactaacaactttttctttgcacaaaaccaagtgaattcaaagttttgattcaataaaatctgtttgtgcttcagaatggtgtgttagtttgactagcaaacaaccgtctcagtagccaatgcattgttctctttgacttccaacacattaatgtctggtgctgcagtgtgatttgatcattagaacttaataagtatgagataaataattaaaaaagtgaagagactaaccttcattaggcgccaactcaggaaacactaaagacatagttgtgtttggttggatagtgaagtttggaattggtaaagagttgggggtggtgagtttgagtaggaaggtccaacccaaagctcaagaaaaggtaacacttttacttttttagttaagtatttcttgttgttgttgttggaaactctagtgctcatttttctattagttgaatgaacacaattgaaggtatttcaggagatgaaatcctttaggtacagattcacagttaggcatctatggagatggaagcataccagccttgattcctccaaag

SEQ ID NO: 52196 - DNA, 1225 bp, Cannabis sativa
caatacaatacaatacgacttaatccagaattacaatcccaaaaacttaagaaatgacccagacaaagtatttacttgtggttgctgttgcgattgttgaatggaaattcgtgtggatctttttgagctcaaggtgtttctttgtattttatatattctcctcctattacattgctactgatatctctacttgagctcaaggtttttgcttgctaaagcttttatgtgttgctttcagggtctaccaagccatctttactttgacttggagttcagtaagagagattgcagaaaaagatggagatgaaatggttgatcttctgatatcggttattttggaagccttgggtgataaattctcaaatgaaggaagtagagaatggatagtagagctttattcttctactcgtggtatgattagctaggagatgtataatgtacagtccttgttcattttggaaatctttgtatgtgtattttcaattatgcaacaaacaaactttatgtttgtgcttatgactttattgtgttatttatatgatttctaaacatggttatctttaaaggattaattataaattacattttgaattgattgttgttatatatatatccatttgcagggaagttctctcagtatttaatcattcgcataccaaaaattgtttttaaagacaactcagatgtgggtacatttgtcaatgaggtatgtattgataaaggaataaacactaactgtttattacatcaacattatggaattatctattagatctcccataaatatgacttattttaggtggaacaaaaggcatagtcttagttaatgactgttatttctattatgtttaattattgttgtgaaaaggattaagctgatgtctcaaaagcgtacgttctaaatggtctttagagaacacgtttgttgagacatcttgctggtctatctgtgttctaatatttgtaacgaatgcacacttaagtgaattaatttagggtctcagttctctctaggattggaaggaattatatcatccaagcaatggttgtttgatgaacaagttacaataaaagaaattactcatttcattcataataacttaattatatataaaatcaataaattatggtatcttttctgtaggatggctcttgaggttatggaggagatgcatggttatgacttcaagtaagtctatttcattttaaccgtatatgtttagtt

SEQ ID NO: 52197 - DNA, 2472 bp, Cannabis sativa
ggctcacatgcaataggtgttaagcggtatacacaaaggtgaaacccaagcctcacataatctgcacaaaaatcaccaacaagaacacaagatcccaactaaacatgttggtgagaggaactccatgtcatcaacaaatatcaccccaaaggatgagagaggaaagggcctatcacgagacaaggaccatataggtcattcaaggcaatgtgagcctacccaccggagtaatactacaatgatggaaacgtcctgtgattctatgaagggacttcacccaaatagtctcttactaggggggcccgcgcctacggcctctttcaagagcaaagtaaacgaaaggcattatcctttaaccatggcaggaagccgcatgatattgagacaagtggagtaatactcataagccccatgtaaactgcaaggaaaacttaagttccactcaccaactctcaagaaaaaatgaagaaaaagatgaaggagctagaagcagatgcaaatcctcataatgggaagttgttggattaaaattctcaaaatgggctcatatgtattagtgtattgctatatacattttgatctaaataaagttattattttagtaattgtggatcattgagtattaaagtgtcatgagctaaatgtgtagataccttaagctactactaaaaaactagattttcccgacagttttaagtagtcggttaatgtattgttgtcggtctccataactgtcgcctattcgaccgtcacaaaaatagataaaacaggcaactgtggaaaaaccttggcaaaaaacaattattgacgggctaaaactgtcaacaacgtggaaactatagcctacagtttaaaactgtcagctatagtatagccgacaattttaaatcgcaggctacatcagtacaataattcgtttattattcttctgtgctctttactagttgattttgaagagtatacgttcatgtcaaaaagattataaatactgtgcttaatgcaatactttggtcaactttatttttatttcgttttctaaatcttacaaaaccaaattaaaattgatccattctcatctcttctctctcataactatacacaaacacacaaatatatattgtatgtatgtatgtgcatcttaaacgattccaaacaagggaaatatatttataattaagctatcttgtattttcatggatatatatatatatatacatatatatgataacatgagcatgcaccacatccaaaatcgttacttccataggttgagcgaacagaaaaaaaaaaaagtaaaaaagaaatggaggaaaaagagtgagtacgttgaacgcaagggttcaataaagagggagaaagcttggaagggttggagtaagaagtaggggttggaaccaaagcaaggtagttgaatcaaagtgaagaagtatggtttcgtccccacggacgcctgaatggaggaaatgaagtcgtcgtcgaacgagagagggggagagagtggacggagagagcgaggaacagtgccttggtcacgaagaaggacgaggcatggttggaacgggagaggacatttgaaatgaaatctaaacgagattggagttatataatatgccccatttagacgacggttatactttagcttacgattcttaatcgtcatcaatttcaagatatgtgatggtgtacaatattggtaatacataacgacatttataaaccattgacaattccaaactatagctcatgattttacactcacttaactttattagctagcgacggtattctaaaaaaaatttttgaagatcgacagaaatattattttttgtagtagtgagcgatatttttaatttattgaaaggctaagttaaaaatacttaaaattaataacctagttataaggttatatattggtagtgaaccttaaaaaataagaattactttattctcatctttctccataaaaaatgaactagaaaaattttaaattttatttttttgaaagattattcttcaaattaccacaaaaattatatttattaaatgatgtaatatcattactatttataaattaaggtatatgtaatatgcttgtttataaaattaaattttattattgtaatcatacaccactaattccatagacatagtgaagtaactacttttttcagttaggagcgggtgtttagtgttgtctgtatgggtcaaaggagccgctcaaactgactatttttattttattttatttaagttgagaaatgagaatggacctatttttaaacaaaccatcaatatactcacatatatagaaatatagaattattaataatttaatatgggactaatactattcgcttttaatatttgtgggatatggcacattttagaatatccttaaaatactcccatttacattaccgcctcccctctctcttcttctctctttgttataaacaaaaaaaaataaaaaaa

SEQ ID NO: 52198 - DNA, 1309 bp, Cannabis sativa
agcaaaacactatctagtaactattctttaatatatttctgactcagcatatgtatagcaggttcatgttcagtgttgaatcttaactttttttttataaccgttgaatcactttagcatttaattttttaaattacatagccggttggcctgaggtatgcaattgttgcactctcaggactgttgacataaaattagatcaattcctccccccaccaaccaaagaaaaaaggaaaacaaaaaaaaattgttgtatactgcttaactaactcatacttttttacttacatatcttgagagacattgtgttccaatatataaggtagttaacaggagtgatcaaatgatcataataaagtatctcagatgagaatatgcaataatgattttcctaatagaaaacaaacaattagtgatacatggactatcatcgcaacaattgaataactcgggtggtctactctttcattttaaaacttgggcgccaaagtgatataattgatataactcagaggccaatactatatataaatctacttaatagcatttcaattaagagagagtttcactaacaatttagaaatatcattgctagttctttatccacctgttacattctaattaaccttatgcatatgtacagttaaagatgatagaggttccatactatatatgaacatgcaatttgcttcaaatggtgaccaaatatttacataagttgcataatatatgtgaaatattccagtggtgcttcacatttttacaactttgtaaaaagttgacaattatccactccagagtggtagactcaatttaccaaaaatattactaacttccctaagtaaatgtagcacatgtttcacagtccagaaaatagtactgcaacaaccaagcatgcaaaaaaaatgaacgaatgtatatttctactagaaaagaaatatacgacgaaaggcatgacaatacaaaacaattagctctacctttttatctttgtttttcctcgataagttatgttcttccttccttcgtttgctgtgttcctttttctgtgagcaaaataataatactattaaagtttaattggcacgaccataatttttaggcattttcagcactagaacttctggcattatgtaacaagagcaagagtaagtgaaattcgaaaaagaacaagaacatacattcatccatctaacccgtaatgccacatcacgaacagtcttgttttgtagcagcatggcaatcttagcataccgaattatagttgattctgaggcatatctggaagtaacattattatattacatac

SEQ ID NO: 52199 - DNA, 1890 bp, Cannabis sativa
  modified_base (225)..(237): a, c, t, g, unknown or other
atatttagagttatctaaattagtaattttaattgaataaatatataattaaaataaatagattaaaataaatattagatgaaaatacagtttaaataattagctttgttataaaggtattcgatcttcgatgtttgttctacatagttctttttttagtgagattaatccccaatagatggacgttcattagcaatttaacgccgtaaaatctcgaaagataannnnnnnnnnnnntgttttattcttagtaacgtccatccgaatagtggttgctaagagtaggactttcaaagtatgaaataatgacagagtcatgaaataagaatgaccttgactctcaactaaaatgaagcaacatcaaattctcctttcgatcgaataaaaagttgctagaatggtttccgttttagatgagttaactactctattcaatgaatgatatctttgactctcgcctaatacaggacagtgtatcagtttgttgtaaatcttagaaattatttaggattgtttgttttgtattttcacttgtcattcctacttgctaagtgcttaataatttttgaatgtgtataattttgtattgaacattacttgatttctatgtattgatatttgtagtacccaatatgactatgaacaaccccattgtgtcactgttgactgaaaacaagctctctgtagctaactttgtcaaatagaaaaagaacattaatattgctctcataggtgaaaatgccctatttgtgttaactggagaagctcctaagtagccaggtgagaatgcaaccaaggcagttaaggaaaagtttgagcgttggcagaatgctaacaacaaagctcgatactttatgctgtctagcacggttaacaccttgaaaacaaagtttgccaacactctcacgactgcaaaaatcatgaactagttaactgaactgttcaggatggcgtcagatcaagctcgttttgaggcgaccaagaattttataaatgcacggatgaagcctcatcagaacgtatgtgatcacctgctccagatggcaagttacttctaggaagctgagaatcatggagctattatagatcaacaaactcaagtgagtttgatcttaaatagtttggctccaccttttttgccctttacctcaaattatgtcatgaacaagttgacttttgacttccacgagttaatcaataactttcaaacatttgagaattttattggaggtccgcagaaaggaggaactaaagctcctagttctagtactgctgctaatggcacgaccaagcctgaggcaaacattgcctctacttcgaaacccagcaaaaagaagaaatggaagaatagcaagaaccctcttaaagttgttaactcaactaataagaaaaaggaaagtgcttctatttcaacgaaaagggccactggaaaccctagtgtcctaagtttttgaaatgttaacaaggtatttctatctttgttataaactcatgtgttttagagaattattatccccttgggttattaattctggatctactaacaattttttattttcttcttatttcagctctagctgcttacacttggatcctatcttagcgagttgagtcggatggttggacagaagggtggagattgtccaagttgaagatgaagctcgttatcttctttaatttttggaattaattgttttagttaatgaacaatttagtttcaattattagtttgaaattttattccctatttcatattttttagacaattcattatgacgtttttgggagtattaataaaattttctctttaagaggttttcattatgaatttctattatgaaattgagttttatatttactttaacttgtatgctaataccgtattgtatt

SEQ ID NO: 52200 - DNA, 3447 bp, Cannabis sativa
  modified_base (40)..(53): a, c, t, g, unknown or other
agttcatatttagggtgtcaatcaacatacttgtgagtannnnnnnnnnnnnngtaaaataatttccaacacagggtacgaactcttttatcctactgttgttggaccgaaatggtgtaatggggtttggagtagattaaatacccccaaacatagtgtgattttgtggttagcaatgttaaattgattgaaaactaaggacatgttgctcaagtatggaatgcaaataaatgcctactgctgcttctgtgaggaacaccatgaatctgtacaacacttgttttttgattgtgctactactgtgcacaaattataggaaatcaaaagctggctgtcatggaaagcggtttcaacgaaccttcccaccttacttaggtggattgcaagagcaaagatctccaagtttcggaaaaaggtttataatgctgttattgctagtctggtatataacatttggaagctgagaaagaacataatttggcagggggcagctctatcatcaaaccgaattgctgaagacacaaaatggtgtgtcaaaacgagagttgcattgtttacaccaaagaagatcaaagatatagataaggaatggttcaatgaactataattgtaaaatatatagataaagaatattgatatatagattgattgggcccggctgggtgctaataggttgtaaagaatgttttgtgcaatataatgtcttgatttatcaaaaaaaaaaaaaaaattattttgaacattttatgttttatgaataaagtttatttaatttcaaacttatgtgtgcaaagttaattaaataagacttcaacgctcatagtataactttgaaatcatgtttaaatatcttaattattttgactaaataatacataagtaattgtttggaatagtaacttatgtatgtttctataattaagtttaaaataaattaaaatatgattttaattctataatattaaacttagaaattaaatcacatttaattaaaagctttgaatgactattaaaacatatacatggatatgaaattctattccaatcatttatggttaatgattcattaaggtatcattagtagaaatataaatatttaattagaaatgtctaattaaataaaatcacatttaagcattcactagttgaatctatttagtgaaaattataactaattattcaaatcaatatgagatatgatttaaataaattaaaagtatttttaagtgcttagaatacatcgagattgagaataattgattgaagttgttcatgcaattaaatctcaataaagatgacaattaaaatgaggttaagtttgaagagtcaaaattaaatattaatagtcatgatcatcaattatattcaaaggtaataagtatttaagtaggagtattctactcattaaaataaataatttaagaaaactaaattgttcttaaatacaacaatcagtatttttaaatcaaatcaaacttccatggaactatacagatttcaatagatgagatttattgaaataaaagatataccaagaaggtttgaataaccaactaatttaaattagtaattgtatagacatatagaacatcaaagcctaatgagaaagaaattaatggaaaagttaatactttctaattttgaactatggagtcgaaatatgattattcaataatcatacattaacagtctcattaattattcaatacattaagatgatattgaatatgtatttttaataagttagaaactttaaccttattaaaattgatattgattatggtaaacaataacggtacatgtgatagttcaggaaaatattcattaagagaaggatgacttggttattgacttcataagatgaacatttgaattattatattttgatttgaattttgatgtggtttaattcaaacaatataataatgtagtaattattagatatcaaatatttttgagagaataaagtgattgatatctttaatgtataattactaataaatagtattactaaatatggatttaatactataataatggaaattttggatgttattaaggtattggataaataatttaaaagatattcaaaatatgaaatattagatttgaatataataattgcttagctattgaaatttagggatactagcataatgagattagacaagtaataaattttaaattataaattaagaagagtcttaattaaatgatcaaagacagtggacaaataaggagttgtcttattgagtgggagtattaagtatgccgagagtatatttaaaagatcattcaataggtgaatctatttgcaacgagttgttagaatttaagattaagaaaatatttaatttaagaatatataaattatagtatcgtatcgtttgtgaaacgagaaataaatattcttattaattatgtgatcttaaataaaaaagtcacttaaatgtgacaatgatttaaaacgagaaaggatgtgaaatgaaatttttcattccaaacatctgacttgattagtcatgaaatctattgagttcattaattatcataattaaaagaatcaattagatgtggctaatggagggttttggattaataatatatttaaaaataatagttttttgaataaataaatatttaatattgagaatataaaatgatcaatcaaacaacatgaacctgaaagaaataaaagaatgaataaattaaatatactagaatcaaattttatatatttatccaatgatgatatgaaggtctctgaaatctagaactatagtatgtggagggtctcgttcatatgacttagcctgaatagtcgaatgggatacaacgtctataagagttatagaatatgtaaggagactctccacaagtgagagatttttgggatttatatcctaaaaataagtaattaatagataatatattttagaatatatgaaatacaattataagataaatgatatattaattatataattagttaaatatctaaaaatttcttatttatatggagaaggtacaatcttttgcatggtctgtaggagcccatgtgtgcatagggtcgtggcatctatcgagtccacaggcaacgaaaaattgatgcttggatggacaaataatatttgtttggatgaaaaccaaaagttaaactcaagaaaactagaaaacaaaacaaaacatgccaaacatggtccaaaaagattttctgcatggaccgctgatgcccatgtctgcatagggtcgtgacatctactgagtccacaagaaacgaaaaaaattggcgcttgcaaggctacataggatttgtttggatgaaaaccaaaagtaaaactctggaaaacaagttaaaaaaaacaaaataaagccaaacttggtcaaaaaagatcttttgcctggaccactgacgcccatgtctgcataggatcgtggcatccaccg

SEQ ID NO: 52201 - DNA, 694 bp, Cannabis sativa
tggaaaaggatttgggatgtcggaattcatcctagagtctcagttcttctttggaggattcttaatgatgcaattcctattaagagtcggttacattttctgcaggataaagtctgttctttgtgtggtgctgaggaagaaaatgtgatgcacttattctggaagtgtagtttcacaagggccatttggtttgggggtatcttacccttaagaattgaagacatccctgcagatgacttcataaacttaatggactctttgattgatctttttaaggaccacagtatgagtagaagtgagcttctgaacattattggttgtatctgttctgagatttggcaacaaaggaatggtttatgcattcggagcacatctgcaaatgctgtagctgctttggacagaattaaaatgcagattcgggaccttcagaccgttccatctccttcgaacttagacactaatcatgccaggattttgcctgaaaatctacctccccaggtgcttgtagcaagagcctgtaatgtaatattttcagatgcttcttgggttaaaggaggtgccggcatagcagcagtaagcgtggacatccacaatggcacatggttcgtcaaagctcagaagatccaagctcaatcggcgctggaggcagaattttctgcaatttttcttactctgaacagggcagtcgaactcg

SEQ ID NO: 52202 - DNA, 1439 bp, Cannabis sativa
gggttctgaagtgttaaggaagaaatctcttttaagcccattattttagcttatagagaaagggagtcatttgtaactattgaaaacttacaaatgcaaatatatatatattgaaaaaaggagtgaaataatcttcatggtgattaaagcgatctacaagttacaatgcgtaatcattattattattattagtttagcatatttctccacatggaggtaaaatattgatgaactcttgagtccaaggaagattgtcaataactcaattgtagtcatgagaaatggtacatacattctggactttcttttacactcttctatttgaatttggtatgtggatttcaattataacttttaacattacatgttaagacattcaaattgagtgacttttaacgttatatgttaaaacattcaaatagagtgttgttattagcactcagcgtacttaatagtaacagtaattttgttctatatggattagaaatttagtctcttttaaacagtttattttggcttttaagtaatgaaaacataagaaaaggaatagaaatggatataagaatagaaatagaatggaataaaatttaaaatgtataaaaaaaaaaattgataaaaaattattaaattttttcattccaccaaaatggtggaaaggtcattccattagaatgacattctattactttaatatacaaacaaacaaaaaaatgaaatgaagattgtttcctttcattccattctatttcattaccttcaaccaaacgccacttaagttcaatattcaaattctccactaggagagactgataatcccccaacttgttgaaatttagctttttccataactagcagaatggaagaactgatctagtatgtgtccatattgaattattggcttattttataacatagcagattgctttcactggtaacagatgattacttgtttcaggtttcggtttctcaatcaaagaattaatgaaaccttccgatgttatcaaggtatgcgttcaaaagagaaagcccaagatggctataaggtattactgactgttctttaatgagtaggacatgttatttggtgacctgacctgatctagacttcaattttctctggggaataattctttttttgtttactcttctcttgttgatgctctattgaccccattttacaggtatgcttgtactttaccacatgcacatatggtattttgtgacacaatatatgaattcggaaagaaaggtgacttggagtctgctttgaccgcatttgaatttgcgaagaaaaactcgaattctatcaatatgtatctctaccgcacgataattgatatttgcggtcgctgtcatgcctaccagaaatctaggcagatttatgaggtatttctaccatattggcttacttagtaagtgtttcaaatgatactatgtta

SEQ ID NO: 52203 - DNA, 1260 bp, Cannabis sativa
taaccctttacaattacttgagggacatatatgtatgatcaaccgaaatttatctggaaatacatgatataatgcaaacccaccacttgaagaaaaaattgaaaacattttaaaggttctcgaccaaacctttttgatgaaagaggggtcgaactgttataactccctgaccaaacttttttgaagagacaggggtcgaatcgtaataacttcctgatcaaacctttctgacgagaaagggatcaaacaattataatgttttgattaaaaacctatctgacaggaaaggaaaatcaaaaataataaatgagatacaactcataactcgcatataaagttgaacactaacgactcgcactaaaggaaagtattaaacgagacatcaaggtgccttgaaaaatgtacttaaacctaacgcgtgggtagaagatctaactactcatataagcaataagaatatataaaaagtgacaaggacattgaaaatatattcaagtttccttgaaacaagattactactaatgatcgcgaagcagaatcaatgactgctcgagaatcgagtgcagggcatatgatacactgcttgcgcataaagtaggatattaactacttaatgtcaaagagatatatgaccaatggaaactccaaaaaaacattatgcatgatcaaaatatgattgttaaaattgtgaataaaacacaagcaaacaactgcatattgaagttcaaacataaaggtacgaggcatttaaatataaaataaagaaaaagcaaagttggctatccaactttgcaaattcgtctttacaaaaagtgccacaaggggcaaacaattgtctcggctctaaggccatttgaaaaaaaaaagaaaagagaaaaataaaaaccaagcctacattgtggaagacttaaatatatcttcttcgtccgctgcctctgcctcttcttcctccttcctggccttctcatagtaagctaaagtttcctcttcctcctccttgaagaagctcgtgtccatgttgggattcgccatccaggctcgataaacggtacagaggctgatcttattgcatcgctctgcggttttcgcctcatttctttcgagttcggtttctttccctttaagctcgacctctttctccacaagcgccttcctgagttcattgcattcatcgactttggtcatggtggcttcttcaaagtctttctttgacttctcagcttcctatttgagatgagtgacttcttgttgagcgttgtt

SEQ ID NO: 52204 - DNA, 861 bp, Cannabis sativa
aacccatatcacagacagtagcctgccttcaagaaattaaacaccggtttcatatgatagcaaatgtaatcaacaatttttttttgctatttcacatttgatcatagcggtattgacttcaatgatgatgcaaaaccaagaacgaccagaggaccaagtttcaaatgtattcacaagggtatcaacaatagaacaccaactgtttgatacatggtctaaacagttcactcacagcaaacatgaaaaatgaaacatgaaacatgactagactgataatagatcgaactggggcacaaatggtagaaaatcacaaaaaaaaatcatgtgggaatgtgggattgtggcatacctggaagaacttggcatttcttaaaggagatggggatggaggtggttttgtcgtcacactgccattggtattagaagcttccttcgccattgcgcagatcttgctcaaatcctgatgcccaattcacaaaaaaccacacagaaatgaatcacgagcataaacaacagccaaactcacgagactaataatttcccaccgattaaaagaaaccccaaatcgtcacaatccatccaaccacagcaaaacatactgacttcaatgaatagagaatctttttttaaaaaaaaaattaaatgagagtcaaagctcacactacctgtctggtactgcaattccttgagttgaatatgggttttgaaattgatacctaagagagtacaggcgtaacctatttatatatatttaaatatatgatatgataacaatgggctcaacaaactgatttgttttgtttcgatttcgaaattaaaaattaacaaaacgaaaataattgactaaccataccaactaga

SEQ ID NO: 52205 - DNA, 1266 bp, Cannabis sativa
  modified_base (972)..(976): a, c, t, g, unknown or other
  modified_base (1028)..(1036): a, c, t, g, unknown or other
  modified_base (1129)..(1136): a, c, t, g, unknown or other
catttaaattggtgtaaattactttatttaccctatttttctttctttctttttttttttttgctgaaataccatattctttcagttatcaattaacctaatatatttttgaatgattcgtttgcaaaattaccattatttgtctattgtgtattaattgtgtatctttgagttagaagttgcaaattttaacatgactaccttacataattactctgtaattacctaactaaacaaattttcaaactttataattatgtcaaattacatttatgtacgtttacaatataatatttaaaatcaaaataaattaatagagaaatgtaacagattaaatatcgaaattaatatttataatatgttgtttatttttttggaaatagaatagtagtgatttatcttgtttaatttattagaaaatgtaattggaatgcttaaattaattaaattatctttttgagttaaattatattatatgatagttattttgtaagatatattttaaaggacaaattgtcattatatatttaatattaaaaaataaaaaaaaaattaaaatttattatccttaataacattccttatgcgtgttcaaaaaaataaataaataaataatattccttataaaaattagtggaaaaggttgttcccttttttcttccttatttaattaatagggtaaatagtaataaaaatacctaaagttttaagtttgtaagtggcataatcccaatgtttatttttagcggcataagtacccaatgtttgtaaaaatgtagtttttctctaatttcgttcgtacaaaccctgttattttcttaaacaagccacatataaggtctaaattcttgatcattaggtctagacagaaacatgtagtattagttacttccaaattttcctttgataaatttaaaacggagtctgtactgacaaaactgaagaaaatttacagttttacaaacattgggnnnnnatgccgctaaaaataaacattgggattatgccgcttacaaacttaaaatttnnnnnnnnnatgccgctatttaccctaattaatataatagaataattaccttaccattgattctcattttttaatacatggtaaatagtggcataagtaccnnnnnnnntaagtttgtaagcggcataaacctaataatttttgttagtgacattagtacccaatatttataaaactgtaattttcttccagtttcatcagttcagactctgttattgtcttaaacaggacacatataa

SEQ ID NO: 52206 - DNA, 1151 bp, Cannabis sativa
ttttttaattttttttgttatgaatgattgttaatttttgtttttataatttatttctctggattttttatttataattttttgtatcatttttttctgctgaattattatttggcatcttaagatgtccaacactatataaatatatgacacttaataattagttagtagtttctatattattatactacactatgtttttgtttaaaaatacttttttttcaacaattatttaattataattaatgaaaagtaagatatatcactacaaaaaatcttatttttagtcacaacaaaaacttgtggctaaaagtaaaattattataacgaattacaatcatcattcttatattgtgactaaaaattctgtggctaaaagaattagtcacaagaattataaattgttgtaactaaatgtatgtttttagtcacaatatttgttgtgactaaaactaaatgagtaacagtttgtgtctaaatagtatgttttaattaaaagtaattttttattgtgactaaaagttatatttagtcataaaaattttatattgagactaaaaaattatcccaaaaaaactttttttattgtgcatgattacaatatataaattttaacaagagttacgtacgtataacacatctttcacacgcctaatatataaatgagattggagcatgctccttttagaaacgagtcataatatccgtaaccatcaaccaattccatgcgctaggttgaattaagtcacgatactttttatttattcttttcaaaattttgaaacattcaacattaatatgaacactagtctatcaagtcaacgtaaagtcaactatgtatgtatcataatctaatgtgagtgagacattgattagtaaagtagatatcatatagttatgcatccttttcgcttagagcattgctatttggcattgttatgctgacgtgttttctataattaattaattaataattatttatattatttattaaattaaaatatacagataaaatttaatattaaaatataataataataataatataatattaaaatatacttataataatatatcatcctttatattttaggtccttttatacacaagattggaatagattaaacagattaatttatcacattcagtgt

SEQ ID NO: 52207 - DNA, 671 bp, Cannabis sativa
tataattataagtgatatggttggcaattggcacttcaagaatcaagagaacgtataaaaattgtgcataatataattacttgtcaatatagtgaggaaataaaaaagtttgtgtatatttttcagttttgcatattaatatagctagctacttctacttgactctacattattattgatagtaaaatgtttgatgaaacatatattttatatgcacaatcatatataattaattttaattttacaaaataaaatgtgtacatttgcatattttattttttacaatgaaactagccaatttttataaaatatgacagacaaaataaaatgtgtacaggctaattttttacaaaataaaatgtgtacatttgcatattttagtggcgaaattaattaaatataagtttttactaaagaaaaaatgttaatgtaaaaatagcttttgtttggaacttgcagccggcaagttgattccgaaactatgagacaaaaagagtgattcaaaaaacttgttaaataaagaaaatgacataatataatttcttatataaaatgttaatatattttctttcaaaaaaaaaaaattaagtgaacatatttaaatgcgtagtacctatctctcttattacacaaattattaaatgatgaaaatctctcttattatattagtg

SEQ ID NO: 52208 - DNA, 1074 bp, Cannabis sativa
gcttacacactgcatttcaacttccaggctttacaaaccctctcgctgaaattccagactctcccaatttctttctacttttccttcgctgctgcctggcgaactactaccgtcgtatggcagcttccacctctacattacctccatcgtgtaagttcttctttctttttacttttccgtatagttaagcaaagtttgataaattgtgcttcattcctttttaatggacattgtatgcatgttgttcctggataatggccatggcgattatccttggagaatcttttctcaaaatgtctgatgatatatttttgtcttcttattttttttctttgggaggcaaaagggaagaaacccctcgtcttacattttctttgtgtgagtattttatagatttaggattttttagtggattgaactttcttcacacattcccactccttttttctcttgatttctttatattgcttggatgttttgcactagatgtttgttaatgtgaatcgttagattccttttttcattcatcagtagagggcctcttcccagcagttaggggaccctcattctcctttttgacttaatatttgatgtggagactaactgcttggcttcttatctttcacatgagtgaagttctccatgacctttagaaacatggtttctttgggttcaacaaggaaattcttgagctccattcctcaaactccatgtcgcactccaacgtatccagtgccaaatcctcaacaaaggcgacaaagaagcttgccacggtggaagatgttatgcaaggcccggtcgcttataagaaatactcttgtcgctccaatggttgggaggtcgatgaactccattcaaccttgactttcgctcatcagctggagaagataatggttgtgaatgggatcaaatcgtatggttctggagtctaccaccatctttccggggaagaggagacatcgaaccataattataatggttttagagcctggagctagacccatctcatgttcggagccatgttgcctctacaagactacttcattgacttgttagtgtttgttggactcaccc

SEQ ID NO: 52209 - DNA, 1409 bp, Cannabis sativa
ttgtaattagatatccaactttttttaattggattggattggattggttcggttcaattggattggattggatgatgtccatccctaatttaaggtgtcatccagttaactgtcactatgagttgcttatgtgtatactcttgtacacataatacatttatattgatacagttaatattattattaaaaattattttcagaatttatttttaaatcaaataaaattataaaaataaaaataaaatatttaaaatatatattaaaatttaaaataattttatattttttaaataataatattaagtgtactaatataaatttgacacatttacataaaaactgtctatactaataattaattgtgaaaaatagatgatgacataaattttatcattaattaattgagggagtttaattggcaaaaaaaaaaaatccttttatttatttttgaattttaactaataataataataataaattgaggagttccacgtgtgtaggcggatggtgaacacgcaatagactgtggtaaaggacaatgcaacggctaaattaaattaaaattaataagtgaggagaagaagatgaacaagaaagaaggcgtgttttaaattttaagcttattgggaatagtaattaattatttaattaataaaaaatgacaaccccaatattgaccgtttcaaattaagctttgactttgttggttttatcttttaaaaatgtaaaataaaaatgtgatggttatgttatggcgtgtttgtttggattgaaaaagatagagtcgttgtttgtttaggggtttgggaggataaaatagtaactttatcagtgaatgaattcattagttccaagtacgtatctgtcagcctttaacaaaatcaaaatcactgggctgtgtctctgttgattaattggtactcctttgaaaaaaaatatacaaaaaaaattatgataagtcttattcaacctgaaaaagaaatattatacaattaattgaaacaggtataaaacttgtggaaattaattcactttcacttatgataacaagtataaattatgggaaattgctaattcaaatgcatctctctagtaccctcaattttaaaatgtgcaatattgtcacaaggtcacttcttaatacattttatagaaaagggacaaaaatttaatatatttttgttatttttttaataattttaattaaaaaatattattattttattaaattaatttatattttattaaatttaaattataaaatattattaaaataataaaataagtagtaaaataattagaacataaataataaaaatgactttttattttaacttttttaactattttaataactattcttgaatatagctattacaagattccaccttgtgacagtcagtagtccc

SEQ ID NO: 52210 - DNA, 1331 bp, Cannabis sativa
accttcgatattcaactgcgcataatgatccatccaatcggcatcttggtgactactcgaagccatactatccaatcccaaatacagaagaaaagacgaacacaactttcaaaaacaaagagaactttcaaaacatgtcaaaagacaagacattcaaaatgtgatctaactaattccttcactattttaattttgttaaatgaccaatacatatgtttgaactagtttgatgttacgtgtaatgcacatatatagtaatgtttaattaaataatgttaaatgcaatatacatatcaaattttttttaattaggtaatatatttttattttttaatttttgaaataagatttgagattttgatctttgagaattatttttagctattgcgcttgcattgatgtactctttagatgtaattatatatatacatattttatatatacaataaaagaataaatttcattgttatacgtattttatattaatttatatatataaggattatattataaaatatttttgacaaaatttgaatttgattaaagaattaattacttttaaaatatattatatatatataaaatataaatatatatttttttttaaaaaaataatagtgatagatacaatattcttaatttgtaattaggagagtgtggttacaataaagtgtacaaattattagatgtatacatatatcattaattatttttaaaataaaattttttcgtacaattaaaatttaaatatatatcttttatatatagatgtgattatatataaatgtatttttattttttaaatatatacaattaaattattattttcttatataaaatatctataatttttatttttaaatacatataataatattataaaattaataaagaatattctgttaagtaattgagatattctgttaaagttaacgtagaaagttaaaaaaatcccactaaacaaagaattttgttaagtatccatacttcatatttaatagatgttatctatgtttaagagatattgctagtttgttatctctctaattttcaagtactcttgaaaccatgcttgatgtttctagtacttgtaataaaggctgctaaatggtttcattaggggtgacattgggtggattttattggatttcgagtttttgggttcgggtgtatagaattagtaacctgaacccacccgtttgtgtgagtggttttttgagttttgggttgataactctatgttatagagttaatttttatgcttttaaactaaagtattgtgaggagagtagtgaaaatgtgtttattttgcttaattttaattagtttta

SEQ ID NO: 52211 - DNA, 939 bp, Cannabis sativa
caataaagaagtatcaacataagcagtactctatgaagatattactacttgcatcgctgaactaaaaagagggtatattattgaaggagatagaattaaaattatttcaccgaattcttctttaaacattttaagagaatgcatattggtgtccaacatattcaatcaattgttaatcttacaaacttattcacaaagtaattactaatatcgacatttgagaagatgaccactagtacaaaaatagttttttctgacatttttaaatagttgtttaaagtattcccgtcagtttctataatcgttacctatacgaccgtcaaaaaatgggcataatttgcgacggttcaaaactatcgttaatgtgaatttctcgatggttttaaactgtcacctataacagggtataggcgacggtgtaaaacagtgccctatactatagggaaaatttaagggtttaaaatcgtgcctagtactataaggcacggtttaaaattgtgcctagtactataaggcacaatttaaaactgtcgcttatagtatgggacacagttttaaaccgtcgccaataccctgttagcggtgacggttttaaactgtaccttataataatggtcacgttttttattataaaaagctttttttcagggacgatgttttttagtcattacattagaaaaatagggtaaaaatgcagattttttgcaatttttcccctgcaataatttttaaattttttacaaatctgtatagtcacaataatcaaactagctaatatcatctaaatatatttaaaattctatatagtgataatagttaaactatggctaatatcatctaaatatatttacaaatctatatagtagcaataaatcgagatatatacacactgactaacacgacaactgttgtcgatctgcttccgctttcacgtaatga

SEQ ID NO: 52212 - DNA, 1413 bp, Cannabis sativa
gttccatcggctgaaaaaaaaaatcaagaaaaaaagctttacgacaaaaaaaaaaattaaaaaaagttgagtttaacttaaacattttgtatccaaacatatttttgaaatagtgtatagtgtaaaatgtaaaaagaaaaaagagatttttttttttatatttttttaattaagtagctaaaataagcatagaaatcaaaaaatttcttttattattcctcattggatcaaaatctaatagtttaaaattaatatttatagttgagtttgtttagtaaccatcaatgggtaatacccattaagaagtattccatatacatatatgtattataataaatacaaatattataaaataatttaggaattattacatagaaaatataaattgacactttatttacaaaaatacttccataaggtatggacaatatttataccttttatatgatattaattaccaaaataccacttacacaatcagacgatggttgcagggtggttgctgtgtggttgcgcggtggttgcattagataaatgtttcaattaggggtgttcataaaaaccgataaactgaaactgaccatcaaaccgaccagaccgtaactgaatttttggctccacgtcatcactaaatttggcagtcggttttagtttcagtttttttttgacatggcggtcggtttcgattttctaataaaaaaatggttaaaccaaaaaattgccaaaaccgccaaaaactgcaataaactgccaatctaaaaaatcgccaaaaaccgtacggtcagttttatacggttataatttctaaacggtcggttactgttttcataaaataaaagctgtaaccgaccggtcagttataaaattgtaaaaactgaccataaccgaccgatttttacttctagtttcaatcagaaaatggttgcaaggtggttgctgggtggttggcctaaggttgcatcagacgagtatttcaatcagacgaaagtccgaaggttgcatcagacgaaggtttcaataagataaaattactgttagcaaaatgtttatgcaactgtaatgcaactgttgtgaaacattaaaaatcagaacaatgttaccacgtacgtatctctatttacatgtctctttatgatttaatatgaacaaattcaccattataaatttggaaaataatgaaaatacactaggataaacattttattatagtattgaggtaattttttttggatcatacttgagttggattgtttgggaactccagttcaactttttgagatctgcctttcatggatatgaaaattgaagtcaggaatttagttttatgcaaattaaattggatttctggttgaattttagtttcgtagtagtttttctacactttattttatgaatttgaaacaatccctgttt

SEQ ID NO: 52213 - DNA, 1340 bp, Cannabis sativa
aatagcttcggccacaacaagagacaccgagccattaaaccgtttagtgctgccttccaccaataaaccactagagtctctagccacaaactcaacaccatatataattagaggtttcggtaaacacaaccgcatcaacattgaccttaatgctattaatatttggagcaatccattgctcagctccatcccctggaatgtatccagtgaatgacaactcattattagaattctgagcaacacgccattgattaaggtagtttgttgcagatgctacaatgctttccacccccacaattttatttttccacactttatcattccttgcgttccatactgcccaacacagcgccaccaaaggtcggctttatccttgtccaacaccaggaattgttccatacaccagccaagaaaagtggtttctagcatgctatattaatgtcgtacctatgcccagctgatcccaaaccgtcgcatcaagaggacaagacaacaaagagtgcacaatggtttctgcgtttaactggcagaccggacaaatgacactcacattcacccttttcgactgcaactgcactaaagttgggagacaattcttcgcaacccgccacaacaggttcttcatctttggaggaatttttaattgccattatttcctccaaaatctgtccttagacgagacatcaagatcaaactctccattgagctgctccaatagcttgtaagcactcttaacagtgtacaaacccgatagctccaaactacaacagagagcatcattcgaaggccttgagtgaacagcaacggatcgcaccaactctctatcacgaggcagcaacaaattatcaaggatatcttcttcccaaccagaaccatcaacttttaacagattgcacactttagcatgagtgagacttcaatgagtagaaattatcataggattttcatcatctggaagccatggctcacctaaaatggatatatttgtaccatctcccacaacccatcgagaaccccttttcactaagaattgagcttccaaaatacttctccacacaaagcttggattcgaaccaatagtagcatttaagaacgagacatgggggaagtatctagctttaaacacacgtgctacaagagagtcaggattaatcaaaggacgccacccttgcttacccaacaaagcaagattaaaatctcgcgaattcctaaatcccattcctcccttatccttatgaccacaaagtcgtttccaagatatccaacgaatacctaaagatgagttatttgaggattgccaccaatacttagccatcatactctccatatctctagtaatc

SEQ ID NO: 52214 - DNA, 2975 bp, Cannabis sativa
  modified_base (71)..(72): a, c, t, g, unknown or other
aatttttacttattggtaacctgctattacaggtaaaaaaaaaatataaccatatagttacaataaaaatnnaaccattgaatagtcacccatgtatatatatttataacatgtacaacaatatcatcaccatcatatttcggtatgtggtgttttaatcacttcgaaaaacaatcaaaaattgaaatgacaattagtgcaataaaatgaactaattgattaagagaatgaaaaaaatataaaatgcaaaacataaatcaaatcacaccaatttaacaaggctcgattagttgttttgcagtggcaacgtactgtctactccttagatagaacaacctttgacttcaatttttattgattcacacctggtgttacaatggtgaatcacaaataactatgaactcacaagatgatcgagttctatagcttttatttatgtacagagagaattaggagaggaagaatatattctatttataacaaagttggtattatagtcatagtccaagaatgttgaaaagataaaattattcccaaataacttagctgcagagattgaagctttaaggaatttactggttataattgaatactagctagacttaactaacttcaactaataccgcaaattcacctaatttagttaaactaaaccagtaatgaataaactgttcgaagagccccctaagggcattagctgatggtgttaatacttagcagccttaggcaatgcctaagcttgctaataggaaccctgttagtgaacatgtcagttggatcgtccttagtgttcactttgcttacttgtacatagtttttgctaaagatgtctcgtatgaaatgcatcttgatgtcaatgtgttttgacttctcttgaaatatgagatttttcatcaaatgtaggacattttttattgtcacagtacattgtgatgttttttgaattgaagccatgttccttagttaaacccttcatgcttctgtgactgccatatactctacttcagtggaagacagagctactacctttttgcaaggttgatttccatcttatgcattcaccttgagctgtgaaaacataacctgttagtgatctcctagtgtctatgcatccaacatagtcattgtccacataccctgcaacttcctcttttgaattgcagctagcatagtaagctaaactagtgttaagggttcctttaacatacctcattatccattttagagcttctcaattttgttctccagggtcaaaaataaacttattagtgatgctcatggcatgtgccagatctagcctgcaaactatagcatacattaggcttcccactgcactttcatatggcacactgtccatgacctttctttcatctactatatatctgaggtgaatgatcttttgagagtttgaagtgagcagccaaaggaatggtgattggtttggtactgctcatgttgaatttgctcaaaaccttttccaaataggtcttttgtgataaaaagatctttccatgcctctttcttgtgatttttataccaagtatcttcttagcatcacccaaatctttcaattctaattccctcgggagaccctttataacctctatttttgtcatgctttttccaaccaaaagtttgtcatctacatacaataggaggaacaacttttattttaatactctcctatctcattctcattctcattcataatatttaacaaaactattattttaaaatattcaatatatacatatacaatacataataaatatataataatataattacaatattttatacatacatatacaatacaattataaaaaatatacatacaatacatattcaataaaacacaaaatgcatacatatacactattaaactttagatttttaccttattaccgaaattcggccgccaataccgactaaaatttgatcaccccacacaacaacaatagcacaatctttaaaaatcctaagaaaatttacaaaataaaaaaataaagcaatgtacgttactaaaattattatagatttataccttaatagacgttgagattccacgatttctccaccaaaattggcggccgaagctacaaccaccacaactactacctctaatcttagtttacgctaaaaaactaaagaaaagaagatcaaactctgattatatgtttttgagtataaaaaatgcaagatttaaaaaaataagtaaaaatgaataaaaaataatgaagtgggggatggaaggtggtggttggcgagggttttgtgaagggctgctagttattttgtttgggggaaagataaagtgaggaggatgatgggttgattagggttatataaaccttatattgtcggttattttgtaataaccgacgatataggtatttttcattaaaattcaacactctagggcatcagttattacaaaataagcgacgtcacatctttttctttccaacctcccgctatggcatcgattagcttcatttttttattaatcaactgtaagagctgtctttataggcttattttgtagtagtacttgatcgagttctataactttatttatttttctacatagagaattagaagaaggagaggaagaagatttctatttataacaaagttggtatttatagacatagtctaagaatgttagaaagatagaaattgtctccaactaatttatctgtggagattgaagctttaaggaatttattagttataactgaaataatagttagaattaattaacttaaactaacaccacacgatctatacttaagagtatattgacctactctgattagtcgtctagactagatttttcctaaatgtccttaaaaaattacattatatattgatgaaaagtgttacacatttctatactttttttatttagaaaattttggtattaactacacaaaactaagaaaattagaaaaaactagaattacctagaaact

SEQ ID NO: 52215 - DNA, 1325 bp, Cannabis sativa
tataatagcttttagggagtatcactagccaatcgcaacgcgacatgtcgagaaggtattaagcaccagtagtatttaatagcaatgctcaaaaataatacatctcatcaataaattaaattgtttaaaaaattattaatatcaagatggtgattaaaaattattctatattaaagtttatcattaaatgatcaatagaaaaaatgtattgaaaaaaattatatttattgtgtattaaatttaacataatattatataattgtaacacgtgtcaaaaatttaactaaataaataaaggctaccaagtcaaatgtgaaaccctttacgtatgaagatttgctacttcactatattacttccactccacccataactttccaatgaagaccaatatccaacaaaataattgatgttttgctaaaagaacaaaacaaaacaaacaaaataatgttacttttgttgttgaaattggataaatattattttaaattatgtgatttataaaaattatattaattagactttctatttcgtaaaataataaattagacttaaaatgatacaaaatagtattctcttcacgagttattttttattttttttttgtcaaaataaaacttaataataacttaatctagaggtattgtgacaagattgattatattttctgtatctgtttgtattaaaaattatcttcaagctggttatattaaaacaaaattgttaaacattaagctcgagttaccattttggaaatacatgtctaatttgtcatttaataaaataaaaagtctatttcggtaactttttcaaaacaaaatatctaaaatagtattaacccttaaaaatatagaaaacaataataaacaatttatattataaaaaatatctattttaaccaattacatataatttttattttttatttttgagaatatataaatctatattatttatgatcataattatatttgtatgattaaattaacaataaatctatattgggtgtatgggtttatgttcctttatccattttaattaagttcttctagccaaacaagcttggaggatttttgaagatccaagtacactaaacccatacccccaatatagatttattgttaactcagactctgactcaagacccaagacctggaccctaactcagactcggactcagacccacgacgcaggactcaggacccaaactcgagactcggacccgaacccgaatttgggactcgggcctagactcgggacccaaacctagacccacacccgaacccagatcctgaccttggcccgaactcggacttgaatctagg

SEQ ID NO: 52216 - DNA, 1458 bp, Cannabis sativa
tagcttcttttgagaaaaagatatataaaagatatattttttttataagttagttgctaaattagattttttaattcgttctaaattaaatatagattttttaaattagttacttatttttagaaaactaatatgtatgtatatataagagcaataaaatcgtgtcacaatatcatttaactaaagatttaatttgaattatcaaatgcaattgttgactacataaacatagagattataattagttattattataatgttttaaaattttgctaattaaagaaaaaagagatagatagatagtgatgttttttcttttgaagtgtgtagtcaatttggaacaatttatgataaggtatgattattttaattttatttttctttaagaaaattaaaactctggtacaaatttacaacacaaactaagaaatattatacattattaagagctttcttttgaaaggtaataattgtagtatgaacaatctaaaaaaaaaaaattcaacacaaggaaatcaaacaacattttattactaaaaaacagaaaaataaaaaagaaaaattcagcatatattgaaaaaaattataaaatgtttcatcactatataaattttctatactaataaaaatatatcaaactttgaaaaaatttgggattggctttaatgtttttatgttgtcaaagttaaacccatgattgatcaatattgtttctgatagctttgttgatcttctttttctcacaattatgttctgacatatatcatataataatataaatatgtgaagaaggaagacttacaacttgagttgatacataaacacttgtaacacaaaatttcttaagaatatatgtaaattaatctctaaataaaagtaacataattacaaaatatttaaaaacaacactatttaaaagagaaactttaaagctacaaacaatgtacataaaattaacagataaataatataactagataaaaataataattcaagtattataattaaatcctttgaacaaatagcaaaaatattattgaaattacaatataagttatacttgaaacacatattacaaagaagaaaagaaaaggggaccgagaaagaagaatcaataggataatagtcgctaaatttttaatacctagttttttttcctccttttgttagttgtatgtatagtgggtcaataatttagtcagatatttttttaaatatataatgagagaaaaacgtgatatgtgattttactattttttttttttttttttgaatagggtgattatttagagatatatattttatataaattcatgtttatagttaacattttttttttaaattatatgatatctaggtttaaaaaaagagattttttctattatagaccaaaaatagatgaaatttacatttatggccctaaaaaaggaaataaacaaaagtggaaactaaaaagtt

SEQ ID NO: 52217 - DNA, 787 bp, Cannabis sativa
aaatccatttgcattttgaagtacttgagatgggaaatgggatcttctctcccggtgtacatcttccatgttggcattttaaacttgtggggcaatgccatgagattgatctcacgcgagaaaggagtttcacgtgctcgttccagctcaagacagccatgcagtgaaacatattttccagttcgtctagctgtgcttgtacggctaggttaacctgcttggcattctagtcaattcgaattatgtcagcatctttctgagcggggatttgagcacgggctccagactgcatgatcgtcgtaacattttaatcgtctactcccgtccttctgtttagatcattccttaggtcatgggtcctccccaacctatcgaatatagaagtgcctggctgcctcatcgattgatttgcttggttgacgggtggaatggcaccattaatctggttcgaaccattaggtatgacttctccagatgaatgactagacgaggtctacccacctaccgctaggcccatgagtggaactcatgaccagggatagggcagttgaccacttgtagtctgagaagtattcatcgctggatcttcgtccgtctcacccaggggaatgacatttggaggttgctgacctacagtttggtaggccttttcgtatcagcacggtagcctgccaactacgattatagtgttgtcagcacatatgtataaattctattaagtccagaacataagtatttgttcatgattatagtgtcgtcagtactgtggaatataatcatgattata

SEQ ID NO: 52218 - DNA, 1188 bp, Cannabis sativa
attcttgcttgaaatgtggattttactttcaaatgcttatgtgtatcaaaaaatcaaattttgggtattgtgtattctgaccctgagcatcatccttggttgttgtcttgtgtttatgggcctccgtactttcacgagaaaaagaaattctggttgaacatgatggaccttagtttcaagtttggcgggccttggttgatcttgggagatgtgaattttgtcctgagtaactcagagcgggtgggatccaaggggaagcaccaatttctcccattccttgttgagttaattaatggccatgctttgatagatatgcccataaaaggtgacaacctgaattgggagacaaggctttggttaacgagagttggttaaggatttttactaaagcagtggttcggtcgctccacacttgcaattcagatcaccgacccctttatgttagtattgtgaattccgagtctagagcacaaaggccctttcattttgaggcttggtggaccagggacccgcggagtaccctaattgtgagttatgcttaggcgtcagtttcccataactgggccccagctagtatttttaagaaagtgggtgctacccgcctgaccctaggcaggtggaactgagagcaatttggtaagttagatactaacatctccatgatggaagcccaactccagaatatccaaaaatgcccgtggggtcgagaaagtgggcccaggagttggaggtgagacaaaatctaaatgaggctttacgacagaaagccttatattggcaacaaagatcccaggtctcttagatttaggatggtgataagtgctctaggttcttcttcattttggccatcatccgtaatagacaaaatacagtggaaagtatcttgaataaggatggggtgtggatctctaataaaagagacattgctagagaattcttaaattttcttgggggcatattaaaatacagtaccagtatcttgtattctgtaactacggaaaaactgttttcagtaccagttttattattctgcatttaattaatcacttaattaaatattaaactgggaatattaatatacagaatttcagatataaatataatataaaatatatgtgtttgcaaataaatcttagattaatttaaaaagagaaaattatggcaaaagtccccaaaagtttattttta

SEQ ID NO: 52219 - DNA, 705 bp, Cannabis sativa
aagagaattgtaacattaggtatttttgccaccaaaaataaacactaggtatttaagtgtataaaatcagaaacattaagtatttatgctgtaatttatccttttttattttgttgagattattgctatttcttctatctaagtgtttttttttctccatcttctttctttcaaaggtgtgtctcaaaaatttgagttgcccattaactttgggttgaatattcatcggtgttaattttgttagtgtgttatttttatttgctatattttattttttatgtttatttttattttcaataatagtgttgcttcatcaattgctatattgttatggtagtaaggctttattcattcatggcaagaaattttagtctcgtttctttttgagacattggagaatctcaattggctcaaagtatatttgtattagtaacatgtctatccttatccttattcaaatctaggagattcttaaaatttcattagttccatggttttatggtgcaattgtaatagctattttttgagtgtagcgtaatggtattacatatcaattaataatttaagggtcttgggtttgaacccatgctctctctcttttttcaacccctcccgcaccactaaactagctttagtggcttgttattgctatagttcgtcgtttgtttattttcctttattctacacactacaagaaatgtcact

SEQ ID NO: 52220 - DNA, 2157 bp, Cannabis sativa
aagatgagttttggtctgtttctgtttatttttttatttatagaaatccattggtgcctcccactgaaggaaggactcatggtcgacaaccctcaggaacaatagccagatcttatctccaatactatgttatagaaataggaccaagagttggtgaacctgcaactggcgagccccatgtagacttgggagaagatctcgagttagccgaacttagccaagtcgttggacaagctaacctaactaaagaaccacccgttgctgattgcaatgtatttgctcattagagatgcaaattccatgtgtggatggatgaccaagagtacatcctttgatctcaccaggcagagttagattgtcgcaatagagagaccagggacttgataaggcggttcactcagggaaccaatggatgacgctaggatctcattagagatccactccaatgaagacttgttgatagatcagggagggtgtatcagtaacctaaccaacccggttctttaggagccaagagacaccttgcattacccgaaggaggacaggccttcccacaaaggtataatggcaagaatagccagatctcagaaactagtggtatggggggccggctagggatctcaggctcaatcatagcccccatcaactagcgtttggatggctagacacctcatggagtccccctgactgaccagacgagtacactcctcctcgaggggagagagtgattcaaaggccaatcttcaactgactaggaccaggagcgagtggaaatacccaaagtaacaatttgagaagtgaaactaatcacgtcaggtacttagatgcaccaagctctagcaactagtgtgatctacctcctatcaactcaccgatgacattagtcaatttgggagttacgggtggccagacattacgtgatgcaggtctggcaagccatggacagctccctagtgtagggttggcgggccatagccaaaatccatacttgggagtagccagccaaggtctacaatacaacagaggtctggatgacctccaccatacactctcttagagtatggccggccataccctgtcacatcagagtctgcaatcacatttggaccaactaaggcacatgattcagggcatagctagtccaaaaccttcggatcttcaactagaccggtcaagcagttcaccattctcgacatacataaatgtcttgcacttgtccaaattcaagatgttgatatagaagatgtatacatattagaagacccattgacgcacatcaagtacttcgagatgtagctcgaactctagaagatttttggtaatgtgtgatgtcgaatattcccatccaattagttgaaaatagctcaacaatggtacctcaaacttgccgtagcaaaatttaattcatgggacgagttctaccgtgaatttcacacacgattctcgtcctcaagtcttgtaccatcgcagctagaagatcttgtcgatgtcaaacaatgacaaggagaaattttgaaggattacatctaaaggttggctaagcccacaaagttcttatagaggagggccgatatataatcatactggggggcatactcccattgaatgactacatgaaagacatccggagggtctcaattaacaacctgaaagagttctttgatagagctggtggctttataaaacttgaagaagctatatgacaggcccagaattggcgtgtcaataataggctgtcacaagccatcctgcagtcacataacttttcaggcgcacaagcaggtagcagccactctaccaaaaccactagtggcaagagcgctagaaacaagtgcaacaataacatttctgagagaacagttgcgaaaagggaaagtttaatagtatatcaagtatgattgaggactaacctgtaatgtgtgggcatgcactcaatcactaatggctgaattttgttttgtgaagaaggctatatgatttcgaaattaaaaggaaaaggaagaagatgaagtctcataaacctagagggaaaactaggtttttagctttagaagcatttgttggataaagagaccatagctttccttttatactaatttcacctagggttaaggttgatttatttggaataaaaaatgataaaaatggagcaaaaat

SEQ ID NO: 52221 - DNA, 1379 bp, Cannabis sativa
tataagatttcattcttttactccattctccttttagtcatactattcaatagggtacatttaaattaggggtgtatttataaatttttataatattgtaggatgtaaacataactctcctatttatatatttgtgtgatcaactaattaattagagtactctcatcaacttctttattttatcgtttaatatatagtacaaatttctactttttttattttacctcaaactttacattatatcatacattagtttctttaaaaaatacattaccaaaattctattttttttcaaattttaacacattttattaatatttatacatatccctatataaaaagaaaaattaaaactccaaacaattaataaaattagtttatagtaaagaataatattctataaacatagagcatgaatagtgaattttaaagaagatttaaaatagagaataaatttagatcatttgatgtatcgtattttcatttgacagagacaagaaattattatatttaattaatttttattggtcacacgttctttaattaaatattaagtattaaccacaaattagtaaaccctttaaatagaaaatttcatataattgacttttgatttagtgaaacattaagaagaagaatataattagagtacaaacttggaatatggatccttgaagactgcctttgttttgctttaattttgtactcaaagaaaaaagagtagaaaatggatagccctaattgattaagggaatgccgtaaatggtgtatgagtgattccatgcttacttttaaaaaaacctacccttgccctgttaaagcttcagcaaagacaagaaaaagagtagtaggtactgagagaagagaaagattgaaaagcatttaaaagaatcacctcaactccaaaagtaaaaaattaaaaaatgttcactaatgtgtttcatggtcatatcttatattctcatataacaaatttattttaatttaatttggtaggattttttttgtttgtttttatcaatgttttgaatggatcattgttacttggattggtaccattatcaacccaatacatattataaagggaggcagctgtcatatgcctttttaatttgatctttaagtctttgctcacatttttgttttaattttgaagtgggaaatttgaaattacttccttataatatctttaaattttttccctaaattcataattattaaaattggtcatatatgaccacattactaatttcccacaaatacccctcccatttaaaaaactaaaataaaaaagcttagttctctctctccctctcgcacggtacacccacacccaccaccatcggcttcacctccgacgacgacggacgaccacccac

SEQ ID NO: 52222 - DNA, 1662 bp, Cannabis sativa
  modified_base (36)..(52): a, c, t, g, unknown or other
  modified_base (1444)..(1469): a, c, t, g, unknown or other
  modified_base (1587)..(1595): a, c, t, g, unknown or other
catcagtccatgaagtagccagagtggcgtactcgnnnnnnnnnnnnnnnnntccgtgggtgtaaggacctaatggaggcttgaggcggggatgttatagtccatgcctcgagttcttcaatctcactgcttagccttacccttacctgcacacagagtacccgtgagctaacacccagtaagaagagctatgtaggacataaccgtcctaactagatacttgacataagttactcttaatactaatcataaataattcacattccataaaatatattcacaatgcatgttgttctcacatgcataaatcaagtctcatagtccacattttactcacatacgataatcaactatacactcatgtttatcagacatgaggtaacctgccctgccttgtgttattctcacacttggcatccaacagggcaatcatttactataagttgtactcacccatgataaagttataacctgcaagtgttatgctcacacaagcagtaagaccctaatattattctcatgctaacgatgctaattatgtaaggaaatcatcacaatacataatcaaattaaatagcaacccaacccgagttgtatgcataaacatacaccctgtgcacaattccaactcttcttacctcagttgctaagaccacacttgatacctcgagcacctcaatgaattttcttattgcgaacaagatcctcagaatagcccagaacgtgatcgtcgacgttcacgtcagttttgtcgccaataaagtgtaactttgtccccgattgctgttgacgcatcctttcgattggggaagctctccacagtgctcaggatctcaaaacgatcaagatcaacgcaagaaaagaggcccaagttggcagatcagagttgtctccttcgttggtggtgtaccgtctttaatggagtcaaaatcgtattccttctctttgcacgttaaagcttcgttttcttacgtcaaaaataatccttagggtcccatacactcatatctaacctcccttgacccaagaacaagcttaaacacgttcaaattcgtgtccgttctaagtcgtaccttcgaagcttcaacaatggtgaaactcgaaacagtgacctctgacccttatacaatgctaaaaggcttccttaagtcgtacataagtgatctcaaacccccacttcacccaggtggcactccactccaagaacgaaaaaaaaaactcaatatatcgtataaccgtatactctctctgtttcactcttttgacgtacaaattttgaacccaataaccaatctctaacgtgtttgaacccgagcaaaactatcgccttgaaccgaaaaggaacgattctcatttcatataaatcggttgttataggtattggtatcgtatatacattaccttatgtatatatacattatcagaataataataataataatannnnnnnnnnnnnnnnnnnnnnnnnnaataataataattataataataagtgtgttaaatatatcatttactactataataatatttaccaataatattcacaaatattatatactatatcgtaacaccctaactagcataggnnnnnnnnntgatttttaaacatactgtgcaactcgttgctcatcaacgaggtttatggaaaacgtgattaattaa

SEQ ID NO: 52223 - DNA, 1116 bp, Cannabis sativa
  modified_base (29)..(30): a, c, t, g, unknown or other
aatcaagattaactgctaatttccaaatnnaactaagcgggctttacagtaagattttgggtttaatctctaaaatgagatttaggtcttaatctctgagatgagatttgggtaatttactttgtgttgggttcacttttaaaaaaacttaaaattatttttctctttcgtacggcaccatgagtccttcttctctgcagttctcttcgcccttgaactctttcatggatgtggttgattgactctgatgactcgaatttcttcatcaggtaaaactttttttttttattttatactctccctctcttccttcaatctcagatctgataatagcatgactctaaaataggtttttagagtggaaaattttctaccattgaaggtatgattatatttttaaaatatttggatttatatgtatatatatacacgtttgggtttacatgattttgaattatctgatttctattatttatatttatcttttattgcttatgatctcttttgtcaatcatttgatgattcaatgggattttggtttatgggatgtgtttaatttcttgtattttctctaattttagagttttaatttgagtttgaatgggaattgcataagaaattagagaagtattttatatttgtgtgtgttgttctttaatgtatttcgatctagtgatgttatattcagcttttccattttcaataatctggtttgttaacttggctttatttcaagaacacatctctctgttttcatcatcaagctcttagttatgtctagttttgcaaaacagtcatttttctttcaagctttgcaattagttatgcttggataaaagttcattaatttgttatgaagcccatagttgttattattgactagttctttatgattttagatggagtagtagtagttgtagttgctagcgaataaattagtattggctaatggctgagcagttgtaagcatttgacagcattaaaatctgcatattgttgatataaagaaggtgagcacttatgttgttgaagttgaattgagaatgagctctttttccaaatacatgttgatacatgttctgttattattctcatgtacatgttaatgtaattata

SEQ ID NO: 52224 - DNA, 693 bp, Cannabis sativa
  modified_base (363)..(364): a, c, t, g, unknown or other
tgggttagtggattgatgattataattggcatgcataaagtggttcaattgttcgctaattgcattctatggtttcatgagctaaatgaaaataattgaaatctgttaagggttaattgatatgaaattctggattatatacataagtgaaacttttttcataagcatgttattgaagctacttgaaaagtactcatgttttggagattaacttgttttatgtttatttagtattttactcgaggatgagtacaagcttagtttgggggaatttgctaggttacttttagtattaattttagattaagcttagtatatttttaattgagttttgatcatgtttggagcatttttacggctttnnatcttttatttttacagatttaaaataaaagaagattagaaaaatatcagagaaaatagattggaaaaaaaaaataaaaatatctcacaaaaagatgatatttaaaatagtgaaaattacggaaaaaatgaagctgaaatttcaagcctgaattcgactatcttttggttatattttggaaaaagtcataacataaaagttctagatctctcttttatctttccggaacatcttgaatcgtcaaattttgagcaatatcgagagagtgacggccaaaatactatctatcaacgcagtagaaaaatcaccgtcaaaacgtgaaattccaa

SEQ ID NO: 52225 - DNA, 978 bp, Cannabis sativa
gataagtgttaaaagacattcatcgtattcaacatttttctaaagtgtaatattattattagagcaattcaatatcgagtcatatttttttgttttttgtttttttttttttgaaaaaaaactagaattgagaaagaaatattagacctcatagtcgttacacaaaatattcgtaggaatagtcgaaacctcaactattcccgtacaattattagcgtcaacccacttaactacattatgggcagtaaaattacaaaatctcaaaataaaaacaaaattacaacataaaaaacaactagagaatctagctattatagtttgttatgtagttatagtgcatcacttcattacttcatcctagtgcgaagcactataagtactttatagcaatgctcttttagttaagactaataatatattcactacataatttatttaaaattggtattaagaattttattcattgtattgtgataaattattttatttaaaaatatatatattttcatttaattagcatattatttaaatgagcaaaacaaatggatataatcaaaaaaattaaatcaaatatgttataatcatgaatcatattgaatatttatcaacatgtattgtaagataaatttagttgagagatgaacacaatacgtcgacaaataaacacaacaagttaaattaggattgagttttttcggcacaagatataaataaaatcatcttatttttgactaattagctagcgctacatcaaattgaataagattaacacaaatataatctaataacacgagttattattcaacttttactttattatttttattgtggatatataatataagaaatttctgtacaccctcttaaaagggtattttggtaggtcttctatttgttttggtattcgaaaaacatttatagtctaattttttttcataattgcgtacgttgtccttatttaggatcacatgtaaattt

SEQ ID NO: 52226 - DNA, 654 bp, Cannabis sativa
aaaaaaaaaactatataaaaaatttgtttgaaagtagtgatttttttaaaaaaaaaaaaataaaattttgattctcaattgaaaaattaaatacagtgaaaatagttttataaaacttgattttaaaaaatatttttacttttctaattaaaaaaataaaaaatggattaaaaaagtgttactaaacacaccctaattatataataaaattttagctttcatataattaagggttttttttaatttaatgttgtttaacactagtattatataaatctaggtaaatatttttgaccatgtgttttgtataagttacttattggacgctctattagtgtgttatgttaaaaatatttagaccctttaatttgttttttaaaatagtacaaaatagactataaactcaatttctgtaatttttcttaatacaacagatttgaagtcaatttagcaagaaaatatacaaaaaatgtaataattcctgtcataacacctttaggttagattaatattaaattttaatttgacaaaagttaagcttaggatctattttgtacaattttaaaaaatactgagttgtcatttaacaaaatagagagttcaattgataatttatcaaaacacataatgtgagttgtcatttaacaaaaagaa

SEQ ID NO: 52227 - DNA, 1083 bp, Cannabis sativa
ccaaagtcaagcagcagctggtcattggttacaaaaatgatgaacaacaaaagagtggctgcagaggatgttaacgaatcgaatgacttcacaagtgctgatgcagcattgaacttgctcatcactgctaagaaggtcaagaaatcagatagcagcctagaacagaatgtacaaaaccagcttcaaaacttggagttgtgcattgaagacctcgaacaaggaattgagagtctttacaggcgtttgatcaaaacaagagtttctctgctaaacatcctcaatcactaactcattacaatatcttagatttgtatcataataggaatacaaatgtacatgtttacaagatacacatggcatactttttgctaataccaaattatcaaatacttttctcatatatcttcggtgttttcattacttccagctattttaaaattccataattgtcgattatcataaacagaatttaaggttgaaaaaaatggtttattgaatgttgatagtttctaagttctaacatttcttataaacaacaattgagagtcttcaagagttagtttttgtatggagatcagcgtgagcagaatcataccatgtgtaaattgcacacccaaggccaggaaatagattcaaagaacatatatagattctaaacttcaaaatgaatcacacctagacaagagatactcttcacaaataaatttcatcgagttatacaagtccaagggtttgcaattcagataactgatatggaaactttcaagattaatgaaataaaacaaaatttaatctaggaacgagtacttatatgaaaaagaagagtaattgaaataagttattgagtttgataaaattattgacataatgtgtataggaaaatcaagggtcataggtaggtgatacctactttcttttctgcgacaaagattatcatttattcattaccaaagaaatttcatgcttctccaaccgtgaaaagtgaagggaaatttttaaaataaatacatgttctaattatgtacttctttctaaaacatcaaatacaatatgctactttatttttttatgatcaattttacc

SEQ ID NO: 52228 - DNA, 2863 bp, Cannabis sativa
aaagatccctctttttctcaccttcttaattcatcctgggttaactctcgggatcctctttcatctcccttgcaactcttccttgacaagcaatccaactgtattgcaaagattaggagttggagtaaatcccaacaccctattaagttccaaatatctcggacacaaactgatctaaataacctgctgagtgcttctcaccaaactcccaactctctctctctcaaatttccactctccaatctcgattggatggccttctcctcaaggatgaagtctactggaagcagcgttctagagttgattggttgcgtgctggagataaaaatactaaatttttccaccaccgtgcctccaatcgcaaaaagaacaatttcattcgcctcattactcttcttgatggatccatttctcacgatcatgccactataacttcccaatttcttcatttttataattctctcttcacctctcaaggtgtttgtgatgtggctgtcacttcccttctccaagggattactaataggttatccactcatcaagttgcttttctagctgaaccttacacagaagttgaagttaaaaatgcgttatttagcctctctgcggacaaagctcctgggcctgatggactcaactcgcttttttacaaaagtaattggtccactctaggcacaaatttcactaaggctatgcttcagattcttaatcatcagggggacatctccccaatcaatcaaactattattgtcctcatccccaaaaagaaaaatcctaagcatgttcgtgactttcgaccgattagtctttgcaatactttctatatgtgcctttccaaagttattgcaaatcggttaagacttgtgcttcactccattatcagtatcaatcaaagtgcttttctccaagggcgccaaattactgataacattctccttgcgaatgaaattattcatgccattcattctagacgatcggggaagattggttgggctgctattaaacttgatatggagaaggcttttgacagagtagaatggtcttttttaaatcgtttgcttaatcatgttggtcttccttcttcgttctcatctcttataatgcgttgtctttccacggtccaatttcgtctatccataaatggctctcttactgacactttccattcaacgcgtggtctccgacaaggggatccgttatctccctatctttttcttttaattgctgagggtctttctgcagcaattcgattgcaagaagctcaggctcatttttctggcattcagatttgcaggggtgccttgcccctgtctcatctcttgtttgctgatgatagcatggttttctctcctgtccattctcaagccagtgattcccttaatgatattcttgatctctacaataaagctacgggccaattggtgaatagagataaatcctccatccttttctccccgaatacctctgctgatgcccagctttgttttcgtcaatcccttcaacttctgggggagggcttcattagtaagtaccttggtgtcccccattgcgttggcagggtctccaattccatgttccattatctgcttcaaaaagtctcatccaaacttaactcctggaacgaaaattttttctctagggctggtaaggaaactcttattaaagcggtggtccaagctatcccctcttttgcaatgtcctgtttcaaagtccccaaatcgatttgtcataaaattcaaagcttgattgctaaattttggtggggatcccacgacactaacaaagttcactggaaaaactgggatgttatttctgtctccaagttttttgggcgcctggggttccgtattttatcctgtcataaccaagctctcttagctaagcaggcttggcgtatttggaatgataggaattcccttcttcattctgttcttaaagctcggtatttcaaaaattctgatttcatgaatgcccctattggtcacaattcttctttcacctggagaagtattctttgaggtcgccaattgcttcaaaaaggtctggtttggaagattggtactggaactaatgtccccttatctgctcccaattggattcctaacattcaacgtcccatcctactgcatcctcttccccagtcccaagcttttgtttcttttttcattaatgatgattcaacttggaacgtccgcaaacttcattattacttcccttcttaccaagttgatcatatcctcacaacccccatcgaccctgcatcttttgattctcttatttggggtttccacccctcaggcaatttaactgtcaaatctgcctaccatcttgcttgctctcttgaatcagttgatgttccctcctcttcgaatcctaatccgtaccttcattggtggaaaaccctttggtctcttcctgttcctcccaaaattaaacattttatttggagagccttccaccatattttgccttgtgctttcaatcttttccttaaaaggactcttcctcacccaaattgctctatctgtgggcataatactgaatcagtctctcacgcccttattggttgcacaagagcaaagtctatttggaaatcttcaagattcaagcagttttacttgacttatcaaaaatgtgacattaaggattttcttttgcaggctttacataatattcctaaacaggatttccaaattttcattactttcatttggcagatttggaatgctcgaaactccattcttttcaacaaaaattatactactaacaatgtggaagaaattattgttaattatttacaggaatacagtgctactcaatactcgcaacaagatgacactctgcactcagaggctacacgcat

SEQ ID NO: 52229 - DNA, 1108 bp, Cannabis sativa
  modified_base (992)..(992): a, c, t, g, unknown or other
cttggtatcagagcaccagtaaagttccatggcccctggtgagcatacccctggaaatgcatcagctcaaactggtagcaatgttgctaaccagcagttcagtacatttggagcttcttcctctaatgtctctgttcctcactttaggagtaccttaaatcagcagtttgctctcaagttagacaggaacgatttctccctgtggaaaacaatggtcatggccattgtaaggggacatcgtcttgatggctacttaacaggaggcagatcaagaccagctgaatatatttcagcacctagtgttgaaggtgaaccaggaactacttctgaaatgaattccgagtttgaacagtggattgtcaacgatcaattgctcatggggtggttatatgggtcaatgactgagagcatagccactgaagttatgggatgctcttcttctgctgatctgtggagtggtttagagtcctcgtttggtgcacattcaaaggccaaaatggatgagtatagaactaaaatttagactgtgagaaagaactctatgaacatgacagaatacctcaagcaaaagaagcaatggggcaaatgtactagctcttgcaggtgatccttaccctgaatccctccttgtttctaacgtgctttctggtttagacatggaatacttgcccattgtgctgcagattgaagctagagaaaagacaacttggcaaactcttcaagatctactgctgagttttgacagcaagcttgatagactcggctccttctctggaaatagcaaacatggaaacaatggctctccctcagccaaccttgataacaaaggctctgctggtggtggaaattacaacccaggaaactcgagaggcagaggaggaaacaacaataacagcagcaatcgtggaaggtcaaatggaagaggaagaggtggtagaggtggtccaaaatgttggcaattattttaccaggatcttatatctactcacaantatgttgattaacaccctaaatattaactttcgaaaacgatgtagcatagcattatcaatatctgaacctggatctctttctctaaatctttgatgctgaaactccttcttgctga

SEQ ID NO: 52230 - DNA, 1352 bp, Cannabis sativa
attgcataaaatacaattcaatataatataatacaatacaataacaccatctaacaactatgtaatgatagtattcaatcccataattatgtgtaacaattattacacttgaaattgtgatcatgccaaaaaagttacaaaaataataaacttgtaactcatgtttaaataataacaaagtgtaaatgacaatttataagttaaaataaattatttgtttacataaaatatttatcaaactcttaatgtatattatactcaaaaatgatatatttatcatattttaatctaaataatttaatttttgatctattaaggtgattataaattgcatatatagtaactaaaaaatagcttttaagagacatgacgattcaacttccttctcaaaaccataattatagttgccaagcgatcatttcccaaagcccttaattagattatcacaatatactcaaaagaactctaagagctggcgaagggctatgataagcacaatatataaatatatatatatgcataattataaattaatatatattagataattattatgtaagcgtctctacctggtctacttatattataagatcatcgtcattatcagcttgatcagcaactagttagcatgatctacactttgattttatgaataaaaacaaaagcaaagattgacccaagtactaatatattatccggaatttatggaccttaagagagatcacatattgttgtgtatatataaatatatatatttggattatttagttgacactaatataatacttggttgaacttttcaaaaaatggtacaagtagtaccattacaaaatacattatgcaagacttagtcagtggattgatcaatttgagttttgaagactaatatttgggttttcatattatgaaaattattaaagtaacattggatttattttattaaattatttgggatgcatactattattgatgaatcaattatggctagttggaatttgtagaaattgatgaagaagaaaattatgatgtagcagttgggatgtcgagaaactaaatgaagagttgaaaaactaatatgaacttgggaggtgtcacaatgtttaccgacatgcatggttgatgagctaagcagatggaaataatattatatatatatataaatatttatatatttatatcaacttgctttacagaaaaatcgaacagctcaatcataatcaagtccatatgcctcatttttaaggtttaataaatcaatatatttatcatctaaaagtttatgtttttaaaaaaatataaatatagatagagggtgtctatatatagtacagtttttaaaggttgtttcatta

SEQ ID NO: 52231 - DNA, 896 bp, Cannabis sativa
ccaacgacagtgagtctaaattgtaagcgacaagtagtataatgtgtatgtaatgtaataaatcaaataaagacacgagaattttatagaggttcagccgtgagtagttcatagcctaatcctcttggtttgtattgacttaagaataaggaaaataatcccttttcttagagctcttacaatggtatctctaaatatgatttcttagataagtttttcgaccctttgcccagtgagtatgaatcactatttataggggtataagcttgggagggaggaatttcccttctgattataattgatataagtggaaagattgcatattaaatacagaatacactaatcaagggattcagacagcttgccatatctctgtgatctgatcccaaaatcatagggatttctttggtgactcatgatgcgaaagctaaaattgctaagtgttggtgtgctattaggactgctcactgcccggttaagaaggcttcatctgagcgaatatatgtggtgccctattcggcatatctcttgctagcagatacacaaagttgattccacgtgtcaccatcgtgtgatgccacgtcagagtgcaaaaattaggataacattttcccccgaagtctgtacaggacttccaaagcgtgtagacttcatctgagctgcccttgcatttgaatcggttacaagtgttaggcgcgcctattcgcgatttgatgtgaggctgatcaggcgtctcttcagtttttgactaattaatactctaacgcaattaatgcgtcaaaactcgactttctctcaccacgtttgacggttatactagattatatttgattcccaatatttacttttggggggggggaccgatgcgtcaaaggcatttaaaatgattacccttt

SEQ ID NO: 52232 - DNA, 785 bp, Cannabis sativa
tgaagtagttgatccaagcctagaaggtaacttccaagctgaggaggcgtctcggttgctccaaatcgggctaattagtgtacaagcctctgctgagcttcgaccatcaatgtcagctgttgtgaatcttcttacagaaaatcatgagattccgcagccaacacaaccaccttttctgagttccatctccacggagattggccgaggcatcccttcaaccgaatacaattcttctaagcctgagtctaacacacagtcctatgggaacaacatgacagaaagttgggttgaaccaagatgagatgggcatcttttttcttctttctgaatcactttgtgtattgttatagcctgtaaattacctgtaaagaagtactctttttgttttatctttagttatccttaattgttttgtttaataatataaactttgaccttaaatttggttgagaacctaaccatttggccatattggaaattcggaattaagaatggcataaatttctacaggtaaagattaaaattaataaagagagttattaacaacagatcattgagacttaaacttagacacgttattgcaactgatatgttataaccccaaggttcaacaataaaccaatttattaatcaagtttttcaaaaagtattatggtttcaatttatctatttaattatatcagtaacctaaataaaatcaatgatagtgaacaattttatcagtacatgtcttggactaattcagggctcaggaaagtgacgattttaataataataataataat

SEQ ID NO: 52233 - DNA, 1039 bp, Cannabis sativa
taacaaccacgagaaaaacttgtaaaggaaagtaatgttagacttttacacaaagatatttatgaatcacaatcaattagttataataagtattatagttagtctaacattattaatatgtgaaaaaaatatcatatataagataaatagactatttttcttattgtcaattgattttgaaatgaaacatcatgcattttaaaccacactttatcaaattttaacatggtatcagagtcaaattaaactctaatgagtatcctatagctaaaaagagtcttttgtgattcgttgtgagtccaaagtaccgccggtctaaaaagacgagccaaacttaaaaagttccgttgtctccccctttaacctctatttaattgggatcttttggtcaatgtgtgccaatttctagtgttgggtctttgacctgtttcaaatgtcttgtgggagattctttcaaatgtcaagttcagccttgtggtatcttaaaggttgttcgttatgctcacactttctaagcccaaacgttaagatgatgtattagagttagtctcacattactaatgtgtagaaataaaatatcatatataaaatgaataagttactcctctcattaccaattgattttgagatagaacatcatggatcttaaaccataccttaccaaattctaaccattaatattattaatgtatttatcaacaagtgctaaatgcattgtgaaatttgagtttttatattttatatcacttcctaatttaaaatgtctcacttaatatccacatgacaaaaatatactgttcttttctctttttattcaaaatactattttcataatatcctcaaacttttcatatttactctttatcttattctagaaacctaaaacctccaccctttccctttccctttcgacaaccccattccattttggtaatccccaccctgaaacctaggcccttgaaataccgttatcctcaaaacctaaacccctaaaccttaatacacaaagtcatcaagacccacgaccattgaaatggac

SEQ ID NO: 52234 - DNA, 3960 bp, Cannabis sativa
atgaaattaactgcctttcttgtttaaaatagagttatgaatgatgatatgtacatagagataaattgatgaatttgattaataattgttgttgactgtaaaaacttgttaaagaaattagagttagaaaatcaatgcaaaatatgaagtatttagaacttattaaaagaaaataagcaaccttgtagaatgcatatggagtttgtaggaaattacacctataccctacactcaacaaaaacaaatgaatcaagtcttccaaggttaatttagaccttttcactctaggtcaaaccacttttgactccaatcaaaattgtactgctttgatctcaaaaaacaaaatattgtcgaactctaatcactttcacacacacttctcaactcgaaaacctagtaaaactttgagtttcttctcaagaaactcaaaggctgcatcagccttgaatcgaaccttctcacccttcccagatcaaaaattaaactacaaaacgcaaacaacaataagattgtaaagagagatagaggaaagagaataccagaattatagaggttccccaaaaattattgggtacttcctctttcgagctttgcctcagaaaaaagctcgttcccactataagatcttcaaagatcaacatgttacaaccatggattccaaattacaggtattgattggtaattatttttccttttacaagtatttctcttagtgtttattgcttttgtttctgactctcttttattttcttttgtgtatgtttctttcctagaatggacctccgaaccctaaccgtagggttccaaggcttaggttagtaaatctcttccttctcttttcagatctgtctcaattttgatcttctgagcttgtatttatagttttaagaaataggtgagagagctgagagttagttgcaacaatttaaacacactttgcaactagctttggttctactgatactgaatagttgattaaggccaaatgaccgcccttaaaatttagtgggccataagtaaaaaattattttgggcccttatttaaaaaaatatggtatttttcaaaataagtaaaaaaaaatatgtaattttaaaaggggtagattttttttgagctcctgggctaggtggaccctatgcacaggcctagcccacctatgcccagggccgggcctggccgaaggccacttgcatgcttgtaattcctttaatttattgtaactgtttattaagctgagatggacaatggatatgggaatttaatccaacagagtttttagaaatatttgcgacataaatattttaagtttttggtttcatacacttaaatacaacatatttttttggatagattaaatagcttaaggtacatttctgttactttcgtcactactaatctattaaaacatattcaaacaaggggtatttgcagcgtacttacctgatgttttagatttcatacacttatattattacatattttttcttctagaaaaattaaatacctaaagttatatttacttgactttcatcactatcgatatatttaaatcttattaaaaacaaactatgttgacacttgtcaatatattagtagtttactctttatttttaataaaattaattattaaataattctaaaaataaaaagtaactaaatattaataaaatttgaaaatgacaataacattttagagaagacgaagaagaaacacggagagcgattcttgtaaataatgtttttttataattcaataaatattatttagttattttttaaaattatttaataaggctaaaaaatacttaataaaaaatatgttttataattttacaaaatttaaaattatttaataggtttttttattgaaaatacgagtgggccactaatatgttgacacgtgtctatttcaatatgatttaatggattagtagtgacgaaagtaatataaatataactttaggtatttaatccgctggctgattttgaaatgtgttggctcggtatcgtacaagtttattgatgggggtcaagaagttgggtcgattgtccctacatgaggtttgaggcaaggtgatccattatcaccttatctctttatcttgtttgttgaaggtttcccggcgctgttaaaagactatgagagattgggtagaatttgtggttgtaaagttgcaagggaagctccgttggtgtctcatatgctgtttgcaaacgatagttacatttattgtcaggctacgaaggaggatgctaaaagtgtgctagaacttaacttttacaatgttttcaagtagcctcaggttagcaagtaaatcaccagaagtctactctatttttcagtactaacactgcccatgatgtcaaaatagaatctgctcttagatgggaatcaatgaagctggtgataacaacttttatttgggacttctgaatattttgggctgaaaaaaagcaactctgctaggttttttgaaggataaaatgaggaaagaaattcagagttgggaagggagattcttatccaaagctggtaaagagtttctaactaaaaccgtggcacaatcattaccaagctatgccatgaatgtttttctcttaccaatggatacttatcaagagatggagcaactaatgtgtaaattttggtggcaagcttctgcaaaaaacaataaagggatacactggaagagttgggagagattaacaattcataaatccaagggagggatgggcttcagaaatcttagagactttaatttaagcttactcagtaagcatggctggcgtctcttaagtcagccagagtctttagtgggacgaattttcagagctcaaatattataaaaatggtaattttctctcggcagacttgggggggtaatccgagctttgtttggcgtagtattcttgaagctcaagaggtggtccgtgaaagggtaaggtgtcgtattggggatggctctacagtcaatattctttcggacccttggctgtcagattccaaaaatttgaaggtatcctctactcatcctattttattgaatcaaactgtgagtgtgttaatgtctactagagatgttgcctgggatgtcgacttggtacatgacttgtttaatgactgggatgctaatttaatccttagtattccgttatcttcaagtcgagaaagagatgtgtggttctggtgtttggaaaaaacagggcattttttagttaaatcaacatacaagctattacaaatgcaaaaggaggcaggggctcaaccgaataactctgatttttggaattacatttggaagctgcatgctcctcccaaagtaaaagatcttgtgtggcgtgcgacttcagattgtcttcctacaaaaaatgtgattgagatctcggcatgtgcaggttgataattactgcccaaggtgtgttcctcatcctgaagctccatattattgcttggtggagtgtcattttgctagtagctgctgggagcattctggaattaagaagaatattctgagggatatcttcttttacagggtggctggaggcaatgtttaaacaagtggagaaagctaaaagagatgacattgctgtgttgtgttgggcgttatggaaaaccaggaatgaactggtgtggtctgataagtagtcgacagctgctagtgtatcaatactggctcaaactactctatctaactggttcaatgctcataataagttgctggtccctacaacaacttttttaatagaggaagatggttgggagacttggcaaaggcctccagctactaaacttaaaataaatgttgatgctgcaacttttgacaacaacggtacatttagttttgtgtgtgtggctagagatgctaattgtagtttggtggaagcaatcactaggtgtcagacaaggaatacgacacttgaattggccgaggcaatgggggttagggaggctataagct

SEQ ID NO: 52235 - DNA, 668 bp, Cannabis sativa
atttttgtcaagtgtttattaccgtatatctttttgctccattccttaatgttgcctttgacttccctcaatttactcatgaacttagtgccctcccaaccagctccttcagccttctgccaccaactctcaaaattcttggagaacgtactgtgctctagccattgattatcaaagcgaaaagggctaggaccccaggaagggggattagaatcaagtacaactggactatggtccgaaacaatcctaaccaacatctcttgtctcacaaaggtgaacgcattactccagctattggtgaataaaaatctatccagcctgcagcaaataggcttgtttcgaaagttcgaccaagtaaattttccattattcaactgtggatccattaacttcagttctcgcaccaattgatcaaacatcttcatactcttagtccaagattgactattaagtttctcttgcactctcctcaccacattaaaatcccctcctaaacaccacatatcaccacaaattgcacttagacccgccatctcatcccagaatactgatctctccttatatgaacatggtccgtagacccccgagaaccaccacggtcttcgaccttctgcttcaattaatactgaaatggaaaactcaccgaccatggactccaacacattgat

SEQ ID NO: 52236 - DNA, 1121 bp, Cannabis sativa
  modified_base (131)..(140): a, c, t, g, unknown or other
accaatcaatccatttaagctctcttcaactatgtagtcccatacctacacagtctcagaatcatccagcttgaccttccccaggaagtgtgggattgcacatgttacccagtatttccccttacggatcnnnnnnnnnntgactgtcacaatcacccctcttatggggtccgatgtccttgtcaaccacacttccggctgggtcaaggctctgataccatttctaaagccctttctaacagagacgccacatgtgtgcttttataaaattagtcttttactaatttatataattataccaaaagtgtggttaattaaaatttatacatttgaacaaatgcataatttttataaaagttaagtattaatattatcaaaatatttacattcaggactaaaagtacttttacaaaataagtttatatttcaaatacattcaaaatggagcatcctgtccaccgggccgtggcatcgcgactgatatgtacattgctacagcaacctcatactcattgctgctcaaccttagcctttccattacctgcaccatttagcacccgtgataaacatgtctaaacaattacacaacatcgtaatcacacaatcttggtacttcataaagtacccttaccactcgttacccacgagctatatatgtcactatcgttgctcgatatagagagcgataagtaagaaacctatttgcggtttcaagagtaattactcataacagtaatgaccgtttcaaaccttcagttataattgagacttaacaaacataaattcaggttctcgatcataatcgagactataacaacacaattgttaatcacttaatcctaagagatgcataacacttttcttagctctgtccaaaataaggtgtgcaggcaaatctgagtggaatcaaagctttgcgatcccagtcctacgtcacgacaaccaaaactcattaaaagcctaaaacaaaaatttcagaaataaaaccctaatcgtaaaaccaaatgtaacctaacttccaacaatctcaaaataggctacacaacacataatcaatccaaacagacactaggtaccccccgagccaaaacaacactcgaagataaccctagaattcaccc

SEQ ID NO: 52237 - DNA, 1061 bp, Cannabis sativa
agaaaagtataatgtaccagttgacatgacaggtttcgtaattatcgattgtctgattaggcaatgataatgtcaatgtgatatacaagctcacctgattaggtgatgtgatacatggatgccagactatggcataggcttacctgattaggtaatgtgatatacacgcacacctgattaggtgatgtgatacatggatgctaggctatggcataggcttgcctgattaggcaatgcggtatatgaatgctagattatggcatgagcttgcctaattaggcaatgcggtatatggatgctagactagaccataggcttgtttgattaggcaatgcggtatatgaatgccagattatggcatgagcttgcctgattaggcaatgtaatatttgaatgccatgctagagcataggcttgcttgattaggtgatgcggcatgttatcctattttttgcatcgtgacgtggtgataagctggatgaaacgtgtcctacatttttttcctatctgggcggaaaggagtattcctagcaactcatgaatggctaatttaaacatttgtaacactcagatgtttgaataggttaatcaagaggacgtccgatcaagatacagacatatctatactgagcaaggcgtataagttggcgattccaaagatcagtctcatcatttccaagacacgaagataatccctatattcgtgggaatgagatagagaataaagacaatacgccttagtttcctatttctttacattgttattatagaattaatatatttttctattttatttaaaaaaaatatttaggtttaaaatttaaaaatataattttatactaatttttggaatttttaagcttttattttattaaaaacgaatttttaataaaaaaaaaacactaaaaaaattgaatttttggtgactggttaccatcaaaatctcaccccaagcgctaggacaagtcgtgattcatttaccgcgtttagccaagctcaaagaaaactattatgtcacttctaaatagttatagaagttatagattccatatttgtgatta

SEQ ID NO: 52238 - DNA, 1973 bp, Cannabis sativa
aaaaacaactcctagaaactcgacacgcaggctggtagtgtcaatatgtacattgctggagaagactgtcacctcatggctaaactagcttttctttgcctttacctgtaccacatagcacccatgagctaaaaggactcagcaagaaaagtaataacaacattcatataatttgttattcaaatattatcatttatgttcagacattcataatcaaacattcacacattactcataagatgagatccaaatctctactgtcatttgtcacaattaaacgtaagtatagatattcagtaataaaaaaaaattatattaataatagaagtcatattcatttaataatataaattatatacatgttacctcataaaaaatccatctttgttacatcacattgcctaatcagggaagtcgatactttaatcagataatcctgtactgcattgcttaatcaggcaagcccgtgccatagtctagcatccatatattgcataacttcatcacctaatcaggtgagccagtacgaaaacctggcacccatatatcgcataaatgtatcacctaatcaggtgagcccatgcaaaaacctagcaccgatatatcacaaaactgtatcacctaatcaggagagcccgtgccaaaacttgggacccatatatcgcataaatgcatcatctaatcagatgagctcgtgccatagccaggcactcacatgtcactactactcgtgcctaattaggcatcaccaataggaagaaacctaactacggtttcagtttatagtcatgacttatcacggttgtctcacaccaacaactcgaatacctctcttggtatccatatatctcattgcctaatcaagaaagctcaacccatagcctaacatccatatattgcattacctaattaggtgagccctcatatcacattgcctaatcaggcaatgttttcatatataacaatattaactgtatcttaacctctatatcaatcaattctcaacaatattaattgcattgcaacataacatgctatgcagtacactataatttttgtacctcaagtttcggtttaggtatgttggctgaccttcttgaagaacaatcaacgatcctaggacctatgtaaaaacaacggtaaaccaataagtgtctatctcaaaacactacttaatattcacataacacaatctagggttttctacaaaatctcgctgtataaatacactaaaataaatcttatattttggctctaaaacatacacaataattagagctcattgtaacattcgaaacattatatagaatatccaaaacggacacccaaataaaaagttatgaaaaaaatacttctcatctcccaagaatttctttaaatggtagatcattttgtagcatgaaaatcccaaattttgcactctctaaaacactaccaaaacctatccaaatcattttaaacttcataggacacatatataccatatatactatagtcccaacgtaaccaaaattaaataaaaggcttacagggcgaacaaatatgaaaaaaagttttttaactttactgcatgggagtcctaggctcttgatacttagcgatcaaagttcttagattttggacggtagaggcaggatgagtaggttttcgtgttctcataagtatggaaactgcctttttccacatccttagccttcctcatctcgcaatatcaaagtatggaatcatgtatgtcttcttcaagataacaaaagttagccttaaggttagccttgaaaaattcataaaaaacctccacaacatttgtttcatgatactcaacatccttaacatgagcctctcgtttggtaggaagttctttctcaagagcggacttcttattcaaagaggattcttctttctgctgaagggccacttctttttatttaaaagcctcaaccaactcttggatcttggtcttgtgcatctaaaga

SEQ ID NO: 52239 - DNA, 1241 bp, Cannabis sativa
cacttatggcggaggaaaaccgtttaaaacaaaaagggagagtttaaaaagcagaaaactaaaaacaaaatgcagaaaaataaaagaagttacagttcataaacaaaattataagaggactctccaccctctgctcaagtctagaaaagagaggtcttcaaagtgctttgttctgaaaacccaagttgctgtccagaattttattttgtcccaaaccactactgctgagtatttctctccagccaaatagcccaaagtgttgctaggacagccgtcttccaaagtatatcctggcgtttacttccttttagcttactcactaacatttgtggaacacttctaggtagagcctagaccaatccgaactcctccaacaacattgaccataatttggagaatttacaatgcagaaacagatgttccacttcttctccactactcttacagcatacacaccacccgggagaaatgagtataaaaggtcatcttcgttgtagaacgtcgtgcacattaacttttccatgagctactaaccaaataaagattttaacccttggcggggctgtacttttccataaagatttggtccaagggggtctggctacattttggttggagttaaaccaagcgaacgctgatttacttgagaaaactccagtggcatcaggtttccatattctgatatcagcgttgacattaagtaatttaacttgttccaactgttgtaacatccctataaggctaggtatttctctttccaacaagtttcttctgaacttgaaatcccaacttaccacactttctccagctgcaccttcctcagctaccagatctattatacttacgtttttagctctagaaatcagggctaaaccaggataagtatgtagcagagatgaatcacctaaccattcatcttcccagaaccgaatcttatccccttttcctaccttgaatttcaccaaccttaagtattcatcatatggatccgcaatgtccttccatggtcccctcggggacatccgatcccctctttttgaatcccaaaaattatttgccaaaccataacgactctcaatcaccctatgccaaagagactcagattctaaggggaatcgccataaccatttcatcaacaaacttttatttctcaaagccaatgttccgaagcctagtccgccttccaatcttggtttacaaacccaatcccgagccactaagtgatcgccaccacctagatc

SEQ ID NO: 52240 - DNA, 1057 bp, Cannabis sativa
tattttttaaaataataaaaaaaatataatattattataccattaattaaatttgagttactacacaatttcaatattaagagttgcaacaaaaataaatttattcttattctataaaaatacacaatattcattacatacctgataaaagttctatagaaaattttgtaacaattaaatacaaagttatgagagaaataagaaaaactaaatacaaagttattaatattcatcaactctttcaaatgcatagtaatccaagaaatttgtcatctccttctaatgaagcttagttgctacctgatgcatccatataataagcatctcgtattgtttatttggagaagaaacatatgcactacaagttaaacaaaaataaaaattataatcattagaatatatcattgtaaacacattattgtcattatatatataaagttatactaattattacacattaataatatatgtataaaattagcattacttcaaaaatctaaccagcaaataaaggaacaatttccaaaagaattactataaatttactatatacaaaatgaataattaataagaaataagttttgtgaatcatgatccatgatttaatactgtgaatcgagtaattttattataattatcttgtattaattttgtgttcatatatatacaaacacacatttatggagagatgatcgatcattgatcaaagaaaagaaaaatcaaatgacaataaaaataagcaactcacttagctattttggcataaagaaaattaaagtttacctataatagatccaaaaatataatcccaacataaaattgatgaagacttctgatattgaaggtgtaagtaacctgaaaaacatcaaagcatcattttaattaatgtagaacttcaataatggaattggaaaattttaaaaacgcaaaaatttgtacactaattaatattctctatatttatattatatatatacaagaaattgtagtgttgagcttagagactgcataatttctttgaaagattttttaatatcaatggtagtttaaagaaaga

SEQ ID NO: 52241 - DNA, 1038 bp, Cannabis sativa
tctgtaagttgtttaactcaggatgacaaacatgaaataaaatttcttgctgacaagttttacatacaggtaatacacaccaagaagatgattggcaaaggtgattcggataatggtctctacatcttggatgccacacccgtttctattaatacctttacctctgctgaagtttggcatagacgattaggtcatttgtcaaataaatgcttgaatttacttcaaagttctttacattgtgatacaaaaaacttacatactgttgaaaacctccttgctatatttatttgtccttttggctaaacaaagaaaacttccttttcctattaataccaactttacttctcattgttttgatcttatacattgtgatgtttggggtccttatcatgttacttctcattctaaccataagtattttcttaccttggttgatgatcactcaagattcacttgggtttacttactcaaacaaaaatctgatgttctttctataatacctgaatttatttcgtatatacgcactcaatacaattgtgttttcaaaaggtttagatctgacaatgctccagaactaacctttaaagaattatttgctaaacatggtattttacatgatttcacttgtatagaaacgcccgagcaaaacgctgttgctgaaagaaagcatcaacatctccttaatgttgcaagagctttactttttcaatcaagagtgcccataaaatactggaccgaatgcctacttactgtcgtatttttgatcaatcgcactcctacttcgaacctcaaaaacaagactccttatgagattttatttggtaaagctcctgaatatgataacttgaggtgttttggatgccttgcctttgcttctactattgcttctcacagaactaaattcgaaccaagggctaggacttgtgttttcctaggatatcctagaggtgttaaaggttacaaattatatgatttgaatactcagcaaattttcatctcacgaaatgtgatttttcatgaacatgtttatccatttta

SEQ ID NO: 52242 - DNA, 883 bp, Cannabis sativa
ggtgataggcgagaagttgatgtcgtccggtggtagaatttggtctagcaatggcggaggaacagtagtagaaagtcaaagatttcaggaattttttgaatatgttggttgggtcgaaaattgcgaagtggtgaaagtaacccatcaaagaaaaagtgttggcttttataggccagaaggggtacaagacagctctgatcagacaccatcgtacggtgggaatttgtatcgattcgaattttgcgatccaacggatagggtgaactggcgtaacgaggataaaggacggttaaaacgtttgagtacctctctgacaccggcattaatgcaaaggtctattaatagacgggaagtgaatcgtttcctgcaaaagaaaataaaaatcaatgatgacaatcataaatacgacctgcgcgcctgggacacatgccactgcatttattagagactggatgtcgcgtacaagcctcatttaccagttactaaatgagacttgggggtaaatgttgcctcagattttcccaaaatacgtggtcgcggctgtgtatgacacgtggatcacaaggacacctcacccgaaaaattagctaagtcatatatagacaggcaagtgcacttcagggagtgagtccctggagaggcacataaagcatgtctctcatctccgggagctagagatacaacaaagcatctccgggagaaggagaacctattcgaacagtcactttgcatttaatgcagtatggggaaaatgtcttggaacgcccattagaggacatgacaaacagcataagcctcttttacagcgattacacgataatcaaaggggctagtgacggctccattatgaagaatcacatcaattaaggaatgataaagatta

SEQ ID NO: 52243 - DNA, 1258 bp, Cannabis sativa
agaataatttcagtcccaaattgggtcagagaacaaaatgctcttaagatatttaagattatatgaatgaccaagtcaccactctgtatatgatttttttcccataatcttccccattaaactaaactactgtgaaaacccctttgttgctttccaaccatatggctatacatgctgccattaatgctaccatccataaaagttgtttggttttacatccgattcccactactacaaaagccaataattttatacgatattgtggcatgcaccatttcaatatgaactctcttaaccaaaagttcaatgagagcttataacgcagaaataagtgatggagatatgaactacagatttttctttttctttcgttttttttttttttttttgtaatatgcatagttaaacatcccaacatatcaatgaaacaaagatgataagcctcctattcagtttgtttaccgagggattagtcttagaaagttttatttaacttgtactaggtgtttaattgtctagggtgacgtgttctattttcattggttattagcttgcaattaggctgctgatgttgcaagttctatactctaaaattagagtacgggaatttggcagataccttatgttggatgagaatagagaataatatcaagtaggagagatctagccctcttgaaaggttaaaaataggagagaaagcctctcaagagcttgattgtgtaattcttgaagatttaataatggatttctagtattctcgaagagttctagtgggatcttttagtattcttgtgtgttattattgctatactcctaatctaggaaaaaactaactttagatggactgaacttttccatggggaaaaaaacattggcaaagaactcaatagtcgatttggaaaacacctcagatctatcacccaaccacactctccaaccttccgcataactaaacctacaagtaattatcctttccaacaaaagacggtatctataaaaaaaatagggagttttttatcattcggatttcttataaaatggaagttccaggcttccagcaaagttgcttcctctctcattctctcttactaagaaatctaaaatgcatatgctcatgagttattttagaagataatactgctaattcaggaaaagcatatttgagaaactccgttctattttcctcacgttcttcaaaaatctaatcatgcttccaactaaactcaattatggaaaacaattaaaccatcatagacaa

SEQ ID NO: 52244 - DNA, 895 bp, Cannabis sativa
ttagttattttaaagttatattataggagcttataatttaaaatacatttagctaactttaaaaattatttttgaaactaatgagttgtcattataatataacaagtaaccatttttatatagtaattattttatatttatttttattattttaaaagcttaattatcgtattaactaagattttaaaaaatatatataaaaaatataattaatcactatattagtaactaaatgacttttttcctgaaaataaatatatgtttctcacattttgaaatgttcatataaaagagtagattacaatagtatttttattagggtcaaccgaataacgatgtagttaaaaattatttttaaaattaatataaaaaaaaaagagaaaaagagaaaaaagagaaagatagtaattaaaagttattaatgcaaaagtattctcaaaatgttattaaaagttaaaattagattattaagttatttttgaaaattaaataacaaataaagtgtcaaatggaaaatatgaaaaatgtcttgagtcttcaaaaagaaaggtggtgtacatttcctatctttcattttattttttcttttaaaaagtttatcatttcctagggctagctggtacaacatttgagatatcaaacaaatatgaatatttaatactaaattttggattttttttatttttttgattgaatactaaattttggacttgactttgatatctcctatctttttgaacaaaacgaggtttgaccaaaatacatggacaaattttatagtatatccgttaagcaccaactacttctcactaattaataaaatacgaaatattataaattataaattattttgtggatatacaagctgtaagtagaactgtaagttcatgcgtat

SEQ ID NO: 52245 - DNA, 2071 bp, Cannabis sativa
tttgtatcaagcacatgctgtgtcccattcttcctgcaatagcagtagttcttctcactgtaatagcaataatgctagttccaatttcaattcttgtaagaattcaaagcttgtatctctatggcacaatagacttggccacccaaaccaacaagtacttaataaagttctcacttttcttcacattagtccctctcaactgtcaatttgtcatgcttgtcaatatggaaaacttcatcaattttcttttcattcctctcaaaatagcacaaatgcaccatttgatttagtgcacacagatctttggggaccatctccctatccatctcctgaaggattcaagtattacatttgctttattgatgattttacaaagttttcttggatttttcccctcacttccaaagctgaaacctctactatttttaaacatttcaacagttatgttgagagacaatttggcaccaaaatcaagtcaatacaggctgattggggaggggagtatagacccctcaaacctattctctatgagttaggaattgtttttcgacatccttgtcctcacacccatcaacaacaaggaagggttgagaggaaacataggcacatcacagatatgggccttactttgctagctcaagcaaaattgcctctgtcattttggtgggatgcctttgtctcctccacctatctcataaatcgactccccatacagaaaaatcaatatatatccccatatgagaatatctttcactccaaaccagattatagtcttttaaactttcgggtgtgcttgttttccattactcagaccttataacaaacacaagtttgattttcgaacctctatgtgcatattcctaggctacagcccatgtcacaaaggctataggtgcctacatccatcaggtagaatttatattgcacgtagtgttacttttgatgagttatgttttccctatactgatctgttttctcccaaaactgattcatcctccccaactactactctccaatatatcactctacctactgatgtctcacctgtcccacaaaatacctcactacagccacgtacacaacaattaccaccatctgcacaatctgtttcacaccaggagcctcatacagatcccacacccgatcccacaagatctattacacaacctatcctgtccattcccacaacaacaaactctactcaacctactaatcccactataccagcagaaaccaatgccatttccactcatcccatgcacacaagatccaaatcaggcattttcaaacccaagatacttgcagcagagttacaaaagtatgcatgttatattaaagaacctacctctatcaaaatggctctaaataatcctctttggaacaaagcaatgggagaagaatactatgctctcaagaaaaataatacgtggatcctagtaccatatcatcatggcatgcatgtcatagacaacaagtgggtttacaagattaaactaagggcagatggtactgtagaaagattaaaggctcggttggtagccaagggcttccaacaaactgcaggcatagattattttgacactttcagccctgttgttaaagcaagcaccattcggattatgtttacacttgcagttacatatggttgggacatacaacaacttgacattaataatgcctttttaaatggggacttagaagaagtggtctacatgcagcaaccacaaggctttgaggatcctaattatcctactcatgtatgtcaattaaagaaagctttatatggcttgaagcaagcacctcgagcttggtatgataagctcaaaaatgccttactctcttggggtttcaccaattccatttcagacagcagcctattctttacaactacaaatggtcatcttcttctccttttggtatatgtcgatgacatacttattactggtgccaattctcaagctgtcaacaaaatcattcatgatttacaagcatcttttgctctcaaaacccttggttcagtcagttactttctcgggtttcaagcagcaagatcaggtgactccctatttct

SEQ ID NO: 52246 - DNA, 695 bp, Cannabis sativa
tattgtcctcttaatgggtttctttttagaatattttttattgctgacaatgttgatattagtatataaggaaaactgtatatttttatgcatggtatggtgcttattatgtaaataagactataataaagtcattaaggttagcttagtggtgagggagggatggaaaaaaggcagaggtcgtgggtttgaacttaagacttttaagctattaaacaattaattgattgtaaataccattacgctacactaaaaaaaataacactataatggaatggtcagttgcattaacgatatttgaggcacataataacactctaatgactatgaattgatctattaattaaagatcaccactactagcagtagcattattacccaaaaacatgctcattttactccttagggtattaggcatataatgaaaaatagggtgagcaacagtcggtttagtcggtttttatacgaaaaaaaaatttaaaattcaattttcagttttcatagttataatccgaaaatcgaccgactattatataaatataaaaaaaaaaaaaaaattgactgttttaatccatgatttagtcggtttaaatcaacagaatcaagcttcatttttttaaaaaaaaaataagtctttaaatttcctataattatttaaaaactaaaaaaaatagagtattgtatcaaatatcata

SEQ ID NO: 52247 - DNA, 1189 bp, Cannabis sativa
tttttatagaaaaccgtaaaaatacataaaaaaaaattctgtaaacgtaaaaatataatttgtttacaaaaaaatagtatcttatgtatttatctaaaaaaaattgtggcaatttttcgtagaaaatgttgggtttttttttaaaagaaaaaatattattttataatacttagccatagtgtaaataattaagtttccatagtgtaaataattagggtgaattactataataaaaaaaatgagttgttccatctttgataagcaaattattatttaattccaacttaggaggtgatggttttttattttgttttgtttgtttatttatttattttttttgaaataataaaattaattaaagagaaaaacaacaagatgcttccagcatcccaaattcatatccctaattacagtatcacagtacatctatggttagtcgtaaaaagaagaagatcacaaattaataaagggatccctatgaaatcatgttccaagaccaatcaaaattataatatataatataagtaaaagacgatcttaatttaaaaagaaaaattaaataaaagctttccggcaagaccaccccaaataatttcttcagacggatggtttgatgcattttttgtttgcggtgtgtcttcatcaagatcaaggtcgccgaagctgtctccatacctctttagccatgaaattcggtgccagcttcccacatggtggccaccgatcgacattgttgaaccagcttcctcgctcgccaagcctttcctgactttttccatgaaaatcgactctgacgagatggtttctcatatggtggtcgtcggtgtcctcgtcgaacttctcgatgtaaattcttcatacgaccgcgtttggtactcaaatatcagttcgaatctatagccgttattgctcttatttgcacgactgtgtttggtaatcaaatattaatgggatttgttttatttttattttattattttattatatattaataatattttattattttattatatataaataaaaagtcatccatgaatatttcataaaccaagaattcagttatatagacacactttatatagaatagatgtttttgattgatttaattattaaagaactaggcaatatagccgctctttgcgcggctatttttttttttttagtattataataaatagttacttaa

SEQ ID NO: 52248 - DNA, 758 bp, Cannabis sativa
tattaaaatattaaaaaaaataaaccaattgtatagctaaaaaattaaatatgatataaatattttatttcaaactatatttatcttattatataaaaataaacctatgattatgaaccatagattcatagtaattaatagtattacatccttagacacaagtagtattaaccctaaccctacgaggatggttaaaaactaaaagaagaaaaagaccctaactatataatacaaatctaaaagaaaccctcgatgtatccccaagtgttcgaagtatagcagatttagtcatggtggtagccaccgtctgcgtgccatagtgaaaaagatgatttggtagatgaaaccactgacaacgaagaagaacacgattcaacaaatgacatggaaccatcaaaaaatgacacatctaactctttcgcttcctcattcttatcattattatcttcatcatcatcaccgcccttcaccaccgccaccatttcaacatcattattatttttattagtaaccacgttatttttcctggccaaccactgtctcagatcaaaactcatcttttttattattttcgcgaacactttctctgttggtgaatgtttttctagggttttgttcattgtgtttctctctatttccattgtttctctatggtactaattttctataatttcaaaattaattgtaaaatatttggttattttaattttttttaattatgttaagtatttgttggagatgctttgtttatataaatt

SEQ ID NO: 52249 - DNA, 614 bp, Cannabis sativa
  modified_base (273)..(282): a, c, t, g, unknown or other
tagtcaatatccattcgagactcatgaaatggataagcagtgtaattggttgcctctagttgagcaactcctctaaccttcttcaaggcctcttcgagcttgatgaagtcgtcagctctgtctagaaactcttaaatggtgtgtattgatttaagtttcaagtctttctagaatgaacacataatttttagtcgagctttcattgccataaccttggcgtctttgtaagtatctttgtttgcgtggttgcctctaagaatcgttgtaggtaannnnnnnnnnaggttcatcttcttgttgcttgatgtagaccaaattattgagctcgattagtctatttcttgaccgggacaattggttatagaattattgtttaagtgtttcccaggaatcaatagaacccgaggaaagcatgagataccattattttgctgtatctaatagcgttgcttgaaagactcggcatcgagaatcgtctcaaatgccttgcaggtcagtttgtacttcaaaattttgtatgtgagagagtgtacgtcttcttttctaatgtatggatgccatactggatttttgaacttggagggaatctccaaagccttgattcaatctgagag

SEQ ID NO: 52250 - DNA, 1045 bp, Cannabis sativa
tgttatattttagttattgtgataatgagataaatataaagattgaatttaaagttcaaatcatccgccataaaaaaatatagtagcttaaacattttattttttataaatatgtatataaattatataatatatagattatatataataaaaacatataaaactctcttaatcgggttggtcgggttagttcgggttgattgggtgggttgatattattttcaacccgcccaatataaagattgggcaagttatattttcgttgggtttttcggtttgcatttttcgtcgggttatctcgagttggtttgggcgggttgttcggattggacggtttacaaaaatttatgtacaacactaatacaaggtaagcaattctaccttatatatatttattcaccatccctcctactatctatcatttataaatttcacaccatcatactcttcttccttcctaccaaacatagcctaaaaaaaatactattattatttatttatttttagaattttttgtttatagaaaaaaaaaacattttggaaagtgtgttatgatacgttctttaattattttcaaagttgtttaataattttttaaattgctaaaaaatattattggtgcctaataccttcctcgatgtagtatcgttattggtgtaattaagtatcaggtctcatataacttaagaaaataaattttaaagaatatcgctaactaattgtagagtgtcacctataaaaggtgttgggtaccattagtatccaataacaatgctcataatttttttttaaaaaaaacacttagactagaaatttgtcaatttttattatttgataaatataaatatttttttctaatattaaattcatttggcataaaattaacttttgactgttgtgtaattgtaataatatttttaaggaaattatatcatatattaattttttaattttttttttaaatttacaattggctaattagtaatttttcccccgaactttgacatgtactaaaccatgccccctaaacttttttgcccgttaa

SEQ ID NO: 52251 - DNA, 697 bp, Cannabis sativa
aacaatttattttagaatttttttgttaaaatacaatcttaaacatataatataaatataatcacaagttatcgcgaaaataagaaataaagagatacaaataagtaatgcaagagtactaaaaaatattattttttgtgctacaatttcttggccgcaaatataataagcctaaaggacttcttgtgtatcaaagaataattaattcttctttcttttgttattgggcttttaattagttcttttatttgttttgttttgtgggcccagttgtaatcctaggtggctaatgtcttaaaagaccaatgcatataaataggagggtagctagttcatttagggagagctgagaaattaagtcagaagacttgagtggagagatttcaccctctcgaaaggtgggagtatgagagtggagcctcctgaaaagctccaaacctttgtaattctgctactaaattcaataaaatcaaacttactagattcaaactcaagattaatatcatagatagtaaatttttactaaggaaaatctatcaaattagtgcggtgagctgtggataccatgcggaagaaacaaagagacaagagcacctcggattccaccgtcgacgatgaagttgcagcattgaagatagaagtgttgggaattacaaatgttgtcaaggaattggtcaacgaatcgttgctcgagatg

SEQ ID NO: 52252 - DNA, 568 bp, Cannabis sativa
aaataaataatatttagttattttttaaaattttaaaattttaaaattatttaataaggctttttattaaaaatacatagcaaaaaaatacatctttttattatgtactttgtgtacaattttacaaattttaaaattatttaataagttcttattgaaaaatatgagtgaactactagtatgttaacatgtgtaaacttagtctattttaataagatttaatggactaaaagtgacgaaagtaacataaatgtaacattagatatttaattcgctaaactaaatgtggtatataagtgtataaaatctaaaacatcaggtatttatgctgtaaatacaatatatttgaataggtttaacagaataatagtaacagaagtaacataaatataacttaaggtattaatttgtcaaaaaaatatacaatatttaagtgtatgaaaccaaaaatataaaatatttataccacaaatatccctatttgaaattaggggtggcaaaacgtgttatcgtgtcgtgttcgtatcatattttatgtgacccatttttatatttcgtgtcaaacgtg

SEQ ID NO: 52253 - DNA, 1532 bp, Cannabis sativa
  modified_base (631)..(632): a, c, t, g, unknown or other
atttaaaaataaaaattatatttttatataatcacatatatataaaatatatatgtatttaaatcttaattttcccataatcttttattttaaaaataattaatgatatatatgcttctaataatttgtacactttattataaccacatcttcctaattacaaattaagtatattgtatctatcactatcattagtttttaaaagtatatgtttgaacataatatataaaatatattttgtcaaaatattttctaatattttcaatacaaaatacgtataaaatacgtataacaatgaaattcattcttttattgtacatataaaatacatatatataatcatatctaaagagcataccaatatagctgcaatagctaaaaactctcaaagatcaaaatctcaaactttatttcaaaaatttaaaataaaaatacattacctaattaaaaaaattaaatatacatgtattgcacttaacattacttaattaaactcaattaaaaagaaaagtaattatatgtgcattgcatgtaaaattaacttagtatatatatatatatgtatatataaacacaaaaaaaattggtttggggaatcaagtgtgcttgcccaaatttaaaaaaaaaaaannaaaaaaaaaaattgaataaaaaacaaatattttaaggaaagaaaagaaaaaaaaaatctatcacttctatgacaacaccacttcaaaaattgaaatttttattaaacataagttgagatgtagtcttaaaataaaataaaaaaatatatatataaaaaaaatagtacacaatataagaaaaaacagtaaaaaaaattagtgtagtgtaaattctcctatacaatttaatacaaagggggtcgatatagggatggttataaaaatatgagaaaataaataaaagttttgatatatatcgcatgtaaagttaatgtcactatcctctaaaaaaaattaatgtcattaaatatggcattttataaccaaactaactaaatatatgagtatttaaatagaaaataccataaaaatattaaaaaggataatcaatttttcaaaatagggatcacgctctctccagctacacaagatttttttttctcttctgcgattcaaattgcttagtttctcatgcgatcaaaatcaatcaccaaagatcatttatcaagaaactaattttttcattaagaaactagtttcttcatacaaaaataatgttgattatataaaagtaaaatttataataaaaaaacctacaaatctatttttaccctataaaaaagatataatatgacaaacttataacaaaaaaaaaaaagacaaaacacaatacaaaaaatgaagcaactccattacagtaaaacagaggtgcttgaaaaaacacaaaaatcaaactactctctccaaccacacaagatgttaatctctctcatgtgattcaaattgcttagtttctcatgcgatcaaaattttactaaagatctttcatcaagattcaaaaaattaattttttcatcaaga

SEQ ID NO: 52254 - DNA, 1458 bp, Cannabis sativa
gcttcattaattacaaacatatacctataagtatatattgttcaatttaatttgtctgcaatcaagatagtccttttcaacaacaaatttaaatacaagaacatctcaaagagtcactgtaaagagtcagagttaatagaacacaaaccacagactcatctcaacacatctaccacagtcttgccacttgaacagaccatgatgtgccaaggatcttgcgatttgaacaaaaaaccaaattttacggtagtcattaagaccatagctatacgtaatcagatcaatatatgtaatccatagtccacatttcctaaacctgcaaacactatatatcgaacgtacagttattattagaatgtattcccccaaacttgtagccctgaacagttgtgggctagattgtttaaagagcttgggatcaattggtgtatggacagcaatggggataagaggagttctagattatggacagcagccattctggccattttttaggctatttggctagaaagaaatagtaggatttttgaaggcatatataaggaagttgatgtcctttggaagaaggttaaagtatgtactggaaaatgggtctacaagacaaaaagctttcagggcctatcttttcaagacctgactagggaatggtgttctattttgtattagtgccttggtatggggatatagacataggcctaaatgtatccggttttgagcttattttgcattttatgcttttaatttttcatgtctgttataatgttaccacggtttccctccgccataagtgaggctctctaataaatttgggaggtcactctaagataagtggcctttgtctctttcaaaaaaaaaagaagaaaaaaaaagttataatgtatgattcttttgaatctttaataagtagacctcgattcactgtaaaactatcaaaatttagctaataataattttgatcatatatgtaccactgatggctattaaaatttattactattgtactgttaaaacacaaacaaattttattaaaagacttggacttatttgtgtgaataaattgtaaatgtttgtttctttctgcggaaggatgcaactgttaaaacttctgataaagttaacttttaataggaatatgttaaaagcacaattagatagccttatataataggtgaagttaagatatatattataaattaatttcaattttggtaatgaaaactcgttcaagataaccacaataattcatataatgccctgtgaaatatcttcaaaatctacctttacttttatttaaggtgtctataaatctatgcaatctggtctcacaaaaaaatgtatgtgacaggatcaaccagcttaacacataacaaattctttaacatatagtaaggcaaactaagaagaacttaaccaatccttgtactaaatcaattcactaatgtaaacagttctaaactt

SEQ ID NO: 52255 - DNA, 1658 bp, Cannabis sativa
gtagctgaatatcctttttttttgtagtgaggacttgatttctagtgatgatgaacttcaaagttgatgagaatgaagttagttacatacattaaaagtgtacaagaaaaagtttcaaagtctttcaagaagggtgaagttactgtgcatgaattaatgattaagtgtctttcgttttagttgtctgtgcacaagagcaatattttttaagaaactttgcttttatattttttaaaaatttttctctagttaagttcatatatatcttgtacgagatattaaacattataatttttttaagttggttatatcttttagtacattaaaaaacatctattattatattttcaatttatacatcaagtatttgtataattataattttttttttttcaaagatacaatagttgttagtagtttttaaaattgttaacaaatgcttaacaacgatgtaaaaaataataaaaacagctgataatttaaggaatctacaaatctttacatatgaaattcaacgtacaaacaatgtgaaagcaacatgttcaaaaagtaataaaattaaacaacgtgtttacaactgcaaaacaacaaacaatgttactactaaatataagtaattttcttcatatctacaatctcttcctatcaatacccccacttgattcaaaattaacataatgtgttctcttattatttttcatgtctggatgtaagagataaagataagtttttgttttaacatgtgaaactatattcttttaattgttgaacaactagtgtagtgtatgattcataacaaactttacaacaacatgaaaataagttgatattatacattattttcaagttgaaataagatgttgcgaaaaaaacacaaaaaaaacttcacactaacatgaaaataacttaattattcttttgtagatattgtgtagtttttatttttgttgttttcaatcaaaaaaatattaattgattaacaaataattataccaaacacacaaaacaactcaaaatcaactactgatgtttttattgcatgagtatttataaattttcttcatatttgcaatatcttcctatcacattgatcattatatttgtgctgttattcagtcgcttgtacattttacttttattttcaggaggatgaaaaaacaacgtaaatgaaacttaaaaacaacgtgaaagcaacatatttttgtattgaaattttaacacatactcattgttcttattatatttcccagaaatttaatgcagtaatttccttcaagatttttcgaaaattagaaaaaaatactaaaaatatatgtaaatcaaccaaacgacaacaaataattaacaaaataattgaagaaaacacactacacaacatcaaatttattttttttattccaaaaactacataaaaattagattttttttgaaagaaaacccaaaatgtgtgggtatgaaaattcaaggagacctctctcagtcgtataatatttgatgattctactagatctccgccctagattgttgattctttctcgttggcttcatggatatcttctcacggtgatctcgttgccatggcagaacatctaagcaaaacttcttaccggtgttaatggagatcagcccaaagttcctagccggcgttcatggagatc

SEQ ID NO: 52256 - DNA, 2216 bp, Cannabis sativa
tcagaaatttgattagaagaattggttacaatagttgcaacaaattcaaagagggagtctttatttgtataagtcaatttggttttgtaaacacttgtgattcatctaataaatttctttctctgggcgtggccctgcagactaagagcaatttgaaagagttgttgataccacgtataaaatgttttgtgtcattttaattttttgcattttactttctgcaatatatttctattctgtcagattttgtgtctgatagaatagagacaaattctattcaagcaattttactacagtttttcattatttaaattgtttgataatttcacttggtaattattaaaaatagaatttaactataaacaatgaaaccatttgaatcttaacggttaggctgctcacggtctctggtggtcacttcaattaggtcgacatcatcacagacatatttgacatcgtccagttatgaaagttgaacgactaattagattcccgaagagtttctttcttgtatagtcgtggtctcatcctcatcctcatttgagagatcccggacattgcggggggtgtaaacatggacaagcttccaatcaactccattctttaggtcgagaatgtaatatatcaaatttttttgggatgcaagtatgaatggttaattttggtaccattcacgggcgacacagacactagtgagtaaaccatcattttctgttgtattatcgtttgtgtcccaccacttgcacctaaaaataataacactacaatccttcatgtaagcaaactcgtacacttgtttgagtatgccataaaaaaatttaccaccttctctaggcaccaaaataccactattttgggtgttacgactgtcatcttgatccttaacttagaatttaacaacattaacaatacatccagaataacaatagcatgctagattagatggatttgcgatggttcaagaaactttaatgagtgaatcaaataaactaataacatgaacatgagttcatgattactcagattccaatacattgatcatcattatgatatgaatcaggtctttattgtaaacggtatctttgataaagacaacttaattacatatcagtccttgtcatatataatctatattaaatataacaccttcacttagatgtcatactacatcagtaattcaatcgagattacttacactgaataacaggcattagtaaaccgtactagcaaccattgattaaagatccctaaatattaatatgcagatgactattttattcatagctaactgatcttaatttttcgtgcaatacaagtcacagcctcatgtatgaaaaagaaattttttgatatttatatattatataaataattcaatattaagtattaataatttaacaataaactatatatgaaagtattcaactcttatttataaattaaaaatgtatttataggattttcagggcataacccttaacacatggtgtaatgactgcatttcataatatggattagaaaaggcaactagcactaattattggtatttttataattatttataaatttatttgattgtggaacccattgttagaaatagacattagagttataatttctcaattccagagattttattaaactctagctgtattatttgtgttatatgtgaattatgctatttttataatttttgctcggcgacaacaaaaaatacgatggatggctagtttgatcacatgggtaggtctagaaccttatttcttagtgggatgtatgttggaggaaatagagtagtggggttgagaggggttatggatttcaaccattttacccctagtcttgaaaatgcctaagttataaaagaaaaggcattttagtaatttgccacatgggtgatttggtggctgccctagatgttgacacctagattctactttcatccaagataaatgtaattagtcttatttttcatttgagggaaaataaataaaattaaggaaaaaaagccaagaaattgaagaaaactctctttcccttctctctcttcgaaccagccaaaaaccaagggatttattactaagttttgtgttttgagcaaggattggagcaggtttaatcaaggtaagccctagacactctttggttatgtttttctcaaggtttgaattggttttaacttgtgattttaggaaattggggctgttagggtttga

SEQ ID NO: 52257 - DNA, 1092 bp, Cannabis sativa
aatttcggtatatatgctgacgtggcacaacggtatttgtgtaaataattttcttaaaggtatttttgtaaataaaatcaattttaagtataatattaaaaaactcccttttttatttgtatgatttttttaaaaaaaaaaaaaaaattaataaattcacattaattccttttacgttttttaatattttttttcctatcacatgttaatatataaataactaatcctaatttaaacctaaactctaaacctataaatctaaatttaaaccctaattgtaattttttttttttttgttagtaacgaataaatgaaatgatttttcttctctttttgaaagaagtgataaattgagctctcattgttaatgggaccttgttaatttgtttcatttgctttcatgtgcttttaggttcaggttcatcagtatcctcaatctctttgttaatcgtggtacttctctcatgacccattaataacagcttatgcacaagaacaatcagctacattaattttcataagtgatgctatagcagcactgttgcatatattttcttttcttatataatctcacacttctcattcaatttgatcacatctcttcaacatattttctaaatagctacattttcttcaaaatatcttccattcgcagttctttttactcaataaagaaagatgtgcacttgtgtcgtgtctatgttgacatttctcaaaatccaatcataagaaaaaaccaaaaggtaataatttttggacaagagttgaatcagagtaccgcaaagatagaaaatttagcaataaacctcgaccaataagatctttgcaaactcgaatgtctactattaatagcgtagttgcaaaatttatgggatgtatcaaccaaattgaaaataaaaatccaagtggtgtttcagcagaagacattataagtgtttgttataataatttatttattattattattttattttttaatttttattgacgttattacttaatttatattgtaacaagtaattcaagcaaaaattttattagccctagataaaaaatacaataaaggctttaaatttgatcatgtgtggcaca

SEQ ID NO: 52258 - DNA, 885 bp, Cannabis sativa
atggttacttataataatgataatgagtaaacttaagacatataattgaatttttagtatgaataattttgatattttcaatcattattcttttgcaaatgacttgaatttgattaggcttagactataattattacagtattgtaaattagttttttattaagttctgtcacacgtcacatgtttgcttattcaattgttacattagtgtcatattaatgccacatgtgtacttaatttttaaaatatatatttttttttcaatttagttgtatgtaatttttttaattatgtttttagtttaataattttttaaaaatgtataatttttaaattttttaatgttaaattatacatgtgacattaatatgacagttaactaagcaactgtattatcattttatttgccacttgtgataaaacttgttagaaagatcaatttacaagacatgactattaactaagtaaacatatcatcattttatttgtcacgtgtgataaaatttaacagaaatatcaatttataatagtgtgaataattcaagaaatattaataacgaactcaaaagtttagtgggcacaataatacgtcataatttatgtggtttaaatcctagagaatattacactttatacctattttttcattttctattttaatttctacttttcttttattactccttattctttaatttataggtcatattttcattatgtattttaggtatataagattatatatgatactttaattataaagagagtatttatcaattaaaattattttattatatttgattatgtccctttttaatttgctttttaaattataaattatttatttatatatctatttttattttattttattaatttaatttt

SEQ ID NO: 52259 - DNA, 1307 bp, Cannabis sativa
tggaaagtttcacattgaagcaatcgagttcgagagtttaagtcttggtacccttccacccaaactttatggtgagtttattacttcttggatcatctttgttactctttttaatactgaaagtgtttaagttttaaagccaaactttctaacttttctaggtatgcaagtgtgtaaaactaatgagaaagaactagtcatggaacctgcattgagatgggctagaaatcctaacactagttttaaaataaagttgctatctctaagacttaaaattcaggttaacaaacattcttaaagggactactcacggtagaatgctacacttgcaactattgaaaagatctttaaattagcagaggtagcctctgttcaccccttcttttatttagactgcacttgctgctatgttcatgtattagcttatcttgagtgttggtattgatgatgcagacaacaaatctcaaacagaacattaatcaaatgtttggtggggaacatgtaagttcaagttcatcttttgactaaatgaagtaattggataaagggtttacttgttttataattgtgtttaataagttcgttgtgcttattagaaagcaagaattcattgatagttttgatgcattcagtgtcaatttcgcaattcatcattggtgccctatagtttatgaaatagcacaaaatattcatttgatgatttttattttttaaacgaagttgtttcttttttgatattgtttgattattttctgttcttgttatagataaatagcacagagaatagatcagtttttcatgttgcttcgtgctagagacactgttaagagtgatgagaagaatgagaacaattgctattgcactattaaagtcatctatgtgattgttttaagtttggtttttgaattttatcaagtccttgaaaagaaaatgtgtcttaaatcttattcttttaatatttgattggtttctaataagggattcaaaattttaatcttattagtattgtttgtgctttctaagaattattagacatgaagctgaaattagtatctatattaatagtaatcacatttgttatttttgctctctattaattttaaatagagaatactaacatttttatttctcttgctctgttgttgggtgctttcttcagctcaaaatctctcttagtgctctgtcgttcacatgtatatataccaatattttattgaagaatgtaattatgaaatgacttcacttgttttagtaaagttatattttactttttataagtctaatttgacatttaatttattatttta

SEQ ID NO: 52260 - DNA, 1240 bp, Cannabis sativa
  modified_base (74)..(87): a, c, t, g, unknown or other
acccaaaggagagaaagagatccacactcagatcttgataatagcctagaatagaaaggaacaagggttagagnnnnnnnnnnnnnnagtcattatattctgttgtaaccaatgtaaagttttgtaaactcttatgtgtttaatttcattattttagagatattcatatttaggatgttattcgacatacttgttaataaatttaaatcctggtaaaatattcccaacagttacctaccgaaatagggctttaaatggtgtttttagatcattggcttagacattagaaacatcccatattaaattcccaacattttcaactttttctcataaatctttttttttttttttgattatgaaatgtgcgtacaacacaaacacgaacaacaacaaaacaaacactcaaaacacccaacgaaggaacagggaaccagcaaacaaacaacagagaaaaaacatctaaaggaaaacaaccaaaacaaacgggtgaactaacaaaacagaccaacactaccctgaccaaagatcaccaactcctcacatatcaccaggatcccactccgtgaggtcatcaagaacagattcgtccagcacctcaggattaatacagcccattattctcgaattagaagcccactttgcaatgttatgagccatatagttgcatttgcgcgagatgtggacaataccccagtcattcatcttgtcacacgcgtgaagaaaccttgatttggcttcctgcagactgaagtccacacaattggacaaaggagcatcgaatgctttcacgacacaacaattgtcacattggaagatgatgtttttcaaacccaactcaatcgccttttctgctgccagacacactgcatgagcttcagcaagcttaggtgaagttatcaaacctgtcttaactgtgatggaaaggattgaacccaagtcatctcgaatgactgcagataacacgcagcctgtagcagaaattgctacatcagagttacagcaggcccatgagggaggaggcggagtccattctagaacctcttcaactctattcgaggcaaccatgacatgatcaaggatcttctggcggaccgagtctatgatcaacgctaactcagtgtccttttttgcatgtactctttggtttctttctcgccaaatagcttccacaatacataatgatgtagccatgaaatcgtagaattcaacgttcggtgggagattcggacctttgtagaac

SEQ ID NO: 52261 - DNA, 1106 bp, Cannabis sativa
gatccatccaagcttgccctttttgagctttgacttggataccttctggggtggaggatccacagcaggcaccacctcagagaggccgatcacttctccggctggtaccttctctttggacagaacctcgttgcctcgggatcgtttgcccaaactgtcaccagtcctcttcttaagagcttgaagtactttttgagacatgattgcatataaacaaaataagaaagttaaagcaaacataatggaaagcatgtcatggaaaaaataaatacatgttaaaaataccctacacgtgggcaagacattttcccgaacaagtaaggatggagcctcatcatctgaagagtcttcttattcctgctccgtcaggatggcttttccttttccctccactagggcagatggccgaacaggtctatcaggttctctaatcctgatagcacacttaactggtgcctagtcacccggaggaaccttcttcctctttttgctcggtctcttctgctcgatcactccgacctggttaggctttaccttcttcttcttcacatgccttggcacaaaatcttctgtgaagagtttgtacttgacataattggcctcagtggccaggagagtaatgttccgagcagcgtccggtagttgaagaattctttgtgccctctccctgtgccccaatatgaagggagagcggcagtacgagggaatatgctggaactgagtgtggacggtgtccattccttggatgaagtagtactcatccatgaagttccatatctttctcacctcggagtctacggtgcccatcaaccacttctcctcgatctgagaaaagtagagatagctcgacctgctttatttaggagttgattttagatcaaagaaccagttggtgtcatgcggggatggctcgccccatccttgtgaagcgtagagaatgaacagggcggataaatacttgatgcattttggggtaaattgggtcagacagagatgatagtaatctgcaattctcttgaagtacggaagcaagggtaacatagcaccctgcttagtgtgagcacccgaccaagcacagtaatgctcccttggactggtcgccaact

SEQ ID NO: 52262 - DNA, 684 bp, Cannabis sativa
aaaaattacaatttacaaccaacagatggatccttaaatgcaattagagccctttggacccattttgctactccatagacaaatgtttggtatgcttggtagctttctacataaatgtatctacgattggtactatatatatattttgttcattggacaataatgcatttgaaaacaatgggtatggttttgattcttgaaggttaatttttttctcttctttctttccatgtcaaacattatcttggaggaatgtagatcttgacttatagaataaagaaacgaaacatattcaattttattgaacggttaatattgtgttctttttctaatctaatttgatgtgaattctcattataatttatgattgttaaaaagaaaaaagtcggtgcccttttgaaggtgtggccaagttttggctaattataaatctaattggacagaaagtaatacgaaggtgatggtgggatctctttatttcttgcaccaaatagtcctctgaataaaaaaaaaagttgtccaatttcaatctatggctttctttctttctttccactagaaaaaggaaaaggtgtaaataatgatagcttaataaggttttgaatataccacctcacatggcatactacgagccacgatcttgaatatgtttaaatatatgtagttttcatgttaattaactta

SEQ ID NO: 52263 - DNA, 607 bp, Cannabis sativa
taaggctctttttattgaaatatataaatatatgtatttcatatgtagctcactttttcttcttctatagttctatattttttgacaggcacctcaacatatatatttatatatgtatttcatatatggctgactttttctttttttatagttctgtattttttaacaggcacctcaacatggtatattgaaaattagttgaaacacttaataattgttaaagctaaaataattgtgttcgttgtctcctctaccttgaaggcaaaactaaatataaagtgagtatcatcaattatctttttagacatcaaatttatttagtcatctatttattttgttgattaaaattttaatttttaatattgtattattctcattttttttattttgtgattattttagtttttgatattatattattctattgctatcaacaagagtgtttggaagaataattttattttgtatggcagttagtatctatgtgagaaggtgatgttgtcgtggttgtttcgaaaaagatatcatcaactcttttttttttttttttaagaaaactgatcacctaaaggataaatatttatcggaggaagatttataataagtg

SEQ ID NO: 52264 - DNA, 3234 bp, Cannabis sativa
tgttatttttatgtagctttcttgttgattttatgttgttttcgtattattttttaaaaaatcgtaaaaatgtaaaaaaaaaaataattcttttgaacgtaaaaatataaatattttacaaaaaatggtgccctatgtaattattcctatatatatatatatttaaacctacgacatatactgaagccacaaaatatcaaatacagttgaaatagatataaaacacgattccatatcaatcaaattaagccatgtaccaattaaaatagatatatatagggccgaccctgaaatttagtgggtcgtaagaaaaaaaattatttttgggcccttatttagaaaaaaaaagtagaatttttcaaaatcagccaaaaaattgtgtaattttaaaacggaaagattttttttgggcccctggactaggtgggccctaggcacaggcctagcctgcctatgcccagagccggccctgtatatgtatatatatatatacagtacaactcacataccgtatatgaaccaaaagggaaagaaaaaataaaatcctaattttcaaaatcctcaaatttcattaacaataaaatcatttgattttcaatcaacttagcaaaaagtggctctgataccacttgttaggatttataaaacacttaagaaatgtatgtatcacaaatttaaatatattcctaaatgtactttaatatagaaaatcctaaatcataaatctattgtgaaaaattatactattttttaccataaacctaacctcgatcgcaccctgcctcatactcgcacccaaaacctgaccttggagcccaacctaaaccctagcctagacctagactcagacgccgactctgaccctagattcgatcccagccccaaactcggactttgacctcaagcccagaccgtaactcgggcccttgctcccgatctcggacctcgaacttgaactcgaacctcgaccgaacctcaactcccgaccttagaccccagctcaaatgcgaaccttacggacttggatcctaaacctgatccctcaaactcagctccgaaccccgaacctggccccaaatgccgaacctcggctccgaaccccaaaccttggcctcgacctgagcctaggaggcgaacctcaacctcaaacctaatcttggaatttgacaccaaacctagaccttggccccaaaccggaactacaaccctaacctcggactagaccatagatccaaattccgacccctgaccttgaccttgaacccaagccacaaccctaacctcgaaccctaatctcgaaccatttctaaatatttattatgtattgaataatatagtttgtattatattaaaatttataatggtaattattaatacaatataaagtctattcaaacataattttttttctttaatacaatagtataataaggtgcctctctctcttccttcatcatttttttttttttgagacagatcttccttcctcaattgaattaatcttcaacccaaattttaatgtactatttagccgttaatgtagtgttgacaagtcaatctttcgagtatgtttcaatataattaactttgctaattttgatgaaatttgagctgggattgcaccactatatacacataaagtgataagacaaacagaatggctaggtcgggcgtttttaaatggaattatttatttaggcatacaacttgtaattatttaattagaattggaattatgaaatatataaataataaaaaatcagtcttacagctcgcacagtctatggatatatttatagaacatagtgatgatcaagctatgtctttatttaattttataaatagtttaagagaaagacaaatacactttaacaaagtacggtgtatgaggattttagggccacctttttaatttctgggtgctataatcatcgagtgtgtatgactttgatatacacatatatatatcttttctccaaaaattaaaaagtgactaacaacacaatcatatctcctaagaaagtaaatattatatacacacatattaccatcccacttcttttatggcccacccgacccaagcttctctgtctcaattttcaactccacaactctaattttattttatttttgcttaatactttcaaatttaaattaaatttcctaatctttttaaattttcttctagttagtaacaatatatattacatatatacgtacgtacgtaattcggtataattgatgttattattattagttggcaattatatctgtaatacgtattatatattatatgttcttgactaggttatgtttttttttttttttcattgaatgtatcagctggttccttttttgcgagtgatgctcaatattttcattgaaatgtaccaaagggtatgtgccattgaaatataaaatcaaatatggaatgtttgaaatatttctactcgtgggttgtgtttaactcaagatgagtacaatttctcaagtttcctactaacacactacttaaaattttaaaataggcgtacgtgtcaatataaaatcaaaacggatgaaaaaagcatttcgaccacacgcctatatgttggacaatattatctcatagggataaaatgaaataatattatatcatttataagaacatgagttattatgctcactatcaattgattgattgtgagatagaacctcaattactttaccatacacttacattcattttactttctaaacctcatttccaccacacttttaaattctaacatagtatcattctattctaagtgatattcagacttttgtggaagactgtgttgaacaccatcgaaagaggagaacattcaggttcagatcttgataattctctgttatagacatgaatcaagggctagctagagatctaaatggaaggagtcatattattccattgccatcattgtaaggattctttattgtgttatttcattgttttaggaaatttatatttagaatgttaaattatagtattataatcacaattacgtaaacgggtaaaccacacgccaaaacccttaacccaaacccctaactatgggttctgctattgatgataactaacttaacaataccttaagtaacaaggaattaaccaaccaagactctgaaaataacacgaattgacgaatcagcttgttcgaaaaacctgtcccataactagttaaccgattttacactacctgtcaaaccggt

SEQ ID NO: 52265 - DNA, 762 bp, Cannabis sativa
ctttatgtcctgtgtcctttgtttgctctcaaatatgtcgatttaaacataatgttgcaggctgtggttgtaagcattgatccccgtagagtctacatcaatgatcccaatgatgtggagtttaagactgtaagggtcacaaatagaggtaaagggacattttccatttctttatttttttacctcttcattccgtgtttgtggtttcttgatacattctctaagttctcactgcagtcttgtagaacaagcttgcaaattgttatattgttatttctattactttattgcaatgtatgttcatctagaagaataattacaatatacgaaatgttcaaccactggtgattggtgtacaatatgaaacattacaatctattgtgtttagttagttatcttgatgagagagagaggagtggcagtggacacaaatatcccatgcattaattaataatgtatcattaaaagagtgggaaaaattagaggcttaataaaggtgtctattttggaaggtaataatgaacattttttaatagcatggctagtggtaattaatggcaaatatattcatgtattcttttttccttcttaatcaattttttctttttgagtttctttattcctttaattatgttctgctgatatatataaataaggcaaataaagaagtctagctatggaagataaaacaagcaaagggacagatcgaacaaaacatatgaagtgagactatatacgaaattgtatactaatcattaatgt

SEQ ID NO: 52266 - DNA, 556 bp, Cannabis sativa
gtagctaatgtatggggatcaaatcagaatgaatgcttagtgaaaaagcttgagatatgtagcactcaactagctgactggggacgcaacctgactgggaatttcaaatcccgtttgtccaaaagcaagaaactgcttgctgaattcaaaaattcgggtaacgattttgatgttgaaaattttgcggtggaaaaaaacaattactttgagatcctagcacaacaagaactctactggaaacagcgttcaaagcaatactggctgcactcgggggataaaaataataaatactttcatgccactgctagcgctcgcaagagatcaaataatgttcagcaacttcaagatagtaatgggacttggcaaaattggaacaccggtcttgagactcttataaggcaatgttttgaggagttatatcagtcctatattcattttctcctttgattattgataatgtgaaagttgctgtcacggccttgcacaatgaagctcttttgcaaccaatacaagatgaagaggttaagctggttgtattctctatgcaccctgacaa

SEQ ID NO: 52267 - DNA, 994 bp, Cannabis sativa
gcagaacgcttcaatcagctggccgttagagtcacgggctaggcctcccacaccaaaagaaccggatgcagaaaagacagcaccgtccacgttcaccttcaaaaaaaccagcagctggtgctgtccagttattgccgttggtgctggtgttgtttacgacagcaggtaggggggaaacctgttagcagcagcagttttccattgattcaaaactgttgttgcagaggtaattacctcagccgctctagtagcatttttattccatagcagttcgttccttgctttccaaattgcccatgccaccataagagcttcttcaaacaccaccggctgacatttaattaaaatcttctctatccaatcaccaaattcagtccccataatagcaccagtaggcacacttgacaagttccagcatgattgagcaaaattacaagtaaccaggacatggaaaatcgattcttcctctcttgaacaacaaggacaatcaagttgcacaggcacatgtttggtataaagttgagtacgagtggggagacacccagtgattgctttccaaacaaaatgaataactttaggaggaactttggttttccataaagaacgccaaaggtttgattccatatcagcagaccatctccctttcgacacttgtaaccattgatagcagctcttgactgaataaaagcccgaattctcatgttgccaaaaccagaggtcattctcttcacccgaattcagagggatatgcatgataagatctcgatcccgttgctgaaacaggtcctcaagaatttccacatcccattgatccttggctgctgtcatcagttgattaaccacggcccccacaagagcaggatgagtactcgacacacacggattagatggatcaggtaaccaaggagtgttcagaataggcacatttgaaccagctccaattcgaatacgtgcccctactgcaataatcgattgagtctcaaagatactcctc

SEQ ID NO: 52268 - DNA, 2172 bp, Cannabis sativa
atgtcttccatatctctatgttgagaaagtacgtgtcagatccaacacatattttgagttacaatgatatcgagctccagacagacttatcttatgaggaacagtctgtccaaattttagaccaaaacaagaaagtactccaaaataagaggatccctctcgttaaagtattgtggagagatagtaaagttgaggaagcgactttggagttagagtcgcagatgcagaagctgtatcctgagttatttaggtaaattttgaggatgaaatttctataaggaggggatggtgataatatcccgataatcctaatggtaaataattagggtttatatttatgttatgggttaattaagtaataagtgaaattatgctcactaatctatttcagcataaattttaaatctgttataagtggataaataagggtaatttattaattacagagatttatataacatatatgaatgtaatatgagctatttgtggaataaaaatatttttagatttggcaaccttggagactcgatcgaggccaaaaatgtcataatgggtttaattaatagatttggcaggaatattatgataagttgatagtgtaagtattgggataattaagagtatgtggaatttggcctacagccctaaaagtaaagattttttagtggctaagaaatgataagataactcttaataataacatttttttattattatattattattataaaacttatcagatatgtttatatatattttaagtttataaattaaaacagtacgaacgaaaataaaccctcttcaattctctgttcgacgaaactcttatccccctttattcattttttttaattttcaatctgaattctagtgattcaagcttcggtagtagcgggatagaaaatccttgaagagagaaagcttgaggtaaggattggttttgttttaagttaaaaataattggttttatatagtaactttgtgatttagagtagttatggagattctgacttcattaaattgttccttggtagttatgggactagttttgatgtttacttgttgaatttgaggtgattttgagttaaaaattatgtttggaacttcttcaagcttaagtttgagctttaatggtgttttctatttaagggctcgcttttaatttcggttacattgggactgtaatatatatggtatatataagtactttgaagtttggagtgatttggataggtttcggagcgtacaaaattggatttttcgagttagtaagtagtctgtccatttttagaaattcctgggagattagaaatcatatttttatcataatttttcactcgggtgtttgttttggacattctatatactgtatcgaagcttgcaatgagctctacactatggtgtatgtattacagccaaaatataagttttattttagtgtatttataccacagggtttggtaggaacccctaggctgtcctttgcaactattaagttgtgctatgggatagacacttattggtttactattgttatgacatagggcccgagatcattgatcattctctaagaaggtcggccaacatacctgaaccgaaacttgaggtaagaaaagtataatgtaccacatgacatgataggttttacaaattgttgattgtctgattaggcaatgacaatgtgatgataatgtttaacattttggtggtgacttttcctgctcttctctctctttcggtgtttcaccggggctatggcgaaaagggcgaaaatagctggaaaagtgaaagctaaagggaagaaaacagggttgtcttcatcggataaggttatcaaaaccagatccatggatgcggtgattggtattcaggaactcaagattcctgaaactttggaagcaatggaacagtactcagagccaatggaatagtgtaacgaaggtctgaaatcacctgttagtgaggttcaggacctatctgagtggctcacgatttctaatagggttgctcaggatgtgagtttggggaagaagatctctcctccaattctcagatctagtatgaccaagaacctggaagctagctttgcacaagcagaaaaggaaacggtagatactagatctgcacgaaagaagagtgttaagattaattttgaggacattgcagaagagg

SEQ ID NO: 52269 - DNA, 4279 bp, Cannabis sativa
  modified_base (27)..(36): a, c, t, g, unknown or other
aaaaccctgtgttcatatattattttnnnnnnnnnnttattttttctgtgtgaaattattactgttaggctcaaatttagttaacgaaaatctgcgttaacatgtttgttttgaaatttagaatttatagttaataattttgattgtatttgaatattgaagctgaaatttagaattttcatatgtgtatatattttttattttaatttttgaaaaatattatttaatactttaatgtttattcaattcatatttatcttttaacattaatttaaactataactatttttattttaagaggcatatgctatacatttattttttcaaatcaattatttgaacaacaaaaactaacaacaatgaaaaaaaataaaagataaagatcggtttaaacgggttaacccgaccaaaccaacaaaaatcattgggtgggttacacttttttttttttttttttcattggacgggttacaattagatatttgcaacctaatatttacattaggttggtaaaaatacactatgacccaaccaaactgaccgatgtacaccctaatatttagatatctaattatatatgggatattaaattataccatttaattaattttagtgatctaatcgatttaacattcatttaatgttaaattagattggttttttatccattaaatgtacttgtattaattcaaatttatacaatattttaaacttagtattttttttaatcaaattagattcatccaatttttttaatcgagtatttattggatccaatctgatagaacaaagtaaaattttaatattaattttcatacataacatatatatatatataagtatggaaatactttttaatgagtattattcattcatggttactaaaaaatttaaccataaatattaattttattaaaccattaaattttgatccaataacaaataataaaagagaaatttaaatttatatgtttaatttaactacttaattaagaaaatatataaaataatatctcttttcacattatataaaaaatatttaaattaaactcaatttttttatcttcttttttgtcgaataactttttttattaatactttcaaccaatagaacaacctagcccatataatgtaaaaaagagagatttttttaattagatagaaaaattaaatataaaaactcaaattttcttaataatatctatttatgagtaatactaattaagagtgtagtcatatatatttttcgcacaaggtggcgtggcactcagcagggtgacacgtgttgtacatattttggcctgaacagagtatactcatttatagttctgtctaggataactcataaccaaatatgttaagtatgattcttcagtaggtaccatccgagcagatcaagtatgcctagtaaagcgccattctccagaaagaagagcacggtgattgaagatctacagagatattttccttaaatatctccatgattatagcttaattaaaatccctatctttgtggaatcgattgtattcgattgagataatcatggaatttaatatttaactttttagaattcttctcctatatttttgagatattgtattatgtatctttcttataaatagtggaaccataacactattttgggatccttttttgacattctacagagcagttactttggaaaaattattgtaacctttcttgagattattaagaaactcaattggtcggacccttatgatttgaataactctctaagtaatgcaactaaaatgggagtatgttattatcaccatcaagggattgaacctctataactcttatgtgttcttattactttattattttattattatttgattcataatcacatcgctttaaagactgcatatcgttgactaaaagcgaggtcaacattttggtgctttcattgagagcaaagagcaaaactttgctcttagcaatctacatctttaattgggttgacaatggttttgacaaggagatcctcatcaaccaagccacatgattcaatggcaacaaatcctaatgtccaagctcccactaacttcagggttgacaaccccaacgcatgactaccacctcgagggaatcctcccacaattcctgccaatgttaaccccagagctactaggattacaacacccatcactagcgtcacagacgatgtacaagaaattggaaccaccagtacccagtacactagagaaatggggtcgggtactggacaaccatctatgggagagcctcaagtagagcttggggatgatactgagctggaaaacctgaggggagccttaggacaagtgtagaatcacactaacaactccaccacaatcagaaagaaactcgagcaattataaaccatgcatttgaatagtagaggcaggaattccaagagtggatggatcagcaagctcagatcatgagggcccaacaagaggaaatcaattgttggtccagatagaataccgacctgatgattcaaccaatggattaagggcaattgattgataaccaactgcccaagcgagacaatgataagggaaaaggtccctatattccaagtgaacaatagtatgagccagaggaacgaccgaccaactacacccagtcacctcgatgagatgggccatctaactccagatctcaagatcaaccagtagaccacatggtggatgatcaagtgtgcctggtgattaccttgggaggaacaaccagttcaatttttatcctcagcctgaaggacaaagagacgatgtactgcatcgaccaattgtggggtctcgaggacatgtggcaatgtacaatcaagatggacgagtccaagtctatgggcaggctcagtataccagctagaaacctcatcaaggtcaaaaaaggtctcatagtggattgtcgtacaagagtaagaatgatgatggagttgatagtggacaacacaacaaccatcgtcgtgataatcattgtacccacgacaaaaatcaagaaaatcctctaaacaatgctaatcctcctaggtcagcccggtgtatgagccaacaaaacagaagagctctaggcgactctgtcttctaaaggatggggcccagtactgatcttcgagacgatttgaatcgtaaaagaggaaccaagatggacactttgtccctccgcctaataattagccaattaatgtggagaactatattccgcaaaacaaagataacttcgtaccttttaaagctccaagagggtagcaggtgacacaggccggttatcaggtaggtcaagtaaatccaggggtgcaagtccaattggttcaacttaagagcctcattcaaggcttgaccggcccaaaactcactgacttggagcttaatcagataggaggttcaacattctctactcagatcaattcctttgatctttcgaccaaattcaagatgcccacttggaagatgtacatagggaaagaggatctgttatctcatatcaagtatttcgagatacaaatggacctgcaaggagtaaaaggtgatgtacggtgtcaaatattccctgctaccttggtggaggccgcctagtgttactggctcacccttttaggcatcacccttttaggcagtaaaattttaggcagtaaaactttaggcagtaaaacacccgtgcgacaacacccgtgcgacaccttgacttctctaagccaaggttagtcttccaaccatccgagtaataataggatcaatttttgcacacacttttgtctctcgaacaacttctgccgagtcatgctcccaagcatccatgagtgcatccatgcatcgaggctctatagttaagatactcacactatccataggttcagactatgataaggcaaatcccaacaccatcgctcacctaatcaatcgtgaccaaggtagagtgtggggcaagatgccaacaccaaactgacgtgtcaacgcttctaatcatgcccaatttgatattatgtgaacaatcttcctcatcgcccaaggactcccatacgtccatggcctaatcatcaaggtaccattcttccatgcatgttggtaggccgtcgagacaagccaccaaactagtagcatacgttagacttttgtctctttctagcatggtgcatctgtcccatgcgcgtatgcagactagcccacgataaactacccatgtcatctcgtgttgagactcgtggccaaggtgcaccacaacattgttggaaattattttactatgattttagatctactcacaagt

SEQ ID NO: 52270 - DNA, 740 bp, Cannabis sativa
cccaaaatcaccacaaagattatctctacaagatgaattaagattatcactaaatatggattaaggtacgcttccgctatttggcttcttctctttgaatcaacaaaagtattttttagatctatggttatacacttataattatttgtaatatatttatctataaaattgaatattgttattgcatattttatgagtgataaagaactaacaacaaaaacatctaacattcctcatgagaaatctacacaagagaggttgctttggcgacatcatgtttcaatcaattcatttaaaataaagacaaatttcaatattttagtatgccaaatttgaacttaaaataaaaaaaaatatatatttaatttagacttgaatttttatcatgaacctcatacatgtacacatatattatatccgattatatctttccaatgtaactcatatttaataataatagcccatatttaattatatatatcaaaactgcataatatatatgtgcctataaaccaaaatcttaaaattattaataaatacctcatatacataactatgaatatttaaccaaaatatgaattgaaaagttttaataagaagatcacacccatagccatagtgcacttaatctaaaagcctaaaagatctaatatatgagtgaaaacttagaatcacatcacatatgaatacatatgtcaaatataaagtacatatgcataaaaaggaggcataaactttaa

SEQ ID NO: 52271 - DNA, 829 bp, Cannabis sativa
atattataatcttcttcacttcatatgcatgaaaaacatcatcccccttctgatttataacagccatcacagattctgaaaaaccatcatcggtacccgcactaaccttctcagcaattccctcaactccacctacattaccaccattagaacccaaagcttcatcctctgctattgcaacactctcagtttgtcctaataacgaacccattatgtcaaaatttggcatatcctaacaacaaaagcaaatcaaagcaacaaacaaattagttaataacttaagagaacaaaaatacaataattacacaaaactgttctgtaaaaaaattaattggcaaaattaaccttttccaaagaagataaaccatcaaaatcttgactatcaacttctttcacagacatctcagatatatttttaatttcttgcacaatataatcagaaaagaaacaattaagtagcaaaaaatacaatagaaaatattaaataataataaaaagaaaccagaccttataaacatcaccgtcaccatcaacacaatctttgccatccttcacatcaccagcatcttcaccttcccccttaacagtaggctacaataaaaaataacaacaccacattataaataacaacatcataacccaaaaaagcacataataagggatactaaaaatagcaccatactatcatagcgcaactaataacacaaaaagacaacatacaaacacatgaaacactaaaaaatctaaaaactactaaataatacctcaacatcatcactaatgtcatctaggttacggggactaccaacgccaccaccaccaccgtcat

SEQ ID NO: 52272 - DNA, 835 bp, Cannabis sativa
cgatttcacaaaggaggaagttaagaaagtgttttttgaaatacctggggataaagtcccaggtcctgatggcttttcaagttatttttttcaggataattgggagattattgggcaggatgtttttgaagctatcaactcttttcttcaaacaggtcaacttctcaaggagattaattctactgcattgacacttatccctaaaactaagtgtcccaatacagtaggtgatttcagaccaattgcttgttgcaacgtaatctacaaagtagcaaccaaactaatttgctcaagacttcgacatgtcctaccagtactagtagctccgaatcaaggtggctttatcaaaggcagatttatagcttacaacatcatgatttgtcaagatctagtgcgtcactatgggaggaaatcatcaaagtcagggtgtataattaaacttgacttgaaaaaagtatatgataccattgaatgggacttcgtggaagagatgctcagagaattcaatttcccggataagtttgtaaaactaatcatgacatgtgtgcgaacccccaggtcctcacttatgttcaatggcacaatgcatggatactttgaagctcaaagaggactgaggcaaggggatccgatgtcaccccttctttttgttctatgaatggagtatctttcctgaatattgcaacgaattggagctaaaccagatttcaagttttttgataggtgtgcaactttgaaaataaatcatttgagttttgcatatgatgttatttcattctgtcatggagattacaaaagcatctattatattctccaaggcttgaagctattctct

SEQ ID NO: 52273 - DNA, 1852 bp, Cannabis sativa
tgttaatttacttgttaccttttacaataccccataaatacttaagtttaactctcagttgtaaataaatacttatgtttaattttttacggtaataatacttaagttgtaattctagaatatttgtaggtaccttgcagttaagtcttaagtaaattgtcacgtgacaattcctagttagtctaagtcattaaaattttgatttttaaaaaagtaatttaaatataccaataagaaaatgacttatggataataatttaatatttaacggtcagatacctacaaagttcaaaaaaatataacttaagtactattaccgccaaaaattaaacttaggtatttatttgcaactgagagttgaacttaggtatttatatcgcaaattactctttagaacactatagaaaatattaaaattttatttttgacattaaaatctttagatttgctaaattatttaggtattattagtgactttcaatagcattacaaggtgaaattttggaaatggttagtgaagttttataataatcattcaattaaaatgtatatgatttgatatttaactatcttactatgggttagttaggattttgtctatcgaattttaatatgtattaaattatattactaaattttttaggtagttaaaattattttttgaattttgacatgtaccatatcatatcctcaaacttctcatttcactaaaaattctcttcaaatattaagattgttagatttaaagacttctattcaattttattaatatgtcgattgtccatgtactaaattgtacctccaaaatttaatatctatcaaattgtattcctaaactttcagcttttatacaaaaaatttcaatttaaatatcttattaatacaattcaagatggtgctacaaaatttttgtgttgtacaatatttttctaaaattatgcattttgtataaaatttcgtacactatttagactatttcgagtcacaaagtcacaagattgatcaataattattatagcatttcgattattcttgaatgattccaaatggccagttcaattgtgaggaaatctttttcgttagctaatcactttagtacttatacctttcaatttgatgcaactaatcactttctctaatttactagaaattgaagttgattagggttttattgtatataatatgagtgatattaagttggatcaatacctttcttcaatcatataattaatttaaaacataaataccatatccctccactaactttttctttaaacaaaaaattagttaataagtttgtggtgaatccccaccctcaaaacaagttgttacagcagtaataatgtccaaaaaaaaaaaataattcaaaactaaaacttgaacttaattgaaaataagaccaaaaaaaacttaactcaataatgaatgaattgtggatctttattgaataggaatagtcagtagtacacaatagaatgagtccaagattacaactcaacacagtaagtaattacaaagaaatacctcacattgaggaaaatcacttcaagagtgatactcccttttacatccctccacacacactcattatgatcttcgactctctctctctaaactgaatctaaagtatgagctttggagattagagatcagaactctcaactcagacctgtctttgagaatagaggaatccctatatatagttgctagtgggtccactttaagttagtattaaagccaattgttataactgttagaattattataatggactaatacaatcataggtttaattccataatacacaatcattaattatgtgcctaatgttactcataaccataatgggatg

SEQ ID NO: 52274 - DNA, 719 bp, Cannabis sativa
gccaacgacaatgagtcttaattgtaagcgatgaatgatatagtttggatgtagtatgaaaagataaataaagaacacatatattttaaagaggttcggccccaagcagttcggtaatagcctactccccttaatttgtattgacttaagaacaaagaatacagagattcttctcttaaagctctgaccatgaaatctcagagtatactctcttagataattctttcgacctcttgcctagtgagaatagatcactatttatagggctatgtgcttgagggaagttttcccttttgtttacaatgtctctaattggtaagattacacattacatatatagagtacattgattgaggaatttggacagcttgccatatctctgtgatacgatcccagatttatagggattgcttttgtgcttcacgatgcaaatgctgaagtttctaagtgttgatatgatgttcggattgtccactgctggctgggaggacttcatacgtgcaggtatatgtggtgttatgctctgaacatctccttcaggcaaatatggggaatcaattccacgtgtcatcagcgtgtgcaaatatgtggtgtgcctcgagacagagttttttatgcacgccttgacagttacacttgattgcttttttattttccaatattaattttttgggggaaattgaaacgtctgtgagatttcaaaatgattacctcttttc

SEQ ID NO: 52275 - DNA, 714 bp, Cannabis sativa
aagttcttatttaggatgttaataaagtagatctaagatcctcgtaaaatatttccaacatttacatctgggaccaaatgactggccttagaggctttacctagctcttggagatgaacaaaatttcttgatagtagggtgtggttgaagcttccgaaggggcctcccgaacatgactatcgaatttagataaattctctgaggaaatttatcttaagtatttcttgcccttaagacttgccacctcactgacctcgagactgccacgtatattagaaaatagaggggcaacatttactctccaagattccctatgcaaaagattagaaaatgcaaaatattctctatgcatcaactgttgagagtctaatgtattgtcaggtatgtacgcatctagatatagcgtacattgttgggatgttagacagatatttaagcaacccttatatagaccattggatagcagctaagagggtcatgtggtatctttaaagagtaaaagattacatgctcacatacaggaagttagatcatttggaggtcgtagggtattctgattctaattttgttggatgccaagattgcaggaggtctacatcaagctatatttttttgttagttcgaggagttatatcctggagaagtgtcaaacaaatactaatatctagcttcttccactatgacaacagaatttgtagcatgttgtgagacatc

SEQ ID NO: 52276 - DNA, 3070 bp, Cannabis sativa
  modified_base (1155)..(1156): a, c, t, g, unknown or other
tatgtaaatgcattatgaaattctgttttttaaaattaccaagtgtaatatttaacaaacaacttaattaatgcataactgtagtaaaattgtttaagtagaatcaaaatctgatctatcacaaactgaatctaatatatcagaataatagtgcagaaagtaaaattacagaaattaaaatgatacaagatattttatacagagtatcagcaatttttgcagattgctactagtccacgagatagcgcccagagacaaaattcattagccaaatttcaacaagtacaaaataatcgacttaaacaaaatttaagaaacttctcatatgttttattcttttagttgattagaaacttgcactgtagtctttcgaattgatccaccacacaaaagaaatagtgtaaactattaggataaagtgtataatttattcttgataattttcaacacatgatgaacaagaattatttgagagagaaaaacaatttttcttttcaaccagcgaatttcaaaaattcctatgtgaaaagcttcttctaatttctcaaattagacatgtatttatagtagttgaatctctacaattaaatcatatttaattatttaaataaatatctatagatgaatttggctactgatatttcagatgagagaatctctcaactactacttgagacaatatctcaactacttcaaaatatctttaaccacttctcaaatttaaatatttatctaatgaaactaattaaataacaccctactatagggtaggcacctaccttatctcatttaggacaaggattgtgtcttttgtcctgacaacttttgtctcaacatatattttcttgacaaattttgtttcaataatttttatcttttccctatttaattaatttgaaaaaattatttatttattaaaaaaataaataaatactattttttccaattcaaaataaatttttctgaacaacataaaataactctttatcccttcccttgatagtgtttcaaggttgcgattcgggaaccatggacctataattctaagctccaataaactagattatttattgagtctcatcaacaaatcatctttatttattaattttaaaattactccactataaatttagaattgaactcttagtaattatnnaattatatttactgagttttactgcagtgtccattaatataattaatttcagtaatcagccctccttgtgtctgttcgtatttaattttggttaaattatcattttacctttctaattccttctttatgctttagtatcgtcaattcactagtgaaagtataatataaatccaatccaaatttgtgcatatcttttcttttccagaattaacacttaaagggaaccaagattcgatctattaggaaagttaggataccataattgtagatctttttctcagccatccacattattagattcccaaaatagaagttgtaagaattatattttctgagaaactttaatgagtgaatcaaagaaactaataatatggataagagttcatgattactcaggatttaggccaatctactactgatcatcattatattatcaattagatttttatagtttaacgatagtttgaataaagacaaatttatttaataggtcattgtcatatataatctatattatataacacattttcttagatgtcatgatacatcagtaatccgaatatagattacttacaccgaataacatgtattagtgaaccgcactagcaactattgattaaaaattcctaaactttaatatgttgttgattgatttattcatgactaagtgatcttaattcttcgtagaactacaagtcacagtctcatgtatgaataagaatttttttcgatatttatatattaattattcaatattaaatattaataatttaacattcatgcatatatcaaaatattcaactcttattaataattagaaatatatttacatgattttcagggcataaaccctagcaatctcccatgtgccctaaaagcaaattgggcatctcccttagtcccatattagttatatgacccataaaagattttttttagtagcatctttgtgaatggaactaccaggtcatgttccgacacaatctttaagaccgtcacattacctctcttcattatattgttgcgtaaaattataaactacgcaagtgtacgtattcagtagtactcacataggtgaggtcaaaccacagaatattaaaattgcttactacttaactagatttatgtttctatttggtcaatcgaaataagatttggtcaatcgaaataagattggaaagaaataaaaataataggcaaaaaaataaaagaaacaagttttaatgttgcttgaatatggatgaaagattaagaatatgaatcttattgtttcagttacccaattgttaatgcaatttatgagctttctttctttaagtgatgatagattatagaaataaccccaactcttcttagatcattaagatcctaaatcatatattatctatttgcatctttgaaataaattagtatataatatacattaagtacgtaacctaaatgtcacacatgctatgtaaatactctcgttttatatcaaaacctatgtttgttctattagagcattcttaatatttacttctccattttatattaagatcataaatcatattcaagatggccagtataaaacatgttaaaataaataagaacaaatcacactgatccagagaaaaaaaactaacaaatcacattaactaaatgaggaaaatatcattcaacattcatcatatccctaaattgggaaattagttcataatctctaagtgcaaatccataataaaacttaaaacagaaattgacataagaaaaataaaagagaaaagaaagaactagttggtgatcttgatccgggccgccacactcgcttcttttgcctccttctttgtttctagggttctatttctgaataatttgcttcaaaacacgaaactcttttatagaaaatcatttttgcaactcagaatggctaaa

SEQ ID NO: 52277 - DNA, 580 bp, Cannabis sativa
aattgaattaaataattctcatgaatgtcgaaacaataagagatgtatcagactcagtgcacacttttttggagtgcattgtagcacccccaatgttttatagagtaaatactatcgaaaaattttatggtacacccccaatgttttgtattttattttattttagataatattttatagggtaattttacaagcaccccttaaaagaggtgcactaatataccactatttcggtatttaggaaaaaaatttagcctaaaaatatttatttcttaatcgtatacattatagctatttaagatattttataaaattttgattttttttttttgaaaaatttcaaatatagaaaatagtattcactctatatatttcacatgcatataaaataataaaaaaaaagtcacacgtactgtttaaatcctatttttggcgtgtaaatttttctacattttttaactttttgtaagatttcacatgatcataaaaaaagggaaatttacatatatactgtttttggaccaaaactttacaaaaatactgggacacggcaaaaacaacatttttactgccccagccc

SEQ ID NO: 52278 - DNA, 1367 bp, Cannabis sativa
  modified_base (1318)..(1339): a, c, t, g, unknown or other
gtgatttatagatgaaaaagaactaaatctgacattcgttgtgattcttggccctttgagtaacaaagaaaatgaagagcacaaagaacatgtttgagttattgaaaaatcacgtgttttgatctatggacatgttgaccggccaatgaggctttgcttgaagcctggccggccatgggtggctttcatggggtctggccagccatagggattgtgtccttaggctggtcggcctatgcctggaactagggttcctggttggcctctaagatgggtcttggggtctaccggcctataggacctgaagccctggccagccaaggccaaggctccaagtaggcagtgagtttttccctctttagaccacgggtagagtcttgtggcggccttagaggcatatacaaatgtggccttgtccgtggtttctcttggaaactttgtataaggctagataatgagtccattatagttaatggtgcaacttaggacttacagtgtgtcttggtaattgcacctaagatgatacttggtcgtttgtcgacctcatacccttcattttttctagaagatgtcgttgagtgtcgttgacttgaatatatttgtagtttcatcaggttgctcacctccccttatttcttccatgaaggtagggatcattgtcaaaatgaaggaggtggcaactatgtaggtctcctgttctccttgtactggtggcaaggacaaagtagactttgcgtagggctccaccatacaatccacatgtggccattgtggccataaggggccaaatcatagtgtaggaagagactgcccaaccttctgtcaaggctgagcctaaaatagactcggatactgggagctctaatgcaaaatccaagttggaggaggctggtccagtgaggggcaggagatataggacatgttctatcctccctaactgtcccttgggcctttataatgcttgaggaaatatgctgaatggtcttggcatgccttcagtaataggactagatcatgtcctagaatagtctctcgtgccgaagatattggattcaaagccacctaagacaaggtaggtttatccagcttctgctctttcttgtgaggcctttcacaaggtcattactagtggccttgttgagggtgttcgttccgagattcctcgcaacaattatagggcacacaggccccttgaaggattgctgacatggttagggcgcgacatagaaaatggggttgtgttgctgctttatcaatactttctggacgtcgcagcttactttgagatgtgcccaatgttggatatattttaccaggnnnnnnnnnnnnnnnnnnnnnngtttcattaacaccctaatatgaattct

SEQ ID NO: 52279 - DNA, 3731 bp, Cannabis sativa
atatatatatatatttatagcattgtgcaacttttttaaaaacaagagttggtgaaatatgaaagctagtgaccatactattagcaagctccaataaagcacttaattgatgtattaagaaatggaaataattaaaatgataagagtgttacaactacttttggaagcgagtagtttccataatcctgcaaatagacctagttgaatatttccaatattaaataatattatttagtactttatattgcattctctcaacatcctgagagtataacttcatggaagtttttaccatagcctagtgttatcgactggaaggctgtggacttttgtaccgtattcaaaatatcaacactctgtgattctcgaataggtgcattgttatggcggacaatagtctcagccatctgtttgaagatacggtacagattactacagaggccttgacgtgtcgccttgaccctggagaaactgaagtccaggaacctcaaggaaatgttctactgggaaaactcatctgcaaaggcaaactggaaagaaaagctattgccggaaccttaaaaaagcctggtcttcatttaaagggtggagttggaaagaggatgatgctgggataatacatttctcctttgcaaacaacgaagatgcctggaatgttcttaatagacgtccatggatcatctgtggtgctttattggtcattatgccatggccatcgtggcttgctccttctgaagtgaaatttgacaagtccctattttgggtgaggctaagtggtatccctcctttctattggaacaagacaaacctagaagaactcgctgctaaagtttcagcagtatataaacttcctcgttacattgacttcgagaggggatcctttggcatggggacgttacgttttaaggccaccattgaaatcgacaagcctatattctctgggtttttcatgaagagggaatccatcaaagatttgtgggttcaatacaaatatgaaaaactgcctaagttttgtcaaaaatgcggcattatagcacatgaacaaaagctctgttttaagccccctacagtcataaaagacgccaaaggaggttttttccctatgtatggagcgtggatgacacatgatgatgaggcgagatggcccttctcttcgaatttgccaaggtggttcgaggagtggatagtacagaaacggctcactgtagataagaagttcaagcagctgtggaaaatggacaatacattgaaagccatcgattcgtgggaggctagagaaacaagaagacaatacccagggaagagaaggatggttgagcaagtggtagaagacttgccggaaacggaggaagaacgggtgagtcgctttccgatggtcttgttgcccgggataggtgaaatttgcccgtttgaggatacagccaatctggtggtgaaaaaactgcctgcaaatttgccccttccagcgtcaacagctgtggaacctgaaaatgactcctcctccggcgtgccttcgaatacggtgcaggcagcagacaaaagagagggacatgaacctgggtcggatgcagtaattcagaatgataccagctacaacggacagtttatttccccttctgctcaagaccaacctgagatagatacttcaagggttaacggcacccccaatttatcaaaggagtcaaacgagatggattctaagtcaactttggacctgggctcttcatcttcgggcccaagcaaattcaacccgtatacaagtcttctgggcagttaggcccaaactttatcttggccttcaaagcaactatgggagatgggcttcaacacattaactgggctggggactgttgataaatatatgagggagccttcaatttttaatcccatttttgacatcaatgatattaggtccatggaattcgaatgtggcccaaagaaacgtaaggcattggatgggattcttattgggcctagtccattgaagtataatggccaggaaagcactgtgggagattcaagtctatctcctttaagcagcaatcaaagttcaaaggatatcaaagacccctcccctgtaattgcagtagaatcgggcttctccccaggttcagtggaagatgcaaaacttaaaaggaagagaggtcgtccgatgtctaacaggattgagaagagttcaaatgatgaagatgtgcagttatcgactcaacgtcgacgcggaagaccagcaaaagccaacccgagtgttggtgtcaaaccaaatgtattcaaaagaaaccaaaaaagaagtgcggctaaacagaagcaaacaattaaagctcactgggataatgagatgtttgatctcactgtggaccttgacaaccattttgtgcttgtggacagaagctcaaaacagaaatcgtcttgtaccatccaggagataaatggggagggagatgcaaccactgagggtataaatcaggattttcgctttggggccgtggagacttgcccaaaaatgtctcccaatgcatcatgaaactcctagcttggaactgtcgcgggctcgggaatgccgcgacagttcgacaactgaaggagctcatccggaagtcaaatcccgaagtgttaatccttttagaggtaaggctagcagaagtaaatttatacgggctcatgggaaaactgcattttccaggaatatgctatgtccctccgcaaggaactgggggcggtctagcgctttgctggaaattgggtgtggattgtaatatccaggatgctgataagaataaagtcattggaattatatcctatgatcctccggagcgaccatggattatcatgggaatctatgggcctccttctttcggggaaaaggaggaattttggaaaaaggtaggggagtatattgatcagtgcaactttcctctgcttttaatgggagaccttaatggcactttaaaacacggagaaaacttgaattatgccaatgcctccaatacaacgaggtactctttcgacttaaggagaatggtccaccgaaccgggttagttgatctgggatacacagggatcaagtttacgtggttcaagaaaagtatggatccctccgtgggatcttccttgaagagagctcgtcttgatagagccatggcttcaaccgattggagaattgattggccgaatgctattgtttcccacctcagtgctacttcttccgatcacaatcctattcttctggagaccctaggtggaaagtactgcaccaagccccaattcaaatacgaaatgatgtgggaaagagaccctagagtgttttgggtggtaaaaagagcttggatagagaaaggtcatcggcatccgatggttaatcttcatcgcaagatcaagcacaccaaggatcacctaaccaagtggaacaaggagcgattcaagaagctatcagttcagataaatgaggctcgagtaacccttaagtcaatcgaagaggctaaaaacttcgatgaaaaggctcactcaaaagcgagagctgatctcgaggaaaggctaagaaaagaaatttttcggtgccaaacatcgcgagttgcttggctaaaggatggagaccgttcaacaaaatttttcatggcaagcacggtaacaaggagaagacggaagtatatccaatgcctgaagaatgaacagggggaatcgattgaagaactgaaggaaatagcccaaccatttattcagaaatttaccagtac

SEQ ID NO: 52280 - DNA, 1178 bp, Cannabis sativa
agtatgtaacttataaaaaaacacagtaaaaaagtgaaaaattccgcctgacagtatttttgtaaaaaaatagcaaaagttagtatactatgtaaatttccctaaacttttacactaaccaatcaaaaaaaaaaaaagaaaaaaaatttaaaaattaaaataatatgggcatcggtgctgggcaagagcaatatggttatattatccatttgaaaagtcaataattttagggaaatggacccacattttctgacagccacaagtatagcaactcccattggagttgcactaatgaaaactagaaaaatggtttcttccatttcggatgcactagggcgctaattggattttcttcatagcattgcagtacctaaaactagcattacagcttgggctataggcttgacttcgagtcgtcttttcacaaagcgttgaggtgcctctaatagcgttaaagcgctatctcctgcttactttgctcaatttttgttcgttaatcattctaaaacgtacccaactcatctttccacaattcaactaacccgaacaatctaattggcattagactagctaattatcatctctttttgcatatttttctcacttatttcactcaaacttaaatttgttgccaaatcaatctgaaacatcaaagaaacaagcataaaaccgccaaaacaataaaaattgactcaactacagcctaaaacactctaaaaataacacaataggcttttttgggtttgcggtggtggttggccctttggttctcggatccagattgggatagtgattaggagaaatgttttagttggcgtttttagatttgtatttggtttgtatccactttttctttgtctgttttcgtctttagcaatttctattttcatgtgttttttatgcttattttatcttcttaataataataatggtatttcttcaccgccttactagattagtaatggttgttattggtctgaagattggagaggggtttgatctcttttggatttttgatgttttgtccaatggctttagttgcttatgcagggggttcataattctttatatcattttgacctgtctattggtccagcgttatgcgctatcatcttttatgttagagtgccaaaatatggttggttgtgttattttctttagggatattggcggctaaa

SEQ ID NO: 52281 - DNA, 1593 bp, Cannabis sativa
acatgtaaacataaatgatttctaatcttctattgataacaaataagattgtattgaaatggattttatttagggcataaaatcctaacaaaataattattcattccagcaagattgagtaaaaatagtgaaattgacgtcaaataaatagtcatggaaaaataactgtaaaataatactaaaacaaatcaaacaaaacaaaaaaacaaagaaaagactaaaaaaactaaccatcttctacacaacctcaacattagatacaatagtggctatatttgcaagcccagtcttggaaaatcagaataaaaaaaatactaaaataacacaaaaataatgtaaaataaatgtagcagatttaaccacttagaaaaacataaaagaatcatacacctcaaaattctcttgccagtgagctccataaatgtatttataagaaaagcaaaatcaaaaaaccacaaaaacatccataaagaaggaagaagaaatgtatttctaacctcaatcttccacacccatggacaggatcaccatagcaacatgagaaaatctagaaaataatcattaattctggcaagatggagtaagaacagtaaaatctacgtcaaataaataaatcatggcaaaacaaccgcaaaataacactaaaagaaatcaaaaaaaaaaaagaaaagaaaaaaagattaaaaacaactaatcatcttctgcacaacctcaacaccagatgcaatagatgctatatttgcaagcccagctctaaaaaattagaatagaaaaaccatactcttatctttccgaaaaacgtagccaaaaactttaaaaactaaagaaaaaaataataaaaaaaaaagaactgaacaagaaataaaataaaaatacttgggtgactgactactcaatagttacatttttattgtaaccatcatggttgcatttttcctttacctataatattaggttaccaataggtaaaacttcctttttaaaatcaattaattataattataattaattgaatatttaactagatctcttttagcaattaataatcacaaataattttttatataaattcctactataattattttaacagttaagctatttaattataatatttaaaatgaattttttttttacaaaaattagacttctttttacacaaattagaattctctttttgtataataaatttttaaataattaattatttttaaattatattaaattacttttttttataactagaagcactaagtatgagtttttctattcaagtttgaggttgcttattttatgggggagcttgactttattttttgacactagtttggttttttaacaagatctcttttagcaattaataattataaataattttttttaataaaaatccctactataattattttaacagttaagtcatttaattataatatttacaatatttacaatgtttttaatgtttttttttttttacaaaaattagactttttttatacaattagaattctcttcttgtataataaatttttaaataattaattatttttaaatgatattaaattatttttttataactagaagaactaagta

SEQ ID NO: 52282 - DNA, 823 bp, Cannabis sativa
ttttgatctaataggggtggaagaagttaagaagtaatatatgttgttcaacgatcttttctatctattaaactctaggctagattcataacgccacaaaatctctacaacacttacgggtggaagaagctatagacatatgcagttcaaatacaataattttgaactctagactatactcaatacaccacagtacctctatgacacacatattgtgattagacagggcttaatataatgaacaaattagcaaattattagaacttattcttgatcctgtttttgttccaattaacatgttactgttgtaatagaaattgataccaataaagttattggacatagtatcacagtaccttatttgagtgggagaattttataattctaagcccatctttattttggtgacacttgtgcttactatgttatgatcatgatatgaactttagaattcaactgagaatgtaaatctaaccattcatgtgtatagaagtaacttatccgaatcatgaggataagataggaacttttgcaaagtctattcgaatgacttaggcaaaatccctattcctcctaaaatgttttatggtatctttaatgattacttattcttaagcaagtattttacagtaatgttaattctagattgctttgttgatgactttatcttgaaggaacttatagtttcaaactaagacaatatgtcacaagaagatgtcactaagaaccaatagtaagaggctaagtgtacacttgtgtacggacttaacctgactcctactgttgagtgggagtcatctaagatgtaatcaaacaaggaaca

SEQ ID NO: 52283 - DNA, 1015 bp, Cannabis sativa
aactggccaaaaagtggacgatatctctaggtcaaacatataccataataataataataataataataattatagtttaaccttagaaaataattcaaataataaaattataataaagatacgtgcaaattacagcataacagtaaacgttcacctttaccaaaaattcatttatatacctattcacgtcaaatgttaggatattttattataatctcaactattagtcaacatcgaaaacacagttgttataaccatacctataatagtatctaggataaaagaaatgtggtacaaaagagagaacaaattggacttggcgcataaaattcaagatttagaaaagaccaaactctgtggcttcatttcaacatatatatatcatcttgggtttgtgctctcagtttaattgaacaataatatccatgtttagattagtgactgtgacataattaaaccagtttttattttattttattttaatcttaatataagatttaattgtcacgcagacgcaagttggtttgtggtttactaatttgccactatatgatttatatatacttggaaaagtattcgccaccttttctacgcctgtttttgatttaaaaacatgtgtatatttatgtattatatattatatatgtgtatatttgattataaattaaggtgtttttatattgttccacccaatataagtgcaaggcctttgaagaatattagttattgggtaatataatacagtcaagtatatttactaattaattgaatttcccaaagagattaactgacagtgattattaggctctgaaaaaaattatgaatgtgtataatcttatccatttgacataaaaacataaaaggaaaaaaaaaatctacaataattaatgtggttgtaaatttagttttgattctccaaaaaaaaaatgaattgagcaataaagattattaggagttaatgaaatcatcaattatttatttatttttttcaatagggtatcattaaccctgcctt

SEQ ID NO: 52284 - DNA, 1903 bp, Cannabis sativa
  modified_base (66)..(72): a, c, t, g, unknown or other
ctaaagggggtttttatagtagtgagtacatatatatgttcacaatatattatatatatatatatnnnnnnntatatatatatatattaagaaagacagagtttttattcattaaaataaacattacaaatggctagagttcttgtaatactagaattgttgttgattgaagccatataacaaattgtagcataataaagtaacccagcgcagtgatatgaaccaacccacatacacgtacgtgttggaactacaattacaaacacaccattatttatataaatatatcaaacgtacatagagttcgatggatcaaggatatatttatatatatatatatcctatcttattacatagacttaaataagtacattattcgaaattcaaagaacatgcagtgatatgagtacttccacgtacgtacgtagatattgtacgacaaaggtgcaaatctacgtatttcctcagccagatccattcttcaaccttaattcttctattaaacaacaaccatgcaaaattaattttcttttagtaaacgttcaaatcaaagagcagtactaaataatataatttttgatcagttatgagataaaatattagatgaagatggaatatttaattaattaattaatttaccgggttgacaaagacgccaattgaatcaacgaagtcgcctgattttccatggaatccaacaacgacaccaccttgtattgggtgggagaaaggagtcccagtttctcccccgaatggtccatatgttttgagatttgttataaatgatatggatgtgatgactgtcaagttcaaatattttccatatgtcccacttatagatgtcaaatactcggcataacctggctcaaactcaatctaaaatattaaacattaacattattaattgggttgtggaatatatagtacttgtcccacaatatatatatatatatatatagtcatatatacttactgttgttggtagaccgacatttttgggattgttgccaccaaaaggtccatactcgtagtcattcccgtccttgaaagagagagacttgatatttgaactatcctggtagacagttatctgttttatccaacttctcaacacagtgaatccaaaagggtctccacccggaccaccccatgccccaaaggaaatctttgcttggggtttttcataaataccaagagcatcaaggtagtagccgcagcgtccgaaaaacccgactacgacgttgtcttcgcttaaggggatgaagaaaggctcaccggtagtggttccgaatggtccatatgttttgagatttgttttgaaagatagtgaaaggataacatcatctttaccatcaaactcaccatgtgttccattaatatgaatcaaatactcaacgggcccgttcaaaacaatctacaacatacagtacattaattaattaatttgatgatcgatgatgatgatcatattgatcaggtgatcatatatgatcagaaaattaaaatatatatatatatatacatgattacgtacgtacgtacgtacctttctctcttcacccttattaaagggattataattaggtttgttgccaccgaatgtcccagaggtaaagccagtggattctttgaaggaaatggacttgatattcccatcttcatggataattatctctttcaattcagaattcagaatgtatctccaagggccaccacctgtgccaccacatgctcccaacgaactcactccttcctataaccaaaacaaacatacatcccatcattcatatatatatatatatatattattcgttaatgtatatatatatagtctataaataaataccatttgctaagatcgatagatataaatttgtcgaatatgcagtagtactgatcacaa

SEQ ID NO: 52285 - DNA, 738 bp, Cannabis sativa
ggtaatgaaatggaatggaaaggacacaacttttattccatttctttgtttggtttcattttaaagtattagaatgtcattcttattctagttatgttttccttccttccaaccaaatgtcacctaatggcgtgtttcatacgtgagtttgagttggagagagtagagtcagggagtagagttggagggaatatgaaacctaagtgttggaggggattaacattaccaccattttaatttaaaaagtaggatccacttggaaacacaaaccacttattattaaaatttaatttagtttgacattcccattcatatcaagtctgaaccttgtactaaacgccccattgtgttttgtatttatctttctttcaagtctactcttgttgctttgttgctggttttccaactttgtttgtagaaatttgagtttgttgttattcccaacattttctttgtgtgattgttttaccattgtagattgtctttgagttttcttggttctaaaataaggttattacaacacagtaatcataatgaccaacactcaagtactcaacaatgtgttttgaaataaaaagtaaggtaaaaaggagtaaatctaggatcattaaccaacaatgccaatcatgatatgcttagaattcactaaaagtcaagaaacagaaaccccaagctaggtcaataatagctaaaatacacataacaaaccagtgaaatacaaagcttgactacccagaa

SEQ ID NO: 52286 - DNA, 1316 bp, Cannabis sativa
  modified_base (27)..(32): a, c, t, g, unknown or other
aaaatagattacattgaaatggagttnnnnnnagggcataaaacccaacagagctaacttttcctgtgtctcatgcaactcttaggacactcgaactaattctgggtcttgtttataataatacccatctttatagtacccatccttgacatatccgccatcctcctccttttcgtctttgacatcacaatcttcttcaccttatttatgatgcttgtctaagtttctctcttggttgtcagcttttgatgcatccccttctctcgcattactcgactgggtgcgctttggagagagagggtttacatctttcatgatgatgtcgaggccgccttgaggagccttctttgtgatttttttcatgtagccactatggtttcaacaacattgtggcttagatctttcctcagctctcaatgaaagtataaaaatatttaccgagattttaaaaactaatgaataaagagcataagaaacaataatttcagtaagcaaaatagacaaagaggtttgcgtggtttaggcataaataagccctagtccacgagtaagtatattggccttaaatggctcgtataatatttcaaagtggtgtttacaagaaaattctaagtctactctctttgtttctcttgaagaagaagaaagcttagagagatttcaatagagctttgctatcttttttttgatcccccctttgtctaagaataaagaggtatttatagactaaaatacgagtatggatgtacccttgacctatttagggtttttacaaaaaaacctactattggggtaaaatacatataaaatattgactattggaccccgaagaaaggtctttctcgtgcgatgaggcagttgtacaatggggacaattgctggtacaagacacgtttcgcttaaaggttgcactttgaacataagacgcctagacaagtcgtcagaaaaaagggtgtatttagaggcgagggtgccactaccatggtctaatgcaggggataagatcttatcatgtgtcagaaaaagtataaccgtcacttgggctatccgactttcgcttcatcatgggtaagttactcttcttcgcatctcaaactagcagtaaggctttcgagtcctaaatgaaggcttgtttgggagcaatccttgaaaacttcttcaggattagacctttcccggacaagtatatttcccttctatcctttcgcgattaaagagatttaatctgtgctaattcgggaggttgttatctaatttttgccacatgtctttcatacgaaaacacggataacaactgcaattatagatcttgaatt

SEQ ID NO: 52287 - DNA, 1444 bp, Cannabis sativa
tgaattaatatattaatcatgtacgtatagtaattggttgtttcatataattttgttaataaagcaatcggctggtatgaactgagaacagtatatacatctagtcacaaaaacatgcattaaataattaaggaaaaaaaaaaagatttatatgaggcgcagccaaaatatatagttcattagcaagttatagcaattaaaaatttggtaaataaaattaacttattaaaattttatttattgttaattatgagatcacaaattaaataatgggggcagctttcttcacatggaagatggtacatgcatttaattataaccattaataattaatgccactaataatactctaataccatacgtataccttcaaccctaatcaaactacgtatcccatcactatatatatataaatacacacacatgagatcattctaaatcacacaacattatacatccaacttctaaaccatataccaatatcattgaatattatggcttattccaataacattttcataatgaagatgagtttattcattttatacccactaatcatgttgataatcttagctcttccaacattatcaacttcatctttcaatgttttgatgggttttggggcgaaacccaatggcctaactgactccaccaatgcattcctacgtgcatgggaagctgcatgtacctctactcatgctgccctaatatatgtccccaagggtaggtatttgcttcgcccactggcctttaagggtccttgcaaaagcccccatatcaccttccgaattgatggcacccttgttgcttcacacgactatcgggttttgggtggagctgagaattggcttaacttccaaagggttagtggaatttctattgttggtggtgcacttgatgccaaaggtcctgccttgtgggcttgtaaggccaatccaaccaagtcatgcccttctggagccacggtacgtaatataacttgtactacacataccattactcaaagatcatttttatagggcaccaaagtgcccagggcctctataacatggtttttttttataattgattagcgatttttataatctttattaaattaaaataggtgagacccaatgtatattaaattgcattaatattaatattacatttcataagggtactaggcaccattagtgctctttagcatttctcttactcaaattatattatatgtagttgtttgtttgttaaaaattaataagttcaggcttaattaacttgtttaatcattcctatcaaataacaattgttttattatttgcatgtagagtttgagcattacgtactccaaagacataaaaattactggactattgtcgttaaacagtcaaatgttccacattgtgataaaccattgtgagaatgtggagatgagaggagtgagaatcattgcccaccgtga

SEQ ID NO: 52288 - DNA, 1510 bp, Cannabis sativa
ctaaaaaattagtggtaatagtaaagtcatattttcaacctctcttttttttttttctttcctaatatgtaaataattgttaagcaaaacaaaaaaaaatgtgtaaataaattattttttttttatgatttttaattaatttattaatttttatttatattttttaaaattaaaattatgatttggaccaataatttatcaacagatggtattctttattagtaaacaaatttgttataaaagaggactaacagacttacgaaaatagtatccttgagactgttactgataatttttgaggttgaaaatttatctgcatcaaatataagttttgggggacttatactgcaatttttcctaactaaaacaacaacactcccaagaaataaactagaacaaaatatcaagaaaatcaatacacaaaataaacaagtgttacaaattcaacactattaaaaacaaaatcaactaaaaatataattaaacattttttatttttaataatttttattatatataattaatataaataacttttttaatgtatataatataattgaattggatcgatttttaattgaattttgagattaacatccaatagctgatccaatcaaattataatccaacttttaatatttaatccaattgtaattggatatccaatttttgtaatcggattggattaaatcgatttggctcaattggattggatgttgcccacccctagtttcttatttctagtaaatcgttcgtatatataaatatgctaattaatattacgtgcaatacgcacatacttagttatattcttagtttttattttggttatatattttcagttgtataattaattttttttttcagatattattcaataaacaacaacatttttttatttaaaaatatttaatttaagtaatatttattaaaaaaaaatacacaataatatttacaatttgttgttaattataattttagtttaatcataatatttttaatttgtaatacttttttattttttttagaaataccatatacgtttttttttttaaatatattaatagaaagatatttttttgtaattgcaaaaagtaacggcattacaacagtgattctttaagaaataaataatttttctattttattgaagacaataatggaaagatattttttagatttgtagattggatataaaaaataataatataaagatattttttagatatgtataatgagtttatattttaaatgtagtgtaagaaaatattttatattatatagttacatttaatatatgcatatttatatatatataagatataagataagagagatatgtgtagtaatttaaatttgaattgaaatattttaaaaagaaataatattttttataatacaatcacatttgatataacaaagatatatatatatatatatatttatataatataaccatataaatgttgaagtcaccaccaatttctaaaaaaatctaggcttaaacact

SEQ ID NO: 52289 - DNA, 2519 bp, Cannabis sativa
  modified_base (33)..(75): a, c, t, g, unknown or other
  modified_base (669)..(679): a, c, t, g, unknown or other
catgcaacataaaaatgttatttctgatctttnnnnnnnnnnnnnnnnnnnnnnnnnnnnnnnnnnnnnnnnnnngcataaaacccaacaccttcttctagacaacaacactggcgcaccccaaggtgagtaacttggtctgatgaaccccttgtctaaaagatcttgtagttgagccttcaattccttcaattcattaggagccatacggtatggagccctcgagattggtgcagtgcccagtgccagctcaatcacaaattctatctctctatctgggggtagacctggttggtcttccgtaaaaacatcctgattcacatacaattaggacattctctggcttgaggggggtttctcttgacttgtctactatgctggccaagtatgcttgacatcccgcacgtatcatcctttgtgctttcggggctgtaactagcggtaggcttgacttgactttgactctttcaaatacgaatgcctctacagattaaggagtgaaagtcactgtcctctttcggtagtctattgttgctccatgtcgtgatagccaatccatacccaagataaggtcgtaatccctcatctctagctctattagatttccactaagttctttgtttgcaatccttattggcatttctcacactcctctagatgatatcatannnnnnnnnnngggcaactccatcatgaacttatatttaaagtttacatacggcagttctaaattatctatcatctttaaagcaataaatgagtgcgtagctccagaatcaaataaaacagtacataattttctagcgatagaaatttgacctgtaaccacggtgttactagtctcagcctcccctctggctagtgaaaatactcgacctgggacaagtttgtcatccttgagttgatcaccctattgcggaagtccttcttataatggcctggttgtccgcacttgtaacaagtcttgccttttagtcgacattctcccggatgcttacctacatgttgggcatagtgggtacgccacatatggcttcttccctttatagctattggaccgtatcttgtttctcttgttggcttcgttgtgttggttactcggaggtttccttttgttatcattacctccatcactggccttcttggcctcccacccagccatattatctttacgtatacgactttcacacaactcgacttctagggctctttccagtgcctcagcatacatggtcgcccttacccctgacatcgctatatcctgacttattcgaaatttgagcccttcagtgaagcgatgaattctcagaaactcagtaggaacaatatctacagcgaactttgctattctgttgaattggcgagcatactcggtaaccgtagacttacactatttcatgaactcattaactctagctgagtgtattgcttcactgtagtatatttttgaaaacttgcataaagtcatcccaagtcattgcgaccacatcccgtgtttgtttaataacgtcccaccagatgcaaacatcctttttcaataaactagcagtacaagctacactatctctattgccaagccgcatgtactcgacaataccttcaactattcttgaccattcctcgattttcatttgatctgcgcctccttcaaaatttggtgggtgttgcttgcagaacctttcatatattggttcccactgaccttctagcactggcatgtattgtaccgacaaaaatagatgttacccttgattgggttgttcctgaaggtttgaagttcttcatctcgcttcctaagttcctccctgagacgggcaatttcttgtgccaaatcttgttgtggtggcaccactacaggggcattttggtgttctcggccaactacctcagcagggacttcgtggttgcccccaccttgacctggttgttgtccatttacaggggaattttgattctcctagatcaccccctcgacagggacatattggtttccccttcctcgaccgcgaccgtaacaccgagcacctccttgcctctgatctccagctcggtctcttacaatagctctttcattcaaccaggttgatcttctgggttcaccattttccatcaaatcccttttcttgttctttaaaagaaaggagatggcagctgtaagaaaataactaaaaaaatgtatcttgcacaagaagaaaatatctagactctaaaattatataaactttagaaacataaattattaagcaacaatccactatgtaaaataatcttcattcattcataaaaaataatactaataagaacattgtttgagttatactaaaactcttaactccgaagaatcgatcaattgttttaaacagccataccctaaacttctaactaactaaaagattatctaaagctaaagactaatccaagttgaacgtctattcatcctcttctttggatcttctttcggatcctcttctaactcttcttctagattgtctcctgagtcctccccttgtcgttccacc

SEQ ID NO: 52290 - DNA, 1496 bp, Cannabis sativa
  modified_base (983)..(986): a, c, t, g, unknown or other
aaaaaaaaaaaaacctaatttaaagtgtaaaaatgaaaaagcccctttattttaataacaagttattatagctatagtagacaaaaatatatatatatatactacattataagttaactaataatatttaaatatttactttcaaaacaaatagtatttaaatatttgacaaaataatatattgtattaaataaataatttaaaaaaaaataaaaaaaaatttaagggagagttatgtttattctccataaaaatataatacatgcattatacttttcataatattaccaaaaattatttatttaggtcttaagttttgtaaaaaatcttctcataaaatcgctaaatattatgatagtatttagtaagaataggaatgagaataaaattaatatttcaattctttaagatgcaactaaaaaaaaatagaatggaaattgttttctttcctttattttttattacctataattaaatgccacctaaatataaatataatataccacaatatataatccatatactaatacgtgtgaagcacgtgatacttcactagtataagtaaaaaggagattattgttcaaatcccaactaaactgatgccaacaatttttttacaaatcatattatttttaaaatattaaaattacttcattttagagtttatttctaggcctaattggttgctggaggcatttttgtgtgatgaagtttgagaaattttgaaggctatcaattatgtttaatactatataatgtgtcatatgcttatagatttaattaagtattataaaaaattattaactccacacacgttatttggtggtgatgttagaactggtgtctaataacaatacacacatatatactaaattagtatatatacatatacatactagtaaaaagctacgtgcgaggcacgtatattaaattttatgctaatttttttctatattagttgaaagtgatacaattaaaaattnnnnaaaaaatattattagttattagatgagattattattatgtgtatctaaatattatagtttataatgtcgtcaattaaaagtgaataccgaatgcaatatgttgcccctgattttgcccaaaatacgtggaccaaccggatgatgacacgtagatggaaagagtttagcgtttaaataaatcaactaagtctctctaaccacagggatcaaccttagatatgcctcccggagaaggcatgaaagtctcatatactcccggagagcaaagctacaacaaagcatctccgggaggtgtcagatcctatctgaaccatcatctcgcatttaataccgcatgggaggaggcgtattgaaactgccatatgtcttaaagtttgacggcacaaccctcactctgtagctactaaactatgattagcaagcctagtgacggctactttatgaggactcacatcagtcaaaaaggataaaggactacatccataaaacccctacaaagcctagggatta

SEQ ID NO: 52291 - DNA, 736 bp, Cannabis sativa
accacacaaaacactaacatgctcagaaacacaaactaccattaaagctccaagtttgagttctaaactcaaaacttggttaattctaactaacaaccattataacctgtttgaatccacatatctaaacataaataagcttcagaaaacaaaaccatacactaactgcagctacaacaacataaaccacaaagcatgcataattccataacttaaaacccaagaaatcaaagaggaggttaataaagactataccttagcttggattcactagaaacttgctgaaaatcaccttgaattgctaaagaaaaatcaaaacctagttgggttctaagagggttcgaaagagagagagagctttgagagaaaatgtgatttttgcttactttttctaatttttttaaaattaaaggaatcgcataggttttattaaatcaaactcagccaaatacatttaaaaatctgcttgtatttaattaattagctccaataaagacaaaatacaaaatgggcaaaaagaccaaaatgcccttgcctacactaaactatctttaaaccacttaggggtattttgaaaaattctaaaatcccaacaaaacccgacattcccaatgtataaactatatcgctcccctatactaaaaaatactatgatgtgattctaatagtcaaacaccgcgtttcaatgttgtcggacactaaatatgcaaaattatgaaatttccatatatgacat

SEQ ID NO: 52292 - DNA, 2038 bp, Cannabis sativa
ctagtaaaataatttccaacatatgagcctcgcttccgttagttggattaaactataggaagttttctcgtagcgagatggtcatctcgcatttttgttctctgtgctggttcgactttgatacttaattttcttattgtaagctaaggtttgtgttattcttctccggtgcctcgctattctccttttgcaatatatggtttcttgttaatacactaagtaccagttcgtacattgattcctcgcctaagaccttacagttagcgggttacaaatatactctgatacttactcaattaatgagttattccataaaaagatatggcactgattcacattctctttaccttgacacatgtcctccagccaaactttgggaataaaaattgccccttaaaaagttcttttttagtaaaaagagcttttttattaattacggagggtatttttgccaaaatcttttcttggaaaggacgcctcctttgattctggtggttgtatggtttcgaagatcattatgaatcgcttatgcatattctacacgattcccaatcgttagatttctcaatctttggctttcttgtcactgaacttcatgtataaaagggcggctcatgcttctcatttttcacaaaccttctggctctttagtgaaatccatttttagaatggattacttccttcctgccaaaatgtctcttttgagttcagaaatttatccttccagactcaaaattccaaaatgcaccaactaatttccattcgttcctacaaacttcaagcctcaattggagccagaaacaatggattctagggctgaggagcttccaaccaatccaaaacaagagaaccccttggcctgccatggttgatcctcacaagtgatcacagagggtattgatcttgtgagcgatcccaaagatcctcctcaggctggtgaagaattccagaggaagattggcatggtttcaagtggatctaggaaggaagttggcgtggtttctatcaaagaatctatccaacccaagaccctaacctgtgctagaagatctttgcgtcagcctctctcaaatgttgagaattttcttgaggctggaaatagatctcggattcaggaaattggatcttttgatgatgaggggaatgaggcctctgcagagatcaaggctctttacgtgtagccggtctttctcaagctatgtgtacttggtctttctccgagctacgtgtagacagtctttttcaagctatatgcagacggtttttcttgagttcatcgactttccctctcatcatctgcttgggagaatgacttaatggtttgcccctagtagcatttttgtaaagacaagtttgtaaccagttgtaggtttttcctatcttaaatgccttgtactgttttcatttgaacttaataccattataatgtaaacaactatattttgatcaaatatacaacaattttggttttcgccattgctcgtaatcttcttttttaagtagttagtaatctaccaaactttatgatttttgagcggttgtcaattctcacaattgcaattataatctgccttgagcaaactcaaatacactttaaggatcttatcactttgtatatttttaatttgctcgcatgaatagttatattatctatctattttctaggtttaagtacttatatcaaggcgtcgtgatgccacgtttagtactttcctagctcgcaagaaccgttagtattcagttttatacgcgagttgtaacttttgattttcctctcccgatagataggttataaatcaaaagttatagttgtttgatccctgcttcgtcaaaaaattttgatcaaggtgttataacgatacgacccctttctagtcaaaaaggtttggtcaagtagttatagcggttcgattccactttcgtccaagaagtttagttgagaacttttgaatttcaaaaataaaaaaaatttaaatggcgagtttgcattatacaatgtatttccagatgaattccggttagtcatacataaatgccc

SEQ ID NO: 52293 - DNA, 560 bp, Cannabis sativa
atttgcttgtggttagttgtatccacatttagttatttcggatttttaatatgcgtctttcttataggtccgagataggattgcatctcgatcttgatcctgtcttagttgtgtccatgtttattctgaggtgttatttgataaaggaatgttttttagagaaggggatgaccaatttcaaaaaaaaaagagaataactcaaaaattatatcgtgtattctataaatactatgtgaaatttcataaataatatgaacttgtggagtatgaagaattaactttaaaaccacgttaaaaactttcatgttatttatatttattattattgtttattattattctagagtttatttatcctattaagttcatttattagttaacgaaaatcggcgttaacagtgaatatcataaattattattttttaaattataattttaaataaaatataattaaattttgtataattttatttttaatattacacaaaaaaaaaatattagaaacttaaatacaaattgaaaaattaaatcaaacacattctcatcattattcacattca

SEQ ID NO: 52294 - DNA, 1039 bp, Cannabis sativa
  modified_base (46)..(52): a, c, t, g, unknown or other
agtgtatataaatatatttatgtttatattgattctcataatttannnnnnnatcaaaccaattattttctaataaaaaatagatttttcttcactttaaaattataaaatacaacaatttaatgtaaatacaaaaaatgatcaaaaaaatattatttttattaaaatattagagccaaacattaataatttctaactatcaaaaatacgtgatattatagatgaaagtaattattttaagaagcgaaaagtataggcatatattgtactgagaaataaaattaaaataaatacttaattaaatagactaggtttcatcgtccgccttgataataaaggaacttagaaacccataagaaaattaactaaaaaaaagcggtaaactaacacttactacttcgagtgtttttgctggatttttctatttgaaactctaaaactgtaactgaattttaaaatcctaagcttctatctataaaagggtaaaaggattaatgtgcaattaaacttattacaaattggatgttggttaaaatgtaaatacataaaagtgaaactggagtgccacgtgtcataattggattggctgccattgatgagtcaatgccacatgtcggtcgttggttggctgaaaagagaacaagttggccaattttatgccacttgtcacgtgctgaagggaagaagaaaaaaggctttccagccttggagagcacgaataaggaagcccactctcagttgggccagtggacgaaacacacggaccaggagggtccgttcgcttcacacgcgtgtggggcttcagaggagacaaggtgctgacgcgccttctacaggcaaatgaaagctcgccacgtggcgaggctgtcggctggagagagaggatttgggtcaaaattgggcttttttcttgggttgtttcagcttcaaaaatgccatttttcaagactttggacctcattttattatctttttatttctttttcattcttttcacaaatgttatttactcaatcaaacacaaacaaaattaaatcca

SEQ ID NO: 52295 - DNA, 1339 bp, Cannabis sativa
ttcctattttcatagcattatttttagtgagcaactttggatggaaattcgtcaaacgaacccaataaccaaaactacccagtctcgcgtcacacaagttccaagattagggccacaacttacaaagcattagtcccctcttaaaagtccataatgctttgtcaaaaactattttaggaagccaacaaatgtgatgtcatcctcgaaagcaagcacatgaacatcctaacactcagagacctctcaaatttgaccaaatactgtcttaataaaatttcttttacacttacatttaaaaatgattcgtcctatcactgacagtttccaaatgtcctccacaattacattgctcctctcacaggttgccatagttaatagagatgatcaaataaagggctacaaaaacaagcatagaacacacaaggtcaaagagagtctaactttttagtttatatacatgtatttatattttttaaattgttatttatttatttttatatataattataacctaatttgacaaaaaaaatttattttcaataccttataaaattatctttacagaaattatttaaccacactaagtaaaacatgagttatatttatatttaaactatgtaactgcttattgcattttacattttgataaaactatcaagtttgccacaatatgacgtaaggccgtcttaaatattttggaggccttgttctaatcttttaaattaggctcctacaaaataatataatttataaataatatttttaaatattatcatacggttatatattttacaaaataccaaaacacttcaattattttattaaaattgtttttgattccaatacaataaaaaaatgatagaaaaaaatatgaaaagtttgaaaaaaaaaataataaataacacttaatgacaagttgttagccctttaaaaagttggattcactaaaaaaaactaaaaggcattaaagaaaaggaaattttttatttatatactttaaatataatctattattaatattgccgtcaattaatttaatgactttttattaacgctccacatcatcatccctaccgagaattaaaaaaaaaacaataccagaattgcaaacatgaaacttgcaaaatcgtcatcacgcgccgtgctcctctattatccacggaattgcatcatttcaatcgcacatgtgtaattgactaacaaggaaacctataaaactataactcaaaggattctcgccattcaaaccattctcagagaagaaaaaccattgatgaacaaaaaagctcgattaccgactcatcaaccattgaatctcgaactccttcctcaaaactac

SEQ ID NO: 52296 - DNA, 2987 bp, Cannabis sativa
  modified_base (254)..(262): a, c, t, g, unknown or other
  modified_base (2827)..(2827): a, c, t, g, unknown or other
aatacctccataaggtaaagacaatatttatatttttttatgtgattttaattaccaaaataccacttacactatcacttacacaataaaacgatagttgcacggtggttgcgcattagttgcatcagacgatagttgcagggtggttggctgaaagttgcattagacgaaggtttcaatcagacgaaagtttctgggtggttagtcgaaggttgcatcagacgaaggtttcaattagacgaaataactgttannnnnnnnnttatgcaactgtaatgcaactattatgaaacattaaaaatcagaacactgtttccacgtgcgtacctctatcaacatgtctatttatgatttaatatgaacaaatttaccattagaaatttagaaaacaacaaaaatacaccgggataaacattttactatagtattgatgtaatttttttttttattatacttgagttggattgtttaggaactccagtttaactttttgagatttgtctttcatggatctgaaaattgaagtcaagacattaactttatgtaaattaaactgaatttttggttgatttttagtttcgtagttgttttttttttacattttttttatgaattcaaaacaatccatgttttgattgattctggtcgtcttctcaggtgaagttgccgaaattaatggtgattctctttctagttgaatttttattttgattgtgttgggttgctgcgtagttgcacgatagttgcacgatagttgcccaaaaaatatgaatcttgggttgaaagtgtctgtaagtgctatttgtgtatatttttttatttgggctgtatatttatctatttccttatttttgtaatattattattttttagttaaaactgaaaaaaaaaccctattgttattggtatatttaagtatcgatttctatataatttttaaagaatattactaactaattgtagaacgctatttataaaaagtgttgagaacccgtaatccttttaaaattatatatatgtggagcccaatgttttttatgaatagtaattgtaatgtatagttgacaagaacactacaacctatatacatagctgtataaaaaggtcaaggccgccgtagccttgtatatacataataataatattgaagagcatattctttggataatgtaaaattgtatactacatacgccaacaaccaaagctgtaacttatcttattaattgaatttttagcataaatttccctaaattttactttgtttgaaaattgagttatttagatttttaacaagttttgttggcttttaaaaatagtagcaattaagttatttcagttattatttttttcttcataagtttattaatttttgaattattttttaaattattcaataacttaggtttgtctaaaaatatttagattatgtttggttaaaagaaataaaaacatatgaataaaaaataaaaataagaatagaatagaataaaataaaatttagaataaaaaaaatattaaaaaaagattattaaatttttgttcattttttattaggattccattttaaactagaatagtcaatccactaaaatagattaatgttatccgcgtttcaggacaaatgatgtgtattttttaaagcccaacattagctaaagtaggcccattcttgggcccaatcaagacagtaagtcaacccacggagtcaagatacagcttcggatccggatataagtccagcttgtagacactacaaggccaaacttctttagtccgagaagggatgtttggttcaaaaggcgaagggtccatcaagatctacacggatgccccatggggtaatctagtcataggcgatggaagagacatccaaaagcctccggatatcatcctacgtggtgtcctccagacacagggtcccaccatgttaggggcttgtcccatacgtcaggcccatggagtacgcacaccatcaaaaggcaaccacctttttgtgcaacgccatattctttgacattcttagtaccaacacaacagctcgtgacacgtagcatcattaatcggtccccacttgtacggacgactgttaactcgtgaattgggcctcacccaattggccccaagttaatatatattgtattttaccccatcggtgagcttaattgacactgaaaaaccctactgggtctgggtttatccacacccagttctatcctataaatagaacaagatccctttgtgcaaagggattagttggaaatcaatttctgagatcaagagctaagaattaaggttcttcgtctagggaaaaaacacttgtgtaaagacactttgaaatttttctagctcaataatattgatcgtgcactagaattcattaacactcgaaccacgtaaaaatctctctcttcttttttaatttatttccttcttaagcttattttatttcatattcggtttctaaaaaactcaataaagccgatgaaatatttaccatagttgtcatctacaacgatggttgcaacctgaaaggcaatgttcaagtggcctactcgatatggtagggataatgccgccaatgatggcgagaactattttcttaaagatattctgcataagagtgtctttttataattatgtctttttattttatttaatattagtatttttttttattattatattgtattttttaaatatattagtgttttaaatcaattattttgtaatgaattttaacttgaggactaaaatgtaagaccataaaagtaaaataaactaagggttaaaatgtgaagaaaatcaaactcctatgttcctttcattncagtatttctgaacaagttcttggttttacaccaaataaatgtagattcaatatcaaacaccattaagggcacctccaaggaggctgcaaataaatggtatagtgtgtatatatgttccaaggaggctgcatatcatgcagcattttgatgttttatgta

SEQ ID NO: 52297 - DNA, 1008 bp, Cannabis sativa
  modified_base (62)..(68): a, c, t, g, unknown or other
ttaataacttttgcaaaacataaagtctaaaataatatttacctttattattattattattnnnnnnnttaattattattattattattaagcttttatcgattccttaaaatatattatcaaaaactatatttgcaatatattatacaccagttttttattaatttttttacattatttaaatattatatttttaaatacaatattattaattaaattacaaaagaaatataataaaaaaaataacaaagtaattaatggggaagagaaagcacaaaagtgaaaattaaatatattaaaataatatatagggaatctcaaatgtttatctacatataagttttaaaggatgtttattttacatatacttttgatgcatatgatatgatgtaataagagtatttttcatactgctcaaatgtattatagagaaggaagttttgatgcggaaaaaactttagagtaatttgcggcgaaacattttatgttttaatttttatacacttaatttcttgatttttttttttttttttgtggcaaaattctcttatgtttcagttttaatacacttaacccccttatgttttaatttttatacacttaacatctttatcttttgtagagaaggaagttttgatgcgaaaaaaactttagagtaatttgcggcgaaacctctttatgttttaatttttatacacttaactttcttatttttttttgtggcgaaattcccttatgtttcagttttaatatacttaacccccttatgttttaatttgtatacacttaacctctttatcttttattttgatggcaaaacccccttaaatttacttttctttacaaatttaaagtcttagttagatattaccgttaaatactaactgaattactgctgtatcaatttcgaagttttaccgttacatatacacaagtgtatacaatggtcatccagttgatatttaacggcaatatttaaatggcgtgttaaatttacaaagaaaaata

SEQ ID NO: 52298 - DNA, 1044 bp, Cannabis sativa
ttttttttatacaaaagacaatactttttttttgagagaaaatacttgatattattaaacaaaaagagattcgtttacaataacagaatatataggtggaggaataatctccaaccaagtacaagtctcatccacccctaaagcaaatttggcaagcccatgggctgcattatttgcagaacgtttaacatgtgtaacattaacgttagggaaaaaggataaaagactaagaacatcaataattaaatcagagaactccgaatttgaactgaagggagctttgacagcattggcaaccataagagcatttgtctcaatgtgtgagattggtagttgttgttgaagagcccaattgagactgtggaaaagagatttggcttccatctcatgtgatttaaaatccctcaatattggcattgagagagcagccttaacttgtccattagcatcacgtaaaactgcccccactccagtaatgctagtagaagcatcagatggacaccaaggaacgtgagcagcagtaggaggagagacatggtgagaagaacctgatgcttcgacattaactgcagaagtagtttttacttgtgcattcttgtagttttgtagaaaaaccatggagtagagggctaaatcaacagcacatctagcgttcttgccatgaacaaccttattcctctcagtccaaatggcccatagtgtacaaaagagttgttccatctcagctttgttgtaaattgaagacagatgttgcaagtaatcaccatttttcattgatgcatcagcctgccaattgaagtgaaggttcaaagatctccacactgttttggcatacttacaactgaaaagtgcatgtccccttgattcccatgcttgcttacaaattgagcatgtggactcggtaattattttccgtcgaacaagtgaagtggcaacaggaagtgcatcatgaatatcacgccaagcaaagatctttgttttttaaggaattctcaaagaccagaaaaatttccaccatgaagcagccaaggtggatgtggagct

SEQ ID NO: 52299 - DNA, 1467 bp, Cannabis sativa
  modified_base (302)..(310): a, c, t, g, unknown or other
  modified_base (813)..(815): a, c, t, g, unknown or other
caaaagagaggaatttaatctttagttaaataattattattaattgaataagcttaatgctaattgggcctaaataaaactaccaaggtgatattatattttagcaacctagtctattgaaatattcataattaaatgggcttccgatacgaatctaagcctaataggaaacatataggctcacacaggacaaatgattttgatgggccctatcgtgtaactaggtttatcacagatgaaaaaaattacaaaatttacctgttacaaactgtttatatgatctattgacaattggactatgnnnnnnnnnagatcattggatctgtcaacaagttaatcgtagcaatttagataaaataaaataataggtttgctaaaataaagttttaaataacaatttaaaacaaataatcaaacatgtaacaatatctagtaagtatgttaagatatttctttttaaaattaaatatttttaaaaaaatatcttaacttgaattcaaattaagttgttagaaaaaattttgaaaagaaatttaaaatctaacaaactcccaattatcttaaattcaaatttgaaattcaaatatccaactaatttttaaatatctagtttatttaaatttaatttaaattaaatatctaataaaataatataacataatatcttaatttaaaaagttaaaatatttttaatgttatatttcaaatatcataatttaacaaatttaaatttaacaaaataaacaatttgaaaaaaaaaaagaaagatattttgatggttaggatattatcaattttattttttaaaaaaannnaaataaaataaaatatcctaaatttaaaaattgtatagttagaaaatcctaaaacatctattcaaacaaaaattaacaatttctcaaaaaattccatgttattttaacaaaaaaaatataaattttatttaagataaatatctaataagataaaatgtcaaaactaacatttctaatcttataattgtaattaataaaatatattttaaaaataaaaaattttgaaaaacagatatagttagcaatttgaaattctaactagattatctttaagttttattaatattttaatgtcaaaataagatcatttcaaattttattaataaaataagtaaatatctgatcttataattaaagtttataaaataaatccaaaataatcaagtttcaaaaataaccatgaaggcaagtttgtagaaaaatctatttttcaaattcaaagtccactaatatctaaaactaatttaaattaattaaaaaaaatattaattttattctgattattatatttttctttaaaaatttagattctacacaaaattatactaaaatttgaattttgtttcattaaaaaatgatttttaaaacttgaaatatcacaaaataaagattgcacaggggattattgataactctaagatttagagttatt

SEQ ID NO: 52300 - DNA, 1335 bp, Cannabis sativa
ccatcagcaaaaagtagcttagtattttaacaaacaagtgaaagcatggaaattcttcgtgggagatatggtcttaagaagagtatttttgaacaccaaagacagtacgacagatgtgctcggacaaaactgggaaggaccatattaggtggtcgaaattctagaatcgggggcatacaaattgggtaagtatgatgaaaagatgcaactcgttgtagtaccaaggtattggaacatggaacatttaagaaaatactaccaataaaagtaccaggtcggatgaccatatcaagtacgaaataaaaaaaaaaacatttgctcttaagtgaatggccttctgggcggaccacgcccaaaggttcagataaaattatcaagtacttaggtcggatgaccacctttgcaagtacaatttttattttctgcaatttgttttgtttatgctaagctaaacatcaaatcagatcagcataatagctttaatgtaagttactacggtaacagacatattttcgaccaatacatgaataaagatgtttatttaaattcaaattgagtcgagttcattagcatgttaccaatttaccatccagtgcgtacaaaaggtttggtcgtaccaaaaaccccttacagacaaaaaaatcatacttgtgaaaaaaaaaaagcaagtgaccaagactcaaaagtctgctcggtcacttggggggcatctatacctgtacaaagcatttggtaaagaacaaaaacaaaacaaacacaattgcacgatgattataaacgagggatgaaattcattgagaataatgttaggctacttttagcctaagttccgggtcacattaataagcgttttctcagttattgtagcctttttggagcggttttacgcttgattttccttgtttcaggttctcggtgcattgtagttcaaattcagttaattggcaaaaagacgggacaatttgatgcaaaaatatgctgaagctgacaaagacaaaaagcattgttttccacctttacctgtagtcgcgaccagccattaagttggtcgtgaccagttacgaaacacgagatttttgacctatttccgatatttttccaattggaggcacaaccctaattcctatataagggactcgactcagattgccaaaggcatcacaaatcagacacgaaaagtgaatgaaggaggagaggaagctatcttgaagatccggagcgaaatcaccatttagtttctttctttcactctttattttctttatgtctatttttgtttcagatttaatcatggatgtttattttatttctatgaactaaattcccaattaggga

SEQ ID NO: 52301 - DNA, 1508 bp, Cannabis sativa
taatcctaaaatgtttcaaagtatttcttatgtgccctcaactaggttgatcttaccaaataatgaagctataatggtgaatcaaggtggtactgttgctatctcaaatcagctggttcttgaaaacgttttatatgtccctggttttaaattcaatattgtatctgttagttgtataactgggactaatgaacttaaagttaagttctatactgacagtttttgcatccaggaaaaacaatccaagaatgtgattggcaaaggtaaagcttggaatggtctatatgttcttgaagatggtcagattaatacctgcaacaatattattacagctgatatgtggcattgtcgtttgggccatccctcacataaacgactggccttactttgtaataagattcactgtagtattgacaatattcataaacaaactacttgttatgtttgtcctttggcaaaacataagaaaatacccttctctaaacatactggttttgcagaatctaagtttgatttaatacattgtgatacttggggaccctatcacattccctcacataccaatcacaaatactttctcactcttgttgatgataagacaagatttacttggatttttttgatgaaacaaaaatcagatgctgtgaaaatcatacctgaatttttagcttatgttcaaacccaatttaaatgtgtgtttaaatgtttcaggtctgataatgcacctgaattaatctttaaggatctcttttcaaaatttggtatcttacatgaatttacatgtgttgaaacccccgaacaaaatgctatagcagaaagaaagcatcaacaccttctaaatgttgctcgggctttatattttcaagccaaaatgcccatacacttctggacagaatgtatactcactgctgcatatttaataaatcgaactcctacaccaaatcttgacaacaagagcccctatgaagtcctttttgacaaattgcctaagtatgatcaattgagaaacttcggatgtcttgtttttgcaagcactcttactgctcacagaaacaaattctcaccaagggctagaacttgtgtttttattggatatccacaaggtgtaaaagggtacaagttatatgatattaatactaaagaaatttttatttctagaaacgttatttttcatgaaaaaatatatccctttcatcgtttaaatgtctctcaaaattacattgatccattctccaccatggttcttccttctcctaacatatctaatactgatgttgatgatttccctataattactaatgataattcctatactaatgaatcctttgaagagcaagacaacgatccccttctggacacaccagcagcatcacctgctgaacatgctactgctgaacaagaaaccgaatctcagactcctctagtgcagccaagagaaacccctcctgtacccaggcgcaccagcagagtcacaaaaaaaccagcatacttgcgtgattatgaatgcc

SEQ ID NO: 52302 - DNA, 940 bp, Cannabis sativa
ttttagatttattttattattattgtagggtttttattttaccaaattagtttttatatttattttattttatttattctaataagtttataactttttttaaaaaataaaataaaataaattttgaaataataattttttataatttttaaaaattatattaggtggattaatataaatgtgccacatatacaaaagtgtacacataagcagtctatgttggcatttaactgagataaatagatgacaccttgaatttgttaacagatcagtagttcagagaattttactaccaaaattttaacttagaaggttaaatgcaagtgaaatgatagttacgggagtctagccgccaaaaactcaaaaaaaaaaaaattattattatttttattgtttgtattaattttggtatttttatataattcttcgataaattttttaattttttataagaagaaaaaaattatttttaatttttttttcaaatccaatattaaattatatcaaatggtatctctggtgctcatcggcaaatagttaagtatgggatattgatttgatatagaaattttgatatttataaagttgtcattcaaatattttaactaaaagataactttcaactatttagagtgaagtaaacatactattactctcctttgacttctactagggtttctttctaacctagtcactgccaatcttatttttctccggccaggcctgctagcctcatttgggcttaggtgtgttcgtgattagcacaaggggtttggcatgacagaccctctttcttttcgccactatctttctattctcataatattctctgtccctatgctctttttcatctctgacttaaatctctgccaatgggtgaagttagtgttggttttgatggagtttgttggtggcattttaataggtgcgcatgtctggg

SEQ ID NO: 52303 - DNA, 720 bp, Cannabis sativa
  modified_base (70)..(71): a, c, t, g, unknown or other
  modified_base (380)..(380): a, c, t, g, unknown or other
ggattgagatcaattgatctaagaacaactaagtgacattgacttagaaaagatataacagtaagtttannatatcttttccactgtcaatattggtcaagtccaatgtatatagtcgatacatccgataccagtgtactttgctaatgtcctaaaaaggacattctacatactagtgtgtaagtaaactttattgttgattatcgcgtcagtgtaaatccagtgcactgataaatcatgagactaaataatttgaagcatataatgataattactttttactgtgatgacatcactgtaattataaataaatatacgttcgtgatttaatagaatttatatattaaacctataatcatgtataaaatatgtgaacaaancatatgacaaggtcaagatatgatttctgatctttatttaaagagaagaagattacaataaaattgagttttatttagggcataaaatcttaataacctcagcccgaacccgaacccagaccaagcaacggccccaaccccagaccctgacccagcctgacctcgccccagacccggaccccggcttagacccggacccttgcctcggccctagacccgaaccctggcctcagcccagcccggtctagactgaaaatgaggagagagaaaatgataagagagaaaataatgtgagagaatgaagagagaaaaaataatgtaagaaagtgataaaataatg

SEQ ID NO: 52304 - DNA, 1771 bp, Cannabis sativa
tgggagaatgttatactttttatttgggcttacattaactttattggttttattaaaacatgagttgattggatagttctttgttgtgttagcccatattgttagtgatcatagttcatgggtttagcatatgtgtgtgtaaagtctaggtgaagcagaagtgtgagcttttctagttgactaaatcttttcatgagcaggcccaatctaactagggttatgtagctaagtcctctccctaactctataaatacatattgtctcatcacaattgtatacttttgataatcagataaataaaattgcttttgatttagagatctagggagaaagacttagatagattgtactatcaaattgcggtaattgttatggattaatcaaatacgcataaacctaattattatatattattattgtgttctatattatatacaaaatgatcttggatttattattaatttttctaacacatggataaaaaattaaaaaataattgactaacaaacaaaaatatagtacaaaagattatttaaaaaataataataattataaaaaggcattcattaaaataaaaaagaaaagaaaataatagaaaaaagatcattattactgatgacccaattaaaataggctgagatataagatttttatagcatacgtggtctctgtaattgtcaaaaatgaaggagtgaagaaatggagaaatctttagttctacataaaagaaaataaataaaaaataaaaaagatcaaaaaattaaatataaagaaaaaaaaaatataaaggtaaaagtaaaaaactaaataaaaaaataaataaaagttcaaaataaaaaattcaaaaaaataaataaaagaataaaaaaagagaatataattaggtgaaaataaaaaataaaaaaataataaaataaaatcacaaaatgacaaaaataagtcttttttcttgttttgtagtggagtcatttttttttaatattattgatacatgtctcttaataatgatcaaaataaataataaaaaaaagaatatctgaaaggaaagaaagaagtgcgtaattttaatgtgtctaatcaaccaggcaatagtgcagtaccgacatcttcacagaattcactacacctaaaccatcaattattgcacctctcatgtcttcattacactttttttttatatgtagaaattgatgtttcactgattcaatatttatatcgctttctcaaaaattaattcattataaattacttttctaaatttttaaacctttcattttattaaattacagttcatcacaaaaaatacagatgcaaatcctaaagaatcacgcaacttccattttcttcaaaaacaagaataattcatatattctttgaaaacaaacataagtactttaattcaagtttgatttttgtcataattattaatcatgactatggaaattaacaatacatccaaattaatatttaggaaattcccattcatccaaaataaaataatttatatctttatccagcatctataaataaaatttattgtggtcataacatagatcaatggttctaacattaaatggagatctcaagttcaaagttttctcctaatataaaaaaaatggtaaatggcggtaaaacttttaaaaattttattttagtttcacctaattcccaaaacttaaatttgggcggtaaaactcctaatactcgtattctgttagcaatttaacatttttcgtccattttatgtgttaagtgttggaaatattttacc

SEQ ID NO: 52305 - DNA, 1496 bp, Cannabis sativa
aaaattcaaagcttgattgctaaattttggtggggatcccaaggcactaacaaaattcactggaaaaactgggattctatttctgtgtcaaaattctttgggggcctgggattccgtatcctttcttctcataaccaagctctcttagctaagcaggcttggcgtatttggaatgataggaattcccttcttcattctgtccttaaagctcgatatttcaaaaattctgatttcatgaatgcccctcctggtcacaactcctctttcacctggagaagtatcctttggggtcgccatttgcttaaaaaagggttggtttggaagattggtactggaactagtattcccttatctgctcctaattggattcccaacattcagcatcctaccctcttgcactctatccatcagtctcaagcttttgtctctttcttcttaaatgatgactcaacttggaatacccgaaagcttaatcattattttccttcttaccaagttgatcgtatcctcacaaccccaattgatcctcaatcttcagattcgcttatttggggctttcactcctcaggcattttaacagtcaaatctgcttaccatcttgcctgcacccttgattctgttcaggttccttcctcctccaatcctaatccataccttcattggtggaaatccctttggtctattcctatcccctccaagattaagcattttatttggagagctttccatcacatattgccatgttctcttaatctctttcttaaaaggagtctccctaatccatcttgctcaatctgtggatctgacaaggaatctgtctctcatgctcttattggttgcccacgagcaaagtctatttggaaagcttcatcttttaaacagttttatttgtcttattacagaagtgacatcaaggaatttctatttcaggcttttcaaatgttaaataaacaggattttcaagtctttattactttcatttggcagatttggaatacatgaaactctattcttttcaaaaagaatcatactactaacaatgtggaagaatttgctgtgaattacttgcaggaatacaaggatgcacaacattcccaacaacatgacagtcagccatcagaaacttcaaacatctctcagtcatcttatcagcataggcctctttccttgtctcctgaaactcctgctctttttgtagatgcagccattgaccatcataaaagcctaactggtgctggttttgtcttcaaacgtggacatcaaactgtgttggcttctcaattctgtaggatgcctggtgttgtctcgcccattttctcagaaggccaagctcttttacaaagtctcaaatggtgcattgattcccagtatacacctcaagttgttttctcagattgcctaaacttagtctcaaaagtaaatggagattggcaggacaactctgctctttctggtttagcttcgcgcattcggttgctcttctcgaacttccctgg

SEQ ID NO: 52306 - DNA, 982 bp, Cannabis sativa
ccatgtgttgacactttcaatatagttattaggggtctttgctctgtgggtagacaatatgaaagtgtgatgttgttggaagagatgataaaccagggtaagttacctgaacaatctgtgtggaattcgttggtgacatttatgtgttctaacagagtatatattatgcctatgactagctgagaagctctttgagcatttattgttgtcttgaactatgttatgttgttgggaaagaatataagaatgaatgagaggtaaattacttgaaaaaggaaataaagaaaactatgttgctgtgtttggtgtgaaaagtaaaaatatcataatactagaattccatttgatacataaaattactgagttgaatagtaaattaatttgagtcgttacactatagatggacacgagtacaagtgtcgaacagagcaccatgatcggattaagcagatcattaatatttttccctttggttctttccaagtatggaattctaaagtggatgctattaatttttctgtaccctagaaattactaacaaataatataaataaacatataaattaaaatgtattgaaaaaaaaaaacaagcatttgcaaaaatacgacaagtggataatattttttcagtgtgtaaacagctagtaatttggttgagccctttcatctacgtgtagttaccttgccatgcaaacttattacgtggctaaacctaacatactctttataaccatatttatttcttacatagccaaaacgacgaaacaattcaactcaaagaaaaaacgattgatttcatcaacaaaatgatgaacattataatccctcttgtgtccctaacattattgatcgtagttttacctccatatctcttcttcaagtacattttagccattttacgacccatcttttctgaagaccttatgggaaaagtagtcatcatcactggagcctcctctggcattggtgaggtaataataag

SEQ ID NO: 52307 - DNA, 1074 bp, Cannabis sativa
  modified_base (77)..(81): a, c, t, g, unknown or other
tgtgggtagatctaagatcctggtaaaataatttccaacataatgtaccccaaagaacatatttcaagcaacaaaannnnntaacatgctcaaaataaaaaattttcattaaagaccaatgtttgagttctaaaactcaaaatttgtctaacaaccacaacaagccctgaaataacttcaaaccatcttattaaacatcaacataactctaggatacttcaataaaaacaaatcacaacaacaacagccctaaatcacaatcatacaaaattcaacaattcaaacttaagaaaacctggagaacaaagttagaaagttttaccaagcttgacacttcaacaaggaagcaagaaaagctctgaattgcaagagaaataaccctaattgctggacttttgcaaggcgttcgagagagagggaatgaagagagagagggagaaggtaactttgatcgttttttatttattttataaaaattaaataaaacaaataaaataccattattaactcatcaaaattagattactaacttattttaaatctcccttaagacaaaaatctcaaatggcaagaagaccaattttcccttgcttaacccaaaagcaaccctaccacctagcggtagtttggtcaaatctaaaaccttaactattcctgactttcccaatgtctaactataataccccgctatactaaaaatactaaaatgtgattctaatggcacaacgccgcgttctgatgttgtcgggcacaaaagatgtaataatataaaattctgaatatgacatataaaatgcattctaaattcaaataaatctccataaaatgataaatcataaatatcatgcaagttgcataattaaaccctaattattttctaatttccaaattaaagtttagcggtctttacataagagtttaaaaaacctcacattagttgcagcgaaatataatgactccattggcccagatgtctaacctttgttcatttctgctgtagagtattattaagatctgagcctggatctctttcactcctttgggtttggttaccaccgtcttactcactatgat

SEQ ID NO: 52308 - DNA, 1656 bp, Cannabis sativa
acttttatcgaaagcactgggatattgttggtactgatcttgttcaggctgtcttagactgtttgaacaatgagactgatttctttgaggtcaattccactctaactgtccttattcctaaaaagcaaagggccagcactctcaaagattataggcccataagcctttgcaccactttttataaggtcctttttaaagtgttagccaatagactgaaaatggtgcttgataaacttatctctcatttcaaagtgcttttgtggttgggagagtcatttttgataatattttgattgctcaggaggttattcatgctatcaactctcgaaagcatggtaaatgtggttgggctgccttaaagcttgatatggcaaaggcttttaatagggtcaactactggcattacttgaagagcgttgttatgcttcattttaatatccctgtcaattttgtttcccttattatgaagtgtgtgaccacttctagcctttccctttcaatcaatggggttgtctaagggtcgattaaaccttcctgaggccttagacagggaaatcctttatccccttatctctttcttctctgtgctgaagggttatcctctctccttcgtgctcatcaaaatgagggtcttctcaagggagtttccatatctagaagggctccttttatttcccatctttttttcactgatgacatccttttttttctttgttctgctaataggaactcttgtagctctctaagggatattttccagctctattcccatgcatctggtcaggccattaacttttccaaatcttccatcttattttctaacacccctcaagatattagaaacctttttttcaccacttttcacctggaagataggcctttcattagcaaatatctaggtttgcctcattgtcttactcgatcaaaatatcattcttttgcttttcttagggacaaagtcctttctgttctcactaattggtctgctaaatgattttctaaggctagtaaagagacacttctcaaggcagtgattcaagctattcctgcatatgcgatgacttattttagactgcctgttaaattatgtaaaggagttgaagttgcgatggctagattctggtggggttcttctagtagttctaagaaaattcactggaaatcctggaaaatagtatgttaatctaagtatctgggagggttgggttttcgctctttaattcattttaatcaagctatgttaacaaaacaagcttggaaattttttaaaaaccctaactctttattgtgccagattcttaaagctaggtacttccctaactcctctcttcttgaagctattcctggtcataacccctcttatgcctggaggagtattctgtgggggagagatctgatggcttctggtcttatttggaaggttggggatggggataacattctaaccattgaggatcattgacttcccaataataaatatatctcttataaagatggcagcttgcctacttcgtctaaactttcttattttatttctgactctgatcattaggatgtatttaaattaaagaatcactttgacgagtctattgttcatgatattctagaggttcatgttactggtttgccagataaagatgatgttatttggtcaag

SEQ ID NO: 52309 - DNA, 733 bp, Cannabis sativa
tattataaatagacgtgtgagcgtaacacataggtctatgccatatagacatatatagacgtgtgagagcaacacgtaggtctatgccgcatagacaaatataggcgtgtgagtgtaacacacaggtttatagcaaatagacaaatagtgcagtggcaccattaattatgtgatatatatatattgagattaagggttatgcgttcaaggcatagtcaggttgaactcggtaactagaactgagatgaactattctaaggccttattatatttagacgtgtgagcgcaacacataggtctacgccttgtagacataaataggcatatgagtgtaacatgcatgtctgtgacatacatgcatgtgagattgacgttattatttatatagtatgataaacatgttattgatatttttatactgtcttgctgggcttggctcacgggtggtctactgtgcaggaaagggtaaggctattgctgatcagccatgactgtattagctggacgaagaatttacatgttcaggccacactagaccaagcggggggtctaccagtgatgtattttgttctctgttttgccgcttaggtcggttagagaaagcaaacttgtaataaccttttgtgaaatactttcgggatcttgacccatgcatcttttattttgtaaagtgaaaaaaaaagtattacaagtttattttcattccgtttgtaattaaagtttaatttctgcg

SEQ ID NO: 52310 - DNA, 889 bp, Cannabis sativa
ttgaagtgagagcctcaaatatgtaattctttctaaagtaaattttgtccaataaaacacctcctagtaccaaagattcaagatttatggcatcaacttgaatttgtaaataatcatgatcatgttcctccttgtaaagtagaagtaccaagaacttgaggctcaaactctccaagcaaacattcatgttatcacctaagaaactatgatttgttaactccaatttctcaatagatgggcagcgcaacaagaatttaaccacgccttcttcctctgcattctctgaattccaaacgtcgtacaatatcaaagtttttaagcatggaaaattaaatgaacaagaagaatccaactctactgatttcaactccaaaatagtcaaatatcttgcattatctataactttaggtaagcagtaattagactcaaagagacgatgactaaaattctttaggcctatctgaagtcttatttccttaaccttattattatcaattacaaaggctagccatttatctatgatgacattcttgtttttttttataacaccaaaatgttttaagcttaaaactagttatggtgagtgaagaattgtcaataataagatgcataactttcttgcgttgttctaaacaattattgacatcattgtagaacttttcaacatcattatcaccataataatgagtatcattatcgttaaaaaagagtatggggactgaatatggaatggatttccaacgcattaaaagaatgcatgtcgaaatcatatctttagttgggagaaacgagagaatgtgatggattagttcatcgggaagttccgaaattttatcattatcacaaccatccaccaccattgttgttgtcatgatcttaaaagatttag

SEQ ID NO: 52311 - DNA, 1971 bp, Cannabis sativa
  modified_base (1909)..(1909): a, c, t, g, unknown or other
caaaatactatcttacgagatctaacactatatatattgtctaacggatgacaatctattagggattgtccaaataaaaataacaagctatgttagaccaacaatgaagaattgaaattggtactacataatcaataacataaaataatactatgttcaatataaattctaatcgcatatattcgaaaaatcataaacacataatcaaatatgaaagatatgggaaaaatactaaaaataagtatatcttaaattttccaaagtttttaaccaaattatgtacagtgtcacgtattgggctggatgcaaaaatatcacctgttaaaaagagtagtgagctcttctaaaatggacattattttagcaaccttttattctatcaaaataagatttcaacattgtccagtattggattggcaaggttaatcttattttatgagctactactatcgtttaatattttgtagaccatattctaagccaggataaacattattaagaatataaaatttacaaaaaatatttatctttcaagatcctacagtgttaattgtctaatggttacatctgttgggaatgaattccattaaatcaacaaccatgcaaaaccaacaatagagatggaatatcttataaaataaagctcattattttaaaagaaattatatttttattttaaatatttatttcaatctattaatttaaatatatatttaattaattaaaattactaattagctaaactaaatataaattttaatttaatatttattgaaatattcacttagattcatctaaaaataaattaaaaaattattttctaaatttagtatatattgtccaaataaatattataaaaattacataattcaagttggtctgaaattaagtaagaattaattttcaacttaaatttaatttttttataattatattaatcatagttcaaaattcaatgtattctcaaaaaatacatttttaaattcatattaaaataaaataaatcctgaaaaaattattctaatttatgttgatctaaaattaattttcaacataaatataattgtaatgccctaatacgtgtgtaattttataaaactagcttaatactaatatattaattaattaataaaaactatgaaaataataaaaacttaactattataaaacactaaaaagggacattataactgcagtaaaaaagagttccggggatccttgttataaaagatttatccaaaagatgatatacaacaacaattcaaaacacaatttaaaatacaataggcacaggtagtctaaaactactcaacacataggctggtggggacaatatgtacattgctggagaagaccgtcatctcatggttgtcctaactttgccttgcccttacctgtaccacaaggcacccgtgagtcacatagactcagcaacaaaagtaacaaagaatgatacattaaatagctaattatacatttcattatcacaaaatgattaaactataacattcaacaataggtaatataaccagtcatatgcatagaaatatatatgcacataatttgcattgcctaatcaggtaagcccgtgtcataatacaatatcatatataatatcattgtaccacctaattaagtgagcccgtgcaacaacttggcactaatatatcgcatcatctaatcagacaatctcgtacctactcatggtacttatcatatgtcactaacgcctgtacctacacgcgatacgtcgctaggaaaaaaatccaacaatgatttcaatctatgccataaccaggaaatttcatatcactggcacccgtacctacacccgatacattgccagaaattttgcatcacctaatcaggtgagcctgtacctacgctcagtactcatcatatgtcactnacgcccgtacctatgcccggtacgtcgccaggtatatcgctcaactaatcaggtgagcccat

SEQ ID NO: 52312 - DNA, 1024 bp, Cannabis sativa
aacctagcgatctaagctccagtagtagcgggatagcaaatctttgaaataagaaagcttaaggtatggtttaatttcgttttaagctaaaaatgattggttttgtataggggtttcgtgaattagaatagttatgaaggttctaaccttataggatttttctttgttagctatgagactagttttgatgtttacttgttgaatttgatgtgattttgagttagaaatcgagtttggaactttttaaagcttagtccaaacgttagtaacatttttcatttaagggctcgattttaatttatgttacataagaatggtagcatttatggtatatatgtgccctataaagtttggagtgatttagataagttttggtagtgtttcggtgagggcgaaatttggaattttcgtgttttaccgttttttaaaatttttaagagatcagaaatcgtatttttgccataacttttcactagggtgtccgttttggatgttctatataccgttttgaagcttgtgacgagctataacatatggtatacattttagagccaaaatataagttttattttagtgtatttgtactacgagattcggtagaaaaccctaggttgtcctttgcaactattaagtagtgttttgggataaatacttattgatttatcattgttatgacataggggtcgggatcatcgatcgttctccaagcaggtcgaccaacatacctgaaccaaaacttgaggtaagaaaagtataatgtaccacatggcatgacaggttttgtaatcattgactatctgattagatagtaataatgcgaatatgacaaacgacttcacttgaccatgtgatataatatatatagattttagactgtgaaatgggttttcctgattaggcaatatgatatataagtacacttgattaggtgatatggtgccaagttacggcatgggcttagcttgtctgataaggcaaagcagtatacgaatgttatattacaagcaactccaagagctcaagc

SEQ ID NO: 52313 - DNA, 2319 bp, Cannabis sativa
gagtttgggtttaggttttggtctagatccgggtccaggtctgggtcctcggttccgatctcagtatgggtatgggtttgggcccgtgtgcaggttagggtttagtgtttagagatttaggttttaggattttagggcttagggattaggggtaactataaagagtttaggatttagggttcaagggttcgcttcaagtttcggttccaatttcatgtcacagggtacgatttaaggttcgcgtctgggtctgggtccaggtatgtgtttgaattcaagtccaagtcttggtcccatatccacagacgaaccacatgtcgagtcaagttcaaattcttatacgggttcggtttttggtcctgatttgggtttgggtccatgtctaaatcccaaatttaaacaccgactatgggtcgggcccaagcctcgagtcttgggtcatgggtcccgggtccaaatctagatcctggtccagttcaagctcatgtcttgggtcttggttctcttctcaggtctaggtttgggtataggtttcggtcttgggtcctgagtcattggtcttggtccccgattcaagttagggtcctaggtcctggtctgggttacggtcccagtccgagtgtaggtctcagttcgtgttcggtactggtccttctcttgggtcttggccatgtccttgtctaggtcacggttcggttctcaggtccatggtccgagtatcgagtccagggtccctgtcccgatcctgggtcacggtctcggtcccagttcgggtgctagtcccaatcaaggttcaggtctcggtcctagttctggtacgagtgtgggtctgggtctggatcttggtctgggtccaggtctgggtctagatcttggtcagggtccgagtttcagtccgtgtctgggttcgggtctgggtttgggtccgggtttgggtacgggtctgggttctagtctaggtcccgggtcagagatcctgggtttaaggtcttgggtcgtaggtcctggcgcaaattcgagtttaggtttgggtctgggtcagagtatcgatcctagtctgggtcaaggtccgtgttcggttttgtgtctagatctggtattgggtccaggtccaattcatgttccagggtcttgattcaagttcttgtaccgatttcgtgtctagggtccgagtctgggattaggtcctggtcaggaaatggttctaggttcaggtcttggtacgattccaagatctagacaccgactacgggttaaatccaagcccctagtcttgggtcaagattcggatcccaatctttggtcccagtctcgttacgattcaaatcttaagttccagtctgtatccttgtccgggtctgtgtttgggaccgagaccggggtcgtgtcttggatcccagtcccattcctggatcacaattctagttctaattttgagtttgggtcccgaatctaggtctgggtcctaggaccaggtctgagtctccaatcccgatcctagtcctgggtcagggtatgggtccatgtccatgtttgggttcaagttcctgtcccaagtcccaatttgagttttgatttgggtcctggtcagggtctaggtgtagctcatagtcaaattcaaattcccgaactcaaacccagactcggactcggacccaggtcagggttacgggtctaggtctgggttagggttttggttagtgtccgggtatgggttcaacatccaaacactgactacgggttacgtccaagcgatgtgtctaaatctggatcacggtatcgggtcccagtctagttccactttgggtcccaagtcccgatctgggtcctaggtcagggtctgggtccgtggttgggtcctgggtctcggtcccagttctgatgcccatgtcctgggtataggttccccatccaggtccgagtcctaggtcccagtctaagtctaggacctagtcggggttcaagtcctagttcgattccgagttcgtgttcttatctcggtctgggtcaagatctgtgtccgatagatacgaatcttaggtcccggtctaggtcgaagttcaggtttgggtttggatctcgagtttgggtccgagtctaggtcccaatactagttaatgtttgagtcttggtacaggtcccagtctaagtccaagtccctgttcgagtctaggttagggttctgatctcggtcccaatcaaggtctaggtcccagaccagttttttatttaggtttgggtccgagttcaggtcctgagtttgggtctaggtttgggtctggatcagggtccagatctgggtcttgggttccgatctcg

SEQ ID NO: 52314 - DNA, 827 bp, Cannabis sativa
tcttatccggagccatagactttaaagcaacctcaacttcgttggctgtgaaaggcttagtaagatcatcattcatttccatagtgacggttgttggaatagcatctatgagggctgcaatagcatcatcatcagtagggcctgctgaaaaaatttcagcataatattgacagataacatcagcaatgtcttgtttagatgttactgtgactcccacatcagatttgagagaaacaattttgttgttagcccgtcttgcattggctttcgcatgaaaaaatttggtgtttttgtctcccgattgcatccaatccaccttagatctttgttgccaaaaaaatagtattattaattattaattttttaaatgtatctatttcacccataaacttttttaaaatttaattttttttttgaaatgtttaaaatttaattttaatgttaggctatttaaaaattttatgattgacttacatagatgcattttacgttttttttaggagaggcattaatctttctttatttttttcatttatatattttttttattctttttatgtgtatttattattatttttattctcttggcatataatttaaatttattaaattaattaactaaagaaatatttatttaaacttatatatttattttctccttttttctaatattttttcaaatttgttttaaagtcaaataagaaattgtttctctttaattattttaccaaaaccactaccatgtgtatttttattttttcaacaccctatatatataaatattttaagtaaatataaataaaatattttcaattttatatatatat

SEQ ID NO: 52315 - DNA, 786 bp, Cannabis sativa
  modified_base (722)..(722): a, c, t, g, unknown or other
aaactaagcggtctttacagcctgattaccgctccaatattgactcttccttcagataaggaaaagtttatggtttattatgacgcctcgagacagggtctcagctatgtgcttatgcaagcttgaaaggtaatagcctatgcttctcggtagctaaaggagtacgagcaaaggtaccctactcacgatctagaactcgcagcagtggtgtttgcactaaagatttggcgacattacctatatggcgagaaatgtgagatatacactgatcacaagagctcgaagtacttctttacctagagagatctgaatatgagacagagatgttggctagagttggtgaaggattatgattgtgagatcctttatcaccctagtaaggacaacgtagttcctgatgccttgagtaggaagggtcagagtcaattaagtattctgaagcaaatctctcaacagctagcaaatgagatgacccaagctaacattgagttggttgtagggccgttggctaatattaccctacaatccattcttttagagtgaatcaaagaagtacaaatgaaagatccggaatcggtaaaaacccgagctagggtttcgtctgggaagaataatgatttctcagtggatgaaacaagaatgttacgattcgggaatcgtgtttgtgtgcctatagattagagtatcaaaagagagaacatgaatgagtctcatacgactcnttactcagttcatccagggtcaacgaagatgtatccagacctgaaagccatgttttggtggcca

SEQ ID NO: 52316 - DNA, 1267 bp, Cannabis sativa
caattttccttgcgacgtattgggtgtaggtacgggcgtcagtgatatatgatgagtaccgagcgtaggttctggctcacctgattagatgatgtaattttccttgcaacgtactaggcataagtacgggcatcagtgatatatgatgagtaccgagcgtaggtacgggctcacttgattaggtgatgtaattttcctggcgacgtactgggcgtaagtacaagcatcagtgatatataatgagtaccgaacgtatgtacgagctcacctgattaggtgatgtgattttcctggtgacgtacttggcgtaagtacaagcgttagtgatatataatgagtaccaagcgtaggtacgggctcacctgattaggtgatgcgattactcctggcgacgtgtagataccgcgtcagtgatatgaaaaattgtaaggttatggcataaaataaaaccgttgtagggttttctcctggcgacgtgtagatacgagcgtccgtggcatatgataagtaatgggcgtaggtacgagtttgtctgattaggcaattactcctggcgacgtgtagagacggcatcactgatatgaaaattgccaggttatgccataaaatgaaactgttgtagggtttcctcctggcgacgtgtagatacgaatgtcagtgacatatgataagtatcgagtgtaggtacgggctcgtctgattaggcgatgcaatatattggtgtcaagttattgcacgggctcacctgattaggtgatgcaattgtatgatatatgggtgcagctttttggcataggctcacctgattaggtgatgtagttatgcgatatatgggtgctaggctatggcacgggcttggctgattaggcaatgcaatatacgattatgctatttaagcatcgacttgcttgattaggcaacgtgatgttatgaagatggttactttataaggtaacatatatataatttatatgattaaatgaaaataaattctattattggtataatgggttcgtattaccaaatatttgtatattgatgtttattcgtgggagatgccagtagtactttagattttatcttatgaacgatgtgtgatgatttgattcttattgtgtataaatgacaatattcgaataataaactatatgattattattacttttcttgctgagtccttgtgactcacgggtgctatgtggtgcagggtaaggaaaataaatgctagatcaaccatgaggtgacagtcttctccagcaatgtacat

SEQ ID NO: 52317 - DNA, 1286 bp, Cannabis sativa
cattttcatttaaaccccaccagaaattcgccatcatggattccacttgcttgcagaaataggttggtaaccggaaacaactcatggcataagtaggtattgactgaacaacagcttttaaaagcacctctcgaccccctgctgaaaaaatcttctcattccaggtattcatgagcttccaaatcttctctttaatgtgactgaacatctcttttttatccctagcagagtaagaaggcagacccaggtacttttcatgacattcacagatcggcatagatagttgttgatgaaaaaacacttgggcagcaagagtggtatttggagagaaggacataaccgattttgccaaattaagttcttgaccagaagctttgtggtaggtgtccaagaccctcttaatagcaagacaagatctctcattagcgtggcaaaaaagaagggtgtcatcagcaaagaacaaatgagtgattggaggagcatgacgtgtcaatttgaaacccaaaagattgccagattcctgctcatgttgtaaaagtctagagaagccttcagagcaaatcaagaacaagtatggtgataatggacatccttgtcgaagacctcgggatggagtcaactcacccataacttcaccattaatgagaaatgagaagctattagtagtaaggcaacacatgattaatgaaatccatctttcagcaaaccccattttccgcataacttcttcaatgaacttccactccaccctatcgaaagtcttactcatatcaagcttaaaagaggcaataccattgtgaccagccattttattcttaatggcatgtaccaattcaaaagccaccaatacattgtcggtgattaagcggttgggtaagaaagcactttgagcttcagaaataatcaatggaagagcaagcttgaaccgagatactagcaccttggtgacaagtttagagatcacattacagaggctaattggtcgaaaatcttgcatgcgatgaggtttcttgactttggggatcaaagtaatgattgtcttgttgagattagtagggtcggcatgatcattaagaatgctgagaacaacctttgttacgagatcaccaacaacagcccaattcttttgataaaacatagctgacatgccatctatccccggacttttatcagcccccatagtgtgcaaagcagagtatacttcatccgatgtgaaaggcttaatgagtgagtcattcaagtcatcacctaccattgttggaatacaagagagcgtggaggtaagg

SEQ ID NO: 52318 - DNA, 1113 bp, Cannabis sativa
aacctgacaacaacacaataacaacaactaaacaacttttatctgctccaaggaggggatcagtttcaaaagttggtattttggttgatactgacactttgaaatagaataacctgtaaaacaataggaaaataaccaaaagcaaacccccaacaaagctgaatattgacactactacaaactgtacttttagggtcggttttttaactgacacgtatacttttaggctcggttcataaaactgacacctattctacagtgacaaaaagtcaattttttttgtgttagttctaaactaccactattaagttttagtgtcattctacaaccgacatttaaagtatacatatatgttttttcttttagtgcagtttaaaactgacaccattgagttttagcatcgtcttataaccgagtcttaaagttttttagtgtcagttataaactgacacttaaagggggttaacaaataaaaaagatactaaaaccaataaaacttaaaaaactttagaaacatgataaaaatattatttacaataaattaacatatctttatttattacatttatgttttgttattgagcaaatttcatcatcattcaattgtacaatgtcttacagcaacaatattggctaaactatccaacaaactttaggaatttaaacttgcagaacttgtggtgggttaggaatggacaccaggtcccttgatgtaaagaccaaacttccttgcatttaccatctccatttgtattaataaaagcacatccacatttgttttctagtttatctagtttcaaccattcatttatagttgtagcagctgttagaggaccaactcctactcttaacttattgtatttctccttacaacatatacacgataaattccaagtccataatcagtagtaacagtaccaactgcacaaaaaaatgtagcataaaagtagtaaagaataaactcataaatattattgtaatgggagtttgttgggaactcaacctactccaaagtagatactgagaaatatacataactgacattcacatgagagaatgacttataagtggttgatggtgcttgcggttaattgaggtttcacagctgcgaat

SEQ ID NO: 52319 - DNA, 1164 bp, Cannabis sativa
ctcttgttattcttaatcaatcttcaagcctttagtgatagagtaccatgtccacacatagcaagttaggtactcaatcatagtgtgaaagacggtggctaaccaaaaccgaagtagagaaggagatccaggcttagatcttgttattactctgtgataaaaaggaacaagggttagagatctgagcagaaggagtcatattatgctactaccatcaatgtaaggttttctaaactttatgtgtttaatttcattattttagagaattcatatttagggtgttaatcaaacatacatgtcagtttatctaaatcctgctaaattaaaaccaacgcctaagagccatggtaatgatttactttcatgaaatatagatttaaaacgataattattttgttgttggtttatgtgtgatttgatgaatatttataaattaaaaaatatttccatgaaaaaaatttatttttgttccaaaaataatttatttggattccttgtgaaaaattaagcaactttattttttacggaactcgattccgataaaaattgaaagagatatggaagtttgaaaatttaggtgcatatggtgtcgagggttatgcaccatcgcaccagaccctcggacaaggcagggttctgcgcacgcacttcagacatgttttgtctgattctcggtcaagtctgggtcacgcctgcgtttagacacgatttcgtgcacaaggaccctgcacccgccgagaaatctcagctaagtcaccttgctgatccaccatccgcgcacggatagggtagcgtgcagcctgtccctcggcagctaggtgctatgcaccaaaaattcaaatttttggtgatttttccaccaattttgattttttttttttttttgaatttcctatcctaaatatctaaataaaatataattttaatttttaaatttaaatatcaatgtttaaaattaatgatattttattttttaataaattattattaatttatgatattttgaagttttaatttaaaaattcgttattttatatttgagattatggttagaaaatttgttaattttttaaatttacagattatttaattataagattagatatattaatattaggcatattttaaattaaaagatattattatctttttaatttgaaatat

SEQ ID NO: 52320 - DNA, 1045 bp, Cannabis sativa
aaattgagatgagatcttgaattaaacttccatcagtgaattaatagaactagaagtaaagaaataattagaaaggtaaaacagtattaagagtgcaattcaatatcaatggacactactgttaaactcagtaaatatagttctataattactaagagtgcaattccatatttatagtggagtaatcatggaattaataaacaagagattatttagttgagttaataaataatcaagtttattagagcttaaaattataggtccatagtccataaattgccaccttgaacactgtcaaagatagagataaagagttgtacaaagatgtttgaagaaaatctattttgaattgacaaaatagtaattattattttggtaataaatatataattttttcaaattaattaaataaggaaaaagacaaaagttgttaagacaaaatttgtcgagacaaaatttgttaggacaaaagttatcaggacaaaagacaccaaccttgtcctaaagacaatggtaggcacctatagcattgtattgtctctattagatttgtctttttggattaattaattatttaattaattcaattaggtaaatattaattttctgatgcattatataggaacgtatagaatgaagtaacggaaaaaaaattattttttttctaagtgagaattcgtctatgcttactaattaattaaatacgtttgaaaattattttaattaattaaataaaagtaataatttaataaataaattttctctaaaaagataaagtgacacaacacccgcccgtcagctcagctcggctcggctcagccgaatggacagcgacgtgcgcatgtgtagtggttcggtgtgtgagttctcaccaatacgcacaaaactaggtactcattggggcctaacccaagttttaaatttgcacattatatacacttctaataaagtattattatctcatatagaactcaatacactcatacactttatttttttttttttgatcaagaagaagaaaacttcattaatctactcaacaaat

SEQ ID NO: 52321 - DNA, 964 bp, Cannabis sativa
aagcagtcgctttatctcgagcttttagaagaaaagcgcgatcaggctcacctgaaaaaacgcggcttatcagcggtgaaccgcaagatacttcaactctaaggtcaaggaaagattcctgccagtaggagacttagtccttcgaagaataatgccaaacacgaagaacccagcgcatggggtcttcggggataattgggaaagaccatatcttatcacagaaaaggttggcaacgcaacgtaccgactcgcagaactcgatcgtactgcgattcaaagagcctggaatggcgagagcttaaaattttattatcaatagtactcgcactatatagtttgtactcactatgtatttatacttagtcattttttcataaaaatcctaagtatagggggtatatacaactatgtactattgatcacttaagagttatgaaatttttcaaaattttccaatttttgaaattttcctaccttaatacttattacaccaagttgtagttaagtcgcaatcgagatattataaatagcaaaacacgcgagtacccgagtactacgaaaatgttatagataaatatccccgagaggatgtaaattcattcaaaagaaaaataatataaacttgtccaaagtacaaatcgcgagtccccttgtatcgcatatatatatataaaaaaaaagagtctaacacaagtaaatattaaagaaaaaagttaagcattgggaccagcaggggcagatccatctacgactttgctgatagcctcgaccacgacttcctcattgtccgcggcatcagcatcctcgggaaacagattccctccaccgtcttgagtctgcataggcgacatggcttggaaagccttagccatctcagcggcttctgctccgaggattgagaagtcaaagtccggaattttggaaagagtggtataaatatagtcagagaccgcctggtcatact

SEQ ID NO: 52322 - DNA, 840 bp, Cannabis sativa
tctcacttgttttgtatctcacttattttcatcactaccgtatatctcacctgttgtcatcactgtatctcatcccttgtcattatcgtagttcacttgtagtcgtcactattgtatttttcgaatttatatcttaatcttaatttttattagtttgttctgttattattaattaatatgttttaaaaaagtgattgttattttttaaaatatcttaagtaagaaaaaagaaaaaaaatgtaatattttagttatgagaatactaaaaggcaactctccttagtatcataccactattggtgtaactaagtagcaattcttatataacttgaaaaaaataagatttagggaatatcgctaaccaatcgtaatgtgcaacctgtgaaaggtgttgggcaccactggtgtccaataacaatgctctttagttataattatgtgatacttgtcattaaagttatcattttaaaaaaaaagacgtaaagtatacttttgttaaaaattaattaatttttttttaataaaaattttaaacgtggtaaaaagtaattgaaatattttttcaagtatcacgtacaactgattcttttattgttattattattattattattatatcttaatttttttttttttttaaaaagccaaaaacgtacacataagagttattatttttatgttattattaaattattattattattattattatcatcatcatcatcatcatcatttttaggatatatattgtttggctgcttgtatgggtttacttgcaggttatccgatcgtgggtgagtacaacttgttataaaagattaccctattggatgccgagtg

SEQ ID NO: 52323 - DNA, 601 bp, Cannabis sativa
ttgaagagtttgtgatttttttttttaatattacgagaagtggtagtagctagctatagtcataattgtcgattttaagacaaatcttaaaagtttagttctgtaaatacactcaatgatttactcttcctttcctattggtaaaaagttgacgagggtaacaagattagcatataaattacaagagaattacgatgatgatagaacaaattatttcagcatataaatttacacttattaactaatcatatcaggaagttattatatgacaaaaagaacaaatcaaaccttcttccattttgatgttaaaactaatcaaagctcgaataatattaataatattgaagagcacatgacagttatcatttgcttggattggcttgcactaatgttatctctaataagaaaaaaaaattataaggagggcactagcaaagacaaatgtagtagagactattagaaatcctagcagtagcagcctcaagaaatttcctaacaaacatatacaaaatttgcatcacatctgtgtttattctactgacatttttattttttttttaatctcttttccctaattcattaagcagcctaccaaaattgt

SEQ ID NO: 52324 - DNA, 1466 bp, Cannabis sativa
caagttaatcaacttaactctctaatcaccccaatgaacattgggattgagaatcctaataatttggcgccacctcctcgactgcacccgtatgatcaaccgccgaccaaaccccttctgatgggggtctcaggtaagtctctctttctgttgaattttatttacacattggagacaatgtgatctttagtttgggggcggacttaaaatttttaatttttacgttttcctattttagttttttgttttagtctgttttggttaagttttttcttaggatttggcaataagctaaggatagttgtatgctattgttgattgtgaagtgtcctgaagttttaaaaactgtgtgcttaatcctgtaaactctttggattagtttggatgcctgtgaaacttgtgtatggttgcaatttgatgatctgtgaaatatgttataattattttactgtggtttgtggtaagactggttgaatatatagcataaaacttgcatgtcttattctcttgaggtaaaataattgacagcattcaataggaacatgatttaggcagtttgtttggatagtttgagcctttcaagcctaccataaaatgaatatctttagtgaaccctcttgagcctaaacttgcttcgtttcttcacccattgaaccaaaagatgtatccacactgttatttttgtcctctttacattttgaatgatatcataagatttataataagtttgggggagtgaaatacatagtgtgtgaaagtattgaagaaaaaaaatcttccgtgattgagaaatgtgaaagaagaaaaacaaaaattttgtaactcggcatcacttgagaaaaaaaaaagaaaaaaaattatatgcaaagtatattcaaaaataaaagaaaatttcagtgatgtcaggtgattgaaaaaccaaatagaaaaaaaaaattctcaatcatggttagttgtgggaacacttcgggaaattttaatttgtgggaagcttgtgggttataaaggtgcttatgatatctttaggcaagaatgttttccatttaccaaatatcgaagccaaaattttaccctgcaagacctattgattccgaaaaggatattgtcaacattagtggagagagctaagcgtgcaagcatattggctattggtttgtggaattatctgatagagtaaaaccattataacattgtttcaattgtgaagtcaatttgtgtttgtgcattgtgtgataaaatgagcatccaaattaattgttagagtttgttgaattgaaattctagtttgatcaatggaaggaaatggaacttgaggcagcagcattataattatctgatagcatagttagtagtagtcttggtcttactcgagggcgagtaaggatctaatttgagggaattttgttcggctaattttaccctaagtttcaggtcgaattattaagcattttctcagttaaggttgc

SEQ ID NO: 52325 - DNA, 3820 bp, Cannabis sativa
cgagtctgatgtaggggaaaatccctgacactgtggggctctgtgtttggaaggttctgttttggatgatgttcgaaagctatatgagcgacccttcgattacttgctttcggattacctcatgaaggtatctggattggtcttagcagactcttcatcttctggtctgaaaggcctttcctagacttgggtggtccgaccttgttaggtcagtgagctgggctcgtatctggatctgaattgtagcgtgacttggtcactgggctaaatgattaatttgattgggcctaggtttgggcctgccttagctgatattgggctttgaaattatacacgccaccattccagaaactcagataacatttagcccctaaacctccggggctcaggtgtcgcggaggcttgcagccctccatccacattcatttatggatgcagtcaagaacagatgcgaccttttgaaatttcaaagcaatgagtggcgaaagcttttcagtctcttcactttccccacagcagaagacatgtgtcaagaatcttttggtgtgtgcatgttacatgccttgagaaggtgtgtgacatctggggacgcagattgatgagtagttattgtctgtaagttttttgaggcaaacgtcatcattaattgaccttgattatgaacaaggcattaagggcaacacttttgtattcttagaccgttagatctgctttgtgttttctgaagcttaatctggattgttggattaagaagcacgcaaatcaccactttagtataaatgggttgaaaaattgactgtttacccattttaccaattgcatttttgaattcaaatttttttgagagataaaaaatatatgcgagacaaaacttccaagatttccttataaggaatgtcctgcattgcaactaagataatcaaccttcttcttcaagttcgagcactattgtatctagaagcaccacccccgatttcaaccattgattcctcaaatcgactaatttccaaagggaggtcgacgagcttttgcaatatacccaaaaatttcaggcgagactcgaacatcttcatcacgttcctccaatcgacatttatataagtaagtgctcttgacttcaccccgatatttttaatttccatctaaactcttaatttcttgtgaaggaaataagagattggttgtgtagtttaggatctatgaataacttctgttgcatgctccatcgtgtagagcggccttaggacattcgcggggctagtgaggcttgcaggtcgattaggatgatttaacttagtaatttaagactgtattgttgatttagcgtctctgtgaaatctaagttttctaccgtttgggtctcttttggtgtcagttgattttactgtaagcttttattcttccctttcatgttcccgatcttgccatccaagatgaagttccctggagaacttgcttccaaatgttgggtccgtcggggaactctcccaatagttatcggggaggattcttccatacccttactatgttcattagtgtagggtgttaagtgcttgattttttctttctttctttctattacttctatggctgacgcaaatagattcatagaagaaatgatattggattaccaagaggagccaacttgggaaattagaggtgtagaaccaactacaacgaccaatctatctcattaagagatggatcaatacacaaataagttccgcaatttcctaatattgcagtcttatgaggacaatactaggctcaagagcattcctggctgttctagaataggctagcactgaagaatgaatcgccttgctattgcacggacgaatttggagcctggagttgggttcacgttgaatccagagcacgccttcctatctagagctatttttcacgcttttgcatgaaagtaggactggctccatttccactcatccctaggtgtacaaattactagtgggatggtacatcttctgtagagatcaggatgtggagtttccatctctagaagaaattatgtactacaaggtggaattaaatcccatgtggaagaataagtcaaaggtttgcttctatacgctgaagaagtgtttagatgtgacatgtccggtcagttcctgcaagcatactcacaaggaagtattagttctttacttctgggcttctcttggtttgcatcgtgggtaagtgataaaacttttcccatttggttttttgtacatgttctgtcaaatttagctaaatctaatatgattgtcccttttatcttatcgatgatcctccccatctggtgctgactcctttcttgcatgagagggtgaagctttactataggattgatccagaaaccttacaagttgaaggtttggttacgaccgaaaagcttaggcaggtagacctaattgctcctcatcaaagcatagatgatcttgacaaccgttgaatacgctccgactatgctgttgtcaaagaggtcgttgctgcaattatggccagggtggcaaaacaggccataaggaaggaccagtgctggctggaaggttggacgaaggcccatccagagcccatgaacaagaacaaggaactaaaggttctatatatgagcatgtattaaatgagatgtgtggataaatgataagaattatgcgttcaaataactaggttagactcggtaactaaaaccaactctaatatcccaaatacccattcgggaggtcttagttacctcttcacgtctgaataaggtttggttccaaatctagagacatccaactctagagataaatatcgcacacttcagatgggcttgaagcccatccctttatgtagtcctggcccatcatcttggagggtttttatgtgagccttgaccactcgatcttggactggaaatactacgtgtcccatgtttggaaacaaagataacaggaagcataaattttataattagaaataatttttgtgaaataaaaaattatatatttgaattatatttgtcaagccttattatagtttaaaagaacttatcatgtagtcaattctcctaaaattacgaattatttttgtggtagagaaaataaatcaaatttgaattatgtttgccaacccttatagtttgtacttaatttagctaatttctaaataagtcccaaatatatagacttggttactaaaaaaatcaagaaacttatttataaattgatttgttaattgctttaaaaatcaccaataatattacaatggaatcatttcgtttgttagtgggaatacaacttattctttcagtgttgattttgaatgaaagtagaacatgtatagcccaaggtttgaaaacagcaacaaccacagtgaaatgttctcgaaaacacagcgcggttttgactgagtttggtggcgttggcgatggagtcacttccaatactaaggccttcaaggccgccattgatcatctcaggcccctagcatcggacggtggagcacaactcatcgttcctcccggaaaatggttaactggaagctttaatctcactagcaatttcactctcttccttcataaagatgctgttattcttgcttcccaggtatgtaaatatgtatgtttatatagcataaataaaatctattcaacaaacagtttttataggttatttaaattttgtaatagaaagttcattaaaaaaaaaatcaaaagttgtaagagaaaaataactaatgtttttgaaattgttgcatatctatatattagataagtcaattttattttagtttttagttttttttaatatcataattttaaaattaataatat

SEQ ID NO: 52326 - DNA, 1208 bp, Cannabis sativa
ttcattctagttggtaagactgtactgcggtcggatgggtggaaattactattttattgttgtggattcttatatgttttcattttatggttaattttttttttttttgtgaacgtccaatttatagttgttatgctgtcaaaattttggtagaattcggataaatttttagattaaagttaatttaaacccacttgttaggattttatttgcggtatggataaatcgtggatgcttgagaggagagaaacaccgcaattttaagatgggttcaacaaatttctagagtttgccctaaaaaattctagtaattacgaaagaattccctgtctgtgtgtagattgttgtagtaagatagaatgcaatattacgatgataaaggatcgtaaggatttcaatataagctacactacatggtattgacacggggagcggtcaattagtaacctatatccgttagggaagcgagacgtagatgatttcgagtttaataatgttgatgactatcctattgaattgcttgatgaagcacaagaggagtttcttgatgatcctaaaaaattagacaattcggttagtgatgcagaaatacccttgttcggtggttataaaaaactaagataaccaacattagtaaaattttacaacattaaaactgaaaatagagtgagcgataagggaaaacaaatgtcgcaaccacccatagattatcgttgaaggggaagcagatagcaacccctcacagatcatcgtctaaggggaaacatatatcagcccttcctactatgtctttggctggatcacaatcaaatgtcagaaaagatcgagtggacgaggttacaacattcccttttgaggtctgagcttaaatacctacatgcctccacttttttattgaagaatttctaaggaagaaaggtatgcacaacattgttcaagttccaattgatcctgaattcatgccacatcgcacaaatattatcttattattggagaatgtagagcaggttgggaccttgaacaatattagatgttagacatgatctttggaattaggtatgttttacgtaatgatttttggaattaggtatgttttacattatactcttcccaatttattaaaatgtaacacttaaccatggtaaatttatacaaatgtatttgggatgatttaacgaatatgtgggagtatttcaagttctttgacc

SEQ ID NO: 52327 - DNA, 1525 bp, Cannabis sativa
tccttctagctaaatattcctttgctttcaattggcctttgggccccgaggcaattgaggctgaggttttcaagaaggtggaagaggctaatttctacattaagagatgcagtgattgggaggtggtcaccccccaaaagaaagcaggcatcttgcatgtcaaaaagaaggtagagatagtcaatggtagggctgaacatttagacccgcaaacccaaaaaacccaaccacctgccccaacccgctgtcaaaaaaccaaaattgaaaactcgtgtggtcgaatcgggtccaacctgaaaattccccacagaggtttcaggttcgggtattaaaagtgggtgttttttagtcgggttctaacccaataacccgaaaaacacagtgaaaaagaattaatttatttattacattaaaaaataataatattaattattaaaatttaaaacttaaaattgaaaaataataatattcactattattcacatttcacttttagtaactattcatattcactattcaatttcgacagtcactattcaaagaccatgacaaaaaaaaccctagaagaattcaagaaactcccaaaggcagcagctgctgcttcttcttctctagcagggtcccatccaagcggccggctcaatctagcgagcctcatccctaacatccaaagtcaaaaatccttctctgccctcttctatttttccaaaatttgtctgcccgtgtctgtttgtgttcgcctgtgtccgcccataccccccgctggtgtctgcccgtgactgttgagtgctgaggtggtgaggtatgtttcacagtttcagtttccgtttctccactcttattaatgtttgtgttatataattttataattttttattttataaatacagcatttaattaatttttatataataaatactaaatatagtataatagctattgtacatacaataaataatttttaattttttacatattgtactagtatatattacagtatactaatactactagtatatattatacttttatatataatgataataataatgtactaataaagataagagtactaaaaaaagggtacctcctattgtgcctattcctaagaagaaggaaaagtctgatgtttggcttcatttcactaaggaagacaattcttcccgagatacagaggatgatgatgaagaacctcaacctcgtgttcctaagtgtatgtacaattattatgggagtgattttcatcgtgacactaaaaaacatgggactagtcatttatagagtcatttgaaaaaaagtgtgtgagcttagttcactcaaaaatgaagatgaaaaatagaagattttaagttttgagcctcttaagggtggcaaggagggggaaacaaattcagtagttgtggcctatgagaaagaagcttgtaggaacgccctcacataatatattgtgttatatgagttaccatttcgacatgttgagggtgaaggtttcaaaagatttgtgaaaatactccaacttagattt

SEQ ID NO: 52328 - DNA, 1106 bp, Cannabis sativa
tagtatataattttatgtattaacttttgtaaaatgtcatcactaaatggtactatgtcttatagctatgctcttgagaataatatgatagggtctcacatgtgagcttttgattatctttggtttgaattttattgtttttgttttgattatgtttcaacaggttcctgtggatcaaccatgtgtaactttagacatgttgagtcatattacaaattctcctaggtagataataatgtaggagaaggagagtattcaaaataaatgggacattatttgaaagagattggtgaaaggtaggcacaagcaatcatgttaaaagagaaaattcataactaaaaaatttattacaaaaaaaaaaggaagataagagttttttattttattttattttttattttctcattgtttttttctccaattaatgacccatcttaactttgtaatcttaattatcattataattaattaatgagtatttgcatttggcaagttgtgtattacatgtaatttttaaattccctctactctatgacccattttaactttctaatcttgctactaacatgagtgtacatattagagttattcaacattaaaacataataatgggagctatataattcatatatgtttctatatttaatatatagtaacttttttttatttcaatcaaagataaatatatctataaatatataaagttgggatataaaacaagcgataagccgcattaaaattcaatcatggcggaaaaaatggagttggagtgagattgcttggtagcaatttaagctactttctttttttttggttattataaaagattagcgtaaatatcttgcatctttaaataatatttttttttattttttttattcaacgaaatagtaatatggttgctcatagttttgctacaacacatttttcttttctagatagtgtccaacagaggtgatattcttgttgagttacaatattgtattttagctaatttagcaaactaataaaaattctatatttatttaaatatatatataaatcaacaatatcttataataaaaaaaatgtgtattaaaaatcaactttattcccacatttttccc

SEQ ID NO: 52329 - DNA, 1127 bp, Cannabis sativa
aactcacaaagttggtcttttactcaaaaatttacccatcatttaacaatataatatattattatattttttttctatattatttttcgcactcttactttaaaaatattctaatgtataatactttttaaaatactataattataatttcacacattattatttaatatatattttaatttctaggtacaataaatttttagtttcaatttttctattaaaataaataaatagcatcaatgtcacaacatatcatctatgtaaatttctagattgacattcttatctctccaatagtatagcatcttaatattttaccacataatatgtccacctcaccaagtatcctttaagattttaccattagagatgctctaaagtagtttttcatcatatatttgattcccaatccttggcattaattaaaggttaattagaatttttacccctgaactttgatatgtaccaaatcatgctctctgaaattttaagatcgttaaaaatatcatctgaactagattgttagatttaaggaattttgtctaatttaattcaattttactatttcagtgattgtttatgtactaaaccacaactttgatatctaccaaatcatatccctcgaactttgacatatactaaattatgccccttgaactttcatccatgttagatatttttactaaaattagaaaaagtcattaaatccaacaatctcaatagttcagaggtatttataacgaccttaaaaattcaggattataatttagtacatgtcaaaattcaatgaaaaaaattctaattagtctaaatattcactgtaaaacaaaaacaagtgtccaaccatacttttttaggctaatgaattctataaattaacaatcatttataggattgatcacattacatataatcatgtaataataagatatgataaatagataataaacacagaaaaaagaaaacgcatttttttaacccaatgctaaggaagatcatcttttgatctagatcatgtatcatactcgagctgagaatgaaggatcatggcgttacggagcgaacggccatggatggctattggaagctctataccattcccataatgtatagaatgagagagagag

SEQ ID NO: 52330 - DNA, 1828 bp, Cannabis sativa
tcacacatgatagattttatttaggtccaattagtatttgggcctattaaattactaatagtggtttaaattaggactttttacaatggacacaattgttttaatttttatttcaaaaatggcgttgtccatctaatgtaatgtaatgacgtttctatgtaacgtttgctataaatataatgacgcttttattttttatttataattgttttgggagtcattgaattgtatcctatacaataaaggtaaaaagacatatatattgtacgtactgtgctttattatttctttaattcatttctttttattattttgttttatcttttctctttcactgtttaaatgtgtccctctttctatcttgctctttcttttcttttcattttttttttcttttttctttctaacttaaaaaaaaaaaaagagagaaaattaaattctataccatttattgtcctcttttattttaaccatcttttttaaaatctattattttttacctttttttttaaacattgtaccaatttttttcctgtcacttcaaaatactctccatgtgactcctttatatttgattaaacttaaaaaaaaaaacatcctaatttattttttgatataattattttaaaatgtgagaaacatatatttattttatttttatgtttttaaaattaaaaaaaaaatattgaattacttatcatactaattatatattgattagttactgttctataattatttttagttaacaacttaagtttatttttgaatattatgttatgacttaactttgtaattagtttcaacattaaatttaagtatatcttaaataatattaacatattataatataactttaaataagtaataagtaatttagatgtctacaaattttgttaaaaagttatgtgagttcttttatttttattttattgtaacttattagtttcttaaataaatttgaaagtaacattaatgttgctataaataataaaagtaacataaaagtatcttaaaataacaaaatagtataatataaaaatgaacacatgaatttaaaagtaaatattcgaaattagtagccaaaatgtatatgagataaatttatcttaaaataaatcttaatatatatattttttttatttaagttaacaactcaagtttatttttaaaatttggttaattaaacaactaattagtttctacaataaaaatataatattatattatatgtcaactatcagcttccacaataaacttaaagttaccaaaaatatatcttaaatgatattaagaaccataatataattttaaaataacagttggtaacatagatatttacaaatcttactaataagttatgtagttattttattttattttattttattgtaacacattagtttcttaaataagtttgtaggtaacacaaatgttgataaaaagaaagtaatgtggaaattttataatcaacaaaacaatataatataatctaaaagtgaacacataattttaaaagtaactaaataaaaaagtaactaaaatgtatattaaattatttttatcttaaaattgattttttttcatgaaaatataatttattggtagcctatgaatcttataatctcatcagtaactaaaaagttgcctttttacgcagaaaagtaaaaatatatattttcttataaaggttacgcattggtatattatcggcgtcataagcaagtaattgttaaattaatgtgtataattttttctaatgagctatggggtaagttccttataagctatcttttaataatttatcaaagttactctataaaataga

SEQ ID NO: 52331 - DNA, 829 bp, Cannabis sativa
ttgagtgtgttgatctcaagactcgcagtgtgaggtttctttgtaatttgagagagttgttcaaggtgtattgttctcagattcattatcatcattaatatatttcaaccataaatgatcgtttggtacgccatattgttgatgccgttattttctgtgattgaacaatatttagttatggcatagtcattcgaaactctcaagggaaagtagtgatggctaaatcggtaattttgctggtatagacattccgaatttagttgaagcaattggtataaaagaagcgctaaaccaaattaaaactcaactaagacgaaaagtagagatgtaatcaaattgtttagtggtagtctaaactattcgaaatacattatttatgctttcttttttttggagttattatagaagattgtcgtaaattttttgcatttttaaataatatttctttattttttattaaacggtctgctaacataattgctcataatcttgttagaatattttgttctttctcaaatcgagtgtttaataggggttatgtttctgtcgagatacaatcttatctttgattgatttgataaattaataaaaattttatatttattttaaaaaaaagtattgaatttttcttgaaatttttcaaaaattgcaataattttctaaaactaatttctaatagatgttaaaattaagaatatggatgcaccatacaatttttcaaaactattcttttttttatcgttaataatattatgaagcaatattatcctaacacgtgtgtgttaacacattgaaaaatcaaattttattgttgatactaaaaacaaaa

SEQ ID NO: 52332 - DNA, 1061 bp, Cannabis sativa
tgtggtgcttagaagaaggctataaaaagtgcataattagtagagatgttgttttcaaggaacatgaaatggctatgaaaactgttgctccaaactacaagaaatctgacagagaaataattggtttagaaattcaaaacagtagggaagatgaaggtgctacagatcaggtggatactcaagagcactcacattcagagattgatgagcatgaaagtgaagaagaaagcttagtagataattcacaagaatatctactggttagagacagagaaaggagacaaattaagccgccagaagtttggctttgctgattgcacaacttttgctcttgcatcagcagaagaaattgacactacagtcccctgtacatatcaggaagcaatcaactcaaggaataaaaggaaatggcttgctgcaattaatgaagaaatgagttctctacacaagaacaagacttggaaaactgtaacaagaccaccaggcaaaattgagaggctgcaaatggatttttagggaaaaggaaggatcgccaggtgaagaaatcagatttaaagctaggttagttgcaaagggattcaatcaaatagaaggtgttaattttaatgacattttctctcctatagttagacaaacatctataaggatcatgatgactaaagtggccaagtatgacctagaaatggatcaaatagatgttaagacagcattcttacatgggaagcttgaagaaaaaatatacatggaagaaccagatggattcaaaagtaacaaaccaaactaggtatgtctactacagaaatctctttatggtctcaaacaagctccaaggtaatggaacttgagatttcatgagtttatgatgagcattgggtataacagaagcaactacgatccatgtgtatattacaacaatgaaccaatctggctattattgtatgtggatgacctactgataattagtgagaagagacaggctattgacaagttgaagcaaaatctaagtgctgaatttgaaatgaaggatcttggtgaagctaagagaatacttgggattgaca

SEQ ID NO: 52333 - DNA, 1140 bp, Cannabis sativa
gtgaaacatattctcattccacacgttatattctctctcttcaaataaaaaatagaagagctcttcacttcccctttgaggctgatgcacccaagtccttcgacacccgagattctcgctttgtttcgatgatccaagcttccacttgcttcgttgatgattttcactcgtgcataagcatttaatctcattctctacttgttttcttggattttccattatcgtgtttaagcttttccatgtttcatacattcttgattaccacgttaaatgaattctttttggtattttgattcacatgatagttttaggatgcataatgtgtgatttcttgatgaaaaagattcgattttgacctttgttgtgattcttaactctttgagtcacgaagaacacatttgagttttgaaaaaacacactttgatccaaacacaccttggcagccctaagggtagtgttcaagacctgactggctcttgggttttgtcatgggggctagccagctctagagtttaccctaggaagctagccaattcatgcttgggtcttgtgacactagctaattcttgcaaggcacatgggaccctagctaacccactcaatgctttgggaccctagctggcctagggctttggtcccaagtgggtgaccagttttctatcctcttttgacctcagtaagaatcctatcgtggccttgtgaacctataaaacctttttctcatatgttgttctcttagaaactccgtatgacacttcatggtgagtctattatagtcgaatgctcaccttaagactcaacattcgttaaagttgttacacttgacactgtactttgttgatacctagccttgtactatgaaattatctggcaagtaccctttggtacagctgacaagagtcttgtctaaaccttatcgctttttcaggttgctcacctccccttgtcttttgtgtgcagatgatcctgagagactattagggaggtgactgctgtattgacaaagatttacttggtcttatctttgaggaccaatatctagttgattcctctagcagctcctcgagtgatctcgaggtttgtggtggttctctagaacttgaggtccagcatcatcgtcattcagagcacataggcaat

SEQ ID NO: 52334 - DNA, 1840 bp, Cannabis sativa
ttgtcttttatctatcttaaaatggtatggtttgttttattaaactaaacggactagctagtgtgacgtctcgggaaatcggggccttacagtaaaaacagttaccacccccactaaaaactcttaacaaatgaaaaaaaatatttaaaaaacgatttaaaaaaaaaacagaaccaaaaataaaaaagcaaaaaatcaaaatacaaaaaacataaaaaattaaatacaaataatactattaacctaaaaattcaaatctattacacaaaaataatcagttacattttataagcatcctcaaatctgaattgcatgcaaatgaagaaaaccaaaacaaacaccaaaaagaaccaaacacatgatctgaataaccgattcaacacaaagaaaaaagaaaaaaccctagaaaaatcatgaagatttaacaaaaattaacagaaaaataacaaaatcaactcaaactcaaacttaaaacaaaaataaactaaataaaacaatgatcaacaaccaaaataaggacacattttgaaaaatttagaaaaaacacccaccaaaacaccaaacacagcctaaaatcccaaccgatcatcccaaaagcaacaataaaccctaaaaacccaaccaatcatggaaaaacatcccaaaaaaccaaaaaaaacaacaaacatcaaactaaagaactataatcactaaactaaatgcattacagcaaaatttatgaacaactgatcacgtacctcacttaacaaccaaccgagctcaaaaatcaataaaaacagagaacccgaacacacgacagctaattcaaagcttgcttcgatcgacaatggcttcccacacacaccgacgaagacaaaaaagaagaagaggaagaaaatgcaaaccctaagctcagataatgctcaaactgaatggaaaatgagagagaaaatgcttgagcaaaaaatgagtctgattgaagaaaatgaaatggcggtaggatgcaatgagtactaagctactccatgcaaaaaggaagctataatagctatagcttcaaaaaaattaaaaaataaataaaatatgggcattgggctaaaaataacaaaaatatggcttttataaaacccacaaaaggaaaaacaaaacataaatcctatatacacaaagctttatttaaaaatgccataaaaaagttaatagtaaaaaaaatcccataatttgagtaatttttacttataaaattccatatgacatcatagtgtatcaaattgcatatcatttataataataaaaaattacatatcataacaaattttttaaattggtattaatacaaattatatataatattaattatcataatataacgccaacaagtacttaaatataagagcttacataaattgaaaaatattaaatcttacctaatatataaaatggctatgtaacgttttttgttgtgtcttttaacagtttgacgtctatttaacagaatattttcaaaaataagttaactttaacagacaccttaaattcattctatttacaaaaattattcacagaccaagacaaccatttgtcgttcgcaagatacccattcgtaaaagcacccattaattcacaaagtcataaatcataaatgaaacaaagagaaaatcaacttctcaatagttttaaaaaatcaatatcgaacttttttttctttgacactactatcaccatgcccaccaccaaccattaatggcacggccatcgaccaccacaaaaagaaccgcaatttatttcaatcaatctcaaattcagattcaaacacaaactaaaatgaaactgataattaatatcagatacaaaacaagac

SEQ ID NO: 52335 - DNA, 1496 bp, Cannabis sativa
tcaacactattatcatcattcaaagttttttcgtcgtgggtgctttgtatagtagtatcttgtacttcgggaatgtcttcatctccattatttttttctcaagtcagtcgaatcaaaacctagacatttccatcaaataacaacttgtcacttagggatatatgccttttattaatgaatgtcatgatggagaattagtcaattagtacaacattttatgagtacctgaagaatgcgaactttgttgttatctcttgacactatcctgggaattgctaaatttgaaactatcctgcatgatcaatttcatgaataaaatatacaaaattaaagaataatattacaaataacaatgtattgtacaagtctaaccaataccttccattggtaaattattgttcctgaacatgcaattgtttaaataataataggaccccctctaatcacaggtctttcctaaatggctacattagaagtaacgatacatgtgatggcatactcataggctcatatttcgttttctctgagaaaatttcctaaacttttatgttgattacgtacaaggtattgaagtcctaattcataagtaaaaaggtcaaacccattcacatatttttagcaaatatacaaataagaaactataaagtacaaacctacaaatagatattttgaaaatatgaagagacttggtagagaggttacgaatagcctccgaaatatgctccttgccaaatgcatatactactggataaccaagaagccatctgaagcatatacaataacatcatgatgtgagtgtgatatcttgttctaattttgaaactgaagctacacagaagaaggattgtctatcttctaaattaatcaaaggtccatctttgtatgcaattacttatggataccacaaaacgaataggtaaaatactctaacattattaatgcagatgtatcttaatatagaaaattacccatttaaagttggtactgtgacctgggtgtcttgcagacaactactaagatcaataaaattgggactaaataaaacaactgaacaagaaaaattctacatcaagacaagcaaaatgtaatgcatagaaacaagttggaccttttttgtaggaaaaacagaggtgagattacagtacatattatttgttaccttttctttagtgctttaattgggttagtttcttttctcatatcataatctgaattttcccacttgaacagttctctatttaaagtttatgttggtatatattttcctaacaagcatgaaattctctacttctttatttaaactaaatcagcatttattcatactccaagggcatttaatgttggaaacaaaactaccacaaacccataactgaatttcttttactaattctggtaccctttttcctaatttacttacaccaagacaaacactaaagaaccacaaacccatcaagtactcaatgatattttattgagtagaatatttttgctacaaa

SEQ ID NO: 52336 - DNA, 1086 bp, Cannabis sativa
ttatatataatttatacttaatttcattatattaataataaaataatatatacatatatgaaaaaaataaaattagatttttaataaaaataaaaaaataatgtgaaaacacaaaattctaaaactggaaaaaaaaaaaaccataggaagcccctatggatttatttcataataaccgactctatagggtccttacggagtcggttatttcataataaccgaccccatatggaccctatggaggcgatcttttcataataaccgactccatagggtccctacagcgtcggttgtttttaaccgctaagtgtcgcctggaatatcgtcagaagtgaattttactaaaaccgacattgaaaggccttaaaaactgcctctaaagcctaattttgtagttgtgttagtaattaataaaagacacaagttatgagtgttttagtcttatctgtgtgacatggttttattttgttgttagttcttttttgttcgtcattggctcactatcaaatcgctgttagtggctgtgaataacaagttccctacgactgaataggttgttcgtaggtagctacgtaccttacataatagttgagtgctcaagctatgaggttgaatgaacctgttgtaatagcttttactgttgtgtcttctgagcggtagatgaaactaaatttaggtgttcttatggttaactgcgatgctgcaatctttttcatctgattctattttttagtttttttgtcagacgatctaggtattaggtggctgattatttggctcatttttctaattttaatcctgatcgtgtctccaactgggtagatgtctcgatcacactattattttaaatgattgttataaataaaattgcatgatttattcaaaaatgagtgagaaagacacacataagatttatagtagttcactcaccgtgttgcgacagtaatggagctatgtctacttcgagtttttatttctcacgagaattacaagagaatgagctaaggcaagaaagtccattaaaataataaaaaaaatatgaaaaataataaaaaaaatacgaaaaattatggtggcctaatcttg

SEQ ID NO: 52337 - DNA, 1310 bp, Cannabis sativa
agggaaaagtgggtgaacctccacgaaaaactactcctaaacctcattaaaaagatgcgcctcttgtcaaacaaccctcgagatagggttgcatcgaaaggaccagccgcgaaagtccctaggcttagaaggcaggagatcctcttagtgattttgcaaattaaaatgggaggattcctatcagccattctggagatagttggtctacaggaaatcaacggcaacggttgtacgcaaagtacgagaggtacataagtgaaagggcgaggccacgcggaggtgatctaagaaaccatctaagtgataagatgagggcacgtgatctcccggaaagtgatatcaagagattggaagaatagattaatgctttgactaaattggtcaaaaagcaaaatggagtgttatcagactccgaagacgaagacccaaaaccttgtgtaaggaggatcacggagactctgctccctgaaaacttaagatgcctcacattaaattgtatgaggagagaactgatccgcgagcgcatctgaccaagtacaacaagatgatgcaagtcgcccacgttagtgatgatgctaagtgtttatgcttttccctgactctaattaagttcgcggaagactggtggaagtagttggctcaaggagcgattgatagctggaaggatttgtagtcaacattttgcaagaaatttattactgcgcgtgagaaggatatggaagtcggttcgttaactaatgtcaagcaacaacgaaatgaaagtctgaaggcttttattcagagaatgatggaggcagctgccaaaaccaaggtcagtgaggatctaaagttgatggggccagtcaaggctagctgtaggttccttattgtgggggaaaattttagagaaagagagctgagaccctaagtgaattcatggctaaggcacagggcataattaaccttgaggatgcgtatatttagtcctttggagtcccacctgcaccaaccccaactacagctgctctgagcattgcatctcaaactcatgccccatctttgtcccttcaaggacctcagttctctctgactgtctacggacctactgcgtccagtctcgtccctacgcaaacccatttccccaggtatggggcagcacagactgggtgcagcgtggctcccaaacaatctaagactcaagtcccaaattccagtgcgggacattcgcggggtaagaggggaggtaagaatcacagtcgtaatgattcagtaaagaaatcatgaaaggagtacaatccaaagtatatcgagtacacaagtctgatagatac

SEQ ID NO: 52338 - DNA, 1322 bp, Cannabis sativa
gtgtaattaagtatttatgccatacatatagggacacgggacaaactttcacagaatgtatttcgtgatgtacagcaaccgttaggtgggggagttatttgatctgaggactggggttgatctaggggtaattaaagttaaaaaatagtaacgtaccctgagacccatctaatgtaccacgaaatacattccgtcaaagtacatcacgacacaaaatcgtgtccctatatatatcaaaacttattttaattttcccatatttttgtaaatagccctactttttaagcatctccttgaatctatcccagcctcataaagtttctccatctcaaattatctaaattgagtaatttatgccctgaatttagaagtcttggaaggaggaaagaattggtgaggaacttttgagcggtctcttcctaagtgagtgcattaggaggcgaagattgataccatgaacgagctcggtctctcaaagagaaagagaagagtctaagtctgattatctctagtggaacttcatttatctttattgtgtcacaaatttttaagaaagtagacaagtgaatgtttgggtcttcattaggcaaactagagtattgattttgttgtaacatactaactaatgtaagtttcaattcggagttgttcacattcacttgctgttttttttacactcaaaaaatcatcattgacaaccggcttaaaatagtctctcaaggtccggttagatttggcaccattagcaacattgttattgatatttttgttaagtctgttatcactcatctttcttgctctagctcatagttctcttctgattgacttgaaagttctttcaacttcaggatcaaaaggtaagagaggtgaactacgagctttgtgcatgcacacaacaacaattaaaaataaattttttaagaaaactaaataaataaataataaaaaaatagattaaattttataatttcttcactatattaattgaaaatttaaactttttaatccctagaaacgccaccaattttttttttgcaaattatatatatatatatatatatatgcttgtaagtgcacaaatcgacaagtaataatagtagtcaagagaccgatatcgtcccacaaagattaaaaaataattaaagcaattaattattacaaatattaaaatctaattctatctaaacaattgattttgagttatgttagaaaattaaaagagaatagaaagaacgagaataacaaattaaagttgagaataatcagatagaataattgttaaggtttcgatttcaccctaatataactatgatttttatcat

SEQ ID NO: 52339 - DNA, 2230 bp, Cannabis sativa
ataggatgtgattttgtggcttttctaggattttttaacacttttctcttacaattttatttatttatttattttttgtggacaggttcaactgttttagcattcgttatgtataatgctagatggactagtgatggtagagatccgagactggaataataaggcatggtggtcttgtattctaaaagaaatacaagaaacttgaagttagacattctacaaagcatcggaccaactatcgtcccccatcggcctccaaggaaaaaacataattaaaaaactaaatattatcatcggacctaccatcgtcccccatcggcctcgaaggaaaaaaaaccataattaagaatttaaatattatcatcggaccaaccatcgtccctcatcatcccctatcatccacaaaaaaaatataccaatcgtgccatatcatacatacctatcgtccccatatcgtcctataataaaaaaaaagtaaggggtaagggacatcagaccaaccatcgtcccactaccatccttatatcaagccattaccatcaacctcaaacttcatatatcatagttgaactatcagacctatatcgtcctatcatcgtaccccatcagacctaacccaaaatttggaaaaaaaaatccaggtttcacccagaaacccccctctttagcaaattcaacaaaaaacataaaccaaactaaaacctacaatccatttaacaaaacaataatttcatataacacttatatcaaaaaatggataattttattttaaaaaaaaacactaacctttgacattgggttcgtgggtcgccgtggtcgtggagaaaggggacttcagtctgtcagtcacggtggtcgtcagtcgcaatcgtcgtgggtggtggaaaagggtggtgtttgggtcgtgggttatggtggtagttaggtcgcgtgaatccttggatggaaaattggtggggggtttgagtttttcgtttagagaagatgaggataccgagagagggaaagagggtagagcgatagtggctgtttgaaaatgggaagggtattttggaaaaaagagaaatgttaacctatttgaccaatattaatacatataggtttaggagattaattttagggtaatatatgcataaaaaatctggggtcttgatacgattaataattgtgtcatgttcgttttcaccatacacatttcgtgttataaatgtatcgacacaaacacgatactataacacgaattgccaattctatcgggagttaggactcaaaatttttttatttcttaccatgtgttaaaagtggtgtctatatcttcaggtaagcaatattatttatgaaaaaaagatttttacattaatatacataattataaaattatttacaataaaaaccttagacaaataatcataaaaaattaacgttacttagcaaataatgccgtgtattcaatatcattatcagccaagaatactgtctattcaattataaaaggaaaactttaaaaatagattggctcttgcactttttatttttattactcttcttttttttttccagttatctttccaagctacaaataggtgtctttttttaatttcttttaaaaaaaataattcattttctttatgaatagattttctttaaaaataatttttatttcacctctcgttattttagctccaaaaaaaaaagaaatacattcgtgattaattttttaagataatcattttaatatgtaagaaatatatacattttttttgtcattgaaataaaagcatagttttagtttcttatatttagttaacaaaaatatctaaagagtaactaaatgacttagataaaattttccaaaagttattagaaagtattttattattttagatctaaaagttacaatgtaatattttaaataaatctactttatagagtaatttggataattactaaaaaatagcttataatgaacttaccacataatttataaacatattattatataaattaattacgatactaatgagttaccttttataaaataatatatttttatttttctgcataaaaaggcaactttttttaccttttagctactttagagatcaataggttactgttgtccttaatttttcccagttgcccttgatttttcccaaaatacgtggacctggataaagatgacacgtggagctgagaggaccagctcttaaagaaatcaactaagtcttag

SEQ ID NO: 52340 - DNA, 866 bp, Cannabis sativa
tttttttttttttcattttcaagaactaaataatagtttaatcaacagtaaattgagagtctgttagatatttataagtaaatattaatgcttagcaccactaagtatcttattactgttaacaaaatcaagtatcgagtctctcacacaatttaatttaatataataattgttatagaatatcgctactcattcttaaggcgctatcttataatagtgctaaacagtactagtgcctaataacaatacttttttaaagtaacaaacaatgtacaaataaagaatttattttggattcaactatgaaccattattagctaagttttctttaaaaaaagctcttttgttgtatttttgttctctaaataaaagaaaggctgcccttaaacattacatattaacatgttctccttgaaagattgaatatgaatggacaaaaatacttagctaaaaaattgtttagtaccggggaggaggcaaaatattgttcagtcgtattaaaaaacttagttaatctatggacaacattaacaacaaacacatatactagagttaaaatgattaaaaatcttaggtaatcgaattgttgttgttgagctcttcttctttctttttcattaatttagatcaataaaaaaaacaacacatattatttatatagttttatttttatatatttattattttaatttttttttatttttgaaatacattagtggcggggtcccgctgctaatgtcttgtgtcagttttgaatattgaaactgacatagggcattagcggcgggacctcgctgctaatgcctaccgtagggcttaaaaatatataaaaaaataattataataaaattaataattatataaat

SEQ ID NO: 52341 - DNA, 1899 bp, Cannabis sativa
aattttgctgcaggcagtgacttagtaagtatgtctgcagtgttcttttcagttctatctttaataatttgaaccttgccactggatagattattttggatgaagtgtaacctaacatcaatgtactttgttctctcatgaaagacttgattcttattgagatgtaaagcactttgactatcacaatgaatgcaaacagtctgctgatcaatccctagttcccttgttatctctttgagccacaaggcttctttgacaacttttgtacaagctatgtatttggcttctgtagtagaaagagccacaacaacttggagattcaatttccaatttattgtacactagtttagcagaaacacatagccagattaggatcttcttgtggcaaggtcaccagcatagtctgaatccacatatcctactacatttgaggtagtatgacatgttccatatatgagaccaacctcaggtgtcttctttagatacctgagtatccatttggtttctttccaatgctctacaccaggttgtcccataaattttctcaccctactcactacatgacttagatctggtcttgtacagatcataaggtacattatactgcctacaatgctagtatagggtacctttttcatgtagctaatatcttcttcattagatggagcttgtgaagtagatagcttgaagagttgagtaaagggtgtgctaacaagtttcacattagtgaaaccaaattttgatagaattttagagatgtaaccactttcagagaactttaagcttctccattttttgttccttgtaatcccaatccctaaaattcttttagctgcgccaaggtctttcatttcaaattccttactcagaagcttcttgactttgtctattttgcccatatgttttccagcaattagcatatcatctacatataggagaagatagatgatgcaacttgagtacctaacgtaaacacagctaggcacttctcctgaaattaattttcagtacatattcattaaatcttttgtactatttcctagaggactgttttaggccatataggaatcttttcaataggcaaccatagtcttcctttccattttcttcaaagccttttggttgcctcgtgtaaatttcctcttccatggagaaaagctcttttaacatctagtttttccaattcaagatcctcagtagtaacaatgcttacaagtaatctgatggacgtgtgtttcacaataggagagaaagcttcattataataaattccctctctctgtgtgaagcctctagctactaatctagccttgaatcttacttcctcaatcccaggaataccttctttgtacttgtacacccatttatagcttatcaccttacaccctactggtttcttcactattatccatgtgctattcttcctcaaggataccatttcttgttgcattgctgagttccattctagcttgtaaatggacaccatagcttcttcataggagcaaggttcttcaccatcaaattctgatatatttagagcatagaagattaagttagcatatccaaacctgtttggtggtctgatatctatcctttccctatctctggttaactgataaccttgatgctcatcatcatgctcaaattctttacccgtttgttcttcaacttcttgttcaacagtgtcatctaccatctgaaccttctcaatttgctccacctcaatctgaactttcactctgatcttattaccagctatgtgtgaacccttttcttttgaaagatccttgtacatggtgttttcatcaaatacaacatctctactgatgaagttcttttaatgatttccttcttctatgctccacatcttatacccttttactccttcagggtatccta

SEQ ID NO: 52342 - DNA, 3427 bp, Cannabis sativa
cttcttcggaaacatgaataatacctggaaaagacatttttcttatctaagtgtaaataaatcttatcgttaatttttacgtcagtgtaaatacagtagactgatcaatcgtgggactaaataatttgaagcatataatcataattactttctactgtgatgacatcactataattgtggagaactatatgtttgggatttaatataacttatatattaaaactataatcatgtataaaacatgtaaacaaaacatatgacaagcttatatgatctctaatctttattgaaagtaaatatgattacaatgaaattgaattttatttagcgtataaaataccaacagtataaccaatacatctgatactagcatacttttccaatatccaggaaaatacattccacgtatatatataaatatatatgtatcaataaactttatcactaattatcacgttagtataaattcagtgtactgataaatcatgtagctaaatactttgaagcataaatcatgattattttccactatgtagataacactataatcatgtgatacaactcactttgtaactaaaattagttaaataccgttattttagtttactgtaacagtttttagttttctggtttttctgttatttctgtttttttccttctcttcgatcatatcttcctctatataaatgaaactcttttccaaggccttgcagctttggcaagtcttgaattgcaatctcatagattgaattgtcttagttcttagcatagataagctcttacatggtatcagatttcccttgactaccgtcactcatggatcctccacacccaaaaaatccacctcgttcttcagttcaaccacccaccaccgctgctcctacctcggccaatcatccatggaatccgttctgaaattctctccattcatctctcaccgttaaattggatcattccaattttcttgcttggaaatatcaagtaataccaagtgttatcggtcatggtctcaacgatatcattcttggaggagtatctccaccttaacgattggttaatggccaaaccaatcctgaattcaccacctggaaatggaaggatcaactcctgcttagttagcttcgatcatcaatgtctgaatccattcttggatctttagcacaattccaaagttcatactctgcctggcgcgctcttgaacagatgtatgcaagtcaatccaaggctcatcttctccaaattaaaactcagctatctaccattcagaaaggtaatctttccatttctgattaccttgacaaggtaaagattcttgctgactctgtttctgttgctggtaatcccatggatgaaaatgacttaatcatgcatacccttaatggattaggcccagaattcgatcctgttgttgttcatgttactagtcttgttgatgatctttcttttgaatccatgagagtagattagaaagacactgtactattgttgataccagcaacaaaatcttagcaaattttgctgttggccctacacgatatggaactaatgctccaaattgctcctatgccccaggcagaagttcaaattagcaatataacaatcgtgttccacctaagccatttggtatagatgcctacaccaatcctcgactcatttgtcgagtgtgccataaacttggtcacactgctgctgtatgtcattacaggtttggcaaaggatttgttacccccaagattggtgattctcgagcctttctaaaagaatttgatgactctaaggaacatcaagcttactcctcatgaatgatccctgattttgctattgatcacgaatggtatgctgatacaggagccacaaatcatattgctcttagcatggaaaatcttgacaatgaacatccctatgctggcactgattccctcacagttggtatttgtaggcatagttgtggcactgtgttgaacatttgcagcctaattgggagccaaatttggagttgttcttgggccagcctcaccattaggagttgttccaacagagacagcaggtgagttagataagtcattttccatagggttagttagaaaactagttgatggaaaaatagtattagatgattgatttacctgctgttggtttggtggagatttggctgggaactcttgctcattaaatgtaactttttcgtgcaatataggttctgcctgtgttgcttctgcaaagatgacctttatgttgtaatgagtatcccacaaaggtgcacttttcagatcgaatttcaagcttatgtgattggtagggccttaaatgtggaaaacaggatcatccaaagggctttaattaggaagctgtaatctggttgtttgtagaacaaagtctcataaggtgaggcattatgaagaacaggtgttgtaagcctgtttattacaaagacattgtgctgaaaggctaaccaccaatgtgttagatcgagaccaaattcaataagaagtgtcaaaccagattctgtaatatgcctatgctttctctccactcttccattttgttcatggtcatgagggcatggatgttggaactgaattccatgtttggtaagaaacttggagaatgacctgtgctctcctccccagtcagactgaacaattttgattgggagattgaactatttttctacaagctttttaaattcaagaaataagttgtaggcttgggatataagggaaagggggaaaatccaggtatacctactataatcatctataaagatgatgtaatacctgtgaccttcgagggagcaaatgtgtgaaggaccccaaaggtctgtgtggagcaactcaagtggttgagatgctcttgaattggacagagagtaaggcaatttgtgactttttcctattttacatgcttcatagaatctaacgccttttaaactatgtggaatatgcatgcttgataaaattttagctaggatccttggtgagggatgacatcatagtaacagggcccaacaagatggttatcaacactctcatttctgaattgaatcaagtcttttccattaatgaccttggttctctacactaatttcttggggttgaaattgttcgaaatgacactagaatatatctatctcaaaccaaatacatttcagatctattggttcgattacatatggagggtgctaagccttatcccaaccccacatcctccacacacaaactatctcttatagaaggagaaccctttatggatcaaactctctacaggagcacacttggagccttacagtatttgactttaactaggcctgatgtagcatttattgtgaacaagttaagtcgttttatccatgctccaacaacaacacattgggtggcatgtaaatgactattcaggtacctttaaggtaccattacagagagacttc

SEQ ID NO: 52343 - DNA, 3652 bp, Cannabis sativa
attgtattttttaggcgagtttattgaacgtatttactgctttataacatgagctagtatatttttcaaccaattcatacgtgtcatcaccatatatatatatatatatttttttttgagaaaaaaacctgtatccattagatgaaaccaaaaagtacatgatacaattataattgtaaagaggaattcttccacaaagcttcctgatctagacctaaagctgttctagctaaacaatgggcagtttcatttgcccctcttggaatgtagctaagaaaagctttaggaaaataagatagcaagctcttaatttctataacaaaagtgttaagatgcaaattatgagtgacatcaccatattatttactcaaaatatgaatataacaccttatataaaaataaaatatttataaataaagccattagaaaaaaaaacaattcttaaataaataagtgatatgaataaagaattatatatatatatatatataaattcttaaaaccaataaaacctcataaccaaaccatgccgcaggcgtttggtctgaattaaccaaattgccaaaatgacctcgttgattattgtctacagcagtttaaattattgcggtgataatttaaaacgaagtttgccagttctaataaacaactctactgttttttttatatggatctaatacttttttatttatatatataattaataagttaattattaaaattttaaaatataatataagtattattatcattaaaaattaaatttaatatttatttataattaaaaattaaacttaaacacttacgttataaattactgtaaaggaataatttcacaaaagtaatagattttgtagaaaaagtatacacacaaatcgtattgtttttcttttaatctgaacacaaaaatagtatagagtgacatattgcgcgcgcacgtgtgcattcaagggaggtagtacaaacaaaaatattgagctgttaccttcaaattcaataatatatatatttttttttattttaaaggcaaaaataaataaataaataataggtttatataagatatcccgagcttgtggaaaacggcgtcgtattgagtactcttttcctttttcccctcccagcacaaacgaaacagcagtattaatcaaaacgatctagggcttgaagtcgtttttgagtttagtcgttctgaagagaaaaacaaagtccaaaactcctcaaacccaaagaacccaaccaacgaaccaaccaacctattatgatataacaccactctccttcgcgctccaatctcctccctcccagacaatcctcttcaacacttttctacttttttattcagactagtctcctcagcttcggttcatcctcactagccatgccagccgaaggttactcatccttattgctctcactacattcatattttccttttctttcttttttttttgctcaactcttaaatttgaattatgactcgttatattgagattttggatattattttgtctttttcttgaattgggtatttggaatctgttttgtagacacgagtaattgttctgggtatttgtttgaatgagaccttttcaagtaattatagtgtttttttttttttttgaatgttgagttatgttggtgaagaaaaaacaagtgcaatggtttctggaatatgagtttcgtatctttgtagcttgaaaatttgtttttggggtatgtataattgtcatgcaatcaattcttgtttcactcatactcatacatttgattgcagacatgagccgtcggaaggagagattggtagatgaatctaagaagattgtggaaaacataaatgaaatgacttttgcaaacttaaatgatcaacaagtgcattccctgatgacgatgagagaaatagctcgtggaattgttaataacagagttgaaaaggtttgtgagagccacaaggttttatggttttatttgttgtacttttcatggtttaactttgtaaatttcattttctattttgatattcacaggttactaagagtgatgtgaaaaaggcattatccttcagtattgaaaagatggtaatggaattttctactagttgtattcatttattttatctggtttggtttggtttggcttacagtacgagaattggcaggtgggttcatgcaaggatgtcagtaacattttaagtagaataccttgtgatggtatggatgatgagcagactcagtcagtgtcacgaatgaaagagattgtttcgatgattgttacaagacgagctaaagtttcaacaactcgacgtgaacctgttgaatcagtacggttacaagccagaatgttttttttttttgtatttatttctgtaccaagctgaattttcagtttaactgaatgcaaattttataggtcagtggagtagatgcagagactgtggagagtaagatgggtgaggccttgatcccagcaaacagggatatagatattggtgggcttcaaagaagattatttgaaaatgaggcactggaagtgggggctcaggcaagaaataaagacagccagaatgagtccatgccatcaggtaatggtgctgtgcccctcataggggaacaagttgtaatgcacgttgatggatcagagactactagcaatgagatgcagattggtcaggtagaagggatgatgtttgacgacgtgcaattggtggtggaaattgatgatttacatactgaaggtggtcagaatgatctaatggaaattgatgagttaagagctcaagatggtaattacgagatggcagaagctgataggttacgaattgaaaatagtcagaatgagatgatggaagttggtgagttaagaattgtagatggtcatattgagatggtggaagctgacgagttacgaggtgaagatggtaggagtgagatggtggaatctgttgagctaagaactgatgagatggaagctgatgggttgagaactgatgatcagaataatgtgcaaaaaaactttagtgagacatctgaacctaaaaatacagataatcagaataaggtgtcactctcaccctttcgaggacctgttgtatggcccccaggtgggaaaataaccttagattgggtgaaaaatttgatgttttcatttgagcggtcttcaaagagggacccaccatcagagttttggtctctcatgccgcttgctgtggtggataaattacttaatgctgcttcaagtattctatccaaggagccaaattgtgtggcagttgattgccaaggagaagattctagggttgctgtagtgggtgatgtgaatggacaattccatgatttactcaatatttttaaaattgttgggctgccttctgagaagcaattttatgtttttaatggaaattatgtagacagaggtgcgtggggcttagaggtgtttctggtcttgttagcttggaaggtaagataaggcagtgataattgtatttgttggagcatactctctttcattgaacttattgtattcttaagcaccttactttttggtcaagtagattggaaatacctttgttttcttaaatgtatttaagtggtaagatattaagcttggtacactcagtacagtttcagcgtcatggggtctatttgattgttga

SEQ ID NO: 52344 - DNA, 569 bp, Cannabis sativa
cccattgccttgtctgccgttgctgttggatcttttgtcgcctggatttcaactagtagggtactgggggttttgggccgacgttcctactgagggagcctgtggtttgcctggtctaggctcaaaatctgcctgttgaatggcttctttgagcttgatgaaaccatatgctcgatcgaggaaatcagtcatagagtctacaagaccacttttctcaatttctttccatagctctttgagaatctcgatgcccccaatattgtggctagcttcccttctttagttaaccgtgttacttttgtggcctctatcatgaatctacttatgtaggctctgagaggctctcctggtctttgcttcacttcgaccaggtcttctaaatgcagtggaagttgtcgagaagaagagaactgtgcatgaaactctgaagagaaggctttccaagagttgaaccttgttcgtgataacttgaaataccattactgtgcggcttctaaaagtgtggcaaggaatactctgcagcgcacatctcctcgtaccccttacaaattcatttgcttttcaaaaat

SEQ ID NO: 52345 - DNA, 1132 bp, Cannabis sativa
aaaaaaaaagccatctcatgagcacaaattcttatttcccaattcatgaagtccttgtatgacaacacaaaaaacctaacaaaactcaatgcacgagttgatctattcaataagaaatcaataagaccaaactcctacaagaactgaaaataaatcttcaacaaagctgagtatttacacagagtaggaacataaaatatattatatatatactctgtttttttcattaactttatcatttattaattcaatttatcaactatctcacagctcaaaatgattttatatacaacctttaggtggctgtgtgttatcgtatcggttagggactgaggtttcttccagtagttgatctgaagcaacgattgggttaaatgaattgttaggatggttcttcatcctgaaatggcatctatacgaacttggtgcaaatttcaacgaaagtgcaggaacaaaaggtaggagactttgtcgacaatgtgtaggaggaatatgcgtgacttgagaagaactgactaacccctccattaaataaatgttcccagaataatcaaaacttgataaagaacctgtaacgttcattcacaaatgttctaaaaccattaaaaaaattgaaacaaagaagacaaatgaaagcgaaaaaaacagaggagagagacataggttgatgatgaaagagggagctacctctacctccgtacctcgagttctggggatgatgactgcgttggcgttggccagtgagtgttatcagatctgacactggaaagtgggcatgagatgggtttagtaattttaatttaagttaattacagtaaaaccggtgattgttcctttcctcctcccccaaaaaaaaaaaaaaaactacacctaaaaacgttcaaataaattatttgcaatcctttaaaagaaaaatccatacctaacgtatctataaaattataatactattttggtatctaaaataacatattattaattggtatccaaaagcacttattagtatactaaacaatctaaaaaaatcatacttattagtatcatatgcaatttgatacaaattggtatctaaacttaataacttcttattaattggtatccaaacaacttataattatattatatataattg

SEQ ID NO: 52346 - DNA, 1055 bp, Cannabis sativa
aaaataaaaataaaaatatttatatatctatataaagagagggaggcgtttgtgacttgacttgtgggctaagaaaatctttgttttgtttggtaagtatcaacatttaatctcaattgatttattttgataagttactttttaaagtttgatttcatatcattgtattttgtcttggaagatttttttaattggactatttttggaaagcatcttagtgattcttgtttccttttatttatttatttttaaaaaaggaattatttttgaaaaaagtgggccggtttttcgttgtgtttgtgggctggtagtttcctttcttaagttggtttccttttttctcctcttacacacatttatttaaaccaatttctttatcatttaatctcaccatcttctcttccacccgactactcttcctagttcttttgtcttctcttacttccttctctttcaaaaattcatggctaagactaagaacttggggcatcccagcaagatgatggaatccaaacctaccccttcaaatacttcacctctggctccaaaattgcctcctgctgttgcaacagcatcaaacctaggagattgatcactttctcggcgtgaatctcaaactgtgaagcccatgcctaaatggattcctaaacaagtggctaggaaatctgtgagacccatgaaattctgcacttcatcatcttcatcgtcgaagggttctcctcctcgtgctactgcatcgtctcctgctaagggtgtttctgcatcaactccaataagcccatcctctcacactcatgccaaagcctctgctgctgacaagggaaaatagcccatgaagagctctagtcctggtaatatttctccatctcaagttgtaaattccaaattctactaccatgataatcagcgtgattagattctttatgctacttgatagtttgaaagtgagaggaattatgatttgcatgctcgttgtgtctatggtattgtaaagtttatgcaatatcatcattgggaaaatactcttactggttttgaaggatatattgatggaa

SEQ ID NO: 52347 - DNA, 856 bp, Cannabis sativa
attttctttctcataaaaaaaaaaaaaaaaaagaaaagaaatcgaatcttttgatcacaaaatagcttgccgattaaaaaaatccctttaagaaaaaccagagtggcagagtgtaacataatggttttaagtgtaaggttggttaagtcttcaaaaaaatctttcataacatttgagatagcacaaataggtaatgaggttagaacaagtatttggtaagtcctaaggatcaaagtaattatagatgattgttcaatatacagaaagactcaacattaagcatcaaaatggacagaggccagaagcaaggctggaagatctgtgattgaaaagggaagacatccagctcattgatggctactgctattcacatcatgctccatttcttctgcatcctcgaaccgctgatcgttgatctgaagctgcaattttacagaaagccgatcaacgccaatacttttattactaataaaataccctttcttcttcagaaaaatgaaattacaggtatatgaagctgcattggacatgctaaaacaacagtttcaactggcatatccagacattcatgtttcacatgtggaataacagttgagattttcaaacaattgccgaatattttgccaaattgtatattatatcaccaagttcttaaaagacaaccaattaaagcaaaaactattaacgtaagtaattaatgatccagcccaaggccccaagctaccttaccagcctcagctacggaattcgtaattttgcactttataccaaatattttaataatgtttttttttcttcttcttgagttcagcaaatatttcattattgtgacataggaactcagatataaaatggc

SEQ ID NO: 52348 - DNA, 2715 bp, Cannabis sativa
atttttttctcgttccccgtctcgtgtgcttagctctagctatggtttctctctttctcgctcgtgttctctctaatttttttgcaggtagtggtggtggtccggtgggatggtggtggtttggtgcgatggtggtggttcgatgtgcttttggtggtacgatgggttattgtggtggcggtatttattgttgttgttgttgttgttgtttttgtttttgttgggttgttgtggtggttcgaagggttgtggtgatctaaaagtttatgtttttttttattattttttttgttcttttgcctaggttcataatcgaagcaaaaaactaatttgcattagggctttactatttgcttcagttataaattgtagcaaaaatcttttagcgtctgttactaagtgaagcaaaaaatatgactatttgtgtctatggttatagcgttggttacacaaaccgacgcaaattttttatatgtcacttaaaaactgaagcgaaaggccatttttgtagaagtgtccatagacagatggacagtctgagaggaccatatagactttggaagacatgcttcactcttgtattttagattttggaggtaggtggggagaacacatgtcactggtggaattcacatacaataatagctaccaagatagtataggcatggctccttatgaggccttatatgggagaccatgcagatcgccattgtgttaggtcgaaccagatgagcatatcactattggaccccgaattattattagtacaacctaaaagatttaagggaatccaagaaagacttaaggttgttcagagttttttaaaaagctatgatgatctccatcgacaagaagttgagtttgatgttgttgattatgtcttcttgaaagttactcctatgcgtggtttaacgagatttagagtgaagggtaagctagccctaaggtatgttggaccttttaaggttatcgagagggttggggaggttgcttacggattagactcaccagcacgaatgggctatgtttgtaatgtgttccatgtgtctatgctaaggaagtatactccagattcgtcatatgtcaatgagtatgaggccatccctctttaggaaaatgtgacttttaaagaataacctatcataatcttggtgagagagctaaaagaagtgttagttaaggaacagagagattccaatagtcaaggtcttatggaagaaccataaagaagacgaggttacttgggagttagagtccgaggtgtatatgaagtactttcacttgtttatttttcaacttgaggttgtactttgaaatttagggatgaaatttctttaaggagggaagaatgtaaggactcggtcaaaactgagaaaagaaaaaaaaaatatatgtatatataatagtaagtgataaaggaagcccatccccctgtctttctctttctctttctctttctctctcatcaatacaccaaagaaaaacccacaaccactaccaccagcaaccactctctggccaccgtctgacctcatgcactagaccatttaaatccctaagcgttgatgacctcaacccccaagcggcaccgcctctttcgccgtcattggcccaagatcgcaagtcaaagtttagaggttcaaacttcgaatggattttttgtccacctttggtgtcggtttgacgagcgtcttcaccactagactcatctcatcaaggagaacaatctacactaaggcatttcaccaaacctgctactttttttggtgacgattttgtagctccgtccctttttgaaagctttccagcaatatcgtgtactattttgacaaataattagcataggtgtgttctactcttcaaggtggtcattttgataaatactatccttagttttgatgatgttttcattacaccgatttctactgccactgatagttaatgtgcaccgcttaggtgagatttcataattttaaaattttaagatattcttgctatatgtcattggactcggttttaaatgtagaatataatgatgataattatttagccatttaatggtataggtgagagtgatatctaagattggactaaacaattagagctcaggacttgagagcttaggatcatctttttggataaagtttaacgacttgggagtggtagggactcaacttgattattggacttgatttcatatgtattgcataatattagacatattctaatttttatgatttacaaattgttcgaaaaattaaaaacttaatttccatatttttctagactgttctggggctctgaataatattcatgcagagtatgatttttggatttattcaaaatacaacccttatgctgccaaaatttttagaaaataaaagggaacatgttcttttgctattcttattatctgcctgcttttggttatactgatgagagacatgttgatcataatttgtgcatattgttatatcacaacctagctagtctctatgtcatcataggtagatcatgtgtgcattcacctgtaagtgaaagacctagaatctgtacatgaagtgaattgaatttgagccccggtattatggtggttatcaggtgtgactacccagtctttggatgttgttttctatgattggtattgagagttaggggtctagtggacggtgtgatatgcatttgacgtttgatttgtgattatttgtggtctct

SEQ ID NO: 52349 - DNA, 1311 bp, Cannabis sativa
ttggtttaacagaatatactttacaaataaaaggatattctgttaaatttaaccccaaaaaagttttcttttaacgccgttaacttattattcttataaaaaattttaaaaaaattctcagtcctaatctcagtcgtttcattctcacgacaatctcttccctcttcccttccattctcactctgaatcgcagatcatcaaaaccaacagcccgacgaaccaaagcttcctttcaccgactcctccatttcactctcccaatcgattgatcctctctatttttgaagaaatcttaatcgatgtcgctacattttattggaagaagaaatccaaatcgatgccgtccaaaaagttaatcgatcaaatattgcagcagatccaattctcacatacaacgattctgatgtagctccttcattccccaatagtttccctcgtagcttggatatcagctcagagggagaaaaatgtcgttcgtttcccttttccctctcttgatttttgatattttgtaaagggcaacaattctaattttattgggttcactattgactatcttctctctcatacagactgtactcactcttattttcttccatgatagtgaatctcatttgcaagcatgaaggagtcagaagaagagtggcatgattataagatagatgacaaaaagtgcccctgtcagcgagtaccaacaatttatgatattaatagccatagtctctgattttgagaattaaatataaggaaagtttaatttcgatatattattatacattatttctgtgtacatagaaaccaagtttatgcattatcaaccctgggttatggtaatttttgttacaaagcaaggatcattcacataaaaatgggctactaagtgcttgttttaatataactttaggtatatttgggaatatttcacattttggtatgttttagaatgagactcaggcagctcattgcatagctacagtttctgcaaacaattctgaacaattattttctatgacaatttggttggtttatttatatctggattatctgtttacatcgttttgcatgaactattacatgaggattttattttattagttttcagagcatttgcttgtctcttattttttacttttcttaaattgttagtataaatcaatatttagttaaattatggcgcaagagtttcatatatgttttgttccatttgaatgttagatacttttgcaaatttgaaatcgaccgtagctttaaatttgtttattgtaataagcttgattgaaagtttacatcgttacatgaactattacatga

SEQ ID NO: 52350 - DNA, 1722 bp, Cannabis sativa
aagggttccccctggtaagctaataaacgaataccacttgtcattggagtgggagcaggcttggcattgctcatttgagcatttgctagaaggtcttttgcatactttgcttgagacaggtgaagaccagcatctgtttgtgtcacttcaataccaagaaaatatgtgagagagcctagatccttaagagcaaagtgcctgttgagtgatgcaacaatggtgtcaactgtggtgttatcactccctataatcaacatatcatctacataaactaggattagtgtaacagaagtagatgtatgtttaataaacagagaatggtctgatttggatgagattaaaccaagagacaaaaggcagttttgaagcttcttaaaccaagctcttggagcttgtttaagaccatatatagccttgtgcaatttgcacaccaagtctgtctttccagggacctcaaaccctggaggttgtaacatgtacacctcttcctgtaagtctccattaaggaaggcattattgacatctaattgtttaataaaccaaccttttgataaggccattgtcaagacaaccctaatagtaatttaactactggactaaaagtctcagtgaatcaaacccatattcttgatgaaagcccttagcaacaagcctggccttatgtttgaggatagatccatcaggattttcttttttcttgtaaacccacttgcaaccaattgccttccttcttggtggtaatctaacaagggtgtaggttttgttttcgaccaaggctaacactttatcactcattgctttgttccaaactagttgacttagagcttcttgaagagatgatggttctctggttactaaaagagcttttggtttgtggatgccagacttggatctagtcttcatatgatgtgtgttatgatggtcaagaggttgatggcatccctgaacagtatttttgccaattgtcattgctggagtaacaacagtattaactaatccaggtctgctcaaaccagaagtgagctgagcatcagttgtagcaggaggctcaattgtggtgagatgctgtgtgtccagatgttgttcagagtgagtaacagttagctgaggatctgtagcaagagaggttgacaaagtaacacttggagtatcaacctgagcatcattctgtctagaagattgacctacattaaaaatagatggttgacttggaagccaactgttagtagtagaaaccagttagggtggatcaatatttgttgtagcaggttggtcaatctcagattggggattcattagatcagatatggaataagtgcaatgatgatgagagcatgtgcggattataacagacactattggggatttgtcagaaatttttaagtgagatgtgtgctgactgagtgtttcatatggaaaagaaaactcttcaaagattacatccctagagatgtaaagtctcccattaggatcaaggcacttgttatcctttgtggttgaggctataccccaagaaaatgcatagtgtggacctatactcaagcttatgcttattgtatggtctaatatttgagaaacacctacatccaatggttttaaaggctgtataatctggttgaatgtgacaacagttctaaaggcttcatcccaaaatttaaggggtaaggaggcttgagctaatagggcaaggccattcttaacaatgtgcctatgttttctttc

SEQ ID NO: 52351 - DNA, 1346 bp, Cannabis sativa
caaatgaatcattatgtcaaaaaatgttggaggaaatatccactctattttacacaatattaaaataaggtcttgttgagcaacgtccatgtctttaatatttatagtcctagaacaaatttgcctgaaaaagttgtacaattaaaaaatggtggtcgatatagatttcgggagaaacttacaaacaccaacagaaagcaatctttacattattacatggcagtcgtgtgacttcaacctgataacatttgttaaatttttgtttaatttctttttcaaattcgaacaaaagccatctagaaatttcacatctctaataaatttacaaaattagagcctatcattaggtttaagaatgtaatgagcaagcgatttcaacaatttccccctctcatcgtcataaatccacaatcattctttgactcctaacttcttcaaatcatgtcttgcattggtagtgtccttagatttatcattgtccaagattgtgcccaataaactatcacaaacattcttctcaatatgcatgacatcgatattgtgttttaaaatatttgaacaccaatagtcaagctcgcagaagatattttttcctccaattttgattttttataactcgcctatgcttcacactaccaagtagctcatgatttcctgggagttggggtgggagtttgtttacttgttctaatacatcctcataagtgaaacgtctcgaaggaggtcttctctcaatttgtccatcgaattgagtatccctctcattcgatggttatttggcaaaattcttctatgaccgacataagatgtcttaccaattactcaaattgaagaggtatcttcattacaagtgggacaagctttgtatccctgatcactccaaccagacaaataactacaagctgaaaaatcattaactgtccacagaagagctgtgcgctgcctgaacacaatgttggttcgactatctctcgtatctactccgttaagccacaactccttcaactcatcccccaagggtcttaaaaataaatctatgtccatactcggtgatttttctccagaaataagaatggtcaacataaaattattatctttcatacataactaaggcggaagattataagtcaccaaaactacaggccacatgctgtacgcttggctcatgttgccaaatagattaaagccctcagcactaaacctagacaaacatttcgaggttcactagcaatattaggatgtttggcatcaaagtccttccacgttgcaccatccacaaagtgtcacatcaccccatcatcttttgatttaccagtgtggtaccataccatctattttgccgtatg

SEQ ID NO: 52352 - DNA, 780 bp, Cannabis sativa
gttgaaagaaagacaatgggtggatactttgatcgattttgatggctatgtggatcgaattgtcaaggagttttatgctaatatcactgatgagtgccttaatgaggattcttttatgtttggcaaagtctttgtcaagggacattgtattccttcactgtgaaggatatggctgaagctctcaatctacctatgggaattgagccaattgatgtggagtttgatcgtcaaaaggtgttcagatatctcactgttgataataatgtggaactcttcaacacaatgcatatgtctcaactcacctatcaccatgctgctcttatgaggtttgccctatctaattagtttttttgctcaaatctggtaaatgtttcaaatgaacttgccttctttttgtataaagtttctattggtgcaaaaattgatttggctgacatgatttgggagcggattgtctctcttagaaagggcaagaaacctagactcaatcttatttttcctcacttaatttataagattttgtctaaccaagaggagttgattcttgagaatgaaaccacaaaaatgcctgctgttggtaccactttcaaagttccaaagaaacctcctcaaggaaaatttgctaagaaaaaggctcggtctgcttcccctagtgctactgatgaacctgttgctgcatttgcctccacttctacttctacagaaatggctgaattcaacttgcatttgggaagaatggagacaagtcaagccttacttctcaggaggatggacaacatc

SEQ ID NO: 52353 - DNA, 718 bp, Cannabis sativa
tattaatttaaatttattttaatgtcatgaaatagtaaaattgttaaatattaaaaaaaaaattagtgataaactcgttactaatgtctatcgttattcacggctaatacccgtcgctattaataattattagtggcaaatcttagtccgccactaatactaaccaatagcagcgtggcattaacggtagactcatctgccaatgatgattaatgttgtagtgctagctcatatatacaagaggagaaatgctaaacggtactactggtgcctagcatccttttatgtgtcagtatcgctattggtccaactaaatatcgagttccatatagtttaatataatagcttttagagagtatcgcaacgcgacattgctcatacaagagagttaagatgttaatttgattacaaaattaacattggtgggtgtttattatcattatcatatcacattttatggttaacaaattttatagtagttattaaactaaaataaacgtaatctaataacaatgtaataatatttctatttcttcctaatttgtatattttaagatctcctagattgtgagatgttgtcctatgttgagatttcttagttcttggtttaatttgtcattgagtgtatttagtgctaagcctatccaattcagtgcttaaaaataaaaaatattcattttaaaaatgtacataaatttttttagtaattttttaaaat

SEQ ID NO: 52354 - DNA, 1045 bp, Cannabis sativa
  modified_base (571)..(587): a, c, t, g, unknown or other
  modified_base (1007)..(1007): a, c, t, g, unknown or other
aacccaacaataatgtatatatattcaaatttgttttttattgttttatcatatagggtaaatagcggcataagtacctaaaattttatgtttgtaagcagcataaactcaatagtgatttttagcggtataagtacccaatgtttataaaactgtaattttctccagtttcatcagtacagactccgttttgaatttactaaaagaacatttgaaattagctgatactatatgtttctatctagacccaatgatctagaatctgggtcttatatgtgccctgtttaagacaataatagagtctgtactgacagaattagagaaaaattacagttttacaaatatttaggtacttatacagctaaaaatgaagattgagtttatgtcacttacaaacttgaaactttagatatttataccactatttaccatatcatatatctttctacataaaatgtggttatctaataatttttgttggtttaaccgttgattttaagaatataagaatattctattaaatttaacgatgttaatatagttagttctataaatatataaatattaatannnnnnnnnnnnnnnnnatttaaatatatatataaatattattaatattatttttttatgtcaattaaacttactaattttaaaataatttaaatatatatataaatattaatatattatttgtattattattattttttattattattttaaatattggcagtatgttgaatcttaatattcttcaactctatatttatttttctcaaattttaaaattttaaatattatattttaaaaaaaaaataaaaaattaataagtgatttttttaaatttatataatttttaaaaaaatatataataaaaatagaaattaaaaaatataattaaatattcaacataacaataatctaataaatatatatatatagattagtttaattccaattaatgattttatgggattagaattataaggagttcattccttaataantttaatgctgtgatcgtgtttatgtgttgaaattaatt

SEQ ID NO: 52355 - DNA, 546 bp, Cannabis sativa
caaatgtatttggcaaatcattaaaaaatagtttatttctaaaaaaaaaatattattattatagataaataatatttaaacctttatttttttttaacaaaaatatatattttatatttttcataattttgtgttaacaaaccataacaacttaaagattttttttctctttttcttaataatctatagtctcttatatattcatttttttaaaaaaaaaaataaatatgataaaatataatttgaaaatactatgaattgaattttcaacgtacttggaagtccattgataatttaggtgtggtagatactcgcacaacatctcctatttataaatttgcacatgcctttatacaataagatacaaaattatggattcttgaaataagaattaaagtagtggaggaaaaataagactctttgggtaagcagaagtaggtaaaataatactcattatgaatgatcgatattgtcaaagctcatagaggcatacccgtatttggcagagtaggtgaacataatcgtgaaggaaataatctttacatg

SEQ ID NO: 52356 - DNA, 1397 bp, Cannabis sativa
gctctcttggcagtctaggtcgcatcaccttggaagtttgatcaggtggatagaaaaagtaaaatgtagcaattttcgcaaactcatttactctattgtaatggcagcgctaatttaccatgtgtggcatgccagaaatgacatagtgtggaatttaactgatgctaagaagaatgtggttgtaagtaagattaaaaataatgttaaagggcgaattagttggttttggcctaaagaaaattagtgctacaaatacatattggttttctaaattgtaaaagagtgaaattttaaaatatacttgtataggggccattttcataaatcttcactattagattgtaaaatgattattagtataataaaattttagctgattcataaaaaaaatgtatttaaaactaaaaaaaataatattaaataaaaggatataacttatttctgataatgttttttatgtttgatttttaatttaaaataaatgctatatttattttaaggattgaattaaaagatttatttataacattatcaaaacactaaacaaaaaaaaatagaagtgagatatacaatacttgactgaataattagggttgaaaatacaattaaattttctaaatctctctctctaaactcacgcaactctctctctcttacacgtctatctctataggtggtatgtgttgtgttcttttttatctcagtcaccatattttatgaattgagtacagactgtgatcagtaaattatatccattcaaattaaatctaataactcactatattcgtagagtgttgagtcttctagagtgttgagtctgtgaccaacatcaggtctgtatgctctttatttgtgtccacattaatacaagcgtcacattattcttcaacctaaattcaaggtataatttcaaaaacatatatataaaaattggtgtcacatataattatctctaaattcaattcctttttcacttgtcatgctttccttattatatcgtgtccgtcatttcatttatatatacaaaagccacgtgtataataaaaggaatttttataccacatattaaaatttttaattttttttcttgtagggtggaattttttttcaaaaatactatattttttttcgtaactattgtgtaaattttatattgtatattgtattaagttttcactgttattgtactgttgtattttagtttttctatttttggttttaattgttttttttttattgtttaaaggttcttttaagttgatttataaaaaaataatatttttgtaaaaaattcagtgtagcaataaaattataaattgttattcaaaatttaatatatttttgtaaaaaccctacaatttatgtacgagtagtgctgctttttttttttttttttt

SEQ ID NO: 52357 - DNA, 2913 bp, Cannabis sativa
atcatcttcgggccccctcacctcaagcgaaccctattcccaaatcccaaagcccaacctccctcactctattttctcttctcggacctttttttttggtattcctcccccaatggccctctcttgcttcattccaccgtatcaatttcactttggaagaaccctactctttccacctcttcttcttcttctcgatcattttttgctggagaaatctatgttcggcatcgaatttggatacattggccgtcaggtcgcaaaaggagaaggacgggaagtatcgtgatgttgccagcaagaaagaggaggtggaggatttgaaatcttggatgcacaagaatggccttcttacagataagctttccttttaacgagaagcataaacctattcactacatttctgctagtgaagatcttttggtaaatttttcaatctatttggttttctttttgtataaattttgaatatattagttctttgatgaaatttgttgaaattatatgtgaagaatggggactaaaaaccaaagcacacattaaagggtcttcccagataggaatagtaatagctggagtcgacgatccagaacaccattccaggagggaacaattagccatctggaacttctttctgaaggagggcaggctttccttggagactccttccagagtggataagatagactttcggaaacttccttccggacaacatctatcattccactagacttcttctacatggacaagttagacttctaagaacgcccttccagatggcttttaactttacacaacaagaaaaacttttgaagatcttaatatttagagaaactacaccacaattttttcatagatggagcaagaactttcccatattttgcaatttatttatcctctttcatcctgttatgataataccattttatgacataaatgtgggagtttgataggcctcctctcacattgatttactctaggagagcgaagaaaagtgatgtggcatgttagttatgtgaggaatttttgagattgggaaggtgcatcttcttcagtgcacactaggctaatataaataaggaaatatttataatatgggggtgtgaatgatttatgtaattcctttattttcttccatattgtaaggagagaccaaactcttgaatctcttagcaattattaatacaaaaggggttttgctccctatttcttcaaatttcttctatgaactctgctactatattatttgtgacctatcaattggtattagagacaccgatctttggccatgggtccaaagaaggatgttctcaacggtatggataatcactttggtgttttccaaactgtggtcaataggcaattgggtgaactgtgctcgacctttgaccagaaatttgagttcgtgtctggccaactagcgatggttctacaagcccttaccgaccttcaccctccttctaaaactatggtgactagcgttgatcgacagaagaaacccatagacggtgagccattgttgacctcctttccctccccattgactttcggtcctccacgtgatttctaagctccaccatttccgctgccctttccacccgtctgctcagatcgacgatcccactcattttttggaacccctgttccattcgggctatcgtctccctcaagtggagctccttatcttcattaaggataatctagagggttggatcttcaagctcaaacgctatttgttgctcaatcatctctccgatgtccacatgttagaggcgatgatgatagcattggatggcgacgctctcacatagttctagatggaacaccaacgatgtgccattccatcatggaccgcttttaaacatcttttgcttatgcagtttaaggccattctggttggggaccacaacagaggaatttttatttgggacccaagaggctttggtgaaggattatctgatctactgggaatctctcgcttcccgtgtctccagcatccctaagcacattttagaaggcaatttcgtcaaaggcttgaaagatgagatcaacagtgttgactcactaactgcattttgtttctttctaagttcaaagtagaacaatagtgagttgtcacttattattttcattggtggtgaccccgagtataattggtaatgtatttttatgagtgttgctttgatttcattctttactaattctaataaattgatcagactacagttggttagtattattagtccaatcattatgcagtcttcatattttgtctcctctttccattgccctccatattgaaccacacacattattgagtccattcttacaaaatattgtagataaatagttaaattttttgatttattcggaattcgatttttttttttttattgtaaattatacgttttttcatgagatatgtaaaaaactggtttatgtatatgtttattttgctttcgtaataagtttttactttattttttgtaatagatgtattatagtaattggtttttgattcttatccttcaataacttttttgattacgcgtgtatatgttttaaaaaatagatttataatcttacatttttagtgtaacaggtaattagtttgtgaaactttttaatctcaatcaatttgtattaattcacaactcattaccaagaaatacaaaaacatatagttcttgaccaaaattcatctttaaattatatttatatatatatatataggggaaatctagtgtattcccctttctttttatctcatgctataaggaagttaaattaaccaataagaataataaaaaaaaattatacacttgatatcagtgtactccattacagctaatttttcttttaaaaaaaaaataaaaaaaaataaaactactttatttcaataaataaaaaatttat

SEQ ID NO: 52358 - DNA, 960 bp, Cannabis sativa
aattaagcttatatttatttaaaatgtatttatttaaaagattataattttaatcaatatatttattatatttattacgaaaaaaaatattcaaaatatacattaaaaaatacaataaatatacatctccatttaatccctaaatatatataacaaaatataatatattaaattgggctgagagattccttttttgtttttttttttcaatattttaataatcattttatattcttatataattaaggaaacttatcaataataccatattatagaagtcttcctattactattgtttaatcatatcaagctttatcagctatacatggaaactaattatggctttgtttggcgttaacatgttattatagaaggaatagacatcattaatatctgccttggagaagattactcttccagcggatttccactacagtgtcgttttatattcttatataattaaggaaacttatcaataataccatcatactttggaaattttcacttttggttccttcctttgatattcatttctttccagagttattactttgcttactatcttgttttgaagcatttatattagatttcattacttgttttcgttaaccacattgttttaactattggatttcattgcttatttattacaaattttgattacatagtttaaaaggaaatttaattttctttaaaagaaatcttccaaaataccattaatataaaataataaaaactcaaaataatttcaacttcccatattaaaattttattctcttcaaataacattaatatataatctaaaaatagatagtatcttataaaaaattattaaaatactattgatatatttgaatctagcattggcctattttagttgttgccattttctttatacataaatgagtaattatttcataatttctaaaagatattataattatttattggaaatatgtt

SEQ ID NO: 52359 - DNA, 1146 bp, Cannabis sativa
ataatctggattacattgaaacagaattttatttagggcataaaacccaacactagggtgctatgttgatgacttagtttagaaggaatttatcgtttccagagaaagataaatgtcacaacaagaagtttcttagtactaatggtaagaggttaaatgcacgcttgtgtatacattaaaccagaatcctactgttgagtgggagttatcaaaagtgtaatccaataagagaacataaggatacattcaagaaagaatctctagattaaaagtgacctatatgttagatgataggggtgacattttttgaacgcttaaatgttcatcaactgaaaattttatatttgagatggtgattactctgcgatggagaaattattctagaggggtggagaaagccatttatactatcttagttccaccagtgaaactaaatgacttagttgtttttgaaaagcactagaaagttattcaaactgacgaaagttcttgactattttatctctattccattttttggatagggtgaaagttgagtcttttgtacattcaaatgcacttatcaggcagtaaagaattcagtatcccaagaggagtaatgtatatagaaaaatgaaattttacaatgtgttgtggacacaaaagtaagtaatggtggagaaaattattgcttgatacgaccttacagatcctgttgtttggtaatgttaaacacactaaacttgatatgaatatcaagacaatagattaattgaaatgcacttctagttttatattagagggagtttgttgggattttataccctaaataaaactcattttaatataatcttatttactatgaataaaagattagaaatcattaaggtttacatgtagttttcatgagtctagttttaatatacaatttctattaaatccagaacatatagttaatcataattacagtgatgtcaccatagtggaagataattatgattatatgcttcaaactatttagtcccatgatttatcagtgtactggatttacaatgacgtgaaaattagcaataaattttacttacgcaatgatatgtggaatgttatttctaaggctttagcaaagtatactaatatcggatgtattggctatacatcgaactggac

SEQ ID NO: 52360 - DNA, 857 bp, Cannabis sativa
aattttttaattttccataattaattctcgatactgctaaactgctaaaactatactattgtgactttttcgccaatctaccaaatttttattgttgtcgataataaacatatcaatattattacacatacatatattaattttctaatattaaatactaatcttatatctgcctacttctataaatatgttttaatctctaattgcacatcatattctatgttttactatgataccaattaattaataactttccatgtctaattatacagtcattaaaattatttcctcgttaaaaggtgttataccgaaaattcgactgccatctcagtggaggacacgtgttacgataaagggaatatggatcgttgcaatcgcattatatggaataaatcattaattacgtgagtatcagagtatatatgtaacttgtagactgaaaagtctcaggcgaggaactaatatacaaactggtacttagtatattagcgagaaactatatatcgctgaatgcgaattgcgagacatcaaggacactacacattggaagacgaaagcgacatatatccattgtgaaagttcttagagtacaaactacgtacaacggttatttcgactcaaaaccaagtaagcgaggtgcccgtctcgctatgggaagacttcctatagcttcatctagctaacgtcagcaatgattacaaccctggcgagttagaagataacattcaaataggcttcaaagaagtctttgtaaataagaaccgcaatcgacactagacatacatcgtcgacctcggaaggaagaatggccccagctcgctattgggatcaacggaaccaagtttctgtcgagacat

SEQ ID NO: 52361 - DNA, 540 bp, Cannabis sativa
gatgatgatgttgtaggtttgggagatgaggttcaaaatcttgaaattggagagacttccatgctccttcacaaactcccaaagaggaaccacccgtggaaatggtaaatgaaagccaacaagtcaaactaagtgcaaattagattaagacaaaattaattataagctatatagccaattttattgaagcagttgttttttttaagtaaaacaacgtgtaacaattcattttaatttcttcatatttgtttaagcttcttgctctgtatttcgttcttcgtgcttcttcaatttatatttatgacactatttttagtgattaatgatgatttgatatatcttatgtattatttcatataatggacaaaataaaatctgcataccagtattgttaaagatataatgatcaagtgggaattggcttacatgactttgacctattataactttggatgcaaactcaaattaaaacagtaagaacacacaattgaaaagcagtcaatgaagtaaataaagcttatatatgttggaaattatttt

SEQ ID NO: 52362 - DNA, 1935 bp, Cannabis sativa
  modified_base (1670)..(1689): a, c, t, g, unknown or other
cttagatgtaagtattcaaatctccatatataagtgtaagattcaacttataacatgtgatgtttactcatgtgaaatgtgaataattcttaacttgtactgatatgagtgtaatgagtttcttaataatgtgcagataaacctcctctagctgatttagagtactttctggactttcaaactcacaggatttgggctccaatttacaatgaccttccccttggtcctacaacaaaccgagctactacatcgggtgcaatccagttcaacatgatgggaccaaagctgtatgtgaacactcatcaggtaaccatgattgctttgtgctcaccaaaacaatttttttccttattgctcttgcgtccaaggttcaaattcaaactaatatgttgtcttcaacaggttgtggttggtaaaacaccagtcaccggaatgcggttgtatcttgaaggcatgaaatgcaataggtactattcttttactatatcttatggcattaagttcatgtcaaagcaataggtactctttatgagaactatgtcatctaattcagttttgtagaattgaatagctgtggccacattcttcaaaaacacaaaaacactttcacattccttattcatttagttaagataaatactaaggggcacatgtgccaaacaccacattaggtgacatatcattattaacattatttactatcggatctcacacattttgattagcaaacataattatcgtgtatttatgagaatgctctgtcttcaaggctaggaattcacctccagcacctaacaaactgtccagttatgttcaaagacaagatagacgacacaacaatatggcgaggttcacaagacatggccaatcacgagcagtacttagaacctatcaatggaaagaagttttcccatatctgtacaatacctataaaatacaacccccaatggaccacaaagaaagatgttgttttcatagtcacaggggcacaactccttatgacaaagcaagactcaaagaatgttcttcatcttaggctcttgttttcgagggtgtcaaactgtttcattgctcaatctaattgggcagaatgttcctcagaattttcccaaaagtctggtattttctcagctataagtaacactttttcaggtactccacaattgcccaaagataaacaacctgctgtgattgtggattctgccatctttccaactgggcctccagtttcccaacaaactccaaagcttcttaaatttgtagatacatctcatttatgtaaagggccacaggataatcctgggtattggttagtcacaggagctagattgtacttggagaaaggtaagataggtttgcatgtaaagttctcattgttaaacaattgttcatgattataaaatctatatactactcaattattacattttttttttcataatctactatgttgccaacaggttattaataaacaagaaatctattttttgatttaatttaatttaaattaatatatctaataaaaaataattagtaattataattaaatttattggtttttttatttttatatttcaaaacaattttttttatttattttgtatttttacgaaattctacatagaaattcatattgcaactagcgttgcaacctaaattacaacaaaaannnnnnnnnnnnnnnnnnnngcaactagcgctgcaaccacttttgaaatccaaaccgtaaatttgaaagaaaagttaaaaaaaaaatatatatgggataattctccttacatttaattttaaaataaaaatctcaattaatatttataataaaacaaaatatattaagaattaaaaggttaggaccctttgacacaaatttcacaaaagttaaaagttattttttaaaaaaagagtgctaccgtcaacctcttattacaatctctt

SEQ ID NO: 52363 - DNA, 3470 bp, Cannabis sativa
tttttattgtgattaaaaaattacctttagtcacaaaaaaattatgttataactagaaaattgtcactaaaaataacacttttttttatagtaatacaaatcaaacctagtataattaaagaagtaaaaataatttttattggtttgtgaaattattaccaaaccttgatcaagaagatatttctttcaattataacttcaatattacatttactcgaattttctcaataagcctttttgtttgagtaaatatagttagttaggatgaggctattataatcacttgtacctaactgaatttgtacctaatctttgtattttttttttctctatataataataagacactcttgctcaaacgattcactaggtttagactttagagtcatgattaattcccttaattacatttctctacactttattgagttcacatggtatcacattttgtttctcactttattgatccctaattaagagagaattaatacaagtagatagatgtatataatgtcaatcattagaccaataataatgttagttttactaaagaatgtgttgtgcaacacaatgaaatgatctatatatctagtgtctatatctataacaataatttctatgtaaaatgaaatcgagcaatggtttttaattaatgtggttactaattaatcagtctaagtagagagtactccacatagagatggacataacctaagattaatcaacactaaaaaacagcatgaaggatagccaaaatttcactaagatttggcgaatgtgtagcaaccaattgtaaagaccatacaagaggagacaattatagaagggaaatttgaatgttgaaggccaagtctaatctgccgtggtgtataattggtgaccttaacaatgtcacttcgcaatccgacaaacgtggaggtaattcttatccaaactggttaattgatggcttttgtgaaactttaactgagtgtgagttagttgacatggatttgtttggttatccctttacttgggaacgtgggaggggtagttcggaatgggtagaagtgcgaattgatagagctcttgtgagccaaacgtggcttgatttatttccttcagggaaactgtggaaccttgaggctacaacttctgaccattgtcctcttaacttggttctttctcattcggctggggctgtcaaagttagagtttttcgctttgagaactcttggcttaaagagcctctatgttttaagattattgaggatgtttggagtagcaattcgggtagtcatgttttggataaaataaagttctgtagtgatgctttgcttatttggggaaatgactattctgggaactttcaggaaagattgaataagtgcaaggctgagatgaaaaaatggaaaaggggccgtgatcctttggcggtgcaacaattcaaagcggctgagcttgagttcaataatgtcttacttcaaaaggaggttttttggaagcaaagaagtaaacaactttggttgagagaaagtgatcagaattcaaaatacttccatgctatggcttcttctcgtcgaagaaataacttaattcataagcttcggaatgttgatggtggttgggtaacttgggaggatggtcttccgaacttgatgactagttattttgggcagctttttactccgggtttggtggaagttcaagaggttgtgggtactgtgtcaggtgttgtgtcgcaagctcataacactatgttacttgagccaatttctgatgaggagataaggagagcgttgtttcagatgcaccccgacaagtccccgggaccagatggtatgacaccgggattttttcacaaactatggccggttgtaggagatgatgtaaggttgttggtgcggtctttctttgactcagggtattttcctccttctttgaatgaaactaatattgttcttattcctaaaaagaagaatgcggagtttatgactgatcttaggcctatatcactatgtaatgtcctgtacaaagtgatttccaaggttctagctaatcgattgaaactagtattgcctgatgttatctcagagtctcaaagtgcttttttgccaggaagattgatttcggacaatatcatggtgtcttttgagataatgcattacttaaaaaggaaaagattgggaaagtatggttttatggcgctcaaactcgatatgagtaaggcgtatgatagagttgagtggtcatttattgaatctgtgctagtgcgtatgggttttgatagaagggtggttgctttgatcatgttctgtgttagcacggttcgctataagattactcatggtgggcatactttggggcctattattccggggagaggattgagacaaggggatcctttatccccttatctttttcttatttgtgcggaaggcttttcatctctgttgaaggactatgaacggcgtcatcgaatatcgggcattagagtggcgaggggggctccaattgtttcacatatgctttttgccgacgacagttatgtgtactgcaaggccaatgtggaagaggcttctagtattctacagatgctacaattgtggcttcgggacaacaggtgaatttctctaagtcatcaatttttttcagcaagaatactctcgctgatactcggtctcaattatgtagtatgttacacatgactgaagcttctgataatagcttttatcttgggttaccttgcattatgggtcgaaagaagaatgcgattctcggttttcttaaggaaaagatgaaaaagaagatattcaattgggagagtcggtttttatcaaaggggggtaaagaagttttgattcgatctgttgcacaagctcttcctagttatgctatgagtgttttcttacttaccaaggagatttgtgccgagttggagggtttgatggccaaattttggtggaagtcgcaatctaattcctcttctaaaggagtgagttggatgagttggagaaggttgactaaacacaagcatgccggtggtcttggcttcagggatcttagagattataacttatcctttcttgctaaacaaggatggcgtttgctaactaatgagtcatctttggttagtaggatgtataaagctagatattatcctaatggtagtttcttaacagctgcattaggacaaaatccaagctttatatggagaaccattttcgaagcacaagatgtggttaagcaaggagcaagaaggttaatcggatctgggcaaacagtcagtattttgaatgatccgtggttacctgattctaccaacccgtatgttcaatctacacaccctgctctggttgatcagcatgtggattctcttatgtgtatggagggtcattcgtgggatttaaaggtgcttaatgacctatttgtggccagggatagggacttaataatctttatccagcttagtgatcaaagctttgttgata

SEQ ID NO: 52364 - DNA, 1760 bp, Cannabis sativa
  modified_base (246)..(248): a, c, t, g, unknown or other
tagtttttttttttttttttcatggttgtgtacattatagttacttaagccattttgtaaaatttcaaaaaatttaaaaaactttaacacaccaaaaataaaatttaaactttctgtcgcgtgacttttttatttagagaggtgcattgtaatctaattagtaagtttatttaaattattagttaaatataacaattgtaaaaaattttgttaattaatatgatattatttttttttattttattnnnaaattaatataataataaagaatattttttagtataatttttggtgttgtggttgaagtagaaatattttttgaccctaaatttgatgatagtataacaccaaatttaatatcttatgttcttacagtcgttacttaaatagaagaacagtaacatgactcttgtgaataatgcaaatggcaatggatgctcaaccaggttttcttgtttctcttcttctcctcttcattccattattgattttcctggtaaaaaaaataacaaagaaacaaaacaagaaccttccaccaagccctccaaagcttcccatcataggcaatttacaccagcttggttcattgcctcaccaatcattatgccaactctccaaagaatatggttcagtgatgcttcttcacctcggaaacttgccagctgttattgtatcctctgctgaagctgcaaaacaagtgatgaagactcatgatctgcagttgcagcagacctcaattgcatggtcctaagcaactgacatacaactaccatgacttggcattttcaccttatggagaatattggagagagattaggaaaatttgtgtgcttgagctcttcagtgtgaagagggtaaattcataccaatcaattagagaagaggaagttactaagctcatcaactccatatgtcatcactcctcatcttctcctggtgctcctgttgatcttactaagaagttgtttactcttactgctagcataattttcaggattgcttttgggacaacttttcaagatgctaaattttccgaggagaaatttcatgacatgattttagagatttcagccatcctgggaagtttctgtgcagctgagtactttccatatgtgggatggattgttgacaagctttcgggtttagaacaaaggagcaaaaggatttttcacaagatggatgatttctttcaaaaagtgattgatgatcatcttaatcctgggagagtaaaacaagagcatgaagaagatattattgatgtgcttttgaaaatagttaatgagcaaaccagttataaagcagcttcactgaccatagacaatatcaaggcagtactcttggtaaggtttgttttgttttgttttatttctttaagacttttcagagacaaaattgtataataatttgtgctgtgtgtgattgcaggacatgtttcaagctggggttgatactggtgctattaccatggtgtgggcaatggcagagctagccaagaaacccaaactgatgaagaaggcacaagatgaagttagaacttgtattggaaacaaaggaaaagtctcagaaatagacactgatcagcttcaatacctcaaaatgatagtcaaagaaactttgagattgcatcctccagttcctatgcttgttccaagagagaccatatcacatttcaccgtcaatggatatgacattgagccgaaaacactgctccaagtgaatgcttgggcgattggacgagaccccaagaactggaaggatcc

SEQ ID NO: 52365 - DNA, 823 bp, Cannabis sativa
ctcagttctttacctgacagttgggaaacgttggtgataacgatttctgattccacgccagaagggactttgactatggatttggtcaaagctagttcgcttaatgaagaggccaaaaggaaagcacaaggtgaatcttcttcttcttctggggttcttataactgaaaagcatgacaggcggggagaagatgtcaaactgaaaatcagcatggttctagaagaatatccaagtctcaaaaaaatattaagtgctatcattgtaacaagccacgtcacttaataagggattgcagaatattaaaaagagagaaaaaacaaggagagaaaaatgagaaagagactaatatagtttccactgaaggtgatgttgtcattgtatgtgatgatgggtgtgttagtctttctacccaagattgtagttaggtgattgattctggcacttcattccatgttaccgctcgtagtgatttctttacttcttacactactagtgattttggcaatgtcagaataagaaatagtggtgcatcaaagattgtgggtatttgagatattttcttggaaacctgtgttggtagcaaattgattctcaaatatgttaggcatgttccagacattcgccttaacttgatatctactggaagacttgataattaggagttcataaactggtttggtgaaaataactaaacaattgaagaaatgttaggtgtatgctttcccattccaagctacctaagtcctttttgggggaggctatgagaactgcagttgatttgattaacctttctccttcagttcctctgaacggtgatgtgcct

SEQ ID NO: 52366 - DNA, 1552 bp, Cannabis sativa
tttaatgatcaacttcgtttagagcattgctattaccacataattgagaatactcaacaatgataatgtcctataaatagttagtatttttttttataattattattaaaaaataaataggatctaatattttttaaaaaaaattaaacttttattaacaaattagagtttaatatacatcaataaaaataaataaataattctcaatccaaactaattcatcataaccctaagtgcatgtataactaatttatgagcagacaaacataaactaggaatgtctcagaaaaattaaaaaagaaactagcagtatcatctaaaaaatactagatggagtaagtgccttataatatttctctcatcatttgtcttcccgaatagttaggactctttaaagcttgccttaaacatttatttttggaagttattcttttattatgtattagttgataattttttagaactaattaagttgtatacttccttacaaagaagaaataaagttaagttatatttttttttctcgtatttttgttttctagaacttataatactataagataacattcattaaaatatgacttaccaatattttctcctaaacttgtatatttacaaaaatttagtgcatatttggcatcataacaaaaaaattattttttatttttaaaaataaaaaattattttcttgaaaacaattaggcttggttggcatgaattctttacactaagattatcccaatcgaaatgaacaactttacttattacattattcttctaagatcaacaatagttttctcttcctctctctccccgattagggatctttgagctataagtgtgttttggaaatataattcaacaaagtttcgaccaaactagtgtagtcaagaattcgtgccttttggaatgttggggtcttctatttataggcgagaatcagtgttgcacaatcttctttctcttattggattggcccacgtggctccgtgttcctatttcctcactcgtcttctctcatgctctacttatcgagttgcgttctccaagctatcctgaacctagctatgctcttcttctttccccttctcctttaaatgatacaatgcatttttgcctttcctaccattttgctttattaattttcattttattattatggtaaatttactcttatactcccagattatttttattttttacaattatccattagttctacaatttttgagcttttagctgttaagtttgagctcaaatgttgtggaaccagtacccaaaattatctaccacctacctttctaagtcgtatttatttaataaaacaatcatttcaaatcttaggaaattgtccccaccttttcagtttaccttaatttcctaatttcaaattaaactagttgtatttaattaaaagattgtatcgaatttaggaacttccctgattatctttgattttccttcttcttttttgacgtctttccttgttgtttgtttttacttccttcatcccaccgactcgacctacaacaatggcttctagaaggtttat

SEQ ID NO: 52367 - DNA, 793 bp, Cannabis sativa
gacaactgatcctacaaactaacataagtatttctagcatgtctagtcttcacttgcacgcattcaggaaaacttctcaagagattacccattctaagattactttaagtcaagtacacttaactttagagttctcaagtgatgaaatactagaaaataagatgcaccttgttgatataggtagttcttatcaatccatttaagttctcttcaaatgtgtagtcccatacctacacaatctcagaatcatcacacgaattttcccaagcgatatgtgggattatacaacttacccaatattttcctttacggatcaaggaactattgactgtcacagttaattttgagactatgtaggtatgatatacacagttgaagatgacttaaatagattaatagatactacttatatatacatatatatttttttttttttgaaaatgaaacgggcatagatagaaatcagacctcacgatcattacatagggtattgttcgaaatagaagaaacacacaaccgaccatgctgattgtttgtgaaagcccacttgatcacattatgggtcatataaattacaagttctgctaacaaaatgaaaattacaacaagcaaaaagttgagagagtcttatacaaaacttagcgtagttctcgatttcccaacgaaaattcaggtcgttgagcgaattgataaccaccctagaatcactctctataataatatacttccagctttcctctttcgcaagatccagcgccaaacaacatgtagccgcttcaccacaaagagcatc

SEQ ID NO: 52368 - DNA, 1062 bp, Cannabis sativa
cataaaacctaacaatattatatgtaataaaaataaaaataaaaattgtatataactgggttggtgggtgggttcgggtccaacccaaaacccaatgactattataaaccaatcaaaaaacccgcctgatggtctatcggtttgaacttgacctgcccaaatagaatgggtttttaaaatgtttgagtagactgggtcgggtccgggtcaaacccggtcaaaatattcagtcctaggttggagagttatttgtgtcaagctcttttgtttttggacttatgccgtaatttttctaaaattaaattttagaaaagataatttagattttttttccccgtgaagtttgacatataccaaatcatactctttaaacttttcaggtaaagtttaattaaaagttcccctcgaactattgagattgttgaatttaaggatttttttccaattttactaaagaaagtctattgtgaatgaaaattttgagagcacaattcggtacatattaaagttcaggagtcatgatttggtgtatatcaaagtttagggttataatttaatatagggtaaataccattttggaccatgtgtttcgcaaaagttacaaattagaccatctgttttcttaaattacaaaatggaccctatattttccaaaatggtaaaaataagatcttgaacttaattttcgatagctttttttttttaatataacaaatttcaagataattcctaacacgaacatatactataaaatgtaaataattttgtcataatacatttagatcggttttttattaaattttattttgataaaaaattagttcagggtcttatttgtactattttagaaaatacagggtctattttattatttaacaaaatagagggtctaattggtaacttttacaaattacatagtccaaaatgatatttaccctttaattgattgtaaaatgccattatgctacatctattttatataaagtgtgcctatataactgaaattcttgttttatgagaaatttatgggtgacttttcatttttatttaataaaataataa

SEQ ID NO: 52369 - DNA, 1050 bp, Cannabis sativa
tcagtgacacaaagaacttccctatttgctgctgtgattgcacataacaatgtattatttggctagagcaatatttaatatctattgagtagacatttggtttctaagctattactattcttcctttgtctaaccaaggattattgtttgagaaacaccaaccttggaagagacttgtatacagagttcccatattcttattctgcacttttgtttgtaagagactaacaaacccagcttgctttgaatacatcaattgcttgatctcattatgcttattctggctgttaatccctctcacattccagcataaaaacctatccatttgaggacaagggatctccctcccctcctgttttgtgcccaaattcctggtctgttataccacaatccatctcagtgcctactgcaacatcagcagcatcatgaagggattcaaacatattctttgtcattgccccttttgcctccttcattgacactacttttttccctttgcttgaccttctaaaatccttcatcatccagctgcttctctacattcattactggtttcttaggcacccacatttgtttccctacttcttttttctcctcttttttcctgcaatctgaagtgctatggccaattccagagcagttgtaaaaaactaaaggcaaccattcatatttaacatctagatccacttcatgatcaaactcatcaataaaactgattttttcaggaaaatcttgtgctagacttacttgaatgaggatcctgggatattgcagtcgatccctatttttagtaacaatatcgacttgcaaaggaactcccagctggcctgcaattttgaacagagaagcttctccccagtatttgatgtccagaccttttagctgaacccaagtaggcacattggtaacttcctctttggtgaaatcgtcgatagggttccagggtttcatcaccattggcttacgatcaaaaaacacatacccatgctgcatcactttgtctctttgttctaaactttgaaatcggataatgaagatgcctttggctag

SEQ ID NO: 52370 - DNA, 1070 bp, Cannabis sativa
caaagtcaggaatgaaagaagtggcaaatgcttgagggtcatactcgattcatgctcagccatgtatgcccaaggagtgttgttggggacagatgatgaagggccattggttcctggtttgggtgtgacccaggatttgtcaaatctgtagtgacaaactggtgttgtgtgtccatagcgaaggcataattggcaaagaggcctattttgttgattctggggtcgaaagttgggtctgccaccatacttcgcttgctgaggtggacgatatgaggggttgtgtgagccagtaaatgcaacattagcttgaagtttcatggtggaatcagtgatagaactgtgatgctcaagccgagtttcatgggaaagtaacaaggcttgaacctcctcaaatgttagaacatcacttcttgcactgatgcctgagacaacgggatcatattctggtccaaggccgttcagcaattgcaagattagatcttgatcaagaattgaggaaccgactacagcaagctagtcagcaattgcctgagttttgtcaacataatctgaaatggattggcctcctttgcgaatggtggagaattgaatcttgagttgcagtagccgagctttggattgactggagaacttttgttctagagcacgccagactgcatgagatgagaaaaaattggcaacaaaagctaaaactccttcagtcatcgatgatcggagccatgacaaaagcagctggtatttttcgtttccaatgattgaattcggggtttggttcgccattgacaagagtttgcgaaggaggaatgccagcaagaaggatctcatctaattcatggccgatcaccgttggaatcacctgagatttccaagacaagaaattagttcgatcaagattaacagttaaaacagaggttaaagagtgagaaaacgggttccagttggagtgtatctgggttgttgtcgcggtggacagagttctgggaataggagcaggatctgaggaagtagactccattgacgacgctaggcagaggcgactgataccatgtagaatctcagaatatgagatt

SEQ ID NO: 52371 - DNA, 821 bp, Cannabis sativa
aaaatagtgtataacatatatatttataggcacatagtatacccaccaaaagtggccgatctaaaagtagttgaaccatcaacccgatttcgatttcgattctgggtatatcatttcgataagaacccaaaaagaaaagtaaaatgaaaatgccactttattgcatacacatatgtgaataatatttgctcacaataaaaacccaaaaatttgcttacatagcaaggacaatcatattgcaaagttgtcaattgagttggattcaataataacaatacagaagctaattttattgtaagtagatatctgaagtattttattcagaacaagaaacttctttcttcaacaaacccacattcagatttcgaaaaagcagtctaacaatttttttcaagttatgacataaacactgttataaagggagaaaaaaggaccggaaagaggagcaaggatacttctagtaaaatatctaaattgttgtactacttactgaaattgaatggcaaacttcctcattaattgtcaatctaagttgttttccaacccctaaggacaacaaaatcattaaaccactataagaagtaacatgaaacaaataattaacaacattagagaaatacttgtatggaatggcaaaaaaatgtagtacgaaacaaattaatcatattattcaatcttaaacagcggttttaaaagagaataaataaatgaaatttcaagacaaaataggatcattcatgaaaactctttttcttcagcctttataaatttttattcgtaatttaagagattgttgctacaataaaggtaagaaggtatat

SEQ ID NO: 52372 - DNA, 588 bp, Cannabis sativa
  modified_base (450)..(452): a, c, t, g, unknown or other
tggctgttgagattgtgttgtgtttgaagaagctaaaggaattgattttctttcacttgagcatatgaatttgagttagagattgaactattgtaattttaatcttgggatattttatatttatgttattatactgttctggaaagtttggttagctttggttgaggttggattcggttttgggttgaaaaaccagaaattttcatggctgccaggaaaaaatagcagaccgttttctaggcacccagaataacggcagaccgtttttctcagtaaggggaaattttgggtttttctcctcaagtccgatctgattcggggtgtctttcagagtgaaattcagggtgttttagagatagttaagctagcttgatccgggggaaagtagagtgtgtttgattgtgtgaattagagtcagttatcagaaatttgattaaggtatttattgannnttggttgtcgtgacataggaccgggatcgcccagcttgatttccactcgagtcggcccgtacgcttgaatttagaactaaggtaagaaaagtggtaagcaccgtatacggacaattattaatggttgaatggttat

SEQ ID NO: 52373 - DNA, 900 bp, Cannabis sativa
gggtgaaaattgatgatgatgaagactaggaggctgctatataatccttgttgttcacactttcccccaagatgtatgagcactttgttgatataatcgtgtatggcaaagatactctgaccatgacagaggttaagactgcattaaattctaatgaaattcaaaagaatggagatgagaaagaagagaccaatggagaaggattactcattattaagggaaaattcccaagaaggaatacagggaaaatcagaactcaaattgctacaaatgtaaccattcaagatctaattctagaaactccacaagagagttaagctctaatgagctgcaagaaagcaatgctattactgcaagaaagagggtcacattagagatgattgtttgggtttgaaggctaaagtgaagagagaaaatcatcataagtgcaaaaggcatggagttactggtattgctgatggctactagtcatctgtcttgtattgtcatttgatgcacttgtgatgtctagattagatttaggtggagattggattctagatttagggtcttcatttcatatgacaccaaacagagaactgtttgggactctttcaaagagtcatgggggcacagttcttcttgtgaacaacaaaacatgtgagatcaaaggtgtgggaacaatcttattaaagaatcatgatgaagtcatgttatgatgagattttatgccctaaataaaactcatttcaatataatcttatttgttatcaataaaagattagaagtcatttatgtttatatgtattattcatgtttgtatttaaatatacaatttctgttaaacccagaacatattgtaattcacaattacaataatgtcaacacattggaaagtaattgtgattatatgcatcaaaa

SEQ ID NO: 52374 - DNA, 763 bp, Cannabis sativa
cttgtaaagacgttcttacacaaaaataggatcattaattaataccacatatggacaacaaagtaattttgactggttccaaatctctatagcaggtggaagttctttgtttctaaaaataaactatttgtgatcactgctagttgatatatcaatcccaagcctcaaaatcaaagaacaactcatccacataatataaacaatactcgagaaataaaggatagaatacttgaacagaataatgcactaagctttatcatacacttagatttacaaatgatatagagaggtatttatagagaggtattaatgagcttagatttacaaatgatatagagaggtatttatagactagattctgacacactacatacttaggtgacggttgggaggaataaaaatataggaatgagaatgagaattggaataagaataagaatgaaatagaataaaattaaaattcataaaaaaattgataaaaaaatattaaagcttttcaaatcttgtattggaatggtatttccttccattttaaaatggaatagtcattcaactaaaatggtggaaatgtcattacattgcaataatattctaatactttaaattgcaaccaaataaagaattggaataaaaattattttctttccattccatttcattacctccgactaaacgctaccttagttatataaccaactttctttgcatgtgattcactacaaagccatataaaatacagccattatcaaccttgactttgtaa

SEQ ID NO: 52375 - DNA, 1241 bp, Cannabis sativa
tttgaatagaaaatataaatacacgtgctcatattaatactaatgagacttacagagacccgacaaggcataaaccaatatttcggtactccatctggggctgcttcacgttctttcagcgtcaataagtgtgcgtagcaactaataacctgcacaaatcaacatgccactaagcataatctcttcgtagtatttttttttcttctaataatgcttagaatagataaatattaatgaagacatttactgaatcagttatttccattccaggcttcaagcacagtagttgttgccgaaaaagttcaagtttttgaaatttcacaaaagggtacctgccaatgagacaatggaattaggtacaatatatggtaatactaatacacagtcttactgaactaccaatctactaattaaagacttaccctttatcaaaattttttccgaaaacgaacattgccagcttaaattcaatctcgcttgctggctccttcaagtggaaagtgtccacatacaattccttgcttgagtggaatcttttttcggtcttttgatacgcgtttgaagcaaggagaactttgatggccgaggtgcattcaccttcatgaccgatgtcttctaccattgtcaaatccacagggccaacctcatattgattgttggtaggcgggttgtcaaactccaaatttctcgtgttttcattttcaaactgatcctcatttgaagtgctcatcgagctagtttctttgtcggcctcctcatcatctctctccccgtccttatcactaacttccatcatttctttgtcggcctcctcatcatttctctccccgtccttatcaataacttccatcagttcttttagtagagattgcctcaactccattaacacggactgcctcaactctttcatcactgtttgatgcaactcggctgtcacagattttctcacctcaggtaatatagcttcacgaagctctggaataaaagattccttaacctcgtcaatgatacattgcttcatagtgacgaagccctttccgatgtccttagagatgtcggctttgaaagagtcaaataatcttagtagttcttgacaagtagtgtctaactttttatccctgtccttcatttcatctcttaagatgcagttgcagcatgtagaggatgaggttcctccctggttggataatggaatggaagtgtcttctgtatggccatatgtcttcctgaacataggcggg

SEQ ID NO: 52376 - DNA, 975 bp, Cannabis sativa
ttttttaaaaaaaaaaataaaatctcatcactttttcgtttgaatttatttatcttagtattattataatttttacaatatttatctctgtatagataaaaagaaaatctaaaaaataatttttgaaaaaattaaccaaatttatttatttattttttgctgaatgttaaccaaatagttttgcaaaaaaatacaattttaaaaactaaaaatagaaaataagtttcctaattagtattgattgattttcttattttgaattgtaaaatcttatataaaattataaaacatgatttattttttttattttttatttttttgtaaagacttgatttatattagtagttattaataaaaaaagagagatgtttcaagagaaaacaacaagcttgtatatagtactagctcatcatcccacatctacaattaaggacacaatctataagttcacaattataaaagttaagaaaaatgaactttaatgcactaaccactatgttggagatttaactcactaattaggtgacaagttagcacttactattcttagaaatacaagatacttagttagcttgtaaacaacttgcctcaactaacttccattgactaaatatagtttcttactttaactactaaaaatattctcaagtctctaaagtaaatccgtaatttggtgttaatcacctgatgtaattgagagtttttaatctcgacttgtaggcttttttttttttttattttaaaaaaagtaaggtgattatacagatgaaagtaaaatacgtgtaataggcattacaaataatgttactttgttattgagaacagttataatttctttaagcgcccacttagtcaaattataggctactaaattaaaagatctacaaatctttacaaaattacaactcaaaaaggagtccataagacttttacactgagtaacatagttattaatttcccaccttgagtttaaat

SEQ ID NO: 52377 - DNA, 1439 bp, Cannabis sativa
  modified_base (719)..(720): a, c, t, g, unknown or other
accatagaaaagggctaccttcagtatggtgtgataacatccagttgcacgatcaaattgaaataggctaaaaataaaatattgccaatgacaatgatcctatttttagtgcacacactaatgcatgacaagtgagtacaagtttgtaagtctcctctctaaaataaaaaaaaaaaaatcatggttcacattttacgtaacttgtgtattttttctcaatgtctggtaagtatggtttgtatttgagacactaaattcttatcatctttatatgcataacatggttatttgtcctttttatgaaacttggaaagatgcttgtattagaataacttgatttttgtatattttagttttttttttcgaaaaaaaattaacaaaaaagggagtcatgtatcttgaattatgggctaagaaaaattggtcatttatatttctttttgtaagtatcaacatgtgctttctttggtaaatttttgatgagtttcctcttaaaatttgatttcttattctttgtattttgtttaattattgatcatgattgatttctctttatcttattttttttcttcgggaaatcttggtttctttttgtctttgacccttatagataaacaaaaaaggggagtatttgggattttaattttgattgtatactcaactatccagggggagttgaggtttgtgttcatctttggtcaaagttagttttttatttnngtttaatgttgtgcttctcagggggagcttatatgattattttggtttattattgtgcttctcagggggagcttatatgtttgtttcgctaactttgttttgtaggtgtttgttaattaaaaatatgttgattatctaaagtgccaaaggggagattgttaggtccttttttggcaatttagttgtcaaaatattttttaattaatttgtatttttatttagcatttaaattatttttattacattgattttgtgcctctagttactattttcttctaaggaaatattccttctcagttggtctctttttggtttaggaaacttcttgtaaaagaaggaattctcttatggaaagttgtctaactttagaaaacttgactttccctttttttaattgatgatttcagttttgcttttattagaacaaatcaaatcaaatttatttggcaggtttgaagtccaaattcgtgatcttggttaaatttggaaagtttcctttctggtcttgtcttttgctgcaaacccgattctgatgttgcaaatcagaaatttttttaagaaaattttgtactgctgggaaatcatttttgtggctgtctctaggatttccatgttctataaataaatgatttatatctcttctagtctcatattttcatatctttctttgtgagaagagtgtttcatttgtaaaaacttagagtgttcaactaggtttt

SEQ ID NO: 52378 - DNA, 981 bp, Cannabis sativa
agtatttatagtatattttattgttgatttatgaatatgtagcggtatcataattttaataatttttttaattatatatttattgattatttaaatttacatcaacaatggtaaatttttataggtttgtcgtgaaacataagttaaaaataaatttttaaatataatttacttttgtagtttataaaaaataatattattatttaagcatttttaattgttgtttttcttattataattatgtatgaataagattaatatgaatgttgatgaatcaatttttgacacaaaatgtccttttggtggtggatgtgtagttcgggatcacattggtcatttgattaaggttatgtttgttagtaagctatgctgaattcaacctgtcatggtagaggcatttggatttaaggaagctttaagttgaattaaaacgaaagagtgatatcatgttttggtggagaccgatagcctagtggttgttcaacccattaccagttccgttaccataccatctttctttagtaatttgtttgtagctgattgtaaacatcttttggcttccttatataatctttttttatgttttgttaagggtattgcaaacaaagctgcacattgtgttacttgtagctcttgtttctattcagttcttaaagtcaatgataacactactcctgttgattttctttcaatcctttcattaacggatggattctaaattggaggttagagtagatttgttatcctctctcaactatcgtttctctccttcaatcgagatttgtcatctactcccacctctctccatcttcttctttccatccgctcacttctatttcctaccaaacatagtttagggtgagtttgaaaagccacaatgtaattagatttgtgtataattggaggtaattacacaatttgacatgtttgtctgaccatgtaattacaatgtaactacgtaattggaagtaattgaggggt

SEQ ID NO: 52379 - DNA, 1190 bp, Cannabis sativa
ttttttttttttttgtatagagttgtttggtattctaagtagttcacatttttttatgtgttttgtttagagatccatgtatagtttcttagtgaatattatatatgttaggatagttttttttttttttttgttagtgtaggttgtttaacactttatttttttagtagttttgttgtttaccgagtactttattgtattgagtaatttattttttatgtatgtttatttgttatttaaagattaaagtttattgtatagttttctaatggatcgtatatatatttgttattttaggttttctagtgtgtgtgtgtttttttttttttttaatgtgtttgttattaacaatttatgatttagtgatttttttggctataatttttgttggtatactaattagtttctgttgtatttgtttttttattaagtatatttttaataggattgtgcttgatgaatgtaataccattgtattactttttatttttaagttacttatttcaggataaagtttacttgttagtttctttttaataatgttatggtgaatatttgcttgtggatatatctatgattaggtgttttaatttgattaagcacttatatatgttactttttgagttttgtgccttaatgccccttttcttgactaccatagaaactatgttggatttaatttaataaagaaaatgaacaaaagagattgtattttcatagaatattcatcaacataatgatggtttcctatttgttgcaattaatcgttttttctatttttgatttcatcattgttttttatctagctttatattaaaataaagaaactgttttattgtttttaatattatgaaagtaatattgatgtattactttttatttttaagttcattatttcagaatacagtttacttgttagtttctttttaaatattttatgtttatttttaaattttcttacagtttgggatttttacttgaaaccagaggatagattttgtggaaaaatcatatactggttcgatgtgggtgttattgcataaatcaaggataggttgactactaagcaacttcctatgttttgagaatcctgttttgggcattttctagatcttgaggagtgcaacatgcaatgtcaggttatacatactgctttgtgtagggaagttcatcaagcaaatgttaaggaa

SEQ ID NO: 52380 - DNA, 893 bp, Cannabis sativa
ttgtaaacccacttgcatccaatagtatgatgtccaacaggcaatgtgactactattcatgtgtgattttctcaagggcatcaatttcattgtccatagcattgtcccacactggtatgccttgtgcatgatgaaaaaattcaggttcatgataactagaaatagctaaaacagttgctcgaaaatgaggtgccaacctgctatagtcaagaacctgtgaaatagagtatgaggtaacaaaagaggaatcctgagacaaaccagagacattagtagtagcaagaaaacaatggtaatcttgttagtatgagggctttttggaagttcaaataggtctggtatgagaagaaggcacaggagcatacaagttagaattataaatatcagatgtatgattatcattgtgttggataccagatgcattgggatcagcatgttgaatatcagatgtatgatgatcaatatgttgagtggcaagtgcatgatgagcagtggtggacgtatgagaattgtgatgatcaacatgctgaacaagaaaagtaagaaaaataagatgattatcatgaaagaaatcaatatatgtatcaggtaaaaaatcattagtatgaaatggaaaaatgttttcatagaattgaacatccctggaacaaaaaaatctattagaattgagatccaacagtttatatgctttcataccagtggggtatcctaaaaaaatacaaggggctgctcttggtgagaattttgttctagaaacactcaaagtagaggcataggcaagacacccaaaagcccttaaatgatcatatttgggaggtttagatttaagaacctcaaagggggaaacattttgtaaatttggtgtgggtgttctgttgataagatatgcagca

SEQ ID NO: 52381 - DNA, 812 bp, Cannabis sativa
attcttccttctgtggatgttatggctagagggattaagttggattttaatctccactaaaagtaggggtctttgacgagggatgactcttcttactttgtctcgagtgccattacggtccctggtgtctcaggtcgtcacaaaatctttgtcgatgcagtagttaaggactcgatggcggttgtgggtgttatcgtcaaagacaattcgaattagctgactgctttgtatgcagtgaagattcttactaaagaccccctttcgggtgagctccaggccctgcttcatggggtcaaagtctttcaacaatttgagtctattcttggggacctttttatggacagccaagttcaatccaaggccatttcaagcaagcttattctttcctggtctgttgtctcttattttgctaagttgctagatactttagatggtattgattgtaatgtgatttgaattcctagggatgctaattttagtgctcaagctcttgctaagcgggggcttaacaacacttgttcgatttttcttaaattttgggaggtgaatctccatgtaatcaccactatcttttgtgttaatgaagtttttgaggtatttacaagcaaaaaaaaatattcattatcttattttagtattgattgagtggtataatataaaatataacatagtaatgttagaattataaaaagaaaaaacaaaattaacattatagaatgatagaattttagaaataaaatttggtattttacaaaatatgtagaaaaatgtggttattttttataataaaaaaaatgatgaaattaacgtaa

SEQ ID NO: 52382 - DNA, 3249 bp, Cannabis sativa
aatcttttcgatatcggtcgagaaagatatgaatcagatcatctctttagtttgttaacaggcattgataacttttgtactaaaaaatattacaaattgaaacatgaacccaaagaacacttggaaaataatggtcctacaaatctatatattggatgcactatagaccaatggaaaaaggccatcgtattttttgaactacctaaagtgaaggtgttttagttttattctatcacaattgaatttttactgaactattttaattttacatattagtatctccatattaatttttgatagaaacgttcgaagatcaattaatgcatcaaatagggaaaaattgaaggagctgagccatggaagatctcaatatatacctgctttgcattataaaagagtatgattaatttataaatataattatcatatttgtaatttttttgttattactttgtataataataatttaaaaaaatatctatctcacaacgtgatttggagtctgggccattggcaccgatcccagatgcttggcatgccactcactataagtagggcaaaggatgggcgactgacactgctggagagacatgggtatgttttaagcaaatattatctatcgatctatcgatatatatgaattatttaggtggactgcggtcttatcatttgtactgtacattcccattgatatctaacttgagtttctaacatcatcaaatatttgaacacatatttacatataattgatgacaccgtatttataatatcttgatgtatatttacattaaaataaatagatggaatttagactacatttgaaattagcgtagctgagaaactctcatgcttagttcattttgatataagttgttgtattatggaaccctcagctattagggctattagaaatcactgcgagagtctaagaagattggataggaacttgatttctattagtcatgagagtaaagatatgaagatgtttttgctattgcatcttcaatatatgtcgaggctaaagcatcttgagattgcttatacaggtgttagtactaaaggtgtattaaaatatttagacatttttgaatgttccaatctcacacattctcaaaatttgttcaccaatttttgccctgatttaaatgtcgttgtagataattttgttgacaataacactatgttctgtatcgttattggttcacatcgtcacttaactttgaattatgctttggaatactataattagatcataaatgtataattttaaaggttttattaaattcatgtgtgcttaagtatattcaacatcaatctaattaatgtttcttttttcttttaaaaaaaatatagtacattgaaagaaatagatgaaatttagtctacatctctttatattttttttgtctcaataaagtttataatcaatttaaatactattgtgtaataggaggaaatgattgctatacgtgagacacaacaaacacagtccctctaaaatactaaagagctaggcaatgtcatcaattcagaagacaaagattgatcacttgtccaaactatttttggaagacatcgtgggcaccaaaaaggttatgggcgtctaattagcacaagagagatagtagaaccacgtacatttacccaacatcctccgcctcaggctggtgtatatgttggagctaatgtcatagttgatacgcaggatcggattagacagttggaggaactagttaggaatctgcctcaataatttaatcattctgatgatggaggactcagtcagtagttatgtttatctgtagtgtctatttcttttacaaacctttttattagcatattgagaatttatgtaactaaacttataattttaaaaatataaaaaaagtaaatttatggtatttttattaatgaattttatttttatcattatttgagcaattaatgtgaaaataaacatgcatatgatatacttattatgaaaaataatattgaatataaaatgtgatttatatataaaaaaaacttttgttctcggtaaaagatattataccgtgaacaatgtcctcggtatagatgagttagttgggccaaaataaaagacaactaccgacaacatatctaacctttaacgacaacaatgtcctccgcaaagtttttaacgagaacatcatagttgtccttggcagaaatatatttttaacgacgaggctctgacgaggactttttaacgagaacatatcctcgttatatgattttactgaggacatttagagttgtaacggggacatttgtcctcgttatagactgtttttttgtagtaaatatttttggctttctaaatttcatacaccttacgtgtggtttttataattagtatttgatatatttttataaaatgtgtacatatacatatatatgtatatttttatttaagagtaaatataatttctgatttaatgagaatatatataggagattaaattcatttttaattttttttaatttctttttaaagtaattgaaattttttattaataatactttttaaattaaataaggcacagcacgtgcatatcgcacgtttgaaaattagtttttatatatatgatatcgttatctaataatttttgttgatttagtagaatttttgaagaatattttattaaattaacgatgttagtagggttagttttataaatatacataaatttaaatattacttattttaaattatttaaatatatataaatattaatattatttatcttcaattaatttaatttataccaattttaaattaatttatatataaatattaatatattatttgtaactttattatttttaatcttagtagtatatatgtttaattttatatatatatttattttaaaaattattttttttttcaattttacctctgttctagaaagataatgttatatgcattggactctactgcgagaccaaggccttcgtcttctccttctctcaacaagcatgttggcaactcagatctcttcttcttcctcttcaaactttcagaatagtgatgagtctcaaaactctttttcccacccgtctccgtgtcgtggtggttctgcattaatggcgattgacaaccatccatcagcctcctctcagttggaatcggaatcgtcaactttgctgacgatttgggagcaggcgtgccactccattaatgcttcccttacaggtttgatcccctctctgaacaaatctcat

SEQ ID NO: 52383 - DNA, 1194 bp, Cannabis sativa
aaattcaagcgatgactttgctttaaaagaccaaaggatgaaacatcactaggcgtgcgactgacttcaagtagtccttctcttctgggaaggagggttgaagagatcgtccctgatctttcacgcacgaaaaactacgtgcgtgtgagaatcacgttgaatttttatgtggcaaacttcaccgcgaggaaaggcttaagtttcataaaaaccaagctatgactttgcttgaaaagaccaaagggtgaaagatcactaggcgtgcgacagacttcaagtagtccttctcttccgggaaggagggttgaagacgtatgtaccccaagtgatttttcacacacaaaaaactacgtgtatgcgagtgtcatgttgaatttttatgtagtagacttcaactttcatgaggaaaggctaaagttgcacaaaaattcaagtgatgacttggctttagaagaccaaagggtgaaacatcactacgcgtgcgatagacttcaagcagtcctttcctttcgagaaggagggttgaagacgtatcatacccccactgatctttcatgcacgaaaaagtacaagcatgcgccacccgaactctgataagcctcaagagatgtgtctaacttagtgccctccatgatctcttgggcaatctctttctttgggagatttcaaggtgctcagtagttttgaaggcagaggcttgggcttccagtagggtaagcgtcacttcgatagagatgtcctgactggtttataatgtctcgagttactttattggatgtaagctcaggagttatagttacatcgtaatgacaaaaatcgctgtcagcaaccttcaccaaaagtgatttcccttgacaacgcaccttctaccaacaacaccaaaaccaagcttgaccaggaacttagcaggcggtgatgaccccagaggaaaactctcaatcactgcaaccacgagatcctgcaatgtcatcttctgatcaacttaataactcagcaaaaatgttgtggaagtagttgtcggcggctgatctggcattggcaccaacaccgacactgagattgaaggttgagggatcggaattgtgagctagacaaggtagttatatctaatagcccttcgtaagttattcatcgtcgaagcaattagctttagcttctccacctagccccaacatctcatgcacctcattgctt

SEQ ID NO: 52384 - DNA, 1686 bp, Cannabis sativa
atatgtaagacaacaccaactaaaataattcttccaaataatgatagtgttaatgcgaatcaaagtggatctgttgttctaggaaacaacattgtcttgaccaatgttttatatgccccacttttcaaatacaatatcatctctgtaagttacctcactaagaattctccaatttctttttatttcactgctgatgagtttacaatgcatgacaaaaccagcaaggacgattggaagaggtagtaatgtcaaagatctatacattcttgatactacaccaagtccatctcaagtcttctctgtctcagatgaagtttggcactcgcggcttggacacttatcaaataaacgactgaatctacttaaaaatactctcaattgtaacatgtccgatttgcataaaacttctccttgctatatttgtcctattgctaaacaaagaaaactcccttttccaaatagcaatacggtttctaataaaatctttgatattgttcattgtgatgtttggggaccatatcatgttgtatcacacactaatcacagatattttttgactttagttgatgatttttccagattcacatggatatttttgatgcaacacaaatccgatgttaacttcattttgcctcaatttcttctgacctattatgttcaaacaacccaattcaagcaggttttttttaaggtgttttttcgttctgataatgcaccagaactggtgtttaaggatttattttctaaacatggcattctacatgagttctcatgtgttgaaacacctgagcaaaatgcaattgctgaaagaaaacatcagcaccttctcaatgttgcacgatctctctattttcagtctcgagttcctattaaattctggaatgaatgtgtattgacagcagcttatataataaatcgaactcctacacccttgttgaacaacaaaactccatatgaattgctttttgataagttgcctagctaccaacatctcagatctttcggatgtctggtttttgcttcaactttattaaatcagagaaacaaattctctccaagagcccgtacttgtgtctttatgggataccctcaaggtgtaaaaggttacaagctctatcatataaataataaacaaatgtttgtgtctcgaaacgttgtgtttcatgaaaacacttatccttttcaaaaactaaataatgagaatactaatattgatcctttttctcttaatataattcctctttctgtaacaaatgacatgtctggttgtgagtaccccacaggttctaacaatgcttcaaatggtgcaaatcgcatagaagatatcagcaataattcagatcaaactgaggcagaacccactcccattggtacaccagcagttccaccacatcaagttactgtccccacgattacaccagaattttcacctgcaccagaagcttcatcaccacaaatatctcaggaccttccaagaagatcgagtagacaatccaaaccacctggctacttaaaagattttgaatgctactcactcgtccaagatcattcttcaactccacataagattgataaattcatttcatattctaatttatctgaaactcacaaagctttcatccttgcagtttcgttcaacaaagagccaagatcttactttgaagccatacaaaccttggcttggtt

SEQ ID NO: 52385 - DNA, 864 bp, Cannabis sativa
gagatatagccatgaaaaatatatgaaatcttaaaaaaaatttgataccgttatgctatccgatttattgaaaaagatcttcatggttaagaaattatcaggatggcaaaattattaaaaagagcggacttaaaaaaaggttaaatattaccttcgaaaagaagcagtactctgaattatatcaattgatggatatatataaatatgtacatatacttatgatcggcctatcagagttcgaaaaaaaaaaaggattaaatattcacattgagcaatcattgctaaaagaaaaaaaactgggcttatatacaaattatatatattgttgaaattatatatgttggcccatacatgtgcgatcacagtattgacccaggcatatatacgtataaatatatatatgtatacaaataagattaaaattattgtatttgtcttgtcgtatatatatgtatttatgtgatatatgttcattaatgtcattccttacacctacataagatggtaaacaaatactgacatttaatcaaatctcaaggacacaaaggagtgccacgtttcaatagttgcatgagtagaagaaaaattagcattatggctaataaaaggagagtgtatataaatatatatacataaaaaaaacttctagttacctactcaaaattgagtcgtggtagagaatcgaatcttcaaattcaaatgataaaaaaatgagtagacgaatgaaggtcctacactgataaatgagagatgactcaaagtgtggcaacctagcaggagagactcaactttctgaattcgttgaaaaaaacacatgtttcgttgagcattataagatatttatatacggataaaaatttaagc

SEQ ID NO: 52386 - DNA, 1294 bp, Cannabis sativa
aaagtagtatttgtttaaacaaaccctttcctatctaatgactatgggatcactactacaaaaattatatttagcaacacttaattagtgacacttcaaaagagagtgttgttgttttgtctttttgtgaaattagtaacaattgtagaaaaagcgttactaaaggcttattctaaataaaataaatatataaacaaatggtaaattgaacattagacaacactctttggttaagtgttatgtatatattaaaagataaaatagaaagcaacgctttctacaaatgcattgtctgatagttcaaaaaaaaaagatttaagttatataataatatgtatatatttttgagtagtgttttaactgcacccgcctaataaaattttaaaattttaatttgaaaatattaataaggatttcatggtcacacgttctcaatataaacttaccacttatttcatacaacttctctcatttagttctattatttcatagttcttctctttcaattcttcataataagctagatattatattttccttcttgataacttagcagataatatacatctctggttatatcgaagtttacccaagtataattgtttactattataattacttatatataattctttaatactaatttttcgttgtttaattagtaattattctttccaattgttttgcttgcatcaatatttttttcatttaatattttactctttgtcttgtgattgaaatgatttgtagttctctttttataggcactgaacattgattatactatatacatatatgtacattttaataatgtttacgttattcttatgcacattgtttttagtcggtacatcaacaaatacagctttgattaactacaaaccgatacaatttcaagctttgggataacatcaacaccttttattcttatccaagtcttgtaattagatatacatttagctaaaattgtacttgtagaaactactacatgtaatcacattttattttacttattgcaatacaatttattttcacataaagatatataacaatattcgtgtgtgcattttattattattttctttagttattttaaattatagtaatgcactacaaagtttattttgttagatttctagaatgcgaatattttaaatatatatttatataatataagcacaagattttaaatataatgaaaacctaaataatatatacctattttttttttatattccacaatataaaaataaaataacatatagcaacttacaatgtttattaataattttat

SEQ ID NO: 52387 - DNA, 1343 bp, Cannabis sativa
gtttaaatgagttaaaaaggtggcgcctaagattagtgtagtggtggtaatgtggtatagtactaactaggacaatttcctctggtattattagagttactctgtgggagccaaaaagttaaatgcaacttttaatagatttagaaaaaatttagatgcacccattatccattcctgctgctacctagtcggctgtttcactaaatagaaaatggtaccaacaatttttatttatattgtcttgtttttaattattttttcaaaaataaaaaataaaaaattatagcatactagcatttttagagatttttttattattattttgaataatttttcttagtttacattattaacataagatattattattatttatatcttttttattatatttaaaataaatgaatctccatagggattactcgcctgaatttcccacctgcttttggagcaaagtcggctctaagagtaggcaagctaaatgtgcgcctcaggcctctgaccgctcgggattctaaatttgtgaaaaaaattattaatatatagataaaatattaaataaagaataaatattgtttgatgtagtgataaaaggtctcacacagagtaatagaccaaaatgtctttaaaaaaatgttaaaattaacatttatagtataaatattatattttacttaacacataatttttttatttttttttgtagtttcattaagttattacacaactaatatttagaaattatatcttataaaagcttatatattttttaaaataacttatactttaattgataatgtattttaaaatgtgtttcagctataactaaaacttgattttgagaattaatatactaaaaaatattaatatcttaataatttttccttacacattttatttgtaaataattttactccactcatcttttatataaaatattttcattacttatcttttattttttttttaaattaaacctcattaatatttagaattagattaattaaaatttattatttttttttattttttttttttgatgttaatttactcttttaagttcaatatggtacttataaaaatattatattttaaatcaattcgcgcacatgtactgatgtaagtataatattaaaacgcacccacttttaggcaatagtatcctctatataaatttgactcaatataatcattggacaaataaaaagttttgaggtacctagatattatttatatttactacttagtgctaatggtctatgcctaaattgactgagggagaatttgtagaatagagtaaaattgtggaaaaattaatttggaggagaaattattaataatta

SEQ ID NO: 52388 - DNA, 961 bp, Cannabis sativa
aaaacatcctttgaaatactatttggtaaacctcctaagaaattttgaatgtttagtcttctcctccaccctcacagctcacaaaacaaaatttgattctaaagctcctccttgtgtttttatgggatacccccaaatcccaatgtattaaatgatataaactttataatattaatactagtcaattttttatttctaaaaatgtagtattttgtaaacacatatatccttttcgcaaattaaataatgatacttcttattagaccttttttcaaatgtggttttaccttcatttcacatatctcacacaccagttgatgattaccctatgcatatgctccttgctcttctggtttagattcttctttacatgatacaccagcactagatattgcagaagacattactgctacaccagttactccatcatcttcacctcatgcagctccaattgcgctctaaaggactagtagaacaaataaaccaccaagctatcttcatgactacgagtgtcactctataattcaagatcaatcatctacacctcatcctctctacaaaattttatattattccaatctttcagcatctcgtaaagcttttgtatatgcagtatttactcattatgagtatataatcaagttgccaaatacaggcagtggctacaagttatgtaacatgaacttaaagctctatgtgataattgcacttggaccattatcctacttccttacaataaaagatccatcgaatgtcgttaaatttccaaaatcaaattcaacagtaatgggtcgatagaaagatacaaagcgagacttgttgcccaaagatacacacaacaagagggattaatttttttttttttacacttttcccccatagaaaaaatgctcacattcaaattattacttgccatctctattatcaaaaaatggcatactcttcaacttgacattaacaa

SEQ ID NO: 52389 - DNA, 890 bp, Cannabis sativa
aaatgggttcagtcgtcgtactacttactttctaggggtacgttacaatgtaatgacgagcaacttggttgagagcttcaacaacacagctaaggatgcaagaggcttcccgatcactgctactgtagcattcctgaggtccaaagtccaaaagtagttttgtaatatcccagaaaaatatactgatattttaattggacatattttgttaaatatgtgattaagtaggcattagagtaggattagaatcctacttaaactaattatgatttgattagggaaatatgaataaataaagcgtaatttattaattacggaggttatattggaatatgtgggtattgtagataccattattcgaataaaatattttgggcctgacaattgtagaacttgacagggagattagaaatgtcacgacaataaaagatgaattgaattagattttatatcagaccagtttagaatttcagaatgttggtttggtggattagttaaaaattactaaattgcccataggatctatattaagctaaaggttgtaataagggggtataatagtcttttgagtgagggatttgtctttttattaaggctgaaatgaatttaaattaatagcatatattttaagtatttatatatgataagaattagaaaaataccaaataaaccatccccttccccatttcttcttctcgcccgaaccctagaggctgcaaccaaggattttggttccttaattcttcaattgtttgaatcaaattcaaggggtagaagcttgtctaagtcttgaggtaagattttgagacctttatctttgaatttcataagttttagaatgtattggtgtttttctttgaaaattcagagctgtgtggttagattgagtc

SEQ ID NO: 52390 - DNA, 1354 bp, Cannabis sativa
tttatttattaatttaaaaatattatttaaattaatataatagaagagaacaatcaaagtcaattagtttgagtcaatttttctaatcatagatttactgttatatgttctagttccgtaaaaacgaaagaaaagaaaaatacaattttagaccgttttaactctgattgttttgtaaaatcgtttatttttttttaatataaaatacatttcttcttccttctctatggttattttgtgattatttttttttattttggttctcctcaatatacatttgacgagctcactagaaatttttttttgagatgtgtagttcttttatatttttctaagtggttacatctatttattgttttatatttatttttgtgttgttttagtaatttttttgttttgattttttaagattaggtttgcaaatataaatgctattgtgcattgagtattgagactgcgcagaacattttgtaatttttttaatcatgtttttttttttttttattttgtttgatttgttttagtgttgttttacagttgttttgccataatcatatatttgacgtccaatttttttttttttttaatcttaccgaaattaattgttgtttcgaattttttggtgttcctgtgatgattctgtctgtgagtgtaaaagatggatgattcatttttttagtgtttacaatataaaaaaataaaaattgatcaagacagcataaaagtaatttttgcctgtcaaaaatcagtattggcatgtttcccaaaaaaaatttctattacattctctttcacatttctctaaaaacaccattagctgaatagtccggccgaagaataggacggcccctacgcagaaaggcccaactaataaatgatactatccagtatccacgtaaagcaaacaaaaacaagaacatatataaaattactagccaacaaatttacacagaagtacagcacaacgttggtataaatggcaagaggactgttgttttacacggtccctactgttgagcacacatttagttttgaaaacaaacgtattatagtacatattttattattaatatgctttgcagtgtgctagttagcattatttgtattggtgccttgggtctagcatttttattgtggtgggttgggtggttcgagtcctcttaactgcacccttatttaatatatatttttattattttatgtaagattatgatttaatataattattttttaaaatatcatataaatatatatatttattaaggattaataaaccaaaataatataaaaattattcatgtttataaccggctttatgtgttacagctaatttttctattattatttatttata

SEQ ID NO: 52391 - DNA, 600 bp, Cannabis sativa
actccttggactgaatccaaatccacaatcaatggtgccattgagatcttcatcatcacaagtaagtggtggaaggtttatgaactctcctgttactggattgcacactgtaataggatcattttgccatggttcagacaagcacaacaaaccattgcaagaattcacaatgttgtatttttgttcttttggtttcaaattatggcgttgtttcttgtcctgattttttagcacactttttggattgcgtagtgggatcttcagtttggcattaagttccatgttatctttctcgagatttagatcaaaaccagggtcatcttgaatttcaggctcaaccaagtacagaattcttgaaactcgaactgaatccaaagtccagacaaaaattttaggctttgcttgagcaaagtttaacttagcaaagtcagattcgaatatcagattgcgccatttcttgcagacgcatttgcagaaaagaatgcttttggtggggaggctatggaaaaacataacaacaatttcacttggaatgtcgtttatggtagaaccatatatttgatttcttttcctggccattcttctgttgatcaataaaca

SEQ ID NO: 52392 - DNA, 1568 bp, Cannabis sativa
ttctctcaacagaagttggagccttagatgatgatggaccaccttgatcaccttcaacagcagcattgggcacagatttagaaccgaattcttgattacttttactgttatcctttataaatgaagaagtagtgtcaccagaaaaataatcaaccaaattcaaactggttctctcaacagaagttggaacaatgttttcaagttgtaactgaaatagaaaaatcacaaaaaaaaaaatgaataaattgaaataaaaataaaattcataataaattgataaaacaaccatgaaacaacttaaaaacaattgaaaaacaacacacatatacatgatttaaaggccgattgaagatgatgatgttcacattgtccatttttagctgagaaactataagcttctctattttaggccagttgagaagcctagggatgccaatatttgaatacaaagtaattttcccaatcatatggacaacactcaaaaaactaaacttgcatttcataaggaaaatctaacaacctataaaacgcgccatccttatccttcttcttaacaatcctaatactggcatcaatcttacccttaagagattccatggtcatctcaaaacactccttcccccattcatactcattataacagccactatccacaatatcaagttccttaatatagacaacctttccaggaggacctccgagcaagtaacacttaacaaaatacaacacagccaacttgactgcaagatcatcattatccctaaggttgttagcagtaaaggcaacttgaattgaattctcggtaatttttttttattaccctttaaaaaatgttaaactagcatattcttatcttgtttgaactggaagatatcagattcaatgtggcaatctagacctgtcactaaggcaaactcctctacactaaatctaagaaacttcccagcaacagatactcgaaattccatctcattaggttgttgaacttccctcaacaatagaccatgcaataattagaaatgaataatgtactctggaattcgaagaaagtgaccaaaaacagtttgggaaaagattttcaactgggtcggggttagaatagttttaatatcgttaatgactgaataataactagaagttattactttagaatgataatattgggatcacctatatctacatgtccagtcctggattaaaaacatgcatatacatttcaaaacaactgaaaaacaacacaaaaacaaccagcaaaacaaaaaaaaatttaaaaaaaaaagtccacaaacctcaacaacaacatcaccagaaggctcttcgaccccaaatttagaaggaatactcacaataggggatttcaccttcccctacagaaaaacataaagaaaagaaaggagaagaatacaactgttatagaacgtataaatcaacacaaaacaacaatatgtatatatatacaaaatataaaaataaaatagaacgctattacattacaaatgaactaatcaaaacacaacaacatacaaattacaaaaaaaaaaaaaccctaaaaaatacaaaaataaacg

SEQ ID NO: 52393 - DNA, 1366 bp, Cannabis sativa
  modified_base (1229)..(1229): a, c, t, g, unknown or other
gtgaaaataggatcattgtccctgacaagatttttattttttgcatttttcaatttgatcccgcaactggatgttgtcacaccatactgaaggtagcccttttctatagtagtgcatcaacttcataactctcaattacaaagttccagcttactcaaaagatggccttcacacctcaatatgggtagctctattctagcaaggggcctgacaagaaactgaaacaaaaattgctcaactctatacattaatactttagtttatcctgatcatacaataacttgaatcttttaacccaacctcaaaagtatgaagagtacaagacactaatctaattatcatccaaaaacataaacatgttttgtcgaccaagaatgaaagaaggatagatgcaagataagaactactcaaaattttgtacaaaatggagaaccaaatgacaagaattaaataatgcaaatccccaaagattttttgagggagtgaaactgacttgaatctagggctttagtaaaaatattagccaattgtttttcagtatcaacatattttaattgcaatgtttggttgtcaacaagttccctaataaaatgataccttatatcaatttgttttgtacgggaatgttgaacaagatttttagatatatttatagcacaagtattttcacatgcaaaatgacaagtaagaataaatgtgagagtatagcaattatcaatagatctaaacccttgtaaaatgcattgtttatcactgttaagaataaaacaatgatcattgtcaaaattgatggtaaacccttgatcacaaatttgactaatgctaagtaaattagtttttagtctctcaataagcataacatttatcaaccttggtaatccttcaaaattgagagttcccataccaatgacatttcctgttaaaccattgccaaacatgacctcaccacattgcattggtctgatattcactaaaaactccttgtcacctgtcatatgtctagaacaaccactgtcaaaataccacatttgagaagcagcacttttatcagaaaaaccagcttaacatttttctttttcaatctattttttgtttcaaagcactatgtttcttttgaaaaattttcaaattaccaaaataatttgttttgtacaaattttgcatggtgaaacatttaggtcgaatatgccccttaataccacaaaaatgacagattggaacaaaccttnttacctgagatcttgtcctttttgaacttactggagactttgcttctgcaaatgacatttttgtagcagcagatcttaaatttgaagcaacaggtaaattcgctggaacactagattttacaaatttcatttttcta

SEQ ID NO: 52394 - DNA, 1036 bp, Cannabis sativa
taaatcgatttgtggagcaatacatctttttgattcataaaaaaaaatattttattgagaatatactaaatttattattattttattattttattatttaaataatggtaatatgataaataaagaatgtaaaatttagtaaaagccaatcaatcataataattaatgacattatagtaaataaaaacagtagtttttattatgagttaaattttacacaatgttatatattgtgtcaaaattgacataagtttttgcaaacgctaattaaatttagcactttttagaacattattaaagaagtagttttttttaagaagtattgctattgggcaccagtggtgcccaacatcgtctacaggtggtgccccacgattggttagtgatatttcctaattttttttttcttaagttatatgagaccttatacttaattacaccaataatagtacgacaacgggaaggatggtagacatcattattgccttttagcaattctctttcttcagtgtgcttaaatatagtaatacactacctttctgactttctattggagatgctcttatacactaaaattggagtttaattttatgaacatagataaaaaaaaaattatatgttaaatttagcacaacttttagcatacatcaaatttagagtacattatacactacttagagttcaatttatgaacatggacaaaaaataacatatgttaaatttagcataatttttaatattcatttggtacgccgtgttacaccgtattgtattgtatagtattatattaaattgtataattatgtaatatttttatataaaactatatgtggtattaatttttatgggtacttaaatatataatgttttagtataaattaaagcttagcatagcattatataaaaatattatatataattcaattcaatataatacaatacaataaacattacaaacacgtcctaaaattagaatttgaatacgaacccaaaaaaaatatatatatttaccccatctttatatgcacttacatta

SEQ ID NO: 52395 - DNA, 753 bp, Cannabis sativa
aactttgaggagtgaaaacataactgaaataaactaactttccaacaaacttggaacttgacaaaagtcaacctgtttacttgcttggattacaaaatcctacaaaaaatatataacaaatataaaaaattgtcaaatttcattaaattaaactccaactgaatcttttataataatagacaatcactattattcttaaatatgtagttgtaaagtgatttgcttataatttttgttttgccaaaaaatgagtaccaattacaattaaaagccaaaatacaaaatttaaaatcaaatacccaataaatctatacatcaaatagcatatatatattctttatcaaactattaaactctaatatataattacttcatcattatcatatatatatataatcacaaaaaaatttaccgtggtcctctgtcatcctagacctcaagcacccattgcttactgcaagcctagctagatgatcctcacttctggtggagcttgaacactgagcgggcagaacgggtggcaagcaagctccgttcgaacggagaaacatcactgagagagagagagagaggagagagcaactgagaaaaagggagagggaggattggacggtgggcaatgcaacagagcgaaagagaggaagggacgatgggcgaacaatgaaactgagagaaagagggaggaaaggacggtgggcagcggaggttcaaaatgggatgaagaaaatcgtgaaaacctaatttttattttca

SEQ ID NO: 52396 - DNA, 1763 bp, Cannabis sativa
taatcataaatctatataaaaaaaataatgttatataaattttttatattttatatatttttaattatttttttctacagtataaatttatacacatttgataaaaataatttataataatttaaattatattttataacttgtagtttatgggaaactctaagttgatgtagtttattaataataaaaaaaaaattataaatatgaagtactttttaaaacaaaataaaataataagaggttgattggtttgtgattcaaaaattgtgttttttaaaaatgtgttttgtaaacaaaaatttaaattttgtaattaaaaaattgtttctaaatatgtgattggttatagtgtgattcaatatttttgagttttaaaaaatttaatatgtcattggttgagaatttcaaaataaaaaagtaagagaataattggagagtttttgaatttcatgatttgaaaacataaaaaacataaaaaataatgtttttattttttagcctaaaactcaaaataatattcaaatgagattcaaatattatttattttaaatattttttctttcaaaaaagatatttttattttttgtaatatataataaaataattaaatatatttttagtatacaataatttattatagagtattttaatcaaaatagttttttctaaaagttaagttgtactagctttagcttttagctgtagtttcttcataaattcttcaataagctatattttaacaacttaccaaacacttttttatcacaacttttttgaaaagcaacttttagcttttccaaaagttgtgtcaaactagtccttattgtactcaagaaatgttgtacaccatgttaaaatagttttttttatgtagtaataaataaaatattatatttgattttatttataaaatataatttattatttaataattaattaaaatattttaattatggtcaaatttaattattaaatattttacttatatatttaatttttaaaagatataattgcagcaaaagtctccaaaaacttagggttaatgtagattagtcctcaactttaaaaattgacagtaatagttcaggtcacattttttgtacgtcttttggtccctctttctaatggatccgttaaacccaaataaaatgtcacgtgtcaattttttattggtccaaataataattttaattaaaaattttttaaatgaaataaaaaactaaaaaatacattttaaaatcataaatttattttattttttctttcttttttttttcttgttcatcttcttcatgaacccaactagtcacgagagttcaattggaacaccaccacaaaatcttgagacattgagagaccattcatggcctttgtcttgagactaataataatcaaaaaaaatatttctttattttttcttttttctatctctttgttcaccctcactgccgagaaaccacccatataaaaaactcaccacccacgaccaccatctacaacagtttacgttttccatttaaataattaaataattcaatcaataatgattgatgatgaagatgaatcctaacaatctcgacaataccatgatatatctttatgcgcttatcttctaaattttagtttctataaaaaaaaaaaaatcacttatcttcactattagcttcttcaaccaatgctaaactcacttgagggtcagtcacccatcaccactccatgaaccacaattaatggaaccttcacttccttcaacttatcagcta

SEQ ID NO: 52397 - DNA, 2394 bp, Cannabis sativa
  modified_base (943)..(946): a, c, t, g, unknown or other
ttttaacaatgatattagttatttctaaaaaaacaaaaattaaataaatatgtagagtattaaacttgtgacctcctaaaaatttaaaaacatctttatagcacgaaacaaatttattgtcattttactagaaagcatttgtataaagacttgttttttttgggggggggaatttataaaaataatattgaaaatatttatatttatactgcctttatactgtctttgcctttttttccttttatactgtagacaccgaaaatcacatatacgaggcctctatcttccacacacacaaacaaaactatctcaacaacacgagaacacctagaaaataaccattaatttcggcgagatggagcaaaaacgtaaagttgacgtcaaataaataatcatagcaaaacaactatataaaacaacactaaaacaaatcaaaagaaaaaagaattaaaaaaaaaaaactaaccatcttctgcataacctcaacaccagatgcaatagcgactatatttgcaagaaaaattctgaaaaatcagaataaaaaaactactaaaagaaaattaaaatattagaaaaacaaattgatgaaaacaatgaaacagatataaccacttagaaaaacataaaagaaccatacacctcaaaacatttttgccagtgagctcgtcaaatgtatttataggagaatcagaataaaaaaccacaaaaatagccatagaggaggaagaaaaaaatatatttatagcctctatttttcacacccacggacagaactaccacaacaatacgaaaacacctaaaaaataacaaccattaattttggtaaaatggagtaattgaacagtgagatcgacgtcaaataaataaatcataacaaaacaactataaaacaatactaaaaaaatgattaaaaaaaactaatcatcttctgcacagcctcaannnnagatgcaatagcggctatatttgcaggcccagtcctagaaaatcagaataaaaaattacactcttatctttcccaataattaattcttcttcttcttcttcttcttcttcatatactcttttttctatttagttaactactacaaaaagagagagttagcttttatttgactgatgttgtagattttggaaaaaaaaagggaaataaatgaagaagaatatgaatagaggagagagctcaaaaataatgaaaaataaatgtgtgtgtttaatgatttgcttaagaggaatatttatatatataaaaacacataattaggaatgagtagcacatgggttgttgtccaaatttaaaaaaattagatgaaaatacaaataagaacaaattttagaaggtgtttcagcttttcatcatcaattttaagtaaaaaaaaactgtaacaaaagtgacatgcccaatcaaatcaatattttttacaaatttaaaatataataaaactgattagaataaaccctgagctgtcacatttcaataaaacggaacaattgttttaataaaaaacacagtatacaatatattaatcatgaggcagtaaaaaacataaatttataggcacaacagtaaaattgtaaaaaaaaattaggaaacacaatacccaagtgtaaatttatttatttattttttttttttttttaatttagaccgcttgaaatagcttaagaccggtcctaacttcaagtgaggctatagtgcgacttagtttacatataccttcacaagagaactatcaaaccccatatcatgaattgtcgaattgtattagaacactcacatcagatactctaaaatatagaagctttaaattattaattttttttttgaagaaaaaaaactaagtaaaaatacactacatcaaatgctttaagttcctttcttcattttaaagtttttttaaaattcactattcgtgctcaggggcagacccacataaaagtgaggcgaggcagttgccccttgaaaaaaaatcgggaaaaaatatatatacattttagttagttacgacatatatttataataaaagatgatattcatagatataatgttagctttggtgtactgattaaactaggttgcatatagaatagaggttatgcgtgaatattttttttaaagtttacttttacccgtgttttacaaaaaaaaaaaaaaaaattggaactgttgtgaagaaaaagctttggtgaataggtcagttgtttaattttcctttggaatgtagcaaacttgcaatttctttcatgcaatttgagatctgatgtaatgaacatccagctcaatatgttcagttcttgtgtgaaaaacgtgatttaaagcaagagcttgaacactttgattatcacaccctaaagtaggtcgttgtttgtacaaaagtgatgcaaagttttgta

SEQ ID NO: 52398 - DNA, 882 bp, Cannabis sativa
  modified_base (733)..(734): a, c, t, g, unknown or other
ggcataaaacccaacacaaactagcttaaccatctctaaaacaccctgaattccactccgaaagacaccccgaatcagatcggacttgaggagaaaaatctgaaatccttccttattggcaaaaacggtcggccgtttttctgggttcctgaaaaatggcctaccgttttttcctggcagccatgctgatttctgggttttcaccccaaaaaccaatccaacctcctccaaacctcctcaaaccttccaaagtagtataatatagtaaacatgacataacccaacaaccaattcattgcaatatatcaatttgctcaaaatcacacttcaaagtgaagaaaaactcaactttggtttcaacaaaccaaaaccaattcaagcagccatggagaccacttaacatctcaaaaacctaccataaacacattccaaacctagtttaagtcctacagcaacaaagaagtaaaaacctaactcaaaactaggattttcaatccaaaaattgttgagaacttaccttgattgcttctagggttgacttaggttctacaagctgcttcaattcaagcaaaatggtgaaattttaatcctcttcctggctggtcttggttcacacgaagaggagaagaagaaacttagtttcttgccttggaagttattccctttaaataaggttttcttgcatttcattttcatttcatttcatttttttcttattagcccaaaaataaannggacactaaaacctaaaagaaaaaagactaattcacccccaatgaaaaaaataaactttaaaataacctagggaatttttgtaattttgctaattccattaaacgaacattcttaaatttctaccctagtccgaaatattctcaaaat

SEQ ID NO: 52399 - DNA, 1207 bp, Cannabis sativa
acttttaaattataaggtttaaattattacaagttattttcattccgtttattaataaagtttaattttcgcgcttattttactagtaatcccgattaggggattattgttcaataagtttattgggtagcttgcctaattatttagggaattacaatggaggaaatagctctaataccatgttgaacctctttgccattgatgaacaaccaagcaagcatgaacaataaaaccagagaaaaacagaaacgaagagatagatgaaagagaaggaaagatagagaaagggaagtttgaaaacaaagagcaatcttactattcagtaaagaacattggcattatatagccaatgattacaactgtagtttgttgaagataatagaattagttaagaaagagaataagaataatactaaacacaactaattctctaaccaatcaactaactgaatagacactcctaacaagtacaataattttccaccaactaattgaacaaaaacaaaaataaaaataaaaagaaaggcccttttactatattagtaataagagaatcccactaattatagagcaatattgtcaaggagaaccaagctgttaagtagttggttatttcagttagttgttagttaggaactctagctaatttcttgttgttagttgtagtcaattatgattgttccttttttatataaagcaatgtattgtactattcgatctatcattgaataacaaattgcattttaattactttcctttcttttcttctctctttctctcgactgcatcttcacatgctatcagagcttgattctgttcatcaatggagatccctgtcttgtccaatggcgcaggattaagactggataatgctcagccacaaaacaatcagcaagtgcctctaccaaaatcgtaggctatttctttcaacaattctttgtctatcaagctttatgaacacaactttctatcgtgaaagcattaggtcctctcatcgatcaaaggcagcagacttcaaaaatttcttgatcctactcgagctccacccatgtttctaactgttgcggatcaaagaatcaacattatcaatcttgaatatgaagaatgggaacaacaagataatcttcttatttcttggcttctctcgtccatgtctgagaaaaccaggaattaaatgatcgagcatgagaccactgcacaaatctgg

SEQ ID NO: 52400 - DNA, 750 bp, Cannabis sativa
taataaaaaatgaatacaaataattcatggggtaacatgtatcaattaaaatggaacaacaaatttttttagtaaaaagtcagtacacaatataaaatataggcaacaaaaatgtaataaataacgttcaactatagaaataaaataaaagtgtgaaacacagtacttaacgtacattttccatattatattgtcgtgaaattaatttcttaattttatcttaaataaaatttactatttattctcaaataagtactaattgattaaatttactcattatcttattttttaataaaataatatcatctttcataatattatttaattcataattcataaagtaaatctattcaaaatagttttttctcaagaataatttttgaaaaaattaattctttccctaaataattatttctcatattaaccttaccctgtacaaaccatgaacatagatttctaagttccaataaactcgatattactactcatctcatcaataaaataatttgatttattaatattattattactccattataattataaaattacacttttagataatataaaattatatttacacaatttttttttagtctatattaatataattgatataagtagttcgctttctaattttttaattcataactaaagttggtcaaaattattattttacacttctaatcatctcttgaattccttaagtatcattaatttataatgaatagttaatatgtaattcaatta

SEQ ID NO: 52401 - DNA, 1532 bp, Cannabis sativa
cggtctcccaacttttttccctctttcattttcactttcgaacaacgcctctctttccctctctttctctcttgcgttctctctttctctcttgcgttctatttttgatggtctcccctgcgatttcgaaccagcgtaggtctcccctgcacctccgtaagtctctctcgtcctcagctagctgtgaaggtctcgaacagggatgtgatttccctctcgtccttagctctgaaggtctcgtccacctctgtaagtctctctctttccctttctttctctcttgcgttctctctgtaataagtaccctctttgttattagctctgaatttttatgttgttgtagtagactagtagtatcgtatgtttgtgtgttatatgcttttgtctgagatctcttgtacaattatatgcttttgttgtaactcttattgttcattccaatagtataattaatgaaatatatagttgtttattcattcagtctctttttttgtttgattcttttttctcttctttttttagtatattcaaatacaaacccagaatcagattattgtaccatataaaaactttgctgcccttatatactcattggcatttataatgtctttagaatctttgtagcaaatgttattatgtgtagctctacaattcaaacgatatgagcttggtaatcagtgatgagaaacagaaagattctaagtacagcagatatttttttttcattatttgttttatcaggagtatcctgtcctctcttatctgatgcattaatattctataaaatagtcagtaataatttgtaatatcttatcttgaaccaggtgaatttttttattgggctatgtgccctattaaatccgagatagatattatttttagagttagaaagctttttcggaatgggggttttcgattggaatgttagaaatttagattgagagatttagctttgattagcctgattctccctttaccaaaattagggtttttaaactaggttatactctataagggtttttatcttgttaataatgatgaatttgctgtggttgttgttgatgagtgaagtttcttctagcttcccatactcttttggcattatagtttactggttcttaggactagtatattcctgtatttttgttgtttcttgatatgtcatagtgatatggttttcaaccttgctgcattccagttctttggcatcatgtcttatgcttatcagtacaaaactcttaagaatatttctgtcattcttttccatagaccccgaaccttgttttaagttttaaatgcaaagaagagaaaagtgtatcaactaattgagtgaatagagaaattagaaagtgatagaataatgataatcttaagagtagacattatatatcaacacaaacaactacagtaatgaattctcacaggaatgctttctattaatcaccaaagaattactgaaaatagctcttggagaggctttctctcctattctaacctttcaagaaggctagatctctcccaagagatttctc

SEQ ID NO: 52402 - DNA, 998 bp, Cannabis sativa
  modified_base (51)..(54): a, c, t, g, unknown or other
atatttacaagttatctgatccacgtgtccctgtttgattggtccacgtannnngggcgaaatcaggggcaacacataataaataaaaacaaataataataaataactcaaccagtcataattcaaatagaaccaattttataacataatcaataaaaataaataatacaaaataactcaaaacaattataattaaaatagaacccgttatataacagtcttataataaataaaaacagataacaccgaataactcaaaccggttataattaaaaaaaacggttctataacaggcttatagtaaataaaaacaaataacaccaaataactcaaaccggttataattaaaaaaaaacggttctataacataatgaataaaaataaataacacagaacaattcaaaccgtttataattaaaacacaaagaagaaatcaattcctaaagcactgaaatataaattaaaaacaaaattagttccacaacaaaatgaataacacataatacctcataaaactgcttattatgtttttcttatgaaaatgtggagattaatttcaaaaatactgaggcataaatataaatagaactggttccataataaataaataaaaataaataataccacacaaaagaactcaaaaatttataaaataatgaaaccgattatatttattaaaaaactaagattaacaaataataacacacaattaactcaaaataaagacttttgttaatgacttagagaaatgatttgtaaaaactaccaggatttgaaagcattgaagcccaagcttccattcttgatcttggaatgtaggggagttgaacctcaattatgggcaagatatgattctcttgtctttttaatttatgccatgtatttaaaacaaaaatttatcttttagatttggtgaacttagcccaaaaattttgacattttaatataaaaaaggctgtggttgagccaaaaagaacttttattagctatattggaat

SEQ ID NO: 52403 - DNA, 1582 bp, Cannabis sativa
ttaattcttttcacaaatcaatgattttaattttttattattatttattttattagatttactaggacaatcaatgtgtagaagccattaatgacttctagttttctcctttttttttcaatggtaaattaaagttttggggtgtattcaaaagatattcttttggtacacaaagtggggtgtaattgtaaaaaagaaatattttaattaaaaaatagagtaaatttaataatgaggtgtaattataattttacgggatgtaaatataatttaccatctcttttagtagaatatttcgttagaataaatttcacaaatcacgtcaacattgaggttactttaaacaaaaaaaaaaaaaagagacaaatgcagataaaaaatttataacgtcgacagcagggttcgaacctgcgcgggcgaagcccaacagatttcaagtctgtctccttaaccactcggacatatcgacatctgcttgtctgttttctttatacattaattaaatcaacatattgtctttcccatttttcttaaagagtacatttatcaaatttatcatattttacataggtttctctcttctatataaggataaattaggttgataataacatcacctctaattgtaataagtaacgagagctataaatacttgtaataatttggtttgaaaagcatacttcatacaagttgttacatgttgtaaaaaaaaatatgagtgatgtcgtactttatcaaaatgttagttggccttgacagtgatagggtcattcgaccatatataaaagtgacactataacttgaccatgacattgagaattcactcgaccttgagagtgataatgtcactcgaccataagagtgacaatgtaactcggcctagagagtgacaatgtcactctcccattacattgaaaagtcactcgacaaggagattcacaatgtcacttagcaatgacattgtgaaatgtcactcaacacacattcatgaatgtcacccaacaaggacattcatgatgtcattcgtcaagggcattcacaatgtcactcaataatgacattgtaaaatgtcactcaacacgcatccatgaatgtcactcggtaaggacattcatgatatcactcggtaagggcattcacaatgtcacttggcaatgacattatgaaatgtcactcgacacacatccatgaatatcactcgacaaaagcattcacaattttactcggcaagggaattcacaatgtcactcgagaatgacattgtgaaatgtaacttggcacgcatccatgaatatcactctgcaaggacattcatgatgtcacttggcaagggcattcacaatgtcactcggtaatgacattgtgaaatgtcactcgacatgcatccatgaatatcactcgacatgcactcttgagaagtcacacagcatgcaccctcgggaagtcattcagccatgacattgcaaaacttagtgaaatttccccaagcaagagagtgaagagacaagaatacaatcacaaggacaaggtaaacactcaaggaaagtacagtcacgccttctggaagctctaaaagcaagaa

SEQ ID NO: 52404 - DNA, 2038 bp, Cannabis sativa
caggccctcatgcacctgcaatggttgtacttgcggtggagtcaaaaagctccaagatcactaccatatggagtatattatgtcattcttaatggggctttcggactcttactctcaagtacgaggaagtatcttactgatagatcctttgcccgaagttaatagagtattccatcttgtgactcaagaagaacatcaaagaggtgctaattctaccctcaatcctagtaacacaaatcaagcaatggcttttgccttccaaggagacaagaaagcaaaccagaaaagtgaaaatcaagcaccaagaaacaatcaacagaagaggaatagacccttttgcacgcattgcaacattcttggacatacaatcgagaaatgctacaagattcacgggtatccacctggttttaaccggcaaaataagtccaaagatgctaatgctaatcaagtgcaaactggaggtgaaggagacaccaacacacaagaatctcatgccattcttccccaattgtccactgtccagtaccaacaattgctgaatttattggcttctcaacaaaccagtaaccatggtaatgagcctagtacttcgaccaacaacacaggtattatcttatctaatatttcaaaggatcttttatataattcttggataattgacacgggagcaacaaggcatatatgctccaatatcaaattattccaatgtatatataaggtcccttcaactaagctcatattaccaaataacaactctcttgttgttaatcaaagtggaacagtgaaccttggtaacaatatcattctgaacaatgttttatatgcccctaatttcaaatataatatcatatctgttagttatctaactaatagtgcaccaattaaatttaagtttactgctaacggtttcactatgcaggacagggacagcaagataacgattgggagaggtagtgcggtcaatgatctttatgtccttgacactgcacaagaagctcctaaaatcctatctgttactgctgaaacttggcactcgaggctcggccatccttcacataagcgtcttaatctactcaaaaacattcttgattgtaacactgttgttttacacaataaagaaccatgttatgtttgtcctatagctaaacaaaagaaactcccttttgttaataaaaataaattttctgctagaatttttgatataattcattgtgatatttggggaccataccacattacatctcacacaaattacaaatattttctcacattagttgatgatcactctagattcacatgggtatacttaatgcaacataagtctgatgtttcctttctaattcctcaattcctatcttatgttaaaacccaatttaatgacatattcagaattttcaggtctgataatgctcccgaattggtttttagagatctttttcttcaatatggaatcatgcatgaattcacttgtgtcgagacacccgaacaaaatgccattgcggaaagaaaacatcaacatttgttaaatgttgctcgtgccttgtattttcaagccaagttgcctattaaattctggtctgaatgtatccttacagccacgtacttaatcaataggaccccaactcctcttctgcaaaacagaactccatatgagttactcttcaagaaccaaccagcttatgctcaccttcgatcctttggttgtctcgcctttgcgtctaccttaactgctcataggaccaagttttctcctagagcacgaacttgtgtgtttatgggatatccccaaggaattaaaggatacaaactctatgatttaaataataatcaattttttatttcaagaaatgttgtttttcatgaaaacatttttccttttcaaaaattaaacacaaataacaataatgttgatccttttgctcattttgtcttgccgcatactatgattgatagtcattctactaatgagttgtctgcaggaaacacaaacaacaccagccctgctgcccccatacatgattcaggtgaaaaggacatg

SEQ ID NO: 52405 - DNA, 928 bp, Cannabis sativa
gtattaattaacactttcctcaatattattatctagtttttgtttttggtcccaccttataccccaagaacttgaaaatgtaggttttttatttttaaaataagaaacataatttgtaatagggtgcaattcaattacatcatataatattagctaaggcgccggtggtggccaccccttcccatatttttttattaaatatttcaaaattatatgcaagaaaaataattaaaaataaaataaataaatttttatattttttgtattagctctttataaatattttggctggtctggtcagtgtatatatttatataatttattggtatttgtgatgagtagtatagtagtagtagtagtaggggctgctaatttgtgtacacatcaacaatggctgtcatcttgttattatctgttgttgaagctttcaacttgtattgatctttggtttatttatttatttttggatttaggatgtcacagccaacttatttgaaatttctcttcttggtagataaggtacttccgtacaccatacaattagaagaaaaaatatatatgtatacattttaaataataattatgttggtattataactttagggttaggtttagaatttaaaataaaataataaaaaaaagataaaaatgactttatttaaacttgttgcccctaattttgtccaaaatacgtgaaccaaccggatgatgacacgtagactgagagggcttaatgtttagataattcagctaagtctctttaaccacagggatcagccttagacatgcctttcagagaaggcacgtgagtctcacgtactcttggagagcaaagctacaacaaagcatctccgggaggtgtcagatcctatctgaacagtcatctcgcatttaatgccgcatgggaggagacgtattgaaactgcca

SEQ ID NO: 52406 - DNA, 1407 bp, Cannabis sativa
ctttcattgcatatattattgatatgattacattttattttccgcatttcatatcatttgtatatgctatattacatacactatatatatagtctaacatttgtgacattaaaatactaccttaaagtaatcagtgggcaagaatccaaccatgagaaaggaccatgaaagtgaccaatgtttacaagccccacaccacccaacaataatgatacaattcaacattatttcaatatttaaaatccacaataatatattaagatttggatattttaatagtattttgttataagtgtaaaaacatatatagtgaataatttgtcaagtgtagaatttttatccaaattttaggggtgtcccttaccaatctttcttaaatattcaccaccacgtatgtagatttatctatatatgtcaattaattaaccgaattttaaagagaaatgttaaaaggcactgatataacacttagtactatcttaagtgtcacattattattactgcaataattaagtatcgagtcttatataatttaatgtaaaaattattagtgagtatcgttattcaatcatagaacattagatgatgctatgtagtaggtacattcttaggtccttaagaatgtacactaatttaaaagtatgctcaaaaagtgttttaaaatacttacgttttctgcattataaagttccttcactccagaacttttctgggttcaagtcaatgcagtacatcaaatccaaggcaaggcaaacagtctatttttcgagtcgaatccaatattatattcaagtttattacaccttccttcactccaacagagatacacagagacagagtgaagtattggctcatactttcttgtgtccaatgagagagcttcactcggattggacacctcaacagtactcaagctagttagttatcggttataaactaacttcaagattacaagaactcagctcaattacaacagaatccattggctctgttatgaccattctaccccaagactgttttgtacttctaacactataaatgcttctaagcctaatcaacttagagttaaacaaattgagtgtacaaatgcttctttggacagtacttgtccacttgtaaggctaaatatagctattgtataaaccattttccatatatatcacaattgcccacttttctctcatcaaatacgttgtacacattgtttatcagggtgtaacgcatttctgcttagtgaattcgattcaaggcactgcctttggccttggagtaggaccagtcacaggatctataatagaagagtgtaaaccaacttaattagtagagtagtacacatattttagcacagaaatcagaaagggtatcaaaaccataacaaagctcgtaaacttatattattatacatgc

SEQ ID NO: 52407 - DNA, 1812 bp, Cannabis sativa
tcatggatgtcaattggtgagtttagcttgttaagaaattattgcaaaaatgcccactcttctgctgtgcgggtatgagttcgttgaaactgattatgttatgttttgtgttataattttttgttggggtgtttgacaaaatagccttttttcagttattttgcacaatatccatcgtttgataattttttatgattcttgaactgacttttttttgtatgtatcccattctcatccccaaagtgacaagacttgatgaaaattatgtggcatctgtgctttttttttttctttttagtctttgggaaactagtttatattatagtgtattatctctcaattttcagacttttttgcataaagttaatgctgatgtaggagaattgaaattaaaataaggattacaaaaatgaaacttgccatagacgtatgatacttagtgccttatcttgaacttcgctttttgaagataatccccgttttgcttcctgttgtctgatagataacctttgtttcaaccttcaaatacaacacatatagggctcgtttggaacgccgtattaagtcgtattgtattatattgaattgtattttatacaatatttttatgtaaaactatatgtcgtattaacttttatggacaccttaatatataatattttattataaattaaagtttaacatagtattatataaaatatgatatataatccaattcaatataatacaatacaacacaatacgacctaatacgacgttccaaacgaacccatatatcacaaattaaggcaatttaccacccactgggcattcaacaatcatactaataagttcataatgaaataaagaggggcaagagaagggaaaggtaaaacatgccacttgtcctcacaaagattctattctaggccctcaaaaaaatggatcttttttagttcatcataatgtcacttctgcagagatagcataacatacgcataacatccgttgacaaccaatattttggacaatgaattcacaaaatgtgtaccaactgcgcagctaccttctttcttatgattccactacgaaagctttgaagtatagcaacaaatcaatgaatcctaaggggtcgtttcgtatgaggaggtttagacttgatgggaatgggaatgtcagactaaattaaattctaataaccaaaaggtttgtgtttccaagtgaatcctactttttaaattaaaattatggtgatgtaaatcccctccaacacttaagtttcatattccctccaactctattccctccaattttagtctctccaactcgaacttacataataaacaccccattagatggtatttggttggaagactgaaaacattgctagaataggaatgacattgttgaggtgttgtatggtgtggattagtcaaattatggtattgtcgccttatcagtagaaaagctatggccgatacctccttgaggggctatatggtgtggcagtctctgaagatgtctttgacctgacaattgaagagcctttggattacttgcaacatgcgcagacgtgtattgatgtacaatgcctgcttacttttgaaccaattcagcaactagttaacgaagttgcttccaatctaaagcaaggaaaactatcaaagaaaacccaaatcccgcgcctcgtgccatcccgatctgccattgaggatgttgagaaaagtttaaaagttaataagaaatagtttttgcaatgttgggaggttttgatctatatcttggcattagtcctgttgacaaatacaaggatgattttgtggcgataatttc

SEQ ID NO: 52408 - DNA, 1417 bp, Cannabis sativa
tattttttcttttttcatttggttgtttggtaaaactggtttctgttaattttattgtttaacatttcaattttatgataatttttcatagggtcgaaactggtttcacatgttcacatgttcgaatttggtttcactgtaatggggttgctccattttatgatattattgtatattttttatttcaattttttttgtattattttgtttctagattcaatactggtttttatgtgttagatttttaataggttgtttgatatggctggtttctatgatttaattttatatagatttgttaaaaattcttttgtggcatgtcttattattttattgattttcataactggttttttaagtaagttttcataactgatgaaactagtttaaattatttttattgtatatcatttatgttttgtttcataatcttcaatgttgttgtgtgacgatattaatttttatttgctattgctttcataatattcattgttgttgtatgatgaaattggtttcgatttattttttatggttttttttgaattaaatttattcctccaataatataaatgcaatggaagtcgttgttgctaaagattttaagtgttcactttgaggagaaagtaaattgatccaagttttaaggattcatctttggtatattgtcatttcttttttatgtatgttcattttttttttcaatttatcttttcataattttatatgtttatttgcatgaaattatttttttaggtattttatgtttgttcaatttcttagttaattattcatagtttttgaaactggttttgtttaatagaaaactggttttttgtaggtgtcttattaatgttcagtttcttagttagctatactaaataattgattttcgtgtttaaatggtaggttttttttttttttaaatgtaattgaagtttaagtgttttttttttttttttgtgtgttttaaaaaactggtttcattgttcagatttgtaattagctaataaatgtaattggtttctgtgagacagattccaatggctaactccagtgacgactttggcatcaagttgacaaactctagtgacagcgatagctccgaaatttttttcgataattttttccagtaacgacgattttgacgactttttttttggcaccgttagaaactcaagtgactttccgtcaatgttagcaaatttcgactacttttttggcacgacaataactcttgtgactaggttggtggtcaagtcttagagcttctaagaaggatgtaaaatttatataagttttagtttttgtatttgttcttttattaagaaactcgtttttgattatatagaattaattggtttattaaaatattgtcttaataaaattattttaatattatttcagtttttataaaaaa

SEQ ID NO: 52409 - DNA, 1199 bp, Cannabis sativa
gatgtccacaaataaccatgttcgaacgtcctaccattcacgtataactttgggcttcatatcaatctgcatagcctgctaggagtataaccatctatccaagttatgaaatatgatacacgtgtcacccagtcagatgccacgtcatagttaaaaaaattaggataatatctgcccccaagtctgtgcgggaccttcttggtcacacgtgaacttattcagctaggaagttgcccgaatgggtgacacgtgtctaattatcaatattgatccgacgtgacttgatcaaaggtctcttcggtgtctgaggcattaaatatctcttgaaagttgtacctcgagtcacgcactgactgttaagtgacaccgcatacgtgacgtatgtacttttgcaatgagtactaacattcacttttggaaaaaaaaaaaaaaaacctcaaatatttgaattttaaatgaattaattacccctttagatacttataaaaggggattaataccttcaaaggaattctttttagccattttcacttttagagaaccagagcaaaaatttcttcgtgttttactctcaaatcttcgtagaaaaattgttggaaactccattaaaaaataaattatttataaatataaattactaaaaagattcttgttaaatattcaaattaaaaattaattattttaagaaaataattaatttaatttaaaaaaaaaaaaaaagttactaatctcttcaaaaaaatacaattgacactctttggctctagcattgagcagtcaatatattatatactgtacgtagacaaaatttgtagagaaaagttatttaatttctttttaatcttcataaatacatatatttcttttcaaaataaataaataaataaaacaataattatacatatagtacaactcgttaattagcaaacaaaaaagataaaatgagaaaaagaaaaaaaaataaataaccttgatagtgatattgcggtagagataacaaaggaaaaaagaaaaagtgaaatacctaaaatgtaactgaaaggaaattaattagttagagagagaattgagtaatgttaaaaaaatgttaataaatctattctattaattattttgatgaaatagcttgaaattattggtggcattcgagacagtgttaactactttgatggtagtgttaactactttttctctaatat

SEQ ID NO: 52410 - DNA, 1877 bp, Cannabis sativa
tctccgcttcaatcatggtggaaggatttgagaaaatggtcaactctttttggttcataggacgagaattattattaggttccatactaggagtactatttaatccttaggaggatttagaaataagaatgatacctcaagaagcctattatctatttataagatttccaaaacaaaaaacagcaggatatcttaacgaataaagcaattaattaaaatttcttaaaattttattgtcttaattatagtgagacagtatatatttcctattatagcaccaaaattgaaaaacaatgaataccattaagaccggatacccttaaataaatcacaatctaaattacctagtttagcaccaaaattaaaacacacttaataccattaaaactgaacatcattaaattaataccgaagaggaaactttcctataaaatttataatctaattaatctctaaatcaccttcaaaatctaccaatatcacagctatgcacatttaaagaatatcttactctacaagaaatcaaacttttaaccaatattttgacagaatacattcctcattaacgctataccataattacatacaaacatataattatctagtaactcatgggacaccaatctaaatgaatcgtaaaaatcattctatacatacattagggatcttttttaaaattgaaatccaaaatatttaaactaatacaaaactatcaaatccactattaccaaaatcataataatcaattccctttataccaaataaactttttctccaaacactaaaactgaattaaaacttattttataaattccactattctttccagctaaagccttaataaatttatacctaatacctaaacccaaataatgctttacaaaacgcttcaacatctaacctactttaatgtcctcataaattcattcttaccaactaaatccattaaaatcccacaaaattcggtaatttaagataaacatcctatacgataaggtcaaaaacactttaaataaagaaattaatacggtcaaaatcctaattgtaatagctacttgaaacagattacatcgaaataccttaaatagcaacaaaaccgcaatacatatcagaaaagccacatatcatggcacaaaaacctcaccaaaggcacaatttaaccacaaaaggcacaaaacttcacactttccatggcactaaactcctcccatctttccgtaaatccaaaactcgatgtatttccttctccagtaaattccataacaaatctaaaactagagcaatcagaatcattagcctaattacactaatatacataaaaccaacaagccaattaacaagtaaaataaaattcaggagaaagcctaaaaaggactaataagctagcctaacaacagaaacggctgaataaaggcacccatacgacctaactaaacgtcccctaaagttagaccaaaagaagaaaaactacactaaactagaaatatatacaggaaattattacattttagagaaaatttaaactcttgtcataccgaaaatgaatgacaggaattctacaaactaaatttttaaaatgattaaaaacaaattgaatttcatataaccatcaaaactatagaaaaatattggcaaattacgtaaagggaagagattgataaaactccctcagaccttaagatcagccaattcaaaagtttattatactaatatttaaattcaacagctattgcaaattacaccattcatatcagatccaaatcaaaaatgaaaagattcaacgcaaaagaacaatagatttgtaaatgtgaaactgaaaagatttaaagaaaatcatagtctaacaataccgaaaccataaaccaatcaatataaac

SEQ ID NO: 52411 - DNA, 1367 bp, Cannabis sativa
gtaattgtatttggtcaaattattgttttacccttttaattaattttttatcctttattaccattaattcactagtggaattataatttagaccttatctaaatttgtgcacaatttccagttccaaaattaacacttaaagggaatcaacatttgatccattaggaaggtcaaaattttataattatagatcatgtttctagccatccacattattagattcccatagaagttgtaagaatcatcttctctgaaaaactttaacgagtgaatcaaaaaaactaataacatgaacaaaagttcatgattactcaagatttatgttgatctactactggtcatcgttatgatatgaattaaatctttataataaacaaaatgtcagataaagataacttttttcatatctttctcttttcatcatgttcttcttatcttttttatattattcataattattttataacaattttatcattaattttcttttatgaacaaaaaaaaatataagtagtttatactttaatatcatagttaaatataatataataaaataacaaaaataatataaaagtaaataaaaaataataagtgcaacttttgcatcgtgataaatgttctgttaaatttcgtataatatttattgtattttaaatttgaattattttttatcacactattaaatatttctttttattagtttatgttttaattttgtatattaaaaatgtatatataattcaaacaacgcatataacataaaagtaaatgaataaacttagctgatgctttctctcagctgagagtgttggttatccaacttgacggaatgtcaacttttaacttttcctacaaattttagtagtgcctttgagtttgattccactttttatacactctctgagtcaacttgacttttcaaaattactgtttcattagttggtggcaattatgggggacaatggggaggattctcgtgaccaaaggaatgtggcaaatgaatctcgatcagagattcctgaagtaattatgaacagtaactacactcaacaaccccattctcttgacagcagtaaggctacaggtaatgcagttaatggggctacagaaaatgcagctaatggaggaagtgaagcggctgatgtttcacaagatactcctattgaggatcttgaagtactacgaaataatttccttgaatccatgactcttgacttagaacctgattttgagcttactgctgagatcgttagcacaggggttctagtcagttttttggatggtaagggtgtctcaaaatctaggctaaaaaccatccttggccagatttggagacttaagggactgtggaaattcaagactttaaa

SEQ ID NO: 52412 - DNA, 558 bp, Cannabis sativa
aaaatcataggttctgccaaaatctcccagtcgcgaccatggtcgcgaccaaagaaaagggtcgcgaccagagtccttggcagtcgtgactactgacactcgaagaacaaattttttcgctttttcaccaatttgtcccgtcttttcatcaattgactgaatttgaactttgataccccgggaacctgaaacaaagaaaatcaagcgtaaaaccgctccaaaagacaccgatagacgagaagatgcttacttttcagacccgaaacataggctaaatataaactaacacgtattagagtcgtagcgaaagagaataagtaattagatttcataaaaaaattattgactctgatatgaaccataaatttcggatcttaacacaattatacataacacaaacctaactattagtttagggatttttacctcctgttacctatcagagttttctcgctatcttttcatattacacaatcaaacatccaatttagaagaacttgttgaagatttcatgccagagtcttccaagctaacctcaacacttcaggaatagagtgg

SEQ ID NO: 52413 - DNA, 1682 bp, Cannabis sativa
atggtgaaataaatatggtcattggtgacggtattaatgacaatccattagcctataaaaaggaaattgcaagtccagaatgaaaataatggtcagccggcatggattcaaaaatggattccatgaaaagaaataaagtaaaggaatatgtaacaccctactagtttagccgtgttatcgtgctttatattaactgtgcaactcattgctaatcaacgagtttattgaaaatcatgagtaattaaaattttactaataatattaaaatatactaacttttatatattcgagatctcgtgttcaaaatatttacaactaactcaaaatacttattacaaaagctgtcgcccagcgaccatttaaatacagcctgctgtccaaaagattgtatgctccaggcataaccaccctgacatgtataatcttcctctgctcgctctcacggctactcaaccttatccttgtccttacctacacatgcaaacaatatctgtgagtcgttaaactcagtaagaaaactctataatcaaaacataaacatatagataacaggggcgcccatacacctaatcacgatctaataaataagtcaggaacattctcgacaaagtatggctagctatgaatccagcctatactcagtactctggtactgatgtggtagtaggtaattcattctatctaatagcctagcatatatatgttggcatctatgtgaaactctatgtacacctcaccgatatgctaatctaatggctattcatttgcctaacatatatatattggtatctcggtgcaactctatgtacacctcactgataccttgatatgttattctaacggcaactaacatgcacgctaaacatgtatacatatatgcaaccattatactaagcttacctcgtttctaaattcaggtgtgccggtcaacttgagtggaactactgctcgacggtttacaggcccctaaatcacattatttgcaaaactgatgagtgacacgctaaatcacttttcagggacttaaaatcaaaactaaaagttttcctattgatggataacatggaaataccctaaatatcacaaaattgggaaaaactagggttccctaaactgcgccaaccggcagactggttccccaaccggaagaccgatttggtggggtttcctggggaccaatcggaattccggttcctacaggtcccactgaactactcgaccacttcagtgtaggaaacaccaaaaacctcctaaacacgtcaaatcaactccaaactgtacaataacttccagaacacctattattacaacaataagcagaaatcaagtaaaaaaacaaaccaatactctcggaatcaaaatccaccacgtgagagcaaagtttgagctcttaagctcaaaccttgaacaaacctcaaaaccaaccacaaattcaactcaaaacaacttaaataacctcaattcaacttcagaaaaccaaaccaagcatcacttaaaattacacaaccataactctaaaatcatgcataaacttagcttgaaacttaagaaaaacaaagaggaaggtgctaggaattttaccttgaattggatactaaacaattatgctataaatgctctgaattgtgttgaagaaacccctaacctcagcgggctgctagagagcaagagagagagagaga

SEQ ID NO: 52414 - DNA, 1969 bp, Cannabis sativa
ttctcttccaacttgtttggcccaaatattgagaccctcctctctgcatcatcactgctcaaaccttctcttgttgatttcagcacctcaaacacttcctcaataggaagtcgttcctataatttagtcacacaaaattaatacattaaatatataaaatttgtcaccattattaatacttatagagatgcttatgttagaaatctgcagttttctaacacaactcaaatcagtacaaaatgcaaaaagtggtatttttcaatttttctattattctacgtgtatttttataaactcacatgcaattttcttacaggcccaacaataaagagccgaacaaccaagtctcaatatggttcggcccaacaagagtctcacaaagactctctcaatcaagcaaattcagcccactaagaaagagatatcagcccaacaaacccaagaaaaccctaatcaaaacccctattcgctcctctttataacaattaatttttatagatacccacttttatatagatctctcctatattggttttactcactcaactcacggctttaaccactacaccaaaactcaacccgaaaccaagaatacaaacccaagaacaatatcagaaaaatcacaaaattaagcccaaagtgttctctctctccaaattgaattacactaaattagaaattagagtgacattggtgaatcatcaccaaattgtttaaaaagaataacccaatgcaaccgaaagaaaagaaatatttacaataattttattagttaagagagaggcaaaaagtaatattatccaccaaattcatgattattagagaatattaaagttgatcattgtaacaacagtgataaacaatgattattagcacaaatatatattataattttaagagtcatgaaattgaataataaagaattttatgaagtcttaccagatcaatattttcgttttttaattcttctaacgaagcacccatgattgcacggactcaacacacgtaaattctcactttaagtttaatttaatttctgtatttactatttaggtttaattgatctgtatttatatcatgggaggacactatcattttttaaatataattgctttatgtataggttattaatttttttaaatttttaattaatttcttaaagtatctttttgtttttctaagtcatttacaacaatacaatatatcttttatgatttaatcgaatctttatttaaaataaatatcagtataaatgaattttgaaaaaattattaatttgctaaatttcggatttcggtcaaatatgtgccattgtcacattatagttaaaaaaatttacaaaagtattttcttattaaaagttaataaattaaaaaaactaatataaatataaattaataaattaaaataattaaattttaaataatataaattaaaatttaaactgattaatgtatttatccttttgaaagattatattaaatatcaaatatttttttttcaccttttgtcatctttttattttgtgaaactagtaaacaactcgctcttaaattttttttaaattatatgtatgaaattaatcatgtattttatttgataataactaaataaaaaaattgcatcaaattttaaatattaatttttcatataaatttctgaaaaatatgagaagttagatgtaaattcaagctagcccgaccaaacgatttagaatttgagtgctatatgtgtcatgtttaaaacaataacaaagtctatatactaacaaaactaaaggaaaagtatagttttacaaacatttggtacttataccactaaaaatattattgaatttatgctacttacaaattcaaaatattaagtatttatgctgttatttattcaaaactctgttgtgattctcgtatgatgaaataagccaacatttgttgtgatatctctatatcgagaactgttattgtcatag

SEQ ID NO: 52415 - DNA, 1930 bp, Cannabis sativa
aatgagatttatttagggcataaaacccaacagtatgttcattcactgtcaatgggttggtcattgatgagtatgacaaagtggttgagcattttttaaaccacttccgcaatttcatggggagacaaagctcggcttcaagaagattggaagaggactgccttgagtttgggaataaacttactatcgaacatcaagtgagacttattcgttcgttcaacaagaaggatgtcaaagaagctttatttggcattcactcgtctaaaagtccgggccctgatgggtttggtgcggcttttttcaaagagctatggaatgatattggagatgacttctcttgtgcggtgttggggtttttcccatctggaaagcttcctcaagaagtgagtgcaacatccatatctcttatccccaaaattgataatcctcaaggagcttctgactacagacctatagcctgctgcactacaacttacaaatgcatttcaaagatgatttgtactagactctcggaagttcttcctgagcttattcatgaaaaccaaggtgcctttgttaagaagaggcttttagctcacaatgttttgattttgcaggatcttctcaaaggttacactaggaagaacatttcttctagatgtatcatgaagattgatttgagcaaggcctatgatacggttgactggtgctttgtggctgatatcttaaaagctctctgcttcccttcaaagtttattacctggatattaagttgtcttcaaggagcctcttatgcccttctgcttaatggatgaatccaaggttcttttaagggtgaaaaaggccttcgtcaaggggacccgatgtcttcgcttctatttgtgctcataatggagtatttatttagacttctgattcagagttctaagaagaagggatttgggtttcaccctctttgcaaatccttaggccttgtcaatctttgctttgcagacgatcttattatcttctgcaagggcaatgacaaatcagttaagatagtgaaagaggccttccaatgatttagtgaagcaacaggtttgattgccaacaaagccaaatcaacggtgttctttgggggtattccaatttcctgtaaacagagacttgccaacatcttacaaatggaagagggttctttccctttgaagtacctaggtgtgaatctaagacctaccaaatggcgatctgctgactgtggtatcatccttgataaactccataagaatttacacacttgggctagcagaaacctctcttttgccagaagagctcaattgatccattcaattcttctgggaatcaggaactattggatgggtttattcttgcttcctcgaaatatcacggcggctattgacaaatgttgcagagacttcctttggggctccaagggaaacagaagcaaattccatattccctcttgggagaaagtttgtctccccaagaactcaggaggtcttggcttcagagaagggaagatttggaacataacgcttatggcaaagtatatctaggctatatccagcaaacaagacaacctttggggtaggtggattgatgcgatatatctaagagggttgagcttctggatagttaaattcaagcaagatgcgagctggtacttcaaaaaaatccttcatcttcgttcaactgtcaatgaatcaaatgtcatagctgttgtaaaaagaggtaagttcagtgctaaactgttttatctctcttatattcaagcccacaaggttgattatgcaagaaacatttggaatagaatggtccttccaaagcatcgattcataggttggcaaattgtgaacaaccagctgctaaccagagacaaccttagccggtttttgtcaatctcttctcctttatgctcggtctgctgtagggaaaatgagtcgcaccagca

SEQ ID NO: 52416 - DNA, 544 bp, Cannabis sativa
tgttatttctgatcattctgaattatatatgataacttatattatcattataatatgcaagattttttgaatatattatggtcatgaaaacaaggttcaatctatttatataattttgtaatttaaataatcatgcacatttaaatttattcagccaaaataaaaaaaaaattaaaaaataataatatatatagtgacacactgtgagaatgattgtgagtaattatatgttctaaatttaacagaaattatatatcaaaccataaatataaaaataacatgttaacataaatgacttataatcttctattgataacaaataaggttatattaaaataagttttaacaaataatattgtcactagatcatgttgatgaataattatgtatgtatgtgtaataagaaagtatctttagtacttctttacttggatatatatatgtcaaaccatgttattataatgtggaaatataagatgtattgtatcccacttggtactttcacatgaataaatccatatgttatttctgatcattctgaatt

SEQ ID NO: 52417 - DNA, 918 bp, Cannabis sativa
tacaatgatgccaacatatgtaacataaaatttagaaaaaattattgaccttctcaattaaatcttggaactctagatcttgaggttcttagggcctcaattaagcatgaagtttgccaatggtcaaaaacattacaacaatttctaattttttggaaaagagacaaaaaaggttcaacatgtccacgggggtgacctcctcccaaatatattgagacctctcactcatggtggaggaaatccgtggacacaaaacaccaacaaagtacagtaccaaacttatgcaaaatgcagtaaaggcacaaaaaaaagaagaagcataattagtacagaaaacttccccattctctacaaagatctaagaaagaaagttgtcaaagtattttgttttataaatacaagtagcaacctagaatttgatcctctcaagccactaaactgaattcgaatcacatctttcttacaagttgtaaaatatagtttcttgtatggccaaaggattatacaaaatttgtaattgaaaaaggacaagcatttactaaggatttttgtatggcccaaaagattatacaaaatttgtgtttataggcaatgcgaaggtcaattgaaggtgtttaggagtttgatctgtacactcatgaaaaaagaaaaaaataattgacaaggaactgtaagaccaggaactggattacaataccctcaagtatgcacattaagctttgatggggttgcaaaaattttaaacagatatttttttcagttattgttatccgaatttttaatagtattcctaatttatgtgtgttaagtttttagttcaatacacaacttgttttgtttgatacaaattgtttggtttcataatatctcctatttatattaatctcctacttctattacgatctttaaattgtatga

SEQ ID NO: 52418 - DNA, 2827 bp, Cannabis sativa
  modified_base (329)..(329): a, c, t, g, unknown or other
  modified_base (540)..(541): a, c, t, g, unknown or other
aagctcatactaccccttactcattgcatctaggaaccaccaagatgtatcaagatctgaagccatatttattgtggtatgggatgaagagggatgtggtagattatgttactaagttcttaacctaccagcaaataaaagcagaacatcagtgacctgtaggattacttcagccattatcacttctggagtggaagtgggaagacattgcgatggattttatggttggtttgcccagaactacaggaatgtatgactcaatttggttcgtggtggatcgctttacaaagtcagcacatttcttacctgttaaggtaacctatgcagtngatcagtatgctgacttgtacgtgaaagagattgttcgtctgcatggggtacctaagtctattattttagacagagagcctaaatttacctcaaagttctggcttagtttgcaaaaggccatgggaactagtctaaagttcagcacggcctttcaccctcaaatagatgggcaatctgagcgaactattcagatacttgaagacctgttannagcttgtgtcatggattttggaggatcatggagcaagtatttacctctgattgagttctcctacaataatagttatcaaagtactataggaatggctccttatgagctgctctatggtagaaagtgtcgttccccaattcattgggacgaaacaggacaacgaaaatacttagaccctaagttggtctagaagacaaatgaagcaatagacaagattaaagctcgaaggcttgcttcccagagcaggcaaaaggaattaggcgctttgggaagaaaggcaagctaagtcctaggtttataggaccttttgaaatacttaagaaagttggacaagttgcttatagactaaccttgcctccatcattgtcagcggtacatagtgtatttcatgtttcgatgttaagaaagtatgtgtttgatcttatgcatatcttgagttttgaagcattagaattacacacggacctgtcttatgatgagcaactagtatgaattctggatagaaaagaaaaagtccttcgaagcaaaaccataacgttggttaaagtgctctggaggcatagtaaagtggagaaagccacttgggaattggagtccgacatgaagactcaacacccggaactgttcaggttagattttggggacgaaatccttttaacgagtggataattgtagcgaccacaataattaaatatagattagtgagattataagtgctaattttattattattatcattatattggaatttttgtgtgaatgattatgttaaatgtgaataatatgctatctctgtgattttagctcggtgacgatggaaaaggcaacggaggatatcttagtcacttgagcatatatagaatttggtaatgttagaaaatatgtcatgtaagtttaattggttggtattggtgggaatgtggttctgaaccattttaccctaagccgattattgaactaggtttatattggggctatttaagtaattcaccatttttgtataattattattgagtgtctttgccaattaaggaaagctgccatatatttagataaaggttagttaatttaccttttattaggcaatttagaggatttagaaaatagaagaaaaagggctccttcattctccttctttctctttgttcggccatcaggaaccaccagcctagggtggagttttctttcaattttaagggatattaagtgtagttttgaagacttaatccaaggtaatgtcctaagcttgctctattatgacttttcacatgtaaataggaagtgttgttaggtttatggttgactttgttaattttggttctaagttggtgaatgtggttagggctagcttctttaagtcccaaatgacattttaaggtgttttatactgttgttgatgtttaattttgggtttgagcaagtctcaaacttgactcaaaaatggtatgttgtggtttatttagtttttcttgctgttattgtgtgggaattattttggatttagttttctggtgttcaagagggtatcaatgcgtttggggaagatttggttgagttgggagatttttggggtttgctggtgcaaattggtccaccggttttacatgtttccatgccagaccccgaaatctcgctttggttatccttagtatttgggatgatagtgcattattgtgtcattaggattaccatagatttttagttaaggctttggtttagttgttcaagtagtttacttaattgtattttgtgacttaggacctccgtttagctcaaggattttccattcaagtcgactggcaagcttgaatctggaacaaggtaagatagcataataatgtatatatgaatggattattgtattggatgtttccactactaacactcatatgtatgtgattttaagggtgttagtatagtgtgggatgtcaatgttgttacggtgttaccaacacgagtaccagggggtacgtcgtgcatgtggtacaactcgtagtaactcccgggagtacaataatggctctaccaacacgagtacagggttggtactttagtgaatttggtacagtggtcgtacttcccttaagaatgttcttaaccatttggtgagctcggttgttgagctcagggcggcttaagcataaagccggtcttgcattgcttatacatatgtattgcatatcttattgagtctgttgactcatcaatttgttaccctgtgtaggtaaagggaaagctaacctggaggaacagtgagatggagctcggcaatgattgtacatatcg

SEQ ID NO: 52419 - DNA, 1352 bp, Cannabis sativa
  modified_base (27)..(37): a, c, t, g, unknown or other
taccataaaaaggaaaaattattttgnnnnnnnnnnngccaaaaaaggactttacaaatacctaaaatattttttcaagaatctgattggaaaagttacatattggcaatatgtcaacttggtccctgggcccagtgccaggtgtcaacctgggcgctgggtcccagttttgacccctcaaaagttctgtttagttaccgaaaatagttgaatcttaatctttagttaaaatgaagaacatgcttagaagagttctcgaaatacatcatcgaaatcggcccaggtggacaaaattccaacctgggtcctaggccaaccccaggtgttgacttgggtgctaggccagcctcgggtgttaacctaggcgctgggccttgcttctagcacccaagaatagttgtttcttccctgaaagtacatatttccctatttttaatgaagacaaagatgatgcaaaagtaggattgttgatctaatacttggaagtcgctctgattgacaaattgttaaccagggcgttgggtgctcaaaaatgaactttctccaaatctgattatgatgtctcaaatatgttcgtggtatgtctagttcatggcccaatgcaaagtttgatccattttcactaagacggtcccaaaaactaaaaccctagttaaggatgcgaacctgggtgttgggtgaaaccgtaggtgcctaggttgacttcggggtgcaggttcgtgtaattttagcacacagggcctggattaggttgctccatgtcttcaatgtatataatgtcaaaagatagtgagttagaaatgagttattgaagtctgaacttccatcatcctagaggagttcttaaagtcaacctgggcgcagggctagggacccttcccaagtcgacttgttatggctcagaactactcaactccaagatgtcatctttcttcccacgtgtcaaatattgacatccatgtcatcagagctagttttggggtaaatattttctcccaagtaaactttacacttgtgtgaggttaacttaatgacgtgaactacgctcgttttgaattctcacatcagaacttttttttttttttggattttattgaaatatctgctaaaattacaatacataccatcacatgaaaaaatgagttataattgtgtcaatacaaatagagtaatttgcgccataaatacttaagtttaacttccggttgtacataaatacttaagttcaatttttgacgttaataatacttaagtaatatttcaggaactccataggtactaaggtacctgaccattaaatgtcaagttactatccacgtgtcatttttttattagtatatttaaactatttt

SEQ ID NO: 52420 - DNA, 765 bp, Cannabis sativa
aaataacaattttttatattatttattaaattaattttttatgcaaataaatgattttttatactattattatactacaagaaaaaatagttttcaataggacaaatttcatcaatgacgggtgtctttttcgtgagtgatgactaccaatgatgacatgttgtcagtaaaaagtcgacggtgataactcgtgagtaaaagtatttaggacaacattcaaagtcgtcacttaaataaatattagtgacgacaatatcatcattaataatatgctaatatttttttaaaaaaaatgctagactagctatcaatcacgacttagtcgtcatttattatatattaaaatcatcactgatacatatcaattttaaataataataattacaaattgaattattttattacaaaaattaatttatattaaatatttatttttaactaattttgtattaaatattaatatacaaaataactataccaagagtcaaacataaataacaagctaaaacatttcatatcaaatattaagaatcaaacataacaatattattaaactaagatactaaaagcgagtgtcataaaatataaataaatataaaaatgagagttcataaaacgtaaacaaaaatactaaaaaagaaatttgtagtagtgttatcatcatcactagcatctctcgaaatttgctgttgaggaacatcatgtaagtagtatggtggcatatgcaaactcgccatcatccaagatatatctgctacccatatg

SEQ ID NO: 52421 - DNA, 1422 bp, Cannabis sativa
ccactgcaaatgtacgctggtaaaactttaatctctttgccaacacagtttgcgaaatgcgctggtaaaagttacttttaccagcgcagtagtttaccagcgcagtagcgatctgtgctggtaaaagtgacatttattgtagtgactcacaattataagagatggacttatataaactgttaacttctaattagtaatttactgcatacatatatagttaattctttcaatgacactatggttggattcatatatttatattattggaaatcaattttatcaaacaaaaaacatacaaataacaattggccaaaaaaaaaagtgttatcatatacataaataaacaaattttgtttcagagtaaaattgcataatatatatataatgcatgtgtgctgagttcattaggctcttcttcttggtttccattaacccttataatttttgggttgaacgtttaaggttgggaggttgaataagccacttattgccttggatgaaagtcatgctcatgaaaggtttgatttcttcatcactcaatatctttgcatactttacacgcttagaagtacttgcaccaggtcccatgcacttgtactccccgtaaaacacatctctatatttgaaaaattcataattgtaattagtaaaataaaaatatatatacatacatacacaaacacatgatttatactaattaatacgtacttattgttatctccttgagcttggataggccacatgccattggaccagccatcagcatcaatattgttgcccatataagtatatgcaaatatgactcttggcatatctttccaagccctacccaagtaagtgtcaccacttgctatgatgttgcaatgaacaaaagtgaacccactcttttctgaaaccttggctcttgcttgtgctgttctgcatatatatatacatattcattttgtaatattgttaagtaaaatcacaacatgtgttataattaattggatgagtttatgtgttttgcaaaaattactcatattatattatctgttttgtaattaaatgacaaattatgtatttatcaaaatagtacattgagttgattttttttaaaaataaaacataataattactcaattttaaggtgttatgcataagattgattatattttttgtatttgttcgtactaaaaattattttcaagttagttatattaaaaaaaaattaaaaattgagctcaaactactattttatactattttaaaaaatataaggttcaatttatcatttaataaattaaaagatctgaatcagtaattttacaaaaacataatctaattaaatatataccaaataaagtgattgtcaattgccgaagatgaagtcaacagtgccttcaaccatagcaatcactgaagaaatgtctgcccttatca

SEQ ID NO: 52422 - DNA, 912 bp, Cannabis sativa
ttattggaccaactcataattttaattaaaaattaatttaaaataattacataataaataaattattaataaataaataaaaatctttaatattttttttatttcatttttctttttcatttattttattctctttgacttagtcttcttcatcatcctcgagcacccacagacccatatttgctcaacaaacaattttttttttttgcaagctctatttcatatcttctttctttcttgccttccaccattgatttttttttggtaaacaccaccattgatttaaactccacattggaggttggctcgtcgaacttcgaaaaatgcccaggtcaaggccatagtgggtgaggcttcgacaacggggctatctacacacaagggccaaacatcatagggggaaagaagcgttagatctgtttagatctctcgctcgcccaagttgtctcctcttcatctcgacgtcaccgactccctttctttaagctgcctttacgactgcgtctccaccactagcctcatctccaacaagaaaaaatccacaataagtcgtccttgcttatctttgtttttgtctctctctctttctcggctccaccgccctttctcactcttttttatttttattttaatatttttacagatctggttggtggtgagaaaaaaatgtgagtttaattgattttttcttaacttcgtggtgaacgacaaagggagcttcgagaactgtagggcttggggttcgaagcccgatgaaggccacggtggccttgactccagagaaagacgaggagatggtggcctccatttttgacagtgatgtttcttcgacggcgaaagaacttctcaggcccgagaaagagatttggggcttagagatttaatttctctttacacttttcttccaagttc

SEQ ID NO: 52423 - DNA, 4530 bp, Cannabis sativa
  modified_base (39)..(52): a, c, t, g, unknown or other
  modified_base (2412)..(2416): a, c, t, g, unknown or other
aaaaatcaattcagagtcctatttgtactattttagaannnnnnnnnnnnnntttgtcatttaacaaaacacagagtccaattagtaacttttattaaacagagggtccaaaataatatttaccctttgtaaaaatctccaatatcatttttgtgtgtaatttaaaagtaagacaatcattactcaatttactacaagaaaatcaaatgaagagtctccaccatagcattggttgacacttttttttattttttaacaaaggattattggttgagagtagagagaaaggaaaatcgcagatttgtatttctgtacggtaaagtacacgtgtcatgctaaagctggagcgtggaaaactgaaagtaatgcgcgtggggaatagaagaatcataacctaggatactcagaaagaaagtactagattcgtatagattgccgacacgtggaggcatttgaacaagggcagcttcttccttttataattattttaacccaaaatctaaacaaaaatcacatacaatatgatgatatgttttgtatccaatgtttatttagactgaaacattttgactgtatgtaatattattttagggtatttttttaagtacacatatcattttttttatatttatttgttgagctaaatgtttttctttagatttaataacactaaatatattacttaccaaattactcaaatgtaattatgaagttaagattagtagctaataaaccctataaatcattcatactcaattattaatatagctcatttacaaaaaatatactctaataatgtatcaagaagtgatgtaaatttaacacattgtaaaacttgtaccaaatttgacacagtataaaatttacataacaataaatgtattattttttttatttgtatttatatcatttgtattaatttattagtatgtttaactatagcattaaattattaaatatttatatttttttattgtcttatatataaaaataaaaataaaaaaaataagaaagttattaatttttactttttgtaataaaaatattaaataaatattagatttacattaaaattttgtaattatatattggtgcacaatactaaaatttgatgtaaatttactcccacaaactatttttttgtgccaaatgggaaatgatctttaagatgaaattttgtttggtttgactttctattcttgaataattttattagtttttttgttggtgttttattattattttatttatatatttcattatctttaggtaattagggataaggatattaattaattaagttaaattaatcagatcataagatggttcaagtaagctcaactaactaatcgagccaatgatcatggagccggctaagtgaactgatatttgagctaattatcaaaaataattttcttaattgcaacttgcctatatttttattattgtgattatgtagtcatgttaatggagatgtagtactatatatatatataggaagttttttttataggggctctaaaaagacttcatcagaattagaacacatcacgtcatttaatgaagttgtattttatttcagcgagaaacactaaattattgagcatctttatttttatatcattttttattttttatatatttctttttttgttttgttagttttcctctctcactttgtttttctaaaatttttaggaaaagatctatatataatataaaggaaagcacaaaataaatttaggtgatatcttagatttttttttatctatttttaaaattttgtgaattttttctattttgtttagaaaagaactacaaaatacatggaactaaatgtcccacattgtttataaattatgtagacatcatccatgtaggttataaatattattcttttcatgccatattcatccaaaaatatttttgtatatgggtgattgattaatttcttaccctgtgagtttttattaatttacttttaatgtcttataattttttttttatctttcatctaatatacatttcattattatattttaaaaataattatttaatgaatatttattttataagttttttatatttgatgtaatatataattatatataatttattatgagttaattttattttaagattttatatatagaattctatatttttattagcctaacaaaatattcaaactaaattattttaaatgaaactaaacataatttttttctcaatatatatgaacattttcttaccatttatctattttattatatgtcttctaagtaatatatatattttgtaagagtctcaaattgtttataaactatgtgagtattatacttattaactacaagtaaacacaatattatatttcattaaaaaaatactacaagtaaaatatttcttcattcnnnnngatttgtccaaaaataattaatattgtttctctcgggcaattgaataccttacccaattaattttatataattatatataaatatatattcaattgatcaactttatgtaaatattcaaaaattaatatttttccatttacttataatatttgtaatttttcatttcctaattgctttgaatatacatcttaattagtttatgtatatacatgttaattgagtttaaaaagtaatgtggcactagaaaagagaagaaacaaaaatattcatcaattaaaataataatattagtttaacttaaaaattaatacaaacaattaatattataaataataatagtaataaaaaaaaaataacacatcatgattcattaatttaataaatttttgcaacaaaaaaataataaataatattttaaaatatttacccctcattcaataaaaacgttaaaaatttacaatgtttaaattattaatacttaaattaatatttttatataaataaaaaaaactataaaaatatttaatttaaatatatatgaataaaaaattaaattttgttataaatgaataattaaaaaatgataatttttttaattacagaaaaatttataaatttttataatatttgattcatttaaaaaaatttatatttttaatagttctattttattataaataactttatctgaaatgtgcttttatttttattgtactataattaatatttgtgctaatcacaaataaaagaaattttacataaatatttatataattttatactactcataaaaaaaatataaaatagtattagacttgaaattttattcgtaactaattttttttaatgtaaaattttaaaagattattaaaatcacgtgaaacgcggatgtattccctagttgttatataaaggaacctaattttttttaatcacataggtttttgtcaaagatgtgatagtagatattgctttgtcttaacttttgcagtgttctccttttcattaaataaatatatcactcttatattaaatacggttatttaacacaaattgttaatttaatagcttttttttcgttaaaattaacggctaaaacttataacaccgttaaatcaactaattaattatctttttattcctgaaaaaaaaactagttttaaatatctaaatttaatttaaaagtaccaacaaaattaaataattatttttatataattttaatttaaatttggactttaatataattagctaattataaattataaccaaattattagttattttgtttaaaatatataaatttatttacttattttattgtttaataaaatcgattagatatattttgttataaataaatttaaactaaattaaattttatacatttaaataatataattgagattaggtttagttttttctattttaaattaataattaggtgatagtaattttaatacaatcttaagtaaacatattacatattactaatacctaatagtatatatatgtacctaaggtgtggatcattcaagtaattctactaatcttatttgtttaaaaaaataagattagctatcagcccacaaactatttcctgaaagtcgatctagttttacgaacacttttactctccatcttacttattattctaagtgaaaaagcaacctgtatattcaatgtcaccaagagaatagtcttccataaaggacttcaatctcttatgatctttgatatttctcccattatgatctttgatatttctaccttttggtatgtttgataagtccctcttttgagtgctctgtgtggatttgaaataatgttgctgtactggtgttctggtcgattgaatcatggatttacaaggattggaagatcaatgggcatcattggaatcggaggaagaggatgaggttggcttagttgcctcacttgtcgaacaagaagaactggtcattgatactcgatggtgtctaattgggaaactcctctctggcagagttagcgattttgatgcttttcaaaatatgatggcatttctatggcaaccaggcaaaggaatgtacgtaaaggaactaaactctaatctatttttatttcaatttta

SEQ ID NO: 52424 - DNA, 1971 bp, Cannabis sativa
ctctaactggaggattcttcctttctagccttggttagggcaaggttgtaacattcccgtgcaacttgttgattccctctcaggcaccctaccccattttttgttaggaacttgacgcactaatgaaatatcgatgtaacaacttataagtcatataaggttggtcggcccaacatgacattaaaggctgatggaacatccaataccaaaaattgtgccatcacagttatgctcttcggagcttgcccaacagtaagagaggcaaattttccctaaaggtgcaacactttggtcggagaaatcgtacacgggctggaggtatgggatcagatctttgagttggagccctattttttcatatggtgtcttggacaagatatttgttgaggctccattgtctatcatagttcgggccactattttattagctatctgtacttccacaactaatggatcattgtgcggtaagcgaactttgacagcatcttcttcactgaatgttatagtgggttcccccacccatggtacttttggcttcctctcttctacggccaggaccacttctttttgctcgtgttgtaaggtttgggcatacctttcccgagctttgcccaaatctccagctatatgtgggccccgatgatgacttgcgaatgcccgtctattggtggaggcagtaatacatcttggttattttctacctgggcgaccctctgactctggtcagccttgacatatttttgtacatgcgagttattttttcatatcaggaattcaatttctcgcttcagattgtagcattcattggtgtcatggccataatatccatgaaaacagtaaaacttggatatgtcccgcttacttatgtcctttttcatgcgagtaggtttctcttacggaactactgactgagtagccatatagatggtctccaaattttcagtcaagacagagaaagcagtaaatttgttcgaattctctcttggggtctgttcggctttgcctacaaactttccctatctcccattgccttgtctgttgttgttgttagatcttttaccattcgagcttgaattactagggtactggggttttgaatggacattccagctgagggagcttgtgattggcccaatttaggctcgatgtctactcgctgaatggcttcttcaagcttgatgaaaccatctgcacggtcgaggaaattacacatagaatccactggaccacttttcttgatatccttccgcagctctttgagaatctctatgcctcctagtatggcggctaatttcccctctttagtttattgtgccacttttgttgcctccgtcatgaatctgctcatgtaagctcagaggggctctcctggtctttgcttcacttcgaccaggtcttctaaatgtaacgggagttggcgagaagaagagaattgtacatgaaattgtgaggagaaggccttccaagagttgaaccttcctggtgtcaacttgaagtaccattgttgagcggcttctgagagtgtggcagggaaaactctgcaacacacatctcctcataccccttgcaaatccatttgcatttcaaaatataagagatgtgataagggatcttctttccctatatacatcttccaggtcggcatcttgagcttgtggggtaaacggggatccacgtgttcggtccaacttgagatcatttagcttttgaccggctaggccttgtaacatattaaagctgctcagttagctaatccagattggtgaagatctgagagggggtttcagctggtcaagctagagattttacagtgtcagatagtgggatgctattgtttaagaccatgatttgtgttccaagtaatacggaacttagaaactaaatcctcgaagaagctcataccactccatattcattgcatcccggcactaccaagatgtaccaagatcttaaaccctacttttggtggag

SEQ ID NO: 52425 - DNA, 1876 bp, Cannabis sativa
  modified_base (1144)..(1149): a, c, t, g, unknown or other
ggcataaatacccaagtttatcttatcagttgcagtttaatacctaagttaaaattttggcggtaaaaataccttctgtcacactttaagaagttttgtaggtacctgctgttaagtgccatgtcactgtctaggtgtcacagtttgattggtccaaatcatttaatttatatttttatttgaaattgattaaaaattatttgaaataaaaaaaattaaaaataaaaacatataaaaattaaattaaatcaaacattttttttgactatcacggccaacacttatcccacaccaacaaaccaatgacaaacccatatatggaaaaaaaaaatcactcctttataatcaatgacaaccccataaacaaacaatgaatatatttaccataaagacacaccaatgccaaaccagtcgtacaccccaggaaagccacaccccaggaacaaacaccaaaccagtcgcaccagttgcaccccaagaaaaccaccctagaaggatcacacaccagtcgcgccccaggaaaaccaaaaaccaaagacacatgcaaaccagaaacacactagtcggaccctggaagaactaaaaacatactctaaaatttcattactcagcaaaataaaacaaaatacactaacaaaattcagatttatataccaaaattcataaagagaatcttaatggtgagaaataaaatctggcaaaaatatacatttaatataaaataaaaccaaatcaactacactcatatctcaaaattacaaaataaaactttaaatttccctaagattatttatatttctttagattagaaatttcttacgatagattccatgactctcgtcgatgcccaaatctccgccaaaaccttagccaaatctatgtcagtttgcacagagagaaacaaagagaaggatcccaagggagagagaaagagaggcagagatatagatctaggggttttcaaggtggtgaagttcggagttgttcagtttggctctgagcagagagaggtcgagaaagagaggagagagggaatggagagaacttgagggccatagactgccggagttgctatctggctttgcgcagagaaaatagagagagagagagagagaagtcgagaaagaaagggagaaccaaactnnnnnnggttccttgatgctcgtggtggttcttccaaaaaggctcgagagaagtcaaaaactcagggcgatgaaggctctccctctcgtccgtcggtgccgaggtagacgaagcaatttttttttcttttgaactcagtagacaaagaaattagatttaggtttgttttgattttttttttcaaaggtttgttttgatcttgatatttttttatttaattcagttttattttttattatttttaaatatttaaaatgatttttattttaaaaaaaataattaaatgatttggagcaatgagtgactgacatctggggctgacctggcacttaacggccaggtacttacggaagttccaaaaatatgaccgaaggtatttttaccgccaaaattttaacttaggtattaatctgcaactaaaatataaacttaagtatttatgccgcaaattactctataataaataattatttaaaaatataattctaatataaagtaaaattatagatatattttcttatttcatatgattattaataattttatttattaaaaactaaatgcacaattttattaattattatttggaattatttattaagaagtttaaaattattatacgttttgttaataaatattattttataaaaataaaaaaataaggtggtgtagaaaaaaattacagtgttccccataatgcattattttcatatctcgatcattcaaaattatt

SEQ ID NO: 52426 - DNA, 4860 bp, Cannabis sativa
aaccaacattgcagagagagtgggaacgcgtggaactcgcaagcgcgtgaagcctcgatggatgcaagagtttgttagaatggagaggagctgaggaactcgcgggagcactagcaatctgttattttctctgttttttattccttagtataaatagcagaagaatgaatttcaaaagatttatgctgaatgtaaaagcttattggcttgtggagttttgtattgactcgaacaatactcattttattactgagctatcactggtgctttcattggttcttcacctccagcatgaagaacgaagaactggccgccatgattcagaattttcagaaaaattcagaggaacaatttgctcggttttcagcgagattggaagagcaggtatctcgcctggatgaacgagtggaccaattgcaatcaccattatcgaaatcgcttggcggtcacggacaagctagcagtggaatcggatctccgtcggggcatcaaccaacaactactcttgattctcgagaggtcaactctctactgaaggtgttgcgtgtgaaggttcatcgcttcgatggtacaaatgtggaagactggatttataaaatcaacaaattcttcgatttacacggggtcttaccggaagtacgattggccatggtcgcatttcaccttgagggagctccttcgacttggtttcagtggatggagaaaggaggagggttctcaaattgggaatcatttatacgggcactgaggatgcgtttcggagtctctatttatgatgatcctttagggagaatttcaaagctggtccagaccgggagtgtctcatcctttcggacagaatttgagtcactgatgactcaaatcacaggagtttcagaacagtattttctgaatttttttgtatggggcttgaagaatgaaattcgcagagaattactattggctaaacccattgatttagccgacgctatggcgaaggcacaattgtttgaggatcgtaatgacgagctcgtgggtcgggttagaggggaaaccggacgttcgaattggtcacctaagtttatgcatccaccaactccggtaactcagaagggaataggtgtgggttccagcggctccaacacaagtacaccggcaactacgaagttttcaatgccgagcgccccttccttgccagttaaaaggttatcaccggctgagattaaagagaaaagggagaagggcttatgctttacttgcgacgagaaatacagcttcggtcataagtgtaaaaaccgagtgctaattctctgcacacagggagacgaagaggaggacgaggatgacgagacggggaaagttttaacggacagtgatgattctcaaactgaagaagttagcctgaactctctcgctaactcaacggatcccaggatatttcggattcaagcctttcatggcaaggagcagttggaggtattaatcgatacagggagtaataataatttcatccaagaagctttggcagccaggttgggtttgacttgtgtggaaacgaagaggttcaaagtatatatgggcaatggcaattccttatggtgttcacagttatgccgaggggttgagctactcttacagggccataagttcacggtggatttatatattctgcctatttggggaattgatgtagttttggggatgcaatggctacagacacttggcccatgcattcatgatcacaaggagcttacaatggaatttcaatggcaggggtctaacataaaactcgcgggaacgtcgaagtccgatgctcctcaattatctattactcagctacgttctatggtacaggaaggagacgtgactgaaatgtttatgttggcagcaggccgtgacaaccatcagcaagcagttggggagatacaggagatcgaggccaccttacccgagttagcgaagggtattctcacggaatttactgatgtttttgcagagcccactcaactaccaccatataggggtacagaccaccgcatatgcttacaaccaggtactcagcctgtcaaagttagaccctatcgttacccatattttcagaaggatgtgattgagaagttagtaggcgaaatgacgagctatgggtttgttcggacaagtaacagcccatattcttcacctgtgttgttagtaaagaaaaaggacgggtcatggcgtttttgtgtggattatcgagcgctgaataatataaccattaaggatcgatttcctatacccactattgacgaattgttggatgagttggggggtgcacaggtattttccaaactagacttgagagcgggttatcaccaaattcgcatggctccgcaagatatccataaaacagcgtttcgcacgcatgaaggtcactacgaattcaccgtcatgccatttggacttacaaatgcgccatccaccttccaagcaaccatgaatcgggtgttcaagcctcttttgcgccgttgtgtgatagttttcttcgatgacattcttgtctacagccgcacttgggaggaccactgccaacatttgagaatggtattacaaatactgcgtgatcattgtttctttgctaaagctaacaaatgtaaattttttcagccaaccattgattatttgggccatttagtgtcggctaaaggggtgcaggcagatccttccaaaatttcagccatgttggaatggccacaaccacgtaacatcaaacaattgaggggatttctggggcttaccggttattaccgcagatttgttgcacattatgcctctattgcagctcctttaacagaattactgaagaaggatagttttcattggaccattcaagcagacgctgcttttcatcatctcaagcaaacaatgacggagactcccgttctctcgctgcccgatttttccaaagagttcattatagaggctgatgcctcaagtgtgggaataggggctgtactcatgcaacaaggtcatcccatcgcctttttcagtaggaaattgggacccaagttcgctggtacttcagcgtattttagggaactacgggcaattgtagaagctgttacaaagtggagacaatatttattgggtagacatttcaccattcgcacggatcataagagtcttaaagagctccttacacaggtcattcaaacacccgagcagcaacaagtccttcggaaactcatcggatttcacttttcaattgaatataaggcgggcaaagaaaactcagtagctgatgctctttctcggcaacatgaaggttctttttctctgttggcagcagctgtgtcatcagcttgtttcgaatttttagaagaattaaagagagaaaacatcacttgccctgacatgcgagacttacacaaccagcttctagtggaacgtaatggagttactgaattttcagcacgtgatggcctattatactttaaacagaagctttatatcagccctcactctaatctgaaacaacaaattatgcaggaatttcattcatcaccagttgctggacacgcaggagttgacaggactttgttgcgcttaagtgcaaatttttactggcccaatatgaaggcagaggtgcggaaatttgtccaatcttgtattgtttgtcaaacagtgaaatactcgccaacgccccctcttggattgctgcagcctttggaaataccagaaagagtttgggaagatctcgctatggattttattgttgggatgccaaactcaggtggtgttactaatattctagttgtggtcgatagatttacgaaatacgctcattttggagcattggcgaatcactatacagccaccaaagtagcagaattatttgctaacatggtcatacgcctacatggtctgcctagatcgattgtatccgaccgcgacccaattttcaccagcatgttctggaagaaattatttgagctgatgggcactaccctgaagatgagttcggcatatcacccacaaacagatggtcaaacagaggtcactaatagatatttggagcagtatttgcgggcatttacagcagataatcctcgccagtggagtaagttccttgcttgggccgaataccattataacacaagtcaccattcagcaatcggtatgactccgttcagagcagtttatggccgagatcctccttcaattccagcatatacaagaggctccaccagtatccaagcagtagaggaagatttacttgctagagatcgcattttacagcaactaaaacagaatcttctacaagcacagcaccgaatgaggcaacaggcgaataaaaaaaggcgagattgggaatttaatcttggcgagttggttttggttaaactacaaccttaccgccagtccacagtggcaaaacgtctcaactccaaactctgcagaaggtattttggcccattcaaagtgaaggcgcgagcgggtccagtggcttatacattggagttaccggaagggagtcgtatacatccaactttccatgtttcattgctgaaaccatttcacggaaactcaactccacaatgctatcctttaccagatgtcagcatcaacaacaagcctgtcatgattccacaggcaatcctggctcaacgaacagtaggcaccaaaagtgacaaggagctccaagtcttggtacagtggactttaagtgcacctgaagatgcaacatgggagaattttcatgagttttgccaattgtatgatctccatgaccttgaggacaaggtctttgtcgaggaggggagtagtattaggccaggcccaatattaattgacccaaacaaagcccagaacagcataaagggctggttagaggagggaataacc

SEQ ID NO: 52427 - DNA, 837 bp, Cannabis sativa
atttgctcggttttcagcgagattagaggagcaggtatctcgcctggatgaacgagtggaccaattgcagtcaccattatcgaaatcgcctggcgctcacggccatgctagcagtggaattggatctccgtcgaggaatcaaccaacagctactcttgattctcgagaggtcaactctctactggaggtgttgcgtgtgaaggttcatcgctttgatggtacaaaagtggaagactggatttataaaatcaacaaattcttcgatttacacggggtcttaccggaagtacgattggccatggtcgcatttcaccttgaggaagctccttcgacttggtttcagttgattgagaaaggaggagggttctcaaacagggaatcatttatacgggcacagaggatgcgtttcagagtctctatttatgatgatcctttagggagaatttcaaagctggttcagaccgggagcatctcatcctttcggctagaatttgagtcactgatgactcaaatcacaggaatttcagaacagtatttcctgaatttttttgtatggtgcttgaagaatgaaattcgcagagaattactattggctaaacccattgatttagcagactctatggcgaaggcacaattgtttgaggatcgtaatgacgagctcgtgggccgggttagaggggaaaccggacgttcgaattggtcacccaagtttatgcatccaccaactccggtaactcagaagggacaaaattaagtgaagtaacagaattaatttctcgaacaaagtaccctaccgccaatatttttttccaaaaatatgtaaaattaagacaaaca

SEQ ID NO: 52428 - DNA, 972 bp, Cannabis sativa
tgacaaatgaataagtaaaggacaaagctagtatttactctctgaatttgactaccaagtatagaagaagatcataatataaaacctcaaatactatacatatttgaggctgcaaatgaccttctgccatacatattaaaattagtctttttctatcaacatcaccaaattcataatctctggtaaatattgatagacaagaaaaacaaggcttcaaagggggaagaaatcgatagctcaaccacaaagctagaacaatatcgtgacaatttggtaactcccatacatcactttgtagtatatgtctccgcaggtatcgtaaaagaccagccatcgattttacagctaaaggaaaccttgcacttcttaacaatttcatgaaacttatcaaaacttacattatcaaaagtatgttcttcaaatagaagccaacatccatcataagacatgtttttaagctcataaatttgaacatttgccttaatcttcaatgtgattgtcataataatcttactttcttttgcatcagattaaaaagaaattttcaaaaaaaatcccgttcatatttttccttccacaaatcatcgagaacgaaaaaaaatttcttctcgctagtttcacaactttttccaacgattttctccaaaatagtttttgttatcttaataacaacaaaattgttggatacaatcacccatacttttaagggacactttgctttagctgggtttcattctttttgttctagatgatgtgtggaatgagaaatacgaatggtgagatcttttgaaaagctcttttcaatagagttcttttgaagcaagattattgtgacaacacgtacatatcacattgaagataaaagataacatattcaaacttataagcttaaaaacaatatatgataagggatgttagcaattattcgaaaaacacaccttaataagataagctttgactaatttcatgaaa

SEQ ID NO: 52429 - DNA, 1067 bp, Cannabis sativa
attattctagaagtgattaatagttatgattaattattgtaataagagttgttgaaaatagggtaacaatcacatttttattatttatagtactttaataaaaaattcaaatgccacatagtatatgagtttaaagcttgtaaaaaaaatttacttaattttttttaatttgaatattaatgatgaccaaaataattattttgttatttgagaagtacaaagtacgaataatatccaaaacaataaaaatactaattaaagataaaaaaaaaattaagcagtatatagtattaatttatgtaaaaaaattaacttattgattaaatattaattattaattaataattaatatttttgttacttatgttttacgaaaccaaatcctctctccctagtttttcttgtctctctgtcccaagctaattaaaatgcaccactgcaatttaattgtcataccatcatttaacacatttaacagaattaaaggagtatttattctagttttcttgtcataacttttttttttctttgaaacgttctttctatagtttttttatttattttttatttttagaataatagtaaacacggtcccagatcacaattcttccaaggaagttgctaaaagatgtagaaagcatttgcaaagtctttctttggaaaaggttgacagtcactactagtcctggtttagtagcttggcatcaggtccgttcaccaaaaagagctagatgtttaggattctgaaagatccttgagtggaacactgcagcaatgaggaaatacgtatgggcaattgccactgaaaaagataacttattttttaaatggatcaatgaagtttacttgatggagaagagttggtgggagtaccagctaccaactgactgtagctggtactggaagaggatggtggctatcaaaaatgctctcaagaccaagatcgatcaagcttcatttgtagccttgaggtatgacatcaaaactggtcttgatttattctttactcaaactaccgagatgagttggagtagaatagtttggaatagattgaatgtcccaaagca

SEQ ID NO: 52430 - DNA, 1978 bp, Cannabis sativa
  modified_base (1549)..(1555): a, c, t, g, unknown or other
aatactaccattctagagttataacctctggttattactctgttattgaagatattaaaaaaaattcttactgaaacccaattaaatatgttttcaagaattgtatcggaagttatatttgattgcgtagtagctgaggacatttttcagtgcttcctcgtctttgtatgcctgacctttttcaacttctgagtggtgtttgtctgttattagcttcgcgttgttgatgtcgatttctggatctaatttttttactattattttcaagcttttctaccatttcttcagcaaccagattcatatagtcaactatgtcaaatttgacgctgtcaaattctcttatttctgactttcctccttcttctgattggtgttcgagtgtgtatgtttctattgttgttgtgttgttttcaagcattgccacattttcttaatacggtgttgttgtggatgtgatatttgggattgcaacaggtgttgtgttgttgctctgtccgttcccaacgaggaaggaggcgtcatttgtcccttgttattgttcacagtacaaaagaaaaaaaaatggtagtataaaagaaaaaaaatgggcctgaacaatataaaagaaaatttctgtcgtgtggcagtatttttgtaaagattagggaaaaaaatcaatatttttgtaagttttcctatatatataaatatagggcggggccaaacattctgggagccttgttagagagtctcacattgttaatgtatgaaaatataatagaatatataagaggaatgtgctactctcctcgcaatattaccaattggttttaagatgtttcgagatgaaaccccattcaccttatctcacattctaaccaaccttgtagaaaagattaaaattagactttttatatatataaaaaaagaccacaattcaattactagttttttttgtttcttttcttttttttgaaggtgtatttctaaatttctaattatattttttgttatgtatgtataataccaataataaaaaattattttctttctaaaaaaagaaattgggcctttaaaaataggaggttttgtgcaatggtccaagctgcccaaagcttgagccaaccctctatatatattgtagaaattacattatatatggaaaaattataagaatttattttttttatggcataaataaataatactatggggttataagttttttttttttttttaaacatttatatgagattttttatgccatttttttgtaaaaaaaaggatagaaatatcatatttgtaaaataataataagtttcgctgaaaaaatcactcaaaaagttagtgtcgccggaaaaatcactgaaaaagtcactgtcgacgaaaaagttatcggtaaagtcactgtcgtcgaaaaaaattactggaaaagtcatcagtaataaatgtctcaaatataaacaaaaatagaaccgaatctattacataatgaataacaataaataatacaaaataactcaatccagttataattgaaatataaccggttctgtaacataatgaatannnnnnnataacacaaaataactcaaactagctatagttaaaatagaactcgttctataacagtgttataatgaataaaaacaaataacacgaaataactcaaaccgattataactaaaatagagtcggttatataacataatgaatgagtatttttgcggtaaatatatggtatgtgacatgtgtgtaattatttggtgggttagagcatgttaaataatgaatatttttgtttgacttattttatttaactattttttgtgtgtgagtttttatctttaattgctttacggaactagttttttgtcttaaattttaacctagttgataaatgcaatcaatttctttgtaatataattaagttactgtgtgttattttttgtgtttatttattttgttatggaaccgattcttttcatatttatgcctc

SEQ ID NO: 52431 - DNA, 1215 bp, Cannabis sativa
attataataattaaacaaaaaaaacaataatattaattgataatatacatattttttctattaaaaaaccaataataataataaatacatagtaatgactaaaacaaatatataataaatctttttcaaccaacagctaaggccttctatcggccttaaacccaagttctaacgccactatgcaaattctaccccaatggcactaaaaatcattcatacagaaaatactcatcaagaaaatatccaagatatccaagaaaatataacaattaccataaaatatccctattagcattctgcacatcaagtgaatacaaaccaagaaaactatgaaaaaatatgacaaaaataagaaaaaaaattatcaaaacccaaaattacatagccatccacggtgatgagctttctaatcatcgtatatagccatcgactccaaacagccacaatcgccaaccccgaacaaccaccatcgtcgtcaatctgtataaaagaatagagagtcaacacagaggagaagtagagaagggcgtcaaaattagtctacttcgatctacaaaagacggtgacagggtgaggagatcgtggcggaagacgtcggagcccatccacctgcacgaattagagacaggttgagagagagagagagagagacgagggaatcgtgtgagatgaagggggtggagatcgtgggcgcttggggtgaagaagccggcggttgagcactgaaagtcgaagggagatcttcgttcgccatcccaggagaagtggcattcgatgggagaccttcgtcttcatcgttccagtgggagacgaagggagatgatgagatctcatcagattttatttttttttttgaaagcaaattcgtggagactggagaggctagagagaaatggctgaggttatttagattggttttcttacatttttctagggtttgggagtctttttttttttttttttgataagtgtgtttgggagtctttacttttgtattatttcaatagaaaaaaaagactcttcatattaaatttatttttcagcaaaaaaaaaatttaataattttatttcaaataaaaaaaattatttcaaaataaataaatacataaataaaacaaaaaatattgtttattttatcagatcaaaaaaaatatttaaatatttaaataaaatattttttgttgaataatgtccactttttttttttattatttt

SEQ ID NO: 52432 - DNA, 1003 bp, Cannabis sativa
  modified_base (303)..(304): a, c, t, g, unknown or other
ttttgggaattgggaagctaaagctaataattaataatgtggtaatgtggatggatgactgaatgactgagaacatgatctacaattatggaatcttgactttcctcactgatcgaatgttggttcccttcaagtgttaattttagaattgaaaagttatgcacaaatttagatcgaaactaaattatactttcactagtgaattaactatactaaaggataaaaaagtaattagaatggtaaaattataatttgactaaaactaattacgaactgacacaaggagggctaatcactagaatnnattatatcaatagacactgcagtaaaactaaataaatataattctataattactaagagttcaattccatatttatggtggagtaatcatagaattaataatcatgattatttgattgatgagattcaataaataatctaatttattgaagcttagaattataggttcatagtccccggattgccaccttgaaacactatcaaaggaagggataaaagttttatatggaaagtaatgatttattttgtaataaataatttatttttttcaaatttattaattaaataaatgggggaaaaaagaaaaaagttgtctggacaaaagacaccaccaatgtcttgttaagacataggtagtgccactatcattgtgtcctgatgacacagtaataggcgcctataagatagggttgtccgcactgaatttgtgtttgggttagttaattaattaattaacttaaaataaatatttatttaaatttaaatttgaaagtagttattagatatttctgatggttgagataatctctcaaggtagttgagagatttcttcaagtggttgagagattccttcaaacggttataggaaataaataggggaattttaattttatacataattttaaaagggaaatttcattaattgaccctaataaaataccccatttcaaaatttataccctccactaatttgtacaaa

SEQ ID NO: 52433 - DNA, 1541 bp, Cannabis sativa
gcatgtccaatagattcccaagcattcttacatctcgagcatgatgcagagtcaataattttccttttatgcaaagctgaggctaccggcaaagcatgctgaatgactttccaagcaaaaattttcactttcgggggtaactgtaaagcccaaaaaaatttccaccagctgtgaaaatcatcagaagatgattcctggttctgctcggagatagagtttgctagatggaaacccgtctttactgtatataccccagatgtgttatggtgccaaatttgtcgatcttgtgattgataaaaacttaagggaattgtgactatacgatcgacgtcaatttgagcaaaattatcctgaagaagaggcaaattccattccatggtgtcaagaatgaaagtagaaaccggcaaggatggtggtccagtatagctaatcggtttaaattcatcatgtcctggaatccaaggatctaatccactcctaacttgataaccatttccaattttgaatctcatacccttttgtagcaattctcttccccaatgaattccttgccaagttaatgaaggagaatgtcctaggtgtgcttcgaggaatgaatttcttgagaagtacctatgcttcaatagtcggcctaggagagagtctgggttttcaaataatctccaagcctgtttcgcaagcatagcttgattgaaatctacaaacgaacgaaagcccattccaccctcaaactttgacttacatagcaatttccatcgtttccagtgaatcttcgaaccatctttgtttgtaccccaccagaaattagccatcatggattcaatttgattacaaaacccaacaggcaatctgaaacaactcatagcatatgtagggatagactgaaccactgcctttaaaagaacttccttaccacctatggagaaaagtttttcattccaagcatgtagtagtttccaaattctttccttgacattactaaacaactcttgcttgttatgagaggagtaggcagggagacccaggtatgattcatgacactcgcttattggcattctcaaatgttgactgaagtaattctttgcgtcatccgaagtgttcggagagaaagacatgatcgatttgtgagtgttaagaaactggcctgatgctcgatgatagatatcaagaacatttttgattgccaaggctgagctactattagcttgacaaaacaagagactgtcatcagcaaatagtaaatgtgagactgacggagcatgccttgtgagctttaatcctagcagattacccctttgttcctctttatttagcaaccttgagagcccttcagaacaaattaagaagagataaggagataaaggatccccctggcgaagtcctcgagtcggccacacatttccaacaatctctccatttagttgaaaggagaaactattggaagataggcaccgcataatgagagagatccaatgatgtgcaaaccccattttttccatgatagcatataggtaatcccattccaccctatcgaatgcttt

SEQ ID NO: 52434 - DNA, 873 bp, Cannabis sativa
tgtataggggacgagaaagtattgaagcctatggaagaaacttaagagatttaaatttgtgatcaagacccgactaaagttatctgcgttaggaaaagccttgatcccgaatgtagagaagaaatcataagcacccttaaggagtccctagatgtcttagcatggtgtctcgaagatatgattgggattgacccgaataaaatttgtcatgtgttgaatgtgaacaaagatatgcatgcggtgcaacagaattggtgtcccttcgaccccataaaagcgaaggcattaaagaaataggtggacaagacgttagcacatattttcatccgcaatgtgtactacccaaagtggtaggcgaacccaggcctagtcctgaagcccaacgaaacttggtggatcttcatagacttcacagatttgaataaagcttgtcccaaagactgttttcctttaccaacaatcgatcaaatggttgacacgacatccgggcatgagctgttatccttcatggatacctattatgggtacaaccagatcaaaatacatgtaacaaactaataatacacaagcttccatactgataaggggatgtattgttacctagtcatgtcattcgaattgaagaacaacgagacaacttatcaacgatcagtgaattcccttatcaaaatgtaatgtaatatttgaggaaacattagtatattataacttttttataataaaaatgttcataacatttttaatgaactaaatccaaaaattgtgatttttttaatgtaagtattatatttaaatttaaataaatgtaaataaatttagttttttttttaatgtgattcatcctattatataatactcttttttttttttttt

SEQ ID NO: 52435 - DNA, 2673 bp, Cannabis sativa
gcttagtgttctgaggcagcctatctcatttgatgctgaagtaatcaatgtgcatccctaaactaatgcttatcactaatggtaaactctataaccttcgttatcagttaattgtgtaaacttaataataatggatcatcttaggtgaactgatactgagataaattcgggaaataaaatgtatttttatagtttagggatgcacatcaattttaattagtacagggttcctattcctgtgaaaatgaaaaatagtgtctttcttttacattattataaaattagcatgcatacaactcatttaaggagcaagttggtagcctgtgttactattgctctagaccaaaacaaatcccatataatatctaaaatatatacacattaatgaaagatgatctacgcttactcatacactaatattttattatcatcaccatctatgatcccatgctacaaaattgtattgttattacaatcctcagataatcaactagattttctaatttctttccagcttgttgagaatgatcttcagtgctaaacttcacacgaataccagtcgaatattgagaaattacacaaggttgtcatagctgactacaatgaaagagtgttattggatggagttcgttcaaatctagtgcttaaagaactagattgattgttccccttctcaatcaccagaaatcactgcatgaacaaaacccatcatgaaaatggtggaaacaattcggatccttgagtatgatttctcgtcctacaatcccagatattgccttggcagagtcatggcaaaaccgacatacacgaaggttcttagtcaaacgaataggtgcaccggcttgtgtactaatgagcccaaaagaaagtgccaacatttcactgtgtccaacctcgatgcattctcgctcttcatcaacatcatgaaaactataatctgctttaggcttgtgtcctttgtcctccattttcttcattaaacactgcaactcccagtatattccttctgatcttggatgggacacatctccagtcccaaacacatgaactttatttctcagctctatccaactataagctttcttaggtttcaaacccatgtctccaaccattcctttaacctcatcaaccatgtcccatttggagttttcagcataccagttcgacaacaacacgtagttctcagcattaagagaatccaattcacaaagcttctccatcacccgcttacctaattttttgttctggtgaaccctacagccatccagcagagctctctgtaccaaagcatgctttcctatcttttgtttttcaataatagccattgcctcaataaacatcccggagtttgctaaaagagctacattcaaagcatagtgttcaactttaggcgacttaatacagttgaagtatagtataccctcctcaaccctgcgtgcagtagtacaagcacgcaggacagctccatacgttgtttggtctatctgtaattccgatttcttctccatctcccgaaacaaatctacaccaagctggccttgtccatgtgagctataccccattatcatcacagtccatgaaaccaagtctttgtgcttcaaccgtttgaaaattcgcgaagcagactcaatgcagcctgacttaacgtacatgtccataacagcattaagaactgtgacattcagctctaccccatttcttagcaagtaaccatgaatctctttgccttgcttactagcggccatcctcccacaagccgggagaaggctagacactgagagaggatccggcttcagtccattcataaccattaaacgaaatagtttaagtccctcgttgtatcctccagtcttcacatatgcacggatgattacagtccaggaaatgatatcttttactggcatttgatcaaaagtagctcgagccatttggaggctgccgcactcgacatacattttcaagagcgagttactgaccaagacatcaaactccaactcaaattttctagcaacctggtgaagattcttaccttgtttcaacgacttcaacatggcgctagcttcaatggctgttgccagtgccactgaatctatttgagctcccaagtccaacatttcatgaaacaagtctatagccaaactgggtttgtttctactaatgcacaagcttccaagcagagtccaaggaaccgaatccatacgagggggcttgtaaaggagcaattttgcggtattaatgtgatcgagatgggcgtaggcttggagaagagcggtaaagacatactggtcctggaagcaaccaagtttgagagcctgggaatggagttgtttagcgagggataaatgaccagagagacgagaagcagctaagacccgagggagagtatgcctgtcggggcgaacaccgcggagcagcatatggtgataaatggagagaacacggtgtgaatccccagtagttaaatgggtttggatcagcttattccaagcaaaggtgtctgaaaggggaatttcatcgagcgcatggtgggcaactttaatagccgagggaagatgacgtgattgcttgtattgggttggtttgtcggtggagaagacacaacggattcgcggctgaggagcaagaacctccatttcaatctccaaactaaatcttacgtaacattgttgcttt

SEQ ID NO: 52436 - DNA, 1367 bp, Cannabis sativa
acattataaaaatgaatagaaattatatttataccttaaaggatgttgagattcaatgttttctcaacaaataatggtggccggagttatatatcacacaattttctattgggttcggatgacacttaaagagggtaaaaaattaaaaaaaatttaggtgtatgggattaagtatcaaaaatggaagattaaaaaaaaatgggctcaaatggttgaaaaataggggagaaaaggggtggcggaggtggtggttggcaagggttttgggtttggctgggctgtgggttcgatcgtgaggaagaagatgatgatatgagacgcgatagggttttttatttaactctatagcgtcggttcctatataagaaccgacggcatagggtacacgtgtcaaataatcatgtactctatgccgtcggttcttatataggaactgacgcccatagggttatttcatataacccaatgtcctttaagtcccaaccgactctaaatggtataatgcaattctatatctacggtttttataaaaaaaactacctctaaaggtcaatttacaataagcgggtatttttacaccctttagcttccctttttataaaatgtgttgaaaaaagggaagctaaagacccattttatattagtgagtagtcaacaaaattattttttaaaaatatacacataaaaaaaattcatttataaatattatttgagggagcgcaaatgaagtccccttctctatagtgcaactaaacatttatcttaaaactttttattaatttttttttttgtgtaacacatcaaaaataaaataataaactttgatatttaatatttttatgttacaattcataattaaattttaattatcttggttaattaataatttgttcaatatatataatgaatcaaattaaactcaacaatataatttgtttgagaaaaaaaaaactcaacattataataatctttagacaataggatctataatatatatatatatatttatatattaggtattttcatctataagaatggttaattacacatttttcttttggttctgttgatatataagttgtagacttaattatataaataaatatttttttttgggtaaattagctgaatttcataaaaaaaaaatatttgcaaactccaattaatataatataaacccataaataactccaataattacttacgaatttaatttcccaaccaatcaaaagtatctttacaaactcgaatcaaccactcataaaaaactccaacaattacttacaaattaaaattgtcccaccaatcaatagaaataacactctttttttttttttattttgtttttggttgtgtgcaaaggcttc

SEQ ID NO: 52437 - DNA, 2534 bp, Cannabis sativa
  modified_base (673)..(676): a, c, t, g, unknown or other
actttataatagcatatacattatacatatgtgcccacaataggattttaatctaacattgtatagttttaatagttatctctgttttctacgtgtcgacagatctcgtgggagaaccgaccacccaaaaataactatagtaatatactaacacttaccattttcataaaaaaaaatatactaacacttacactagattaagcaatgttaaaggtacttattacaaacaaacaagcatgactaatatttgtgatatgattgattaccgtgataaagagaaattaactatacttattaataaggatgaataccaagttataatagctctgctgaggaagaaggacggtaaagtgtggagcattaggaggttaagcctggaggaatgttggtctaatatccagactttattgataaaaataacagaagtttacttgcctcaactgatagaggcaagtccaagagaaaagaatgcgtataaaagcttgtacaattaaaactgttttcttaattcatggtgatatttataagcataactaaaaatatctagctgcttcaaaaaaaataaaaaaaataacagtaatttaaataaaattcaaataacttttaaatagaaaacaaatgtatatttatttaatacaaaaaataaatcctaattcaaattcatatttaaacnnnnaaaaaaaaaaaaagagaaaaatctatttaagtggaacattttaggatttaaatattattccacaaatctaaaattaatgctttccaatatgtgagtttgtggggaggcgacatgggtttaattacccattgtaggaaaagaaaaaaaaagacccactaaattaactgggtttcatgaaccactgtgtttcaactcatgaatatatggaaatattaaagaaaataaagtttatataccctggcatgcctaagctataatactaaatagcttctacacatggtgccaaaagtagacaccagacaccctcagaaattaaataccagtaacaaattatgaacgaaacccagaaccaaatgataaaagtagcttcaattttcaatcttgagaaagcaaaactatatgcaactgaataaggtagagtgtgaaaaataatttaggccacattggcattcatgacagttgagttgacaacaactaatgctgccaagacattgttagagaacagtgcatagtgacaaagagttggattttcaaagttctcactcttagggaactttctcttctctaaaggaaggaggtagtaatctatgttgaggcgcattgacaaacagtggattctatttggaatggtcttggcagctaactggctcagaaatgtgctctactttttcaagctccccacttgttcatccgcagtttgaagcattgctctcaacttccctgttaccgattttcaatcatacagttgctctcttgcttttgatagaacttgacccatcttgcttagtttcatgggtacactgaaagcacatggaaacaacagataaggtcaagtctagcaaacgtcaggttgatacaaaaataaaggaagcttagacataaaataacaatatacgattgactgctacctttgatgtaaatcagaatcagagctagcttctcctaaggcatgctggctctctttgagtcgagtctgtagttcttgatataaatcgagcttccccttcatctgtgcaatgcttaagtaaaccctagccattataatttggtcccgcatcaagcccaccgtctttctcctccaaatgctgtatttcccaagaactgcagtgtcatcagacttcgaccgttcaatggctgaattttcaagttttacagttgcctcatcatcctgttgtaccaactcagatgcacgtttttcacgtcttttctccctcaattgctacagaaatttacagattagggaatgaaataagattcaaggtaatgcaaacaaatagaattaaaatcaacgtgcagataatagcaagtacaacaaattattagtcacattgcaatgaaaaacaagctactttcacctcaaaaataacccccttaaaaaaatcaaagaatccaagttgaataattaccctttgggctagttttccaggtgagtcagtagattgactgtgatgatctgcattacacaacaagatcagaaacatgccccaaaagaaaagaaaaagaagaagaagaagctttgcaaagataaaataacatatttccacctatcgaattaaccctccttgtgaaatgtttgaaggagaacaccatgataaagctctgagtgcgatgaaagaaactcccaaatcggtgagttgggtgaaagaagtggagaccttagattttgaagcctctactaaagaagtttggagtaagtttaaatcaaactaggcttggacacccactacccatcttgattttactgaaactatgaatattgggggatcaaatagtagctaaacttgaatttgatgaaattgaaagagaagtttaactctcaaaaaattctattgtttatattgtgttgggagccaatcct

SEQ ID NO: 52438 - DNA, 1648 bp, Cannabis sativa
gcaaaatggtgtggagtttttgaacgaaaccttctcattaaccaacatgtgttttaatacattgacattgggatgacctagacgcatgtgccacacattggcatcgaaattaaaattagactcagcaaacaaggactcacagctactggactgactcaatttatttgctatttgaggaattttggcaatatttttgcacttggaggaaacagtaaagcttgaaccagtttcggtagggacttttgacattgatgatgctgtgattttcagttgatatagcccattgttaagcactccccgaagcacctcctccctcgtgattagatccttcacaacacaaaaatcagcataaaattccacaaaaactttgttatctttggttagttgagaaatagagagaaggtttttggaaatctcaggaacgcaaagaatatcattcaatattaaacaaccagaagtgttttgaattgtacttgagccagatctagtcacggctaatggaaaaccattgccgactagcagttgagtagtacctttcatatcagatttgtgctgaatgttggaaggttcagatgtggtgtgatttgtggctccgctgtcaatgtaccaggagttgtcgacatgggcttctgtgctggtgaaataagcttgctgatcagtgttggaatgactgttgttagcattctgagatgatgattgctgattggaaccaggtgcttgaaaggagatgtcaaagcggtgatagcatttggatgctatgtgtcctggtttgccacagagttggcaaatcggtctattgttgttggatcgtcctctgcctcttccacggcctcttggattgaaggagcggccaccagaaccttgattcgagttgtgtccatgacttccaatgttaagagacctgcgcatctgtgtggctaggtgggcagcaggcatgttggagtctcccaatgttgagttgagttgttcaaggcgtatttcttgactctgaagcatatattgcacttcttggagagtgacttggtcttgccttgaggttagattcacaacgacagcttcgtattcatggccgaggcctcccaaaatgtatagaatgagttcatcatctgagagtaattgtcctgcagcagataaactgtcagatatgtttttcatttttaaaatgtaatcatgtatagataagctgccttttttcagagattgcaactgaaatcttagttgcagtattctagctttagagctagtagtgtagagacgttcaagtgtgatccataagtcacacgaggtaaggcaactcatcacatgtccaaacatagattcggatattgagttgagaagccagctgagaatggactggtctatgcgtctccacatggcgtatccaaggttgagttgacgggactcgccaggaatcgatcctccgatcgtattatccacaaactgaggtggacacggtttagttcccagcacgtatccttcgagttcatgtgctcgaagtgcagggagagcctgagatctccagtatgggtaattagctctttctagtttgatggtaagaggggctaagttctgaaagggagaagatggaatggctggtgcaggtgtgattactggagggactacaggttcggcagtgggtgcagcatca

SEQ ID NO: 52439 - DNA, 912 bp, Cannabis sativa
  modified_base (56)..(58): a, c, t, g, unknown or other
ttgtgcttcttctatttcaggatgttgcggatctgtgattagtagttcgtcataannngtgatttctggctccctatttttgttgtttttcagatgctcaaccatttcctctgccacaagttttgcatagtccatgaagcctaaattttctcccccatcttccagtatagtatcttcaattgtatgttgttgattagttgagtcttctgttgttgctgcattgtattctatcgtttcaaatgcgtttgtctgtgcaactattacgttactattttccaagaacgatggattgatggttgttggtgggttgttgatgacattcacacacaatggatatgttgtaaagtcgagttccttcagtgttagttgtatgtagaaatgcaggctttgatcatcctttatcttcaacggttgttatccttctttcacttggtatttcagttgcagaacagtgttttcttggttgcattctaagacctctttcaacttccattgtaattctttgtacttacaattgattgaaatgtaatgtccactagcttcataattttcataattcattcgatcatcaaattgtctattgcaaaagactagaaatggaatgtctttttttcctgtgattttaaaattattattagtgtaaggcaacaattttgaaactgttttgattctgttattgctaatgttagtaatgtatccgaacatttttggtactgatttttataacaaaaaaaatgatatttatgaaatagaatagaaacttacttctatttcttttcctctgttgaagtcttgtatttccaattttgaaccctgtttttgtcattttttgttttattaatgttatgaaactatgaaaaaactgaaatgcaactattacgaaacgtattaaatttattgaacaaactaacc

SEQ ID NO: 52440 - DNA, 1719 bp, Cannabis sativa
  modified_base (33)..(37): a, c, t, g, unknown or other
  modified_base (1023)..(1024): a, c, t, g, unknown or other
ggattagtcttccaaaaatcaaagaagagctcnnnnncggctgtctccaaggtattgaccttctccttcaacctgtccacctcagctgaaagctcctctcccttggcttccttttcctcctttatccgatgaagaactgctcgaagggaagtcctctcgtcctgaagaatgtttacctcagcagataaggtctcgatggtctcctcaaaacggtcagcaacctggagatccttaatcaccatagtgattttcttctgagcggcaaacaacttcttgttggcttaacccaattccaactgaatagctctgacttccaccctggcttcttcggcatccttcctggccaagtctgcctctgcccttagggtgtcagacagagtcgtgttcttggaagcagtagacttagcccgggagtaagtgtaggccaacttcagaccggcccgcacaaggaaaaaactttagcatttgagctaagtatggaagattaaagagaattattaagaaacacttaccctggtgaactacttcaagactccacccactcgcaattccaaagaagagtcattatcagcaccagctagttgctcactgacctcaggaacaagacggttcatataatgggctagcatctccttgccctttttggcctctagaagctccaacaaaggtggagtagtgcctcacccgtttaggatcactcctgaccagttcagacccaaccttcagtggtccagactccttagacttggcagacttgggggtagaggggattgcagcagtcaacttttggggtagaggggtttgcacaagttagctttgggggtagaggccttggtggggccgggagtttcttcttccttttgagtggagtcagctgctcttcctcagcctcatcttcaggattcaagggcttctgagcatactgcttggcccttgcaccacccttcaacttagcctcgcgcttcaattgaatcaactcatcctctgaatgagctccttcggtccggccagcaccagatttcnncttcttccccgtcacggacttaggagtaaagtccttgggatagagcccatacctcacaagattatcctcggaggtcaattggataatatttcggtcgtcccccgggagtcgagcaagtttttgagctctatctctaagagcaagagtgaggagatggcggtgatatgtcggaatttactggaaccgagtgcgagtgatgcccgtgccatccaccatgaagtactcatcagcaaaccgcccgatcatgctgatggtcgtatcgtccatgccagtcaaccacttgaagcctggttgagagaagtagaagtaccctgacctgccttgcttgggggtggacttcaaatcaaagtaccatgcaacctcgtggacagggcataccccatttctgcgaggcatagaggacgaagagggctgacagatacttgatgcccttaggagtgaattgggtcgggcagaggccgaagaagtccgccacattcttgaagtattgatgcaaaggcattaatgccccttgctgaccatgggcacctgaccaggcacacattcccttttcagggtttgtggcacgattgtcgtaggcaggaatgtatcagtccaagtcccccacgtacccaggcgcgcctcagtaaccttagacggagggcttacccacctggcgcccaaggcaccacgccttctatgaggaaccgccacag

SEQ ID NO: 52441 - DNA, 2780 bp, Cannabis sativa
attagtgaggatgatgttcctcctgattttctttctattgtagtggttgaatcttcttattaataaagttaccattttccttcaaaaaaaaacacaattagtctattgattgcgttagttttaaaggacacatataaccttttttttaataaaaaaatcgctctattaagtggactaagttaacccgtgatacttataaaagagttcaaatcattcttgttgtatcaaaatttgattattattttttatttcaataaatattcttaatttcaaatgttatactaatcatttcaactatttgagacgactctcctttgtcattttgtttttgaaattaaactctaatcaacaacaatcaaagtttaatacatcaataaaaagaagaaaaatcctcaatccaaactaatttaccatacgccataagtgcatgcactgttaatttataagcaaccttaagactatacggtgaacatgaacaaagaatgtctcagaaaaataagaaaataaactagtaaaatcatctaataaaaaacctaactcattacaaataattaattgaacatttgattattaaacataagaattaacatagttttcttaaaaataaaataataaacaattgaattgacaaataaagattttaatgaacttacatttgaatgtgaatttgaattgttaacttagggttctttctgaaaacaaagtgataaaagcttgtgaaagttattagaaattttttaaactattatttaaataaaaggtaaaaaattgtaaaaatttctaattaattagacaaacccaacggttaaaagactaaacgatgaatcttttgtactatcatgtaagtgtgagaatttgcatgtacaagtgttatatatatctgcatgtgtaacatgatcaattatgtacaaataaaactcataccattataaattgaggtagagttccatcattactagcataatctaagagttgagattctctcttgagtcttgatttgggcaagtaagctctacagctgagataacaacagtttcttgatcagttggttgtgtaacatttcggtttggagaagacactccttgctccccatacacaaagcttgaatctgtatggactgaaaacccagaaggacttggcgggcaattggtgttcggcgatgacaagtcaatgacactcctttctcccgcttcattctttttgaaagtgtgcgagttaagatccttttcgtcgaatgttttgaaaatagccataagtctcctccaaatcgacggttctatgtcagagttcatcaatagatgcctttgctcgtagataaacatagccgcgtatatgactagagccaatgatgaagccacacccgcgataaggaagagtccccaaaagctttcgagaccaagactgttggatgagaacatgttattagggtccggacaattggtgtctttcttgaaccacacatcttccatatccttcattttctttccctcggtcactttcagtattgcccttgagatatctggaacaagaggagagcctttcggaaaagcctgggataaacatgttgagaatattagtcatattggaactatgaacctttgttttcaagggtatataaattgaaatcatagacttacaaaagcaaagccgtcggctttgaatgttggttcaaccatggtaaacttggagcaatattttgccagaaaaaccttaatataaggtgtttcatcaaaagcagcagcaatcccattttttttactcccattttcaaagagttggtataagtcttctggagtgttatagatcataaattggtgatcttcaaaccccatttgtttcaatattccttctataaaagaacccttttgaaaagcaactttctccttgttcttcaagagttggttaacatcattaatggttggttggagcttttgcactgttaaaagtgaggtcaaactagctgtgtaactttgggtgagtatgagcactacaaaacaccatatgatcactacaaaccttcccaagttactcacaactttttcctctgtaaatttgttaaaagaaaaaaaaaaagacattgttaagttcttatgcaataatttctcaaagacacaagttattttttcgatttgttcgaacaatcacaagaaacttactaggtgcaaaaaccatggttgaaaaggagtaccaaaagcttgttccaatttgatggtatggaggtccacgaaaatcttcgttaattctgtgttcaagaacccatactacaaaaccaacaaaaatgaagaaacaaccacttgtcacccaaagatcccaagtcaaaggcttcaagaatgcccacgcattatcacttctatcatccttaattggtactatcatgtacacaccagactcagtgtaaggcaatgtgaaatccacatacaatgaccgatttgctctaatggttatgtccccaactgcagcatccattttctgccaaatattagccattaaaatgcaaagtattaacagcagaagtaagaacattttattcaaaagaagctagcttaaggactatattaattctaaaagaagaaaaactctctacgcaagtcttctattatgtttctcaagaattaattgtttcatgtttcaacaaccaatccaacagaagagtaaaaccatttattctcttgtataacaaaaacaaacaaacaagtttttaaactgtcaatgaataaacttaattaaataatttaagtgcaaaaaaataaattgctaaaagatccttatatagtaataaa

SEQ ID NO: 52442 - DNA, 1491 bp, Cannabis sativa
acttttatcataaatataaactttactaactatacaaaatataaagtttacaaactccgagaagatcccgttcttctatttttcaaatacaaacaaaatataatgtatcaagagtgttgctgaacgacttacaaaactaagcccatgatgtttaaaagatctaaacactccaagtctaaccatctagatatgtgcaatcttcattgagttccaaacttaccgctacttagctttcgtcttgcctttaactacacatgaagcacataactgtgaatcgacaaaatcagtaagaaaaacatataaatcatgaacatgtaacctgacttataattttagcgcccacacacctaatcacaagcccaacccacatcctatgagtacgagtctcaaagttcttgacaaagcacaactaacagttacaccatatgcacttagtactccaaaagtactagtgttgatagtgttggttgctcgaccaattgctataccatatgcactaagtaccccgaaagtactagtgttggtaggataggtagcacaacaaatctctataccatatgcactcattatcccaaaagtactagtgttggtaggattagtaacctgactaatcgctataccatatgcactcaataccccaaaagtactagtgttggtaggattaatagcacgagccatcgccatacatgctcagtaccctaaaagtgctagtgttggttggattcgttcataattgctgatagcacaaccaaccattataccacatgcactcagtatcctgaaagtactagtgttggtaaaattagttcgtactacccaaaacatgcatgacaaacatgtatatatgtgtatcatttatactaatcttacctcactttcataattaggtgtgctaataaatctgagtgaagatactgctcaacaattctgaggtcttaagtcacaatcatgcaaaataggtaagggactcgctaattgacttttgggttcttaaacttaaacaagaagttttttttatttataaatagaatggaaataccctaaatattgagaaaatacgaaaaattaaggtacccaaaaataccccatctgggtaaccggttccccaaacagttcaccgtttcctgggattttgcctagggaaacggttcacagtttctagaaaaacagtagactgtttcgtagcaaaaaatacgaaaactcgatttttctaactcaaatctaccccaaattacatcaaattttttaaaacacacatatatagaacataatgaacataattcaaccaaaaattgcatcatcaaaactttagaataaaaaataacactgttaagcaagctttgagttcttaaactcaaactttcttagctcacacaacaaatgttataaactaacaaaaacaacacaaatcaaccataaataactcccccaaaacaattcttaatctctcaaattcatagagaacttaacctagaattttacacctcaaaa

SEQ ID NO: 52443 - DNA, 4556 bp, Cannabis sativa
gatgcaggtccgatgctccatgtgaatgggttggggaagacgaagatctgatgggtccgatgggggggttcgacggggccgatggggacccgagggggggtgtccgatgcttgcaagctaggggtccgacaggtccgatgggggggtctgaccgatccgatgggcggtccgacgggtccgatggggcccgatagagggggtctgatgcatgtgcgggttgggaaaaatggggttgagttatgtgagggttatttttgggtttttgataaaagtgtcatatattttttagtttaaaatgtattgatttaagaataaaatattagggtttttaaattatagtttttcaaatttgcctttttgaaatctattttttctgatttttgggttttgaatcgggtaggtttaccacgtggaagaattttcgagtataaatgtaacaccctatctttataggtatccgaaacaccttatagttcacagaatcacagcatatagattacaaagcatcttaggaaaagaagaggcaataaagccacataggaacttgtctcctagagatggcatgtaatgtttttgtgaatacacatgtcatgactcttcaagacttcaacttggttaagtgaataaaccaaaacaaacaaaagaaaaaaatacccatttgaaagcacatatctttattattagtactatggctaaaactcaataaaataattaaaaatgatcaacatcttagcaattcttcaatcactcccatcactctacttcccaccacaaaataacaagatgaacggctttgatttgttctatgttgttattctccctatacaatatacaagctacatttatatatgtaagacaaattataccatttttttaatatagttttatattagtttgtatatctgcaatttgaatgacatcatatatttttattagcggtgctgatgaagacattgagaagataaagctttggaaaagatgacctttatctccttatataataaagataaaatctctctatagagaaaaacaataatcaattgttatatatataatggatttatgattaggtgagaagaacaaagagtttacaattagaaagtggcttaattagcatttgtcctaagtgtatgggtatatatgacttggtcttattttatattgaatatccattttttataaaatttttatttatttaaataaatatacttttttatttttgctgaattataaataaatatacttatgtatggttttttggactttttcattttggctcatttacaagttcatttaggtgcctccaagtggcagtcatttagagccttaatgattctgtcttagataatacactaagtttggtactaatttttaagtaatttgctaaataattattaatataaatatttaaatttaatttagtatctaaacatttaatgtgaaataaataattatgtcacagtatttaattaatttaggtcattaaaattttattttctatttaaaaattattttaaatatactaataaaagtataatacgtgaataataacttaatatttaaaggcaaaattctaaaaatataacttaagtattaaatttaaatatttatatacaattgagaattaaatttaaatatactactaattaatcttaattttgctattttattttttcttgtctctcctagagcgaccaattttttttttttttgcaaagactttttggtcctttgggaatatactcttattttttaaaatattgctcaaattcataacctcaaagtgttcatcattttctaaatcatggcaaaaactagattacaattgtttaactaattaatatttgtattttacttgtgtccaaaatggagggttaaacagtcattttagaacaagtcaaaaggttgtgtttgggggacaaaacaagttccaatatttgtttttaattaagtcgtataaaaaaatagataatatataatatatatcttaaactaatcccacttgctcttagaaaattcaaaagacaactcaagcatatataaatcatctcatatcatcaccatcatcaacaacattccctttctttcctcctaattttctcagtcatatacacattttcttggaaaatataaattcacatatatggagatccaatttcaaagtagcatgatggcaaagaaaaaaggaagaataaacaagagaaatatgaatagttataataacaataagaagtttgttggagttagacaaagaccttctggaagatgggtagcggaaatcaaagatacaatacaaaaaattaggatgtggcttggtacctatgaaactgccgaagaggctgctagggcttacgatgaagctgcttgtcttcttcgtggatccaacactcgtaccaacttcatcactcgtgtctctatggattctcctctcgcttctcgaatcaagaatctcctcaacaacaataagaaaaatagtaataatgagaacaacgatgctcaaccaaaacaacagaactttaatactagtactactgttactgccagtaatactagtactagtagttctacaataactagtactgtcaccagtactagttatgattcttctaatttctctagtgaagttcttcgagatcaagaacacgatattcgctcgaataatcatcaccatcacaataatttgtttgaggatgcatacaaaccggacttaagtactacatgtacatggggaattgatgggtttgatcaattttcatttgccataacaggtgatgatcatcagtttgatttatcaaataatattgagaatattaagaatgtggatagtgaaacaaaaggaattgatgaatttatggagtttgaaaggatgaaagtagagaggcaaatttcagcttcactatatgcaatgaatggagttcatgagtacatggaagctcttcatcatgatcttgatgatgctctttgggatcttcctcctctatgctcactactttgttagttagattattattattgttggtttttgtttatcctcttaatatctatatataattccatcaaagtctacttttactactttttttttgtttcaattttcttcctttatacatttatatacatagctattattgtagtgtttatctagagccttaaaaatgtgtacaaaatgcaggaaagtaagaaatttaatgagtataaaatgtataattatatcacaatactcaactccaaattatttgtgcctaaaaatctcatgccaattcttttctcgagaactaatcaataggtttttgtagtaatatagaattataaattgcaaactcaatccaaaatattattttattcatagacataatatatactttaagtaaacaaaaaaacaaaaacaagcatgtagaaaatatattttttcataactcctaaaacttgttctcttcaccaaattaaaatcatgttgctttctatggaagatcataataaattcactttgtctaacaaaaagaaaaaattatgtatcattttaagttagtaactcacaaatggtggggaataataaagctcacatagagaatgtgagaatattttaggggttatttggctttataacacttaaaaattgtttgtttgtttgtttttttttttcttaataaaagctgaaactttatttaagacaattcttgtacaattacatcaataatgttattcagaatagtgtcaaccgaataactacgctcagcatataaccataaaactcgggcaagatcatgagccacacggttagcagaacgtttaacaaagcataaacaaacattatttaaatatgaaattattctcttgcattcagcaatgcagcagccgaaaggagagtttgtattcacagagctatgaaaagcttgaactgttatgagactatccgtttcggcagtgacttgagaaaccttagactcctttatccaactgagtacctctttcactccaaaagcctcatttttagttgtaaaaaaagaaaacaatttttaaaattaatcagggttgtttgaccaaattttttaaaaatagttttttaaaaattgagttttaaaatactagaaaacagaaaacatcaaaatattattttctatttacaaaaacaacttttttttttttgtttaacacgttcaattttacatttttgctcacatactcgaacctagaccctgatccaaatcctggcccgaacacaatctccggatccgaacccgatcctcagaccccgaacctgggcctcaagctccgactcgaaccgagtcctaggttcgagtccggagtctggggtaggatgggttcatgtcatggtaaaaaaatttagtcaaacaccattaaatttttaaaatgacaaaaattgatttccattctcacttttaaaaatacaattctgaaaattaaaaactaaaaacagagtcgaacaacctgttaatatttttttttagatatttgcaccgaaactctcttaacatttacaattgttacatatgactctattaaaaaaaaataacagtaaaagtactttatcttac

SEQ ID NO: 52444 - DNA, 1047 bp, Cannabis sativa
gagagaaatctcactataacatgactcgttccagcctcctctgaagtatttgaatcaagaagatgaagttcttggtcacatcaatccacggtacactgaatgggaggttgaagatcagcttctctactcttggcttctcttttccatgtctgatggcattctcacgcgtatagttggtgctgaaatatccaatcagatctggaaaactttggaggtatatttcgtgactcaaacttctgctaagattgatctttacactactcagttgcaaaatcaaaagaaaggttccttgtctatcaatgaatatctacttcggattaaaactattattgatcgtttactatctattggtaatcttgttactataaaagaacatgttgctgcaatattcaaagatttgcctcctgcttatgacacttttgttattagtgtcaattcaagaaattctccctactctgtggctgaaatcgagactttgcttttgtctcaagatcatcgtatggagaatcacagtagagaacttgattctgtgaatttagctactaatcgtggttcttgtttcaaaccacaatattcccccaatctctctaacaatgcagattctcgatcgctcaatcctcccaacaccaacactaacaaggtcgtggtgcttggaacccgtatgctgtctccacaagaaatacttcctctggctaatctttctcaaatgctgctgtaggttgtggtttcaccaacttctttgctgcctccaactcccaagttccctcaggttccaaacctgtctgtcagttatgctcaagaacaggtcatgtagcttctcgatgctatcaaagattcaatatggattttcctggagttggagctgcaaacgttcaacaacattcagcaaacattgccactgcagagactgtttcagatgatgcttggtatccagattctggtgctacaacacattgtactcccaatgtctccaatttcacacaaaagtagccttatcttggatcagatcaggttcaaatgggcgatggtgctggtcttcccatacag

SEQ ID NO: 52445 - DNA, 899 bp, Cannabis sativa
tttttgttgataatataaaataaggtcaaatgacaaaaataccccttagagccaaaataaccccacacaacatcaagggtaaaactgtccaatccaacacatatacacacatataactcatatgttcatatttatcatattaataccaaaataaaatcttagaaaagtattttgggtcccgaacccagtttggccaaaaatacccagttgtgaatataccgcaccaacttgtcaaaaagcacttgcagatagacagaatacacatactataaaataatatagtctataagcacgatatatcctgtaaattatgattttacccttctctggtcaaaattacaaaaatgccctagcatagcaacgaggccttaaaataacatttattagtatagtttcacatattagattatataataatataagtccacattaatacataattaaactagttagggttgctaatctggtttctaaatcttagggtattatattcaatctataaactatgatttaaagcatattgtgtctagttgtccttacattgctaaacatgttataaatggtgtagaagttattaagactgatgatgcatatgatgagaatgataagaaaattctttccaaaaatgttaaagctaaatatgcacttatatgtggtttggatagagatatttaaaaatattgaacatgccactaccgcttttaatatgtggaaaatgcttgaagttacttatcaaggaactagtgctatgaaataaactaaaattcaaatttattccactcaatatgagaactttcagaagaaagcggacaaaaccattgctgacatgtatactggcttactacaattactaatggtttgaattctcttggcaaggtacttactgttgggttttatgc

SEQ ID NO: 52446 - DNA, 1748 bp, Cannabis sativa
  modified_base (1122)..(1129): a, c, t, g, unknown or other
ctttgccggcgcacaactgcgccggcaaagctttgccggcgcagttagtgtacttttgccggcgcaaaaatgcgccggcaaaagttggtgttcttgtagtggaatcccaaaaactttcccgtggaaactccaagggaacactttttcgggttaagtttcatattgtacttttttaatatttcaaagcactccgcgaggtctattgtatgatctccactctttatcgacttcaccaacatctcattgacgtagacttcaatgtttctttctatttgtttcgcaaacattttgttcacaagtcactaatatgttgccccagcatttttcaaaccaaacagcataactttataacaataaagtcccatgttggttacgaagcttgtatgctcttggtcagggacatgcatttttatctggttttatccagagtatgcatccatgaacgacataagctcgtgtctagcagttgcatccactaactggtcaatccttggtagtggaaactaatcctttgggcacgccctattcaagtctgaaaagttaatacaagttctccaagctccatttggttttgggacgagaatagggttggatatccacgagggataaaatgcctcacgtataaagtcgttaaccaacaacttatccacttcctgcttgagtgccccttgtctctcggaatccaagggtcgtctcttctgtctcttggctgggtaatttgggtcaacattcaagtggtggcagataatcttagggtcaatccctatcatatctgtgtggctccaggcaaactgatccttgttcgccctcaaaaaacttattagttgctattttaattgttcatccaggttcttcccaatgaatacacactttgtgggatttcctagatctagaacaacctcttccaattcctcaattggttttaataggtttcgttcgtcttgaatccgaggatcaagatcctcatccttcttctcgccttcttcagtcatgactgccattagctggtggtcagcctttctattctgcagctctatgcggtagcattcgagagccagcatttggtcacctcgcaccaatcccacacatgtcggtgtttgaaacttcagggataagtgcttnnnnnnnntaattgcccctagtccaattaacactagtcgacccagcagtatgttgtaagtcgatggcaagtcgaaaactaaaaagtcttgcattattgtggtggataaaggcacctcgcccttggttaatgggagctcaattatttcttgactagcgacactgttgcctgtaaatccgcacaatctaccatgcaaggttttaactttgctttttcaagtctcattttcttcagtgtatccttataaaagatgttcactgaacttccgttgtccactagcaccctttttatccttttgttggcaagctggatggtgattaccaatgggtcgatgtgaggatacctcacgtgttttgcatcttcctctgagaacactatccgaggttcctcagtcttagcttttttagaagattccggagcaaaagcagactgctcgttcttaatttcctttacatatctcttttgggcattgttactttcctcagcaatatgtggccctcccgagataactagaatatcctctccttcaagaggaggaggttgtaatctctggttgcctgggttattaggcggattaggctggttctgtccatcgccttttcgcttcacatattgctggaagtgacct

SEQ ID NO: 52447 - DNA, 974 bp, Cannabis sativa
ttaataacactgtaatttttatatatgttttatcattgcagacttttaatgtgtcttaaatttgtgactaaatttagtctttaaaaataattgagactacatattttcatttagaactaataatttaaaatatgagttatacatgcatcccgtttaaaatactaacgtagtctgtattaacgaaattaaataaaaattacactttttactaatatcgggtactaatgatatcgctcaaaaaatcattagcattatattagtaaattcaaaattttaagtacttatgacacaattattctttattattataataatacacactaacactaaataagatgttaaaacaaaattaggtgtgactcaataatattatgtcgatttatactaatatttgactgccatagaccaataaaactattgacaaaagaaaattttgacctaaaaaatgattaggtcttaaagtataatttttgcaaaatttcaccactaatttatttattttaattataagtttttggtcaaccactgttagtgatatgatcatattcaaatagtatgattaggaagttaattgaagctaatttgtctcttgctgcctaaccaaacctaatagaagacagtagacagacctacgtattcagcattataatatcttatcttctctagatcatattattccttgttttgtttgtgatgatcttgatgtggttggtaaaacttgaaaacatacttgggtgtaactcaaacaatataataataataataattctcatttaattattcatttacaaggtaacaatatcgcatcgtcacgcacatttatttaaatatttttactatacacagttgttttttttgattttttattgattttataagaaagaaaaattatatttaatatatattaaaagataaaaaatttaaaatttttttttatttttacactttacaataattttttttttacattttta

SEQ ID NO: 52448 - DNA, 1542 bp, Cannabis sativa
ggtaaaatatttccaacacaaagagcatcgtcccaaacactaagactcctcaggtgacatctgagaggagtttgactgaccctgccttagaagttcccgaggtagtggtttctgactcagtcccgccaaccatgaagaactcaaagtctcaatgcatggatgctccgtccaagggctctaagggggccagcactgaaggggcccagactgtccaaacctctatccactcctctcgtgctgaatccaaaaataaataaggggaattagatgctttcattctaccaagatcgtgtgcttctcgaagtaaatgatcagttggccaaaggggaggacatgtctgtagagctactcatgggtggcttgttaaaggaattcacccacgtaaatatatttccttttgttttcttcacatgcttttaaccgtgcatgatttgatcttatctcattgtgaaattcaatttgaagctagcatacacatactcctgtgttaagtctgcaaccttaaaaaatgagatggaggctaaaaaggaggtcgagatgaagagtactcaattgggcaaagttcataagaaactcctagttactaacaagctcgttaaagacttgaagaaggagattagtgatatgccattcactactcagctcgaggcagacaatgaggcctttgaaaaggatgttaattccctttaggacgagagggaaagtctttgtattcttctttccagtctcgagatcaaggtcaatgatctggttgaagaaaagaagagtttgcaggagacccttgactctaagagggcatcttttggtgatgaacgggaggttcttcaaaaggtggtggaaagcttggagatggctgccttggatgtcttttataaattttggagggcttaacccagaagctaactttgattacctcaatgaaaacaaggaggcttatcttagtttctgtgaagcccaaaaagccaaagaagatgccaaggcagccagcaccaaccctccgactgaccaagagaatgaaaccctagctgctgaagatgaatctgatctgtataaagaactaaggactccagctgtttaaactttcatctttttctttatcacttcggcctacgggcctatttttaagtcaatatggccgaccaagaaacctttaaacttgggaaatattttattttgttttaagaaaactagctggctaggtagcttttaatcccacagttatcatgctttgttatctttttttaaaaatgaatattttcttttaagtctaaatgattgcacatgtagatatttttgttttttgagcttgttacttacctatgctttgtatgggtgtatagttgccccccaagtgactgagtagacttatgactcttggtcacttgtgttatctcaattttaaaaggtagcaaggcacttaaacaaacaagtcaaggacaggaaactcttcataggagacctagtgctctaaagagttttcctaaacactgaagatccaacagcaggagtgtaacgccctaatctatagggacgccacgtgtg

SEQ ID NO: 52449 - DNA, 1681 bp, Cannabis sativa
tgcgttacctctgtcagttttcaggtacttcttaatggagggataaccaaaaaattcttcccgaagagaggcttgagacaaggcgaccccctatcccctcttttgttcattcttggtgcggaagttctctccaaactattgttagcaaaggaggaagaagggctcctaactgggttctcggtagggagggagggcctccccataacacatttgatgtatgcggacgatttactggtttttgctaaggcgaatggtgcaaatatcagcgcggttctggatgctttgaagcaatactgctgctggtctggacagcaattaaatcacagtaaatctaaagtgtttttctcaaaaaattgctcgaaagaccgccggctttcgattcgaggtcagcggttttgatgagatggaaggggctgaaaagttcttagggaatccgatcttgttcaagggaagtagaagcaaagattttgattttatcattgagaaagttaatgctagattagagggttggagagcgaggcttctttctcaagctggtcgtttaactctgatcaagagcgtcttggctgcgattcctatttattcaatgtcagtgtataagcttccgaaaaaaactaccaatcgaattgatggtataattcgaaaattttggtggacggggcaagttaaccaaagtcggtttctctctttaaaagcttgggatgttctttgtaagcctaagcaatgtggtggtttggggctgagaaaagctgaagatattaatttctgcttattggctaagttggggtgggctatggcctccgatacggtgtgtttatggaaatcgattttgatggacaagtattgctatggatcaaattttggggactctatattaccagctaatgcgtctccggttgctaaaagtatttgggcgactaggaggttcattgtcgataatagtgtctggcttttgggtattgatgccaatgtcaagatcggtagccaacaatggatgggggctgatggggagataatgtccttgggtgatttaaatcctatggttgaggaaggaatgtgtgtgggagatttgtttatggaagatggcaggagctggaatgtgaacttggtgagctcttggttccgtccggatgcggctgctgcaattcttaagatcacccttccttttcctaatgtcgagactcggttgtattggaaagacgatccttcgggttgctgctctcttaaaagtgcttattggcggttgaaccaaaatcagtttgattgtattgatgtggtttttaagaggctttggaagagtcacattcatgaacggttgaagatttttttgtggagacttggccagaatgctctcccttttggatgcaaagttgctgccatttttggttcaaatgttggaccatgtatgctttgcggtcttgaagagatggatgtggtctctcactttgtttcgggctgcaatataactagagcagtgtggttttcatcacagtggggggttagagtggagagatgtaatcttacaaatggaagggatgtgttagcttggcttgtgaacccctcttctcttaccattgatagcagcgggtgtgaagatttccttctttatggtgctttgctataccataaattgtagcaagttaggaataatattttacataacaaagggattctggtgttg

SEQ ID NO: 52450 - DNA, 1070 bp, Cannabis sativa
ttctaatataatacaaaattaatatcgcgttaatttttaaatatcattttgtattgcctttttatatattttttatgtgtatataaaagtgataataaattttatatttatttattcaatattatcgttatctatattatattctaaaattaaattattactccatacaaatataattactaactctctttctttaaaaaaaacatacaaaaaacttaactctttattatatttaaaaacaaataaaacatatatattttcatgcacctcgacctatatgtaatacaaaaatattgtgtcaaatgtaaaccagaattaactatattaagctataaagttttaggactgaatttaacctcacgttaagtgaaaaaaaaaataaaaaaaactattaaatttaccaagaaggctcagttaagaagagaatcatcatgttactaaagttcttccactcataataattttcaaatggttacaccaagaaaattagagaaagaaaaaaaaataaaaaaaaaaccaaaattatgaaaaaacagtttatgttcaacaaaatcataaaaaataaaaacataattaataattaaaaaaaatgggatataccttagctagctcttgactcttaaagctttcaaattggatgtgtaatttgaattatggatcaaaggtccatgcatcttcttatataagcaatgtttttgatctttgatatacatctcattaatatcctcttcctcatctcttttaaattattttttagttttatgtctcattacattaattagagaggtggaaggttgtgaataatagtgtttataaattactctttaataataaaatagataattggcaaatttgtattgaaagacaataaaattgaaactggaaaaatgaatgaagacacattatcatgtttagactttttctttagttatacagtataattaaatgtacattaatctcttagattaaaactgaaaatattaatgtatgtacatagattatcaaatagaaaaagtaattaaacaaattaaataaataacaaaaattaataaaacaaagaatagcaaaaa

SEQ ID NO: 52451 - DNA, 920 bp, Cannabis sativa
catctgtttcaatgtgagtaatagaaagttggttttgcaatgcccaaatgagagcatggaaaagagcttttgcttccatctcatccgatctaaaatttccttgaacaacctttgaaaaagctgcaataacagtaccattgtgatctctaattagagcaccaatacccaactttttatgctcttcatttgtagcagcatccacgttcattttgaaaccattgaattgaggtggttgccatttagcagcctgctgaaccgtggcagtagatgaagttgcagaaaattcactgctggtagcagcagcaagtggagtacttttcctagctcgagtgaagtcttcaaggaactgaactgcataattgactatagcagctggttgccgtggagtacccccatgtacaactttattcctatccgtccaaatgccccacaaaatacataacatcaactcaaaatcttgttgactcaaaactgttgaaaaattgagtaagtaatcaccattgaacatgttttgagcccttgaaaaatcaagctgaaactttgaagatctccatatggctttggcatgcttgcatccaaagagagcgtgtccaatagattcctaactcgaggcacaaagagagcatacagcagaagttaacaccttttttttttaaaaaaaaaagtgcagcagctgttgggaggatgttatgtagcactttccaaacaaaaattctgttttttgggggcaaagtcagattccaaaagaacttccaccaaacgctttgattatctaaagttgaggagctaagtttttcttccaaagaattagctcggtgaaaaccagattgcacagtatatgacccattggaagtgtaatgccaaatcaacctatcccaatcagcaaaaaaactcagtggaatagataatatacgatcaga

SEQ ID NO: 52452 - DNA, 1183 bp, Cannabis sativa
  modified_base (827)..(829): a, c, t, g, unknown or other
  modified_base (959)..(961): a, c, t, g, unknown or other
aatttaaaagtttaaattctgcgctatttttaattagtaatcccgaattaggggattaggattccataagtattttaggtagcgtgcctaattatttagggcgttacaccaggggattcaattccgagttttactggtgatggcttaatgattaactttcattgagaacgagcaacacatgagaactcactggataatagaatcttctggttcttcaatggatgaccatgtgagttctctattattctatgcatcatgattgacccgggatggcctaaccggtcatgctaaataacaaatgaatttttgtggtttgtaaacttctcgttcacaataacatgagtttctattgtacttatacatgtaacgtacaaacctgaagacaaatctgacaatttttctaatatgcattttttttcttgtaacaatagacgtaatgcaaagatactcaaaattattttcatctattgtctcaatatgatatccattacgatgtatatttttgaaacttaaaagattcctttttgatttggtgaataataaatcatctataataatttttgttctataaggcatcaatataatggctcttccaaagccttcaattaaatttgcagtgcctgatattgtattaacatttgccttcattcttgataaatttgaaaaatattatcacttctaagtattgtatgagtggttgcgctatccaccaaacatatattatcaccattatttgtagaatcatgtatagaatgacaaatgtccattacttcattaaccaacaacaacaaaaaaacataataagttcaaaatataaatacttaaannntaaaagttcattacataaacatgtcaaataaaataaacaccttaaagtaaataaataataaaaaaaaaacataaccaagaaaagtggctaattgtggatattctcatctccattatcgatattcatgttnnnattaatgagatcttcattaaaaaaatttgcaatatccaaaggctcttgataagcaaaatttgcctttattttctcctttcctttcacagatgcttgataaagatcaacaaggtattttgtcgtatgacaggtacgtgtccagtgtccttttatttcacatcagaaacataagttttaagaatttctatgattattattttgaggacattttcccttgttctc

SEQ ID NO: 52453 - DNA, 1069 bp, Cannabis sativa
  modified_base (35)..(56): a, c, t, g, unknown or other
aaaatatattttaactttacacaatctattaatannnnnnnnnnnnnnnnnnnnnnttgtattaaataatactaatacaaaattaaaatggatataaaataataagcttagatgtatataaaaaaaaggtcgggtcggatcaaatctgatttgaataaggcgggacggatccttacacgatttggatgaggtcggatcatagctggatcagatccgacctgatccatttacaatcctacaaaatatgataattttatatacataaaatgatatttttaaaagtttgggatcttttataatgataaagaatatgtattattgtcacaaaattaggagcattattatgggatactaaagtgcctagaaatagtgtcttataattagttattagtagtttaatttttattaaattaaaataagtgagaactgatatttgattataccaatagcgatattataccttacaaagatattaggcaccataggtgtcctttaacatttctctaaaactagctatggacctctcaaagtgaggattagctaggcttgtgcctaggccaggtctgccctacctgacaaagacattgtcaatgtcttgtcgaaagagagactgtctcgcttggatgaagaccattgcttgaaatagattgttgctcggttgaagaccatcactcgaaagaggcggagccaacataattaaatgggccatcatccaaataggtatacttaatactacattcaaagtgatgttttatgagtgattaactactttttatattattaatttattaaattaaaataagtagaactaggttagtcaatgctgtttactgatgcacatgccttgttattaagtgttggttatatatatatattaaggttggatgtaaagtagaaacatcaatgatcgacacataattttagaaagaaacacatgtctatgggccacctcattcttgcatatgtttgttagttaagtttggttgttagtttaattaggtcttatagttttttcttgatttgttatgagtttgttatgttagttgtgtcctaacatgtaaagctctgt

SEQ ID NO: 52454 - DNA, 1220 bp, Cannabis sativa
gtatttcgggccgaaccgggttcgggtccgaaatataaattgggttgatttatttggcattattatttatgggtgataatctgaatttttatttcaaaataattgattatgaattgactagaatgcccttgtatgtgtgaataggtgaaaattggccttaggggcaaaatggtcttttgaccttattttatttactttaataaaagctaaattttgaggaaatgaaaagggaattttttggatttctctctccttaccgaaccctctccctctctttctaacctaatccttttcacttgaaaatcataagaagtgcttggaaattaagcttggagtttggtagttttgtgctttgaattgaaggattgttgtggttctttcttttattgaattgagttatgttcttactgaatttttattttttgaaaagcatgaaatatcttaaggaggatggtagttgcatgttgatgatcttgtgttggttcaagcatgctattatttgaatttatgattataagttggattgggttttgtgttagttatagatggaattcttggaattttttctagcttgaatccatgtgtttattatgttttggttgttggaaaatgaggttgattcattcctagggatttaaggttgcaagtatgaagttttgttaatttatgttcttgaatgaagcatgatgttcatggatttgtaatctgaatttcagtgtgttttatggttggatttgatgcatgaattttgtgtttttatcgtatgtttggttggggtttgactctaggaaaatttggcatgtttaggccttaaaaatggagtttttggagtttctaaacccagtcgtcgcgacgggatttttggccgtggcgactgggtttggcaatgagaaaatatgtttttcccgattttgttttggccataacttttgactcgggacttcgtttgagatgttctttatatcgttggaaagctcgttccaagctctattttattatctgtgttttgaatgccatgtttatattatgtcaaagtgaaattagggattaaccctatttgtgaaatcccaggttgtgtgactaggattaccggcacttgatcaggaggacccaggggtttgtaatctctgttattgtgggacaacaggtaagacagtagtttgcacttagagtatgcgtggtggcgcttatgttgaatatgatatatgtgagtaattgta

SEQ ID NO: 52455 - DNA, 1237 bp, Cannabis sativa
agggatttcttgttcatcagttttcggttgttcctttctggctgttcatcctgatgctcagggggtgtctcattttcctcaggttgttcttccctggctttttgctgtctcctggttcgtgagccacgaggtctgcctcgtggtcttctcaccccaggttcaggttgattttgagcattcctcccctgcgctgccctagtcgagggtgcctcttgttttaactcagcgttctgacgctgtgcctcttctagacgacatcgcaggcggtggctttccatttcgtaagttctttctcccacagattgagcacccccatggttttgagctctcttcatcccctgcgcccattccccaacgctgagttctcctcaagcgtgttatcctcgtactaggaccaatgtcgggttgagttctccagggacgtgtggtccgaacactgggaccatcctcaagttgggccctcctggaatgggtagtctttttggacggcagattagttgatcttctagagcccataggctcttttccagaacgtcggttagtttcctaatgtggggtgttaatattctctggattttcagccataaaggagaaggtttttttttttttttttgaaagaggggatgtctttttcttagtgtttttttttagaagctctcaatgaaagcacaaaattgttaacgcagattctcgttaaccaaatttgagcctcacaaatatgattcaacacagaaaaaatataaaaatatgaacactagatttttaagtggttttgtagttaaaattctgcatagtccatgagtcaatcttattcagatttctgagtaagttttttcagggcctctcgcgtaagagtccttttttctcccccttttttgatcttatctgcaactatttataattgcatagtggtagttaattacaaaactgaccaaaatataattacagtcattatcccttaaatcgtgggatttgattacaaaatgtaaacacagtacttgattttgaaagccatacaactgtgattttcccacttttactgggtcaaaagtatcttgtattaattacgtgtttaattgttgattctggagatatctcggtagaaacttgattatagtgaccccaacggcaagctagaaccattcttatatccgagatcaacaagatattttttatgtcgattggagatatgaggaaatatgttgacttgcctgggttatgagccttgctcctgtta

SEQ ID NO: 52456 - DNA, 1111 bp, Cannabis sativa
agcaagctatcaatcttattcgcaaccagggagatgcttgttatgactgtgatttccttctgcggcaaattcgagacttattgggttctagtggggttgttgggttacaatttgtgtaccgagagattaatatggtcgctcatagtttagctaattatgttttgtgttccaaagttagtgctatgtggattgagattatacccccttgtgtcgatcgagttgtgaggcttgattgactttttcctgtgtaatttctcgttttaatgaaagatttctgagttttttaaaaaaagataaataatttagcagttaacatgtggtccgataatatattgacatttgtttcttatgtggcacttaacggatttagctgtcaattaacagtcaaaagatcaatgctcattgttcataaaaaaagatcaatgctgcaataaaattgtaagttaagagacttttgctgtcattttttttattaagatcatatatgtaacaattacaaatattaaaagagtttagttacaaatattatataaatatatatataaaaatattatagggtaacaatttacccaagattttttttaacatattataattgattacttttttatttcatattctttttgtgattttttcaaaagttttattttattttatttattatttatttttatgatttaagttaagtttgtcttcttttatttttttttaaaaatgatatagcattgtaaatgattactcaaaattttttcgttaatatactagggtaactggttatttgttattacatacatatattttagattatatattttgtaaaagttattgatttgatcttttattttaataaatgataaattagactttgtatttttcaaaataataccctaaattaattttaaatcaaaataaaacttaataataatctgatttagaattattatagcaaaactgattacgcttattgtatttgtttgtgttaaagaattttcttcaagttaattttttgagaggtaatttagggttaacagttacactcattataatttactaggtgaaaattacgtgccgaaccacgtaaaaatgttaattttatttaaggtttgtcaca

SEQ ID NO: 52457 - DNA, 827 bp, Cannabis sativa
taattaaagataataatttatgtatgatttaatacttaattacataacacatttagatggtatactaatatcttttaatatttctcacacactaaatataatagaaagaagaagaggataatatatataaataaataaataagaatatttgtgctttgatcttgtttgaggactatattcttctttaattacaaacattattctctaattttacaaccttttaacttggagcactattattagatatgtttaattttcacactttattgtttggacttaaaatagacttgtcctttttctcctcctcttcttcttcgtattagataagatattttatgctaatgacttacttagattattggtgatatttttatttaaaatttggaaaataaaaaaaaaataaaaaaaaataaaaaaaaaaggataccaagaaaattcttaggtatgattgatcaattaattgatgccccaaatgcccataattttttttttttgcctattgaattgataagggacaagacgaatctcttcagtcattgaaaatgatcacaagaaaatacacgtgtcactatcagaatcagacaaaagaatccacagttggctctttgggtgtataataagaattttagtaatttttttcttttcacaccaaaaataaaataaggcatttgattcgttacttaaagacttgttatattataaaaaagacatttgagaatattagtggcctacaattaaaggtacatacaatacacccatcaaatttttttgtacctgatagatagatgttgttggtgctccaataacaaaatgcatgtatatatata

SEQ ID NO: 52458 - DNA, 2725 bp, Cannabis sativa
aggaaacaagttgaggggggtcacactcttccatcgattgtgtcgacgagtgccgttccattacttgggagtggaacgttcatcgtttcaacattgaacgaacctatgttgttatctccattcatctagtttccagccattgtgattttcctccgaaatcaacagtaagatttttcccacagacggcgccaaatgttgttggaggaatttaaacaacactgaatcaaatattataattaaagtaaaactaaatatgcgattactctacccagaatagcaagtattcaaactatggacacatagacgtaatggaaatataaataacacaaaaggaatatcgtggttcagtcagatcacagtctgcttagtcaactgttgcaagggttttttgtcttatttatttcatgttggatcactcctttatatacaaagcaagtgtcctttaattacattgagattgatttaattataaatctatttttacattgaatatcaacagttaaataaattaaaacataaatataataaatgaagaatagtttcggcccaattcactaactacaacaacgtatgcgacctttgtggtgctagttgtctgttcatattttcacataggctcgcagctcaagatgtgtacaagactaatcaagtctcacatgtataagatatttacgtcctgttcgagtcgcatatacgaattccttgtaaaaggtcgataacttaggacatgcgagtccttatcgggttatcgagcacgttgggtcatccagaccagctccatgggtaaagaatcgatctttactaactcatatgaagacctttatagttatcgcatatatctcggtatatgcgagtcttagatttgatcttcggtcctgcatcatgcgatgcatactaatgcgactagagtctgtcaaggtcacatcatctccctgagtctggctcaggcgaggtatatactcaagaggtctccttctgacatttcagctttccacgaagagagtgtgtctacgtgtcatttttacgggagcctagtcttgagtttctaggtaaagaattctcactctaacacttcccatagaagatttggcgacactatctctatatataaaagtgtgaaatctacactgatctttaaagccttaaatatttctttactcaaaaatattgaatttgagatagaggcaatggttaaaactagttaaagaagattgtgagattctctatcatctcaggaaagccaatgtagtagttgatgccttgagtaggaaaactctcgggcaggtatttcagcacgattatgatttcacctcagttggcgaatgacatggttaaatcaggtactaagtttgtggttggcaaacttaataatttgacactgcgatcaaatttgttagacagagttagaaatggttagttggtggatctataataagtgaagattaaaaaaaaattcttagttggccaagctaaagttttatcaatatcagcaaacaggatgcttaatttcaaaacttgagtttttgtcttgaataatgaggaacttaaaaaagagaatcttgatgaagctcatatcagtccctattcattacatcccggtaccaccaagatgtatcaagatttaaaatccttttactggtggtgtggtatgaaaaaggatttagtggaatatgtatcttggtacttgacttgtcaatagattatggctgaaaatcaaagacctgtagggctattgcagcccctgactcttcttgagtggaaatgggaggatgtcatcatggattttttggacggtttacctagaaccacgggtatgtttgattgcatatgggtagttgtggtttgatttatcaagtcaacacatttattgtcagaaaaaacaacatatatagtagatcaatatacagaactttatgtgaagcagatagtacgattaaatggggctccaatgtccatcgtatcagatagggatccaaagttcacttccaagttttgggaaagtctccagcgagccacgggtaagaacatgaagtttagtacaactttctatcccaaatagatggtcagtctaagaggaaaattcaggtattagaagatatgttgcgagcctgtgtgatggattttaaaggctcctggagtaagtatttgccactaatagagttttcatacaataatagctatcagagtacaatagggatgtctccctatgagatgttgtatggtggaaaatgtagatctccagttcaatgggatgaatctggagaaaaaaaatacctaggtctagaattatctcaacgaactaatgaggcagcagagaagattaaggccagaattcttgcctctcagagtaggcagaaaagttatgcagatctgaaatgtagaaatatagagttttaggtaggagatcatgttttcctacgggtatctccagtgaagggggttaaacattttgggaaaagggcaagttttattactagatttacagggccttttgatattctccggaaggttagattggtggcttactgtctagcctttccttcagtcttgtcagtagtacataatgtatttcatgtttctatactaaggaaatatgtctcggatccaacacattttcaaagttatgaaatccttgagctctaactaaatttgtcatccaaggagcaaccattacaaatcgttgatagaaaagataaagtcgtttagaataagaccatagcattgg

SEQ ID NO: 52459 - DNA, 1731 bp, Cannabis sativa
  modified_base (742)..(754): a, c, t, g, unknown or other
atagaagatcgatttctataggttggataggtattccaagtccctggcttgtcccgttagtactgtgaagctttcttacgacatccaagactactgtttctacacttctggcttcccattaaagagatttccaactctcactctcgatttcaacatagtgttagaatttaagataagatgattaagattccatctcaaaaccaatcgacaataggaggattagctcattccttttatatattctattatctttccacacattagtaatatgagactatctaacacgtaacgagtaagtataactatttactcatctctttccttgtttcttcttttttttttttttcttattcgaggaacttaattaaccaagttggtcttgatgtactttttttggttttgggtcatgttgaaatcatccaagggtttcttaagcactctccggattcgagtgagctatgcgaagataagcaaaaccaaaatattatcctccatggttgctgcggctaatgggagggacaaagcagtgagttatattttaagaaatactgagctattgaaatgcttattaaccagaaagattgcactctgacttgggatttgaatcacaatagtaacacgcgactagaatatgttgctttgaaccctcatagatggtgcacaacatcaacgcctcacccctcgtttcgtcagctatattaatcatatgaacacttagaagcatcttattattattattatnnnnnnnnnnnnnattattattatattatattatttgacagtgcatgtggggcggactcatgtaagcaaggcgggacagtcgccaagataaaaaaatttggaaaaaaaaatgtaaatgcaatttagttaatcacgatatatatttgtaataaaaaatgatatttataaatataatattagatttagtactctataatggttaaattagtagcaaaatatgttgaattttatagtaactggttactaataacatttgggtcatttttgtaaacttgagcgttttgacaatgttgtgttcgcttctattaactcctataatacccaaatcattcatttaagcctagctatattgagagctgataacatccatggtgcgttatacttgtttagatttgaaaatatgtgattctaaatactatataaatacatatattagatgctcatttatatactaatttttatctagaaaaatattgctgcaaacttcataagcttgattgttttcaaagcaattccctttgcttatagattggggaaataagagattgtttgcttgtgtttttcaatctttaaaattgcatagaaaataattttttgttattttaacaatttaatacgatttgtctaatgcttcataataactattttataatttttttactaaaaatatattaatattctataccttaccacgacatgaatcagctcacctcggacccgaccccgattcagggatcggaccccagactcagactccaggcctagaccccaaaccccaaacccggacccaaagaatggagctcggacctcgggccctaggcccgacagttggagcgtgaccccaagccaggactcggaatcgaactcgaccccagacccatacccaagtatgtgagaaaatataaatgtctattctatataaaatgtggctatataacagaattcttagtttatgagaaattatttggtgacattattagatgttgccac

SEQ ID NO: 52460 - DNA, 879 bp, Cannabis sativa
  modified_base (415)..(426): a, c, t, g, unknown or other
aaaagagacgacaactagtagagggaagaggtggaaaacggtgttgagaaacatatcatgccttgagagtataagcttcttcaataataaaatatatgcctacatggttggccaaaaatatttgttgatgctcaaataatatggtaataggtagtatatataacatagatagtggttacatattaaatatgagaatatgaagagaatatgataataataatcataataataataatacatatttaattttatataggagttataaaatgaaaagacatattatcatttttatttcaattaatataaaaataaatgttaaataaaaaaaacaaaaaattagatattagactaaatagaatattagaagaagagaatgccacatcatctctatcaaaaccctcctttatatatatannnnnnnnnnnntatatatttatatatatattgattaggattttgagatattacaaacttggtaggatccaaacacccatcttgtggttcccaaagtcaacctggagtagggctagggacccctcacaggtcgactgttatgacccgagactgctcaactccgtaaatattttttttcctgccacgtgttaaacattgatgtccatattatcagggctaagtttcatgtaatcatcaacataatcccatacaaaaataattactaaaactcaaaacaattaataaatatatttagagcaataaatagtaatttataaatataacgtatgagtaaattttaaaatgaaaaacgagtttaaagtattttatgtgagtgtgtttttaatatgactctttaaatattttaaaattttgttattttagagaagttgttggaagttcatttgctaataaaactgaagatta

SEQ ID NO: 52461 - DNA, 2417 bp, Cannabis sativa
aattattattaattattattttattttttatggttttagtaataattattaattattttttcttttgaatgaaatcagcactttattaataaatatcctccaaaactaagaaagaaacaaaagcaaggagagtattcaaacaaaagtactatctacctcaaaatgagaagattgcgttaacatgtgcgctaccttattagcagaccgcttgacaaaattcaaggaaaaagaatttaaactattaataatagctttacaatcaactagaacacagccataaggagagaccatgtttttattgttattcaaatccgctactgcagtaaggcaatccgattcaagaatcacgtccgcccaatcattgtccttaatccaacttagcgcttctttgatgctcattgcttcgactaagagtggttcaaagacaccatccctgctaccacgcttagctttcaccaccattccaagtgagtcccgagctacacatccatacccaaaacgcctactatccaagaacactgctccatcaacattaactttgactcgagggtacaccggttttgtccaacgctctatctcaacctgcctaggcaggttggtaactacaaaaagtttttgagcattaatccattcctcaaagctgagtttagcaaacagagtaacatcactaatagtcggctgcttctccttccaaaccagttggtttctgtgatgccaaattgaccaacacagcataaccgcttcaacaacttcagcctcctgccattgttgtaaacctgcatcgaaccagctggaaaaaaccatagcagcagttccaactgttgctacccgagatacactccagcaattttgtgcaaaaggacaacgaacaagaatgtgaaggatggtttcaggagctcctttacaaacaggacacataggattgatgttaacatgtcctcctaccaattgaaaacaagttggaagactattagaacaagcactccatagaaagtttagtacttttggaggaactttcagattccataacttcctccaaaaccccacattgtcactaccactccaatttcctttccatttctgcatcaaattatatgcagacttaacagagaagaggccggttctctccttagtccaataccactctccttgattattctcactaatcagaacatgccaaagcaactctctatctcggttagaaagcacatccatcaccacctctttatcccaatcccctccctcgatcgtcatgagtgaattaacattattattcactaaagcagggtgagtggactcaatgtaagggtgatcctcatcaggtagccacgggtcattgaggatgctcacatttgatccatcaccaacactccttcgaatccctttcttcaccaatgcttgggcttcaaaaacacttctccaaatgtagctcggattactccccaaagttgcattaaggtaggtaccgttggggtaatatctagccttgaaaattttcccaaccaagcttgattcattgtgtaacagccgccaaccttgcttggccaaaagagataaattaaaatctctaatatcccgaaatcccaaccccccgttctctttctttttagtcatcttttcccaactcaaccaatgaacaccccctttgttagaagactgccaccaaaaattgctaatgatcctctcatgtcatggcaagtaccaatgggtaatagaaacacattcatagtataagtcggtagcgattgaactacacttttaatgagcacctccttacccgcttttgacaagaacttattatcccaagtccgaatcctcttctgaactttatcttttagaaagccaaaagatgcatttttattccttccaattacactaggtaaacctaagtatttgctcctttcatcagcttcaacaagacccattcggctacaaataactcctcttgtttgtggggacgtgtttgagctaaagaaaactgaggatttagagaagttaactagttgacccgaagccttggcaaatgtttcgaggagaagaagaacatttgaaacctccctctcagtggctttacaatataagtagctgtcgtctacaaaaagcatgtgagagataactggagccccattggcaacacgacacccatgaagccatttcctctcttcaaaccttcgaatcaacgctgataaaccctcagcacatagcaagaagaggtaaggggagatcggatcgccttgacaaattcccctagttggtgtaatcggtcccagcaccctgcctcctgtaacaattttatactgaacagaagacaaacacccataaacaatgcggacaaacttatcattaaaacccattcgactcatcattgcacacaaataggaccattcaaccctatcataggctttactcaaatccag

SEQ ID NO: 52462 - DNA, 1890 bp, Cannabis sativa
  modified_base (142)..(146): a, c, t, g, unknown or other
atagttttttttaaaaaaattaaacagtaggcgtttggttggaaggaatgaaaatataagaataggaatgggaattggagtaggaatgatcttacattgaaatggtctttccttcacgtttaaaatggaatagtcattccannnnnatgatagaaaggtcattccatcggaatggtattccaatggttttaaatgcaactaaacaaatgaatggaataaaaactgtttcatttccattcaattccatttcattacctccaaccaaacgccacctaaaaacctaaaaacgaattatatatataaatatttacagattttttttttacaattttgttatacagttttttattttatttttcaaaaaaaaaaattattttcatgttgctttcctatagaacaacctatattgttatgaaataacaaaaaaaataacactttgtattgttgtaaaataaatttatgttatttttacgtagcaacaacatcaaaataatggtttttttttttaaataatggagaaataatatttcgtatttttatataataaaagagaaaattacaaaaaatattagaacttaggttaatttttacaaaaataatatcacacggaaattttttcaaaaatactgtgtttttataaaacaacactggaacagaaaacagaacaactaaaaacaacagtggaacaactaaaaaacaaccttagaacaacagtaaaaacttaacacagtacatagtatttttgaaaaaaaaattatgcgccacagtataaaagtaaaaaaaaaaaattggaaatttcaataagtagtgtaattatccctaaataaaaggaccataaaaatatataaaaaaaaaaccctaaaaatataaaaaaattatcatttttgtatatttgtgaaataatcaacccaaaatgtaattagttttggactcttttgttgtgtgggctaaaacaaaaacagaaaaacatatggactttctcattcagggctcaaaaaacatgtcaatctaccaaataataaaaatcaataattacacaaacaaacaaaactccaattaattatataaatatttatgacactatacattaagatgattggtaccaacattaattttgattaatttttatttttttatttattataataattattttttgcacattcatgtcgaaattttaatacataaaaacaaaattctttataactcaaaacatctaaacataatatcataataattcacttacacacaataaatatatttctatttgtatatacactataataaatactataattagtttggttcaaaattgaattttcgatgatgaaattaatttgccagccaaagcatgtccaattaaaatcttcaacattgaatctaattaaatgaaagttaaatgtctaacttttatttttattgtttaggtgctgaaacatgtgtgctgccaaaattaaaattaaaattatttcaccaacttataaaaataaggaaaaattttaaaaatttatttttacaattttatggcttaaaaattttatttataaaaatacgtttataaaattttaaaattacaaaaatacatcaatctcatggtaactattattcaaaaaaaatatatatatatatatatctcacgataactataaatcaactataaaataaaaaaaaaaaaaaacaatcatcatgtcaactatgatataactataaataaactgtaaaataactaaaaaataatttgttgcttttactaaagaggtatttttataaataaaaaatttcaaagcgtaaaaaatgaaatgttttgtaattttattttttaaatatttagtttattatgtaaatttttctaaaaataaaacgaaaatacatacaacagttgtataaacg

SEQ ID NO: 52463 - DNA, 991 bp, Cannabis sativa
tttggagtccacctgaggttggtttgctgaagataaatgtggatgcaagtgagaagaaaggttcaaggtgttctggaattagttgtgtggttaggaatgaaaatggttaggtggtctttgcttcgaccacaactttacaacaagaataccaacctttccaagttgaactgtagacaatacaagttattctgaaagtcagaatacatattttttcaagatttaatattgaatctgattgtctacaagttgtccaattaattcaacaaaagaaggatagttgtagggatgttgatggtatattagattgttatttgatagcgtcacagggatcttgtttgtatttagggaagctaatgggatagccaatatgttttgtcatacaaagttagtgtcatgtagattggcattaatccctcttgtgcaaatcacgctattaagcgagactcgtctaattttttgtaattatttaattatggaatgaatctagttttgaaaaaaattattatgttcgtaaactttcattcatgtcaaaaaatttggtgaacaaaatttgttgaaattttttaattttaacaatctcaatagttgatgatgaacaatttaaaaaattgatttaatacatgacaaaattgaatgagaaaaaaaaaatcaaaattagcaaaaagaaaattactgatgtgaattataattatttttctttaaggtttaaccttaattttttttttttattttaacatttcaaaacaattttttatatatatttatacgtaaatcaacataacaacccacatagcaatcagtagaacaaccaaaatttacatagcaacccacataaaaactactgaaagaaccacccaataacccaaacagtgaaaatgaaaaaaaaaaaaaaagaatttttgcatcacatactaaaatttccaattctttttttttttttttttttttttttttgggggcagaattttttttaaaaatttttgtttttttt

SEQ ID NO: 52464 - DNA, 516 bp, Cannabis sativa
gtgatcttgatggtagaaagtttacgtctaggtatatgttaacttttgcaaggggagatgtgtcatgacagtccaagttgtaaaaatgtgttgctttatctaccatagaaggacatcatattgcccttgtagaagttgagagagaaatgctatagataatgaattttctacaagaattgggtttgaagcaggaaagttagatgattcattacgatagtcaaagtgcgattgatctgagcatgaatgctacttatcaatatagaacgaaacacaatgatcttagatatcattatactcatgacgcactaaaaaagaagttattccaagtgcagaaaattcatacaaacaagaatgtagcagatatcccaacaaaggtgattcctcggcataagcttgatttgtgttccaaggatctagggatgagttcttgatgatgaagacacaagatcaattcttcctcatggattgagaaaaggggaaaaattgatggggaatgattgttttctaatcatgtaa

SEQ ID NO: 52465 - DNA, 725 bp, Cannabis sativa
atataattgaattgaatggaataatggtgggttttaattaagcctcctctctactccctttggtgcatctatcacctacctacctacctacctatctacaaacatctattgtcaattatctactacaagtgtaaatcaaaccgtataaactgtttgtacttaaccacaatgcataaaaaaatacagtttgaaattctttataatgcgattgtaatttatatttttgctaaactgcgtagtacagtacgatttgcagttttgaatttaataataacagttcaaactgtaccgcactatatattacaaagttatcaatttttattatatgatttttattttttttaataaaagaacaaatatatgtaatatatattattatttagagacaatttaatataataattttatgttatgatgttaaaactttaatataatctttttttttttgtattgttaaaatttttattagttttatttttaaattttattataatatttgataatgatgttagtgtaaatagctcaaaccgtactgtaccacaccatagtctcgcaatgtgatttttgcagttttgaaattttacgatgcaattacaatttgaaaaattacaacaactgcatagtttagtttcaaaaaaattgctacaaccaaccccacccctttgatgatttttatttacattttaacaaaaattgtcaaggaaaggaaataaaatcaaaaacta

SEQ ID NO: 52466 - DNA, 701 bp, Cannabis sativa
ttttttttttgtatatatatatttctcttgtttatttattcaacacaattttttttcttttatttgctttgctggtatgtttgtcttttttatataattggttttgcttgctttgattttactttaggttttgtatatcgatctttgttcactaagttttggggagtctttcattattagacgtctccttccaattaaaaaaaatcaatgaaatttggttgatggttctattatttatttgatatttctattcaacacaagtcacaattgttatataaaaaaatatatatttaattaaattataaagccatataaatgtaggtaataatcaaaaaattattacataattggtttttatataaataaaataaaataaaatttattttttaattagaaataaattttagtggccttttacgaaaatgtcacttgtataagttttggcattttcaaaatgtcataaattattttttaaatattaaacaaatatatagtaaatattatagtgacatttcaaattgtcacaatttatacttaggtgacattttaagatgccactaaaaattaattagtgacatttgtatttttagtcacattggtatagcttacaatttatacaaatgccactaaaatataaaatgtcactaaatattagtaatagtggcattttaaaatattactgattggggtttttggtgtag

SEQ ID NO: 52467 - DNA, 1164 bp, Cannabis sativa
ttttttttgtagctctttttttttttagctcactatccctaatcacaagtggctctttttcctctactttttggatcgatattttttttgtgactgtttttattttttggctcactattcctgaatcacaagtggctttttttgactttggctcttggattaatttttttggatttttagtggccctgtttttttggctctacttcgatcggtttattttttattggggttggatagtcattagaagattttttgtttgtttttgctctgataccatgttagaatttaagataagataaatgtggttctatctcaaaactaattggcaatgggaggagtagcccgttcctcttatataatttatatctttccacacattagcaatgtaggactatctaacagtatttctcctgaccaacaaacttcttaatccaactctaaagcatattttgccaaaccatgtgcaacatggttagcatttctcctaacatgagaaacaattgctttaaggaaaaaggacgaaagacaacgaacatctaaaatcaaatttgagaaacaggccggacaaattgtagatgtaacaatcaaagcattaaagactataagcgcatccatttcaatattggtgatttctaattactgttacagcgcccaattaaggctatggaatagtacttttacttccatttcatctgagcaaaaacatccttggactggctttgaaagagcaacaacaacaaggccttggtgatcccaaacaatggcacccacacccaaagttttcgatgtagagttcatggctgcatcaacgttaagcttcaggcccgcatcattaggaggctgccatggaatgtcttggttgtctggtttcctactagtatgagaagcagcatgtaaggtggtaatagcaccagttcgctattgttgctgccttgtagaagcatgaaatttttccaaataacccttagcaaaagcagttgtacacttcccttatgtgattgtaccatgttaggctatttttagcctatgtatcgggtcacaattagagtcgtttttcgatttttttttggacagaattacgcttgttttctatattttcaagtttcccgtagctgttggacgttcaaggcttcaaaagtgcaataaaagacaagttgagccaag

SEQ ID NO: 52468 - DNA, 1346 bp, Cannabis sativa
acaaaaaatctactttcatttttccatttttaaaattgaaaaatgaaagtgttaccaaacgccaccttagaatttcataaaaacgtaattttttttattattttgggtatttccaaaatatattactatagagagatattttttgttttttttttttctttattttatttttaaaattttgatagaaagataattttttttttttgatgaatgtaataaataaccgcctcacatcacaatagtatttctttaaaaaatataaacatttttatattttattgtttaaaaagaaaactataatagaaatactttttttttaaagatatgtgggttgggtaaaaaaaaaaaacaatagaaagatattttttagatgtgtaatgagtttaaatttgaattataattttttcaaaaaaatactttatgttatataaccacatgtaatataagataaaagataagaaatatgtaatataagataaaagataagaaatatgtgtaatgagttctaaatttaaattgtaatattttttttttaaaaaaaaaaactaaacaacattttctattttatatttacatttaatataatatagatatataaaaattattcaataacgattattttaaatcactacatcgttccgtaacgctgtcaagtttagcaacaacttcataatttctctcatgggaaaatgataggtaactatccaaactaaagaaaactttacttacactatttctaatattctttttgtcctagatttaaaaaccaatttacttatattgggtcaactataagaaaaggggtatgagatttctatcaaaaatagatatgtcggatcaaaaatgtaaagttgagcttaattgatcaagttaacatgacattgaatcgaatgttcccactttgtctctacaataccactaatttgtgcttatcacaaaatttgaaagatgcatcatggctatgacatatttgctatggtcacttgaattttggtggattaaagactttgcaacaaaagaatatggtgactggtcttcttttaattacagctccttccgaagtgtgtgaagaatgtgttgttagcaaacaacatcctaatccatttccacatggacaatcatggaaagaaaacaaaccattggagctgattcattcagacttgtgtgggccaataagtccatcttccaatggagataaaatatatgtaattaccttcatcgatgattttagtcaaaagacacgagtttattttttgtaggataaatctgaagcttatggagcctttaaatgttatgaaagtggccgatgaaaatgaggttagcaatcccatcaaagttctttgcat

SEQ ID NO: 52469 - DNA, 1658 bp, Cannabis sativa
tatttaaaaagaaaattaaataaaaatgctatataaagttttaagagaagcaaattagacatgaaatattagcaagatgtatcaaaaacaataatgttaaaattttataaagttagaaaacgatttataaaatttttaaaaaaataaagaaaaatattgtttaaaaatttaaaaatttgagaaaaataattcctaaagtttaagaatattaaatgaggacataataatatatgtttttttagtttttatggtcaaatagtgttcgtagttcacactttcatttttttcggtgtgcttataattgaattgttcattttcttttgttaataatttcagggacagttttaacaaattgatgatgtttttataaaaataattttgaatatttttcaaaaacttatgttgtaatataatataaaataagtaacacatatataattataatatttcatcaatatgttctattattttcttttctcttagctaataatagaaagtattgcacataataaacacacttaatttaaaaagagttctagctaaaataataacaaaatagagatccaccaaacaacaatattaaaatttacttcaagtctaattataccaatatataactcattgaagactattagaagctctggaaagtacacaaaaagaaatttaacattataaagctaaaaataataaactatgtagcagcaatgataatacactaaccaaatttgtttagccaaatacaaccctaaaacttaaaagcatgagttaaacagcatgacgctaaaacaccaccaatacaatacataaatagtaagagaaacaacgtaataaatctttacagtgagaactactgcatatatctatatatatagtaagaaaccactacctccttttgtaacaccaattaaaacttttcaagtgcatccaaataatttgctggtatcacatgtcccttttctctcatctataaaattagacatgtagattaataacacaaaacaaaaacagatacaaatgtaatgtacacaaaggtcattttaccaagtgtttttccctcctgatgttcttcttcacattcctctcagcgtcttcttcagccagttttgtttgtgacaataacttcttccctgatagaaccaggtcatgctatgcacacccatcttacatcattattctcatattagaaaagaaagaaaataaaaattataaaatatagcttaccaaaccatcgtcttgaatagatttattaatgatatttttgaaaaccattttaaaagctctacaaccctctgtatgtaaacttggcgattccaggttgaatatgacaatattattattagtgtgaaaatcattatcatctgagtagtcaattaaaatatatgatacatagaagaagacaagaaataaaaaggagctagcattggtcgaatcaaatagttacataaataaacatatacatatgtatatttaatagaaatttaagaaatggctgcctcatatcgatatgagagattgagagagagaagaaagaagaatcaaaatataggtttgagggagaaggtagaaaaatcgtgaaaaaagaatcgcaagaatgtcatcttgtttttttgtgagatattatttgaaaataatgtatttaaaaattaattaagaatatt

SEQ ID NO: 52470 - DNA, 1522 bp, Cannabis sativa
  modified_base (472)..(474): a, c, t, g, unknown or other
ttggtttagcatttaggaattgaagagttaacatattaataaaaaaaataaaaacttgaataaacaattccaagttgttaatggaatgatagtgagtgagtaattttggaggaagagaaagaaggaatcatatctagaaattgggttggggttgggatcgagtgggttgagagaggaagagagaggctgatgagattaggaattttaaatgtgaagggtatttttgagaaattagtaatgtggtcatatatgactaattttaataactatgcatttagggataaaattttaaagtattgtaagagcaactctaaggagctctcaaatttgaggttgcagtggctaatcttctccaacgtagtaccatctttacatcatatatgcagtctttgctctagtgcactgcatatatacagtagcactgtagcaactgcatcttttttttattattattattaatatttaatagctnnnttttgtttatatatattgtttaatattaaaatatatcttttggtgtaaattttagtattgtgattggagtgaaaataatttttgacaccaaatttagtgatagtgtaacaccaaatttaatgtgtccttagagatactctaagtatggaaatccaaatttcccaattaattttacaaggaagttgtacggtcatcaaagtgtttcctctactaagttttataagattgggaattgttattgtaatgtaatcattagatatatatataaaaaaattgaatattccaaatgaagtgcctaatgatgtggccagaagagtctttgcatgtggttcccacttcccaccatcaatcagatttgtgagactgttaagaggcaaaagacaggtaggccctcccaccccacatgagaattttttctagaacattactattagataccagtagtgtctagcacctttgcgatatgtcgtgttacgattagctagcgatacttcctaaaaactattatattaaattatatagaacccgatacttagttggaccaatagcgatactgacacataaaagggtactagtcaccactgataccctttagcatttctctttttttctaatatcttatatataatacaaaaaattaaaagggaaaagttaaattaagaaaaaacctaataagtgaacagaagttttgacctaattagcaactcctttttaggatgtattgattgtaattataaagagatggattaattatctatttaattaatcccaaaaataagagctgtttgagctgtcattattattctgcaccctttcaaaagagaccttttcctcttgggccaagtagttaaggtgtacacaatatcttataatcttattcttatcatttttcaatatattttttttttaaaaaaaaaaattgaaattgtgtatatatcaagatctcttagtatatagtaactttagcattatcataaatcataatcataataacaatcacggaaaatacatataacataagctactatgatcttaataatatccagat

SEQ ID NO: 52471 - DNA, 696 bp, Cannabis sativa
aacctattgtttaattatttttatatacaaagcaaacatattgatcagaatgagatataataatgatatggactaatttgaatgtagtacctataatatagtgatgatagtagtttcaaaataaatgataatttttctataaatttatcaattattatacatatatataattatttaattctaatttaatttattcaaataataatatattttggaaatttttttttatgttattaaaaataaaaaaaatatttagtaaaataattattcacattattaatatatatatatataagtatcgaaattttaaagttaattttatgacttaattatcactaaataaaatacaactgcacgtgaagcgcaatacatttctaattaattataataagaaaaaaaaaacccaatatttatttctactctaacatttattatctgtgacaaaaaatatcattctttctcgtcaatatctttaacatttgttttttttttttttttgatttggtggggctaattttattaacattaatatttgagttccttataataatttatttcacttggtttaattagacaatgaatagtaaattatatcagaataattattaaattttcgagttgaggtaaataaggtacaaaaatgaaaagaaaggggatttgggattggttgcatgaaatgatttatgcaaatccaaa

SEQ ID NO: 52472 - DNA, 901 bp, Cannabis sativa
ttaagtattttgaagatcttttcttagctggttcttcggattgggaggatgttcttcaatgtgtggattcttcaatttcgactcagcagaatgaagacttgcttcgaccaatctctgaaactgaagtgaagacggcactgttccaaatgcaccctgataaatccccggggccagatggtatgaatccagctttttatcaaaaatattggcacatcgttggccatgatgtggtggtttcggtccaaaaattcttttgctcttgtttgatgccggtgggacttaatgatactaatgtagtcctaattcctaagaagaaaaatccagaccgaatgagtgatttaaggccgatttccctatgcaatgttctctccaaagtcatgacaaaggtccttgccaaccgcatgaaacacttactcgatcaagttatttccatgaatcaaagcgccttcatcccggggagattgattacagacaatataatgatttcctttgaagtgttgcactatttgaagagaaaacaaagtggccgtgatggctatatggctttaaaactcgacctaagtaaagcctacgatagagtggaatggccttttctccttgccattatgaataagatgggctttcaccattcttggattaacctcattcaacaatgtttgtccacagttcgttacaatgttgttagtgggggctttaatcttggtccgattgttccttctagggggataagacaaggcgatccaatttcgccttaccttttcttgatttgtgctgaaggtctttctgcaattataagaagattcgaagaaaagaagtctttacatgggtgtagagttgcaaatagagctcctattatttctcatctcttgttcgctgatgacagctacatttattgtaaagc

SEQ ID NO: 52473 - DNA, 1416 bp, Cannabis sativa
cagcatctaaatagcccggttcactacaagaacgagcttcgataagatggccatgacaattgcgagccaccaacccagtcccaaaccaaccttctgcctcaaagatagctccatctacgttgaccttaatcttatcagttaccggtttagaccaatgctcacttccttcattttcacccgaagccaaaaataaaggacccttctttctcaattgagcattcttccattgattaaggttgactctagcagacagaatgacatccgaagctgaagtgctcttgcctttccaaatgtacgcattacgtgcattccaaatggcccaacaaatcatgaccgcttcctctctaatttcagtactagatggcaagacagatgactcaaaccaatttgagaacttaccccccaacaagacattcgcacttaaggatgatctatgccaacaactttgagcaaaagaacattctattaacaagtgcacaatcgattcatcctcaaagttacacataggacatcgcagatcaagtgggacatgtctagagaccagttgaaccttcgtgggaagagtttcagagagagagcgccacaaaaaatgaagcaccttaggcgggacattgatgttccaagctatcttccacaatcttttctcatcagatgacaaaagcaacccatcttccttgtgtaacaaattataggcgtccttcactttatacacaccagaagaattgagagaccaataccagaaatcagaagaagctgaagaaatagggagcttacaaatcaaatcagatctcgatcacgggtgttaaacaaatcattcagcacttctaaatcccaccttctatcatgactctccatcaggctagccactttacagtcatctaaacccaccagctgagtcgttacaaagggattggatgcatcaggtaaccagggatcccgctgaatattaattgaagttccagaaccaatattgcaacgcacccccgataagacaagcttctgagtatcaaagatgctcttccagataaaacttggattgtgaccaagttcagcattaaagaaagaacctcgaggaaaataccgagccttgtataaacgactaacaagagaagtctcattaacaattaatcgccaagcttgcttacccaacatggagagattaaaatcccgtaagtctctaaaccccagaccaccaaaatgcttatgctttgtcagttgttgccaactcttccaatgaacaccatgtgactttgaactgtcagaccgccaccagaacttggccatcatcccttcaagtttgttgcaggtatcaataggaagaagaaaaaccgacatagcatatgagggaagagcctgagcaactgtcttcacaagaacttctttgccagccttagataaaagacgaccctcccaact

SEQ ID NO: 52474 - DNA, 1618 bp, Cannabis sativa
tatttagtgctggtttaattcaaatcaactctttattgttttacctaaattgttagtattaatttttgtataattgattgttaatcaattcatgtggagagtggagagatactcatacttatcactttatctaattttaacacaacaacaattcaattctagtaaaagttaatagccaaatttttgactttcccctcaactttttcatttttctcattctcatttcacttaaataataagtaactttagtctaaagtaatttatttttttgtgaataaaatcatctcagcttttatttttaactgcaatcattcatgattacaagaagcaaatcggtagaaacctcattgctcatagagtacgtcagcgacaaaataggatgctcgagccaaagagtgaacaactctatttgcagaccgtcttacaaaaataacgaaaacatcacgcaattgttctaaaaacattttacaattaaaaataatactctcaaaaatatgacaacaaaggaagatcacttctaattgcttaaacacggatagacaatcagtttcaaccaccgttccttgccaatctctttgttttatccaacttaaggcctcccttacccccattgccttcgccaattcaggagcaatgttccctgcccgacatctagtgatagcctcgaccaattgaccattagcatccctagccacacacacaaaactataagtggcattggtgtcaaaaattgcagcatcaatatttactttcaacttgtttgcagtaggttttttccaggtctctcctctgtcttcctctgttagaaacgctgctgtaggaaccagcagcttgtcttgagcattacaccaattagagagagtagacttggccagaaaaactacaccagcaaccgtcgactgtttgtccgtccaaaccagttcatttctggttttccatatcgcccaataaagcactgcaatatcatctctcctttctttctccacttgcttgaacatgacttccagccatcgtaacggctgggacattcttcttcaaaccagcaagctcccaacagctattatcaaacggacaatccaccagataatgataaggagtttcaacattgttaacacaccttggacatccactatcaacttgtacatgcctagatggaagacgcgttttagtatgaagacaatcagaagccgctcgccatacaagatctttaactttaggagcaacatacaacttccaaataccattccaaatcgcagtattacttggtatttggaatggtaataatccactataaattacaccaaaaacagatgaaagcacagtaatatagggaatttaacttattaagtaaaattgtacgaaaaaaaactaatcaaaacaatacgaacaaagattacacaatatgactaaatttttttgacaaattgagaaaaatgcctattcaatatcaagttttaatctgatacaaaataaagaaacactgtcaaacaacacagccaataatatatacgagttgttctcgttaacattgaagcttaaatataaaagaagatcatatatataaatgattgagcaccattaatttcccatttaaattttcttgaaattctaatgtgtg

SEQ ID NO: 52475 - DNA, 1285 bp, Cannabis sativa
ctagatttatcacgggcttgggtgcaaaattgagtactatttatatagtacgatgggaacttgagtacatcacacgaaggacctcgtgatatgcaaagtagtgtgttggacacactacacggagattcacacatttctgcatatacctatgaacataacaagttgattagtgagtcaaggtaaatcaacatatgatgcgtaacaaaacattaatgttaatagtaccttgttttttaaccatgtactgaaatttcgataatgttcatcttgtacccatttttgatttcgtgccttagtcggattagtagtcttgatccaattaaaatgttcccttcaagtgttcaatggatttgttttagtttgaattgatattattaatatgttttaacaatgaaaaattaacttaaacttactcaatgtacggttggacaacatcagtattttgcaacacaagccggtgcgcttcttcacaatcagctcgactcacaccacaaacagaaaaacccctaccccctctgcttatttccctatcgacccgagtagagcgagagccaacagtggtaacctctgacaagtagtctgagcagaattcaatcgtctcttcaacgatgtatgattcaacaatacaaccctcaggcctacttctatttctgacataacccttcaagattttcatgtatcgttcgaatgggtacatccatctcaagtacacaggtccacataactttacttctctcaccaaatgcactgttaggtggaccattatgtcgaaaaaggaaggcgggaaaaattgttccaagtaacacaaaacttctataatttctatcttgagattctgtaacttaggcacatcaaccactttacagcaaagagatttgaagaacaaacacaatctcgtaattgcatatctaactttctttggcaacacagaacggatactcactggtagaatatgttgaatcaatatatgatgatcgtgagatttcagaccactcaaaattaattttttcatatctacccaatcagagacatttgaggagtacccttcaggtactttcacctgggagatagaaccgcacaaagattgtttttctgctttagttagagcatgacaagctggtggtaagaacgttcgtcgaccaacaacttgtgggtgtaaattggaacgaatccctaactctttcaaatctaagcgggatttgattccatctttgctacgcccaggaatattgaacaaggtattaagcaagctgtctgacacatttttctcgatgtgcatcacatc

SEQ ID NO: 52476 - DNA, 899 bp, Cannabis sativa
acaatatttttgaaatttaattgcttttaatgttcgaaaatataaattttttaataatttttccttattaaatagttgtatttgcataccttagaaaggatctggtaggttataaatagaagttgaagtaatgcatcacaagctaaaaaatagagctttaacttgtaatactaaaaaattaattgaaatgtctcaaaacgaaaataaaaaataaattgtattaaaatatatatctacaaaaaaaaaatatatcaataaaatactaaattcttaaattttatctcttgattcaatcaagtaaaacatatactaatgaaaaaactaaaaaataacttgctgaaggtgttaccctttagttagtagtaacgactatcacccaactacttctatctcaccaaaattcaatagtcatactacataaactcataaacaatataattttctaaattatcattaaatattatattgttttccaaaaataaatacttattttttaaattttgctgatatctttgaatttgaaaaattccaatttaacttgaaatctcaacctaattcaaattaaaatttgaaattgtttattaatttttattttatttatgcatatatttttgagaaataaaaatcttctacaataatatggaccataccacaaattatcctaaaaaattagaggaaaccataattactgatgcaaaagcctttaaaagcatgtcgcaaaaattttcacaatgcataagacttctcatcatgtatttaacacctaaaaatatatcttattataaaaaatataaattatatgaaaatgaatgtaatatatctatatgcataaataaaataaagctcaatagaaattgaggtggcagtactctacattcattctattaccattttctttt

SEQ ID NO: 52477 - DNA, 1249 bp, Cannabis sativa
taggtgatgaactaaaccttgataacaaattcactgcgaaagtaatatcaggtcgagtacaattagcaagatacataagagctccaattgcattaagatatcgtacttgtgtgccaagtatctcgtcattattttaacaaggacaaaacaggtcttttttttacatttagtgatctaacaaccattgggttacttaaagggtttgctttatccatattaatgcgtttcaagacattttcaatgtagtttgattgatgcaacattatcccattgtcggtatgtttgattcgcaagccaagacatatttggctttccccaaattctttcattttaaattctttcttcaagtacaacattgcctcatgtaactctttatcagttccaatgatatttaaataatcaacatagacggcaataattacatatcctaattttgttttcttaatgaaaacacatggacaaattggattattattgtatcccttctttaataaatattctcttaagtggatgtaccacatgcgtccagattgttttaagccataaagggatctctgtaactttatcgaagatatctctttgggctcaaaggttagtgcttcaggcatcttaaaaccttcagattttttcatataaatatcattatcaagcgatcagtacaagtaagttgtcactacatccataagatgcatttttaagttttcaaaaactgttagactgatcaaatatcaaaatatgattgcatccattacaggagagtatgtttcttcataatcaattttgggtctttgagaaaaaccttgagcaacaagcctagctttgtatcttacaatttcatttttctcgtttcgtttttgaatgaagacccatttgaatcatactggtttcacaccttcaggtgtgagaacaataagcccaaaaacatttcttttgtttaatgactctaactcaacttgcataacatctttccatttatcccaatcatgtctattttgacattcaaagacagattttggttcttgatcatctattttattgactatattgcatgccagattataagaaaatgtctcatcaataacttttgaatcactttcatttgatgagtttttaggcctcgtataattaactaagatcgcttgactcacttcacttgctttctcttctagagtgttttcctcatcttgagtgtaataccctagaaatgagaagtggattagaaaaaccctaattagataattatgaataa

SEQ ID NO: 52478 - DNA, 957 bp, Cannabis sativa
gttcagatagagcattcacttgttctaatatttcagaacaagtaaatcgtcttggcggaggtctcttctcaacatttccatcaaattcacggtcttttctcatacgatgattggatggcaagaaacgtctatgaccaacataagatgtcttaccaatcactcgaatagaagtagtatcctcgttgcatgtaggacaggctttatatccctgtccactccatccggacaagctactacgggcaggaaaatcattaattgtccaaagaagagctgcgcgcatgttgaacattgagttggttgtagcatctcttgtttcaacaccctgagtccacaatgcgttcagctcgtccaccaatggccttaaaaagacatccatgtccttaccaggtgacttcggtccaggaattaggagactcaacatgaaattgttatccttcatacacatccaaggtggcaaattgtaattcaccaacactacaggccacatactatacgagaggctcatgttgccaaaaggattaaatccatcagcagctaagcctaggcgaacattccgaggatctcttgcaaaatcaggatgtctggagtcaaagtctttccacgcggcagaatcaacaggatgacgcataacaccattttctctcacacgaccagtacgatgccataccatctctttggatgtatgtcttgaactgtataatcttttcaatcgaggagtcagcggaaagtagcgcatcactttatgcgctactttttttccgcttgtctcctcattaatccatctactggtcccgcacaccgggcaaaaatctttcgaggcatgctcattgtgaaacaaacaacaattgttcacgcacacgtggattgattcgtaccctaatcctaattttcctaatttcttcttcgcctcatagtgtgttgcaggaattttattctccttcggaaatgcaaacttca

SEQ ID NO: 52479 - DNA, 1017 bp, Cannabis sativa
cattcttgaagtcaatgtctccagccgctctaggtttacagatattgtcacaggctatttgccctgcaccagtcatcatgtgttgtcccttccataaaaaagctctacaaatagcctcaatttcttttaagatcttcttagatctgactccaataaatatgtatagtgaggagtacagagttaactaatattgccttgcctacaaatgaaacgttcctggtactcgaggatcttattctattggtcattttatctaccaaaatattacaatctttagaagagatccttttgggactgattggaatacctaggtaggtaagtggtacttcactcctctggaaccccgaggcatcaagtatatgttgtgcctctttgttagacatcccactgcaataaatggcagattttgtagcattaggttgcaatccaaaagtttgggagaatagcttgaatccctgtatgagatagtatatgcttttataatccccattgcaaaatagtagtacgtcatctgcaaaaatgagatggttcagcttcagatctttgcacctgtcatcaaagataaaatctgccttccgtccgattctccccataattctagtaagatactccattccaaggacaaagatcaatggtgacatcggatctccttgtcgtagacctctctttgattcaaaataaccatggagtgagccattaatcatgagtgagaatctaggtgttcggatacaagtcatgatgagctatataaattgttcaggaaattgaaatccatgtggcatttcttctatgaagctccattcaagtatgtcataagcttttcacaaatcaagtttgatcatgaaactagcttttgtcaacttcctcccataatggcagactagatcatggcaaattatcatattatgcgttatgaaacgcccttgaacaaataccccttggttttgagccaccaaattagttaaaagatgcttgagtctcgaacatattaatttagtggctgggtttttttttttt

SEQ ID NO: 52480 - DNA, 1459 bp, Cannabis sativa
  modified_base (736)..(740): a, c, t, g, unknown or other
gaatagttagattatctatccactcactaggtttaagtacttttatcaagacatcttgatgtctcgtttaatacattcctatcttgtgcgaaccgttaatattaagctttgtacacaagttatgagttatatatcatttataactttttattttcctttctcgttagacaggtttaaaccaaaaagttatgatggtttgatccctttctcgtcagaaaggtttgaccaaatgaatcctggttaatcatacacaaattccccttaagtatttttaaagagtaaggctttgcaattacttaaataatagaaataattctctttattcataactgaagttaaaatattacatcaacaatgtgagttacatcatttatttagtggtaatagggtcgcaaatgttccacgttccagtacttctttattaccgagccaatttgtaaactctgattcctaatactgcttcgattacatatgggccctcccagtacgggttgaacactcctccagacatgtctcttgtgtttgcaaatacctgccttagaaccaagtcccaacattgaatagtcttttcctgacttttttgttgaaatatcttgtaacttgatgtttatacactacattagtgactcgcgactcagttcgtttttgatcaagcagatccagagataactttagaatttcttgattttcttcttgtttataaaactctcatctgtgagtcgatatgttcacttcnnnnngtaccattgcttccgagccaaatggtagcgagaagagagtgtgttctattattgtctgctcagtagttctgtgaggccaaagtacttgtggtagctcgttgacccagctacctttggcagcatctaacttcttcttgatagtatccttcaaggttttattaacagcttccacttgtccatttgcctgaggcctggatactgatgagaagctcttaattactttgttcctctcatagaactcagtgaacaagtcgccatcaaatttggttccgttatcaaatactatattcatgggaattccaaacttatagataatgttcttaacaatgaagtcaagaactttcttgcatgttatggaaataaaaggcttggcctcagttcatttagtgaagaagtcaactgctaccactacgtacttggctcctcctcgctcggtgggtaatgccccaattagatcaatcccccatatagcaaatgggtaaggtgatgtcatcacccttagttccgttggcggtatgagaggtatatgtgaaaacctctaacacttatcacactttctgacaaactcatgggtgtccttattgatcgttggcgaggaatatccttccctaatgatcttttaatataggctcagccaacctgcatgatccccacaaaagccttcataaatttctctgatgatctcatttgtttctaaagggaagacacaccgaagtaga

SEQ ID NO: 52481 - DNA, 905 bp, Cannabis sativa
tcagaagtactagatatttagataaataatcattaataaagggtatacttcaatctatttgctatttttatgaaagtttttaattatatatttttttattaaatatgttgtacttatttataatcatttaaatatttgattgtaggcataattatttttttttagacgtctgtaaacaaattaattgaattttattttaatatggtaaattatttaaaatattctaaaaatttagaagtaattttatacaaataatgtatatgcactgaaacagttttttaagaaagtatactgtatggattttttcaaccaaaaattaaaaactttacattaaaaaatcactttcctgaaagaccaaatatacttttttaatttcaataaagattataagttcattcttaaaaaaaaaaaagaattatttgactatatatgtttaaaaatgaaaagttgtacaaattaggtttggcttttaatactcgtgcctgtgacgtggatgaaacgagcgttttataacagtaataaatataataacgacctaatgaaatgagagccaaaaagtgtgtacctttccatattacccaattacttactcaaccttattcatcaaataaaaataaaattatttaattattttttttgtgtgttttttatatgtaattaatttgtaccctccaatagtcatgttaattaaaaaaaatatgtggatcctatatatatacagagacaaaataagtgtaattaattagtgtatataatattaatatatgtatttgttttgtattaattataatggtatttatttaaagtgaaattcattattattacactgaaaaatgcaaaggccacgttccttattataacaaaaaaaaaccatatactatacgtactctctctctctctctctc

SEQ ID NO: 52482 - DNA, 7193 bp, Cannabis sativa
acttataatgtccaacttaatgtacacgaaagagtttatttgaaatatgatgaacattctatatataatgatgactaaaatgagtcatactagcattgagttgtaaataacttgtggtaatgggaattagccaccacaaacacatgtattctttttgttataacgtgtactacatttttcattggtaataatagaaagaatatatatcgtctacaatttatgcaattcccattgctactttttttttttttttggttatattgtctacttttttcattgttaccttttttagaacttccaatttatgcaatttatataaattgctagggttttttgtttttaattccttgagattgtcttttttcttcagcaatgcctgttgggcttaggcatgctttggttggggtttgtaattttgctaatgcgattagatttttactattgtgattaatcttgttaatctaacataatttttgagtgtcttttatttaggttactgcaattagtcttatttctatgatatagctagttttattttgttttgttttgtttcgttattgactatatctctatgacatatttttattttgttttattttgttttgttttgtttcgttattagttcgtcttctttgatttttaatggctcgctattaaatcattgttagtggttgagaataacaagttctctatgacggaagaagttgttagtagtgcacttacgtattttgtacaatagttgagtgctcaagtgaaggggttgaatgaacttgttccaacagtttctactattgtgttttttgaacgatggaaaaaattaaatataagtgttcttaagtgaaactacaatattttttcatctaattttatcttaatttcttttgtattacgatttgagaactaagtggttaattaattgactcgtttttctgattctaattatcgtcatatttttgataaaaaaatatatctttgagttacaaacttttattttaactattattaataaagttatatcttttttttttttctttttttgaaatcattaagaaatccaaagctaataatttcatgtttatcgcttgaaaataagtgggtagttaaaatgattggaacataaaatattctaaagttataatatttaggctgctatgactggcaattactaattccgcatgcggcatgcctactatagattttcataaaaataaaaatacaaaatatcagctggaaagtgttaaagtgcctaaagatatttcataattcacgagtgtttttctttttccactatgtttaagaaaaactcttcaaagaaggaaagaagtaaaagttaagaggaggaaaaagtttcagaagttccccgtgagtggaaagaaaaatgtcgatttacattgataaggacccattgctattgattgtcaatattcttgtagctgtatacactagcataatttccattgttttagttttacacactatagttagtaaaccttaatcaggccaaccatgaagaaataatgatgaaagactttggttggtttcaacttaaaatagaatgcatgaggtacaatgtattcaataaaatttgtccttatctaaaatgttgggttttcagtttatgggtctgtcaggtaggggtattagtattaccccttttagcttctgaaccacattctagttcagtcagaacagaagaagataaaaaaagatgtggtaaatggaaccattgtatatttaaggtctggagtctgaactgtacccaaatcccaaagttcttacaccatattcttatagctctttttgctgagaatattcttagtatttgtttcttgtgacgactttgtgttacgtcaataatccataaatatgtagacccatctaactgtcttacggcccaacttgttttcttccattaatatcattcaacaacccacctttagctaaaatatcttatactaatatatcaacacaacaccatccattcacccgctttttatatcattttccaagcagccgaagatgttagcttcttacaataatgttatcccaaaatctaaaaagccaagcgtcacaccagtaacgaagccagtcacagttggaaaataataataataataataataatagcccttagaatttgaaataaaatgacttaaaaaatttaaatactaactccattattgtcactgatctttagataagctcctaaacatataatatgtatatccttagaagaacagtaattgaaaaagactgagaggtcacacagcggaaagcatacgaacaaaatgcagtttgctttgtttctctcgtatatattgcatgaactttacatggctatctaagaatggaattgagcggtatacaagatcatatctccaaactactcttcatatgacttttttttcaaacatatacagaaaaagaaaaatataagaaaactataagcttctaattcatggctaatggctccctacgtttcattttttgcctcagttgctttaccttgtccctcactggcagagacaagtcatccagattctctgtctggggggattcgaataatttctgttgtatcatatcgtggtacatcggttgaaacctcgcctgaaaagccctgaatgaaaagtaaggtagcagagtgcaaaccactacgaaaagggtaactagccaatacagggcactaggagcgcatgcttcaacaagaaccttgtatgatgttgaagacgcaatcggtgggagagaaccgtatattactaagaacacataccaaaatgtgatgcttccccaaatgaagaaatgttggatccatgtgaagtagtttatagcaagtgccatttgacaattcacggcccacactatgcatgtatacattgtgactccgaggacttcaaagtcaacaacctgaccatcttttcgaaaagcctgataaatggtggagttggtggtgaaaaagaagatgattatagagctgacaactccattgaccatccaaccaattatccggagccagctgaagaggatgttttgtatcccctcttgatataaaattgggtactgcaaacagaattagtgaactcgtgttgtcatatagcaatcaagatgacatttattaagcacagtttgtcaaagtagttttatgttaggccttttaatgcgattacaaatttctacaaggatatcaaactgttaccttaaggcagagtcttgcagaaacgtcctggtcaaagacaccaagagcaattacaggaagcgaagtgaagaagacgttgtaaaatgacatgtaccaatcattgtaagcagattgaccagagaatgaagcataggcctcaaaccaaaatagagtaaatccaaatgttatgttcttgtaaaagaagtagcatatctgcattcataaaagaacaaagtgcacatcttagcaaagggtgagaggcttttataatcaggctccctaaacacccacaccgacttttacaaattgaacagatcattttactaaggaagataaaaattatgcagttcatgaacttcatccccattgtgcctcacttatttactctcctagggaaactgaaaaaatataagggaacgatgaaggcaagtttcatttttgtgttaaaaagtaaaggcaatgtgaacataaaggcctggctttaccatcatagatatgcgcctatagcaccaatgcccgtgtaccagcaaaagacgctctaaaaatcggaactgagctattgaaaaatcacttgccatcactgcctgcaacaaaagaattgatgggcatcagagctggtatactattaatgcggaaaggatcaccaacaacaacaatagtttaatgaacagaaaaacaagttgagatggacactgcagaaatcaacgatcgcataaacaaaaatataatgacctgcattccttcaacaccacttatgccaactccaatatcagcctcttgaagcataccaacatcattcgccccgtcaccaactgatagtgttgttttacctgtttccattttaaccagtcttgtaacctgcaaatcttctatatttcagtcagattattctgtagatgaacactaaaaactccaaatgaacaaaacttaattaattatcatagaatagtgaatgccagcaagcaagaacaattaacttacaagagccttttgcttgggtgtagagcgacagcatatgactgaagcacaattgatagcaagctcaaaaaatgacttctcaacattcttgttgagtgaatattccaaggaccttccatcaattattaagccaaatgtgatagagttgcaactctctttagcagaacgaatttgtaaaattccatctacaatttgtttctttatgctgtccatagaagcctgaaacagtcaaggattcaggaaaaaataaataaatcaaaatttgttctctaatgtaattcagaaaattctacctctgcaacggcctctttatccccttgtttctctattgcaataatatctggtgaatcaagtgtaatgacaatttgcttcatatcttgtcttagtaagctacatgcatacctgtaaatgtaaaatttaaattagttgtggactgcgacttcttggaaaaaaaaatacataatccaccactagaattgcttccgtaccctatgttaattgctgtctccattttatcacctgttaatacccatatcttaattccagccaggtgaagcttattaatacactcaggaacctgcacaaaaacaaaaataaagttaaacctctaaggcacataaaaatgttttctaaacattacaaagggcatccagtaacagttcccaaattcaacaagtgtgttctaaatattggaaatggcataaatgttcccatattcaagaagtaatgcatgggagtttttaagttgaataatcacccccttttgcagtttgtcctcaacagctgtggctccaagaagaatcaaatttctttcgatctcatcagcagctgcatcaaccaatacattgcgatcttcagagacagaagttttggcctttctaaacttttcttcccaatttatatatacttcttcatcaagctcacgaaatgcaatcaccaaggttctcagacccgcttcagcgtacttattaatatgatccttggtttgagcctcaaactctctcccattttccgcaagcctttcaaacattacactgcatatattcggataaataaatacttggaaaatgatagaccaactagcaaattcttgtaaataacaataaactaatgatgtcaagagtctcacttgtcagcacccttgcaaagaagaagatactgattttccatgtttcttacaatcactgacattctcttacgggcactactgaactccaagacttgaagtagctcgtatactctggcacacaaaaagacaaaaattagatgtactgaattgcaatggaaaactaaagcaaaaaatagagtaaaagagtctaacttacgattaaatatcaaatttagcaaaccaacatatacaaccacattcataaatgatgagaaaaaacagcttaattttatgatgatgggttgtagtaccaagaaaacgattgtctcagatatacataacaaagggtgggggcagaggttagaggaagttgaaaactttgaaaagtaaaagttaggataaacaattctagccaaatgttctagtgacaacagataaaatcatgtttcaagttaaaatttgagataaaatagctaaaagtagttgaaaaggtaaacctatgaaatgagaaagaactaacctgtcaaccttttttccactcttatagtccaactcatgcacatgtatgcttgtctgtgacctgtcaaaaaactcaaagccaagctcccttgcagcaatgacaaaagctgcctcatctggtgactcggcctcgtaagaaatgtctcctgattctttatctccatcgggaatggctgtgtgacagattgctagaacccgaaagaacttctgtatgacatcagaatgaggttcattaacccacatcccattcattatccgctcatctctaaaattgaaacccttgattgattgttcagtgcctgcaacatcatcgttatgacttggattatcagatatcatatcattagtttcaggcagtccaccccttctcctggatgccagtgctacctccacttctgtcataccacgaccatatgtagtgccagctattgaacatttcacaaactccattgaattacatgtcaatgtaccagttttatcagaaagtatagtatcaacctgaccaagttcctcatttaaatttgatgtgcgagcatgagctcgcctatctgtttcttcatcaaacatgtctcgatcatgattaatgaaaacactctgtaacaccttcacaatctcaatggaaacatacagtgatattggtatcaaatatccatacaacataagagccgtcaagaaatgtagaaaggaagcaagcaatggtcttttggggtcgtagaacacaagagtattatctggacggagataccacctaatatactttccatctttaagatctttttcagtttcaacaccaaaaaacactgatccaacaaaagagataaaaataagagaactgaagagaatgtagatgatcttatccattctcctctcaattttacttctcttggaaggaggatcagttgcattttgcatcacttttgtatcatgcccagtaaaaatgacagcaccaaaaacgtaatcggtgtttttaagctttgaatctcttaagagaatctgttccaaggatagtggatgttgtctaccatcatagtgcagcgttccaacaaacgaataaaggttctcattgggatcctcacacttgattactgctgatgtgaagtctttgaatgatttttcatcgtggagattggatgtcacctccaaagaatgctttaacttcaaattagtttctccatcaaggttcatagtttcaacatagcaaattccatcttcatagcttgatgaaagcaaaagcagatcagcaggaaagtactgatctttatgcaccttcacaatgtcaccaactcgaagtttcttccatctagtctcgtggaaggcataattcttatacactttcacctttcggttatttgactctatatcctgaaaccattccaaggttcagatgagaaatgaacaatcaataaaatagtaaat

SEQ ID NO: 52483 - DNA, 3257 bp, Cannabis sativa
aactcctgctgcaaatctgaggaactaaaatatggtgtgacagaagtggacacaataccatattgcatctattacagcacaagtctccatcactcaaaagtgagctgagttcacaatatacctccgaaacctatgatccaacagaacaaccagccagagaatcttgagtcaatctctcgtaagtgtacaaaaatatataaataaatgaacaaatgaaattctcttacatccttataagtctagaaattcttcataactcataagcaaacatattgagaaagtcaagggacctcacttcttaccaggaacaaacaagtgtcacagaatttccagcgacaattatattttctgtaattatattattacgcacatcatctaatagaaaaaaattctaaacacagaagaatagacataaccaaggatcaggaaatcaactcatttattaacccaactaaaaaagatgtacttcagaggactgtcttgctcagatattatataactagaaagagtacgatttttccatcatttgtgctagaaagaaacatttcaagggatgaagaagctcaccaccacacaatcaccagaaatatcaacataatcatcagtttcatcaaaaaagaacataatcatcagcataaatgaatcctaactaaattaaaatttaccagagtaccaagttatctaaattgatacagagaaagtactcattattctctagaatgccaaattgaacattgcaaaatgctctaaggttttcactatgtacaaacacccttcaactataggatacaggtaaaatttaacatgaagtaatagcagtaattattaagtttagaaacaaactagatttaacatgtgccatcgtcatcatggcccatttcccgatactttcagggtcagccacataaattttacgtctccaagcaatgtgattttctcataggccctcatgtaaacccctaggaactcttccttcacaaccaccaccacctcctcaccggaaaaataaaatagttttcatcataataatcagttcaaattctaatgcacaaagacttaatatactcataaattaattctgccaagaaaatccttcgtcacaatattttgtctaacatactcaggcaccaaccctttctcaatcatttctttactaaacttgagagcaatgtctgtttggtcaatcatcatataggcttcaaccatggtgcaataggagttaaaatctggcaaaacaccattcaataacatttgtcgaaacatctcttcagccttgtctaccttttgtagcaaacaataccctttgatcattttattataagttatggtattaggtttctcaccatggtgaatcatttcatcaaatatcttctgagccttgtccatcatacctcttttggagtaagcatctatgagaacggtgatagttataatgttagggtggatattctcactcagcatgttctcaaacaccctgccgatttcttccaagctacctgaatgactcaatccactaagtaaagaagtgtaagtgataatatttggttttaaattccaccgagtcattaaatcaaacacgtcaaaagcttctttcatatttccatctttgcaaagagcatctatgagaatattgaatgtcacaagatttggcctaacatcttgttccttcattttagctaacaacatgaaggcttccccccatttacctgaatcacacaatccatgaagtaaagaggtataagtaatgacatcaggcttaagacctctattagtcattacttccattagatcaaaggatttctttgttttcccttccttagatagagcagaaatgagtgaagtatatatgacaacattaggctccacacctttatcagtcatcgattcaaacaataaaattgctttttgaggtttctcttgtttgcaaagggaatcaattacaatactatatgtatatacatcaagtgaaatcccagactcagtcatgttaattaagagtctattggcttcttcccaattaccaaatttgcataatccatgaatcaaagaagtataagttacaacattcggaggaaacccacaactgatcatttcttggaataggctcatcgccttatctatatcaccatctctacaaagactattaatgatgggattgaaacattcaacagtgggactaagcttctgatggtagtaaatttgcctaagcaccttaattgccttgttagtttctccggctttacagagcccattaatgattattgcataaataaattcatcacatgggaattccttgtctacaattttgtgaaacaactcaagggcttcaaaaatggagccttccatacaaagcccgtgaagcagagtacttagggtatggccatttgggtaaaggccgtgtttatagaaaattgccaaaacagagaaccctaaactcgtcttcttcaaacgacacaggcatttgataacaatggtgagagtatagacatttggatgaaaatgacgacaacgcatagacaactgtttgtacagagaaacaacagtggagtattggttcttcttggagagtgccccaagcaaatcattaagaacccaaacagagggaatgggttgcatttgaatcatggaattataaagacttaaaagttgttgtacctcaaggcttccagttctacagccggcacgaatcgatttctccaattgtttagcattgccatagttggaatgataagtacgaaattgaggagtgaaaagccctaaaagagaaatgaaagaagaagacgaaagagaatgagaataattaccagaaactcttccgaacagcattagaggtttcatcgtccgaactcttcagaatcaaggctaatatattatggagggtggcagtagaggtttagcgcaagactttttctccgtaatagcatctccaataggtgccaaagtaatacacatcaacaaaaatttatttttattttctatctggttcacataaaagtaaaatatttggcacattttctagaaaaacatgttccaatgtaggtaactatgaaattgtcaaaactcaaaagtacatatattttgttttttttttttttttatgaaaaatattttttatcaaaaaaatgaaataaaatacagatgagatggatgctgccactgtccagcacactcaaataaaaaacaaatcttatttgagatatttgtgacatacatactttatgttttcggtttttattacacatatattatatttgtta

SEQ ID NO: 52484 - DNA, 2195 bp, Cannabis sativa
ttaccaacactagtaaggttaagtgcgtagtgtatgtggtacaacacttagtggtactcaaggtacggtacaaaccctaccagaactaatacagcagcggtacgtagtgcactttctatagtggtcgtaccttagttacaacgttcatactcatctgccttgtagataggtgtatgggcacctagatataagtcggtaatacatatatattgtatgttatatgcttttcttactgagtttgttgactcacagattttgctttcatgtgtaggtaaaggaaaggccaaagcttaacagcattgagtttagagctcaggggatgattgtacatgttgagattgtacgacctgaagagttaggtttcaggacaatttgagcttcattttgtagtcggtgtgcgacatgtttgtaagagttattttgatgtaaatgtaaagtttaaaaacgagatcccagttttgtgtgaatatatgtatatgtttataaaagtttaaagttaaatcaaactttttatttgtcacaatttttgagaaaaccctttgattagcaaaggaagcactgcatttgaaaagtcactgtagcgtgcctaagttttagggcattacaactttccaattctaagcaatcattttttttttcttagtcatttgaacccttctcgtcgtcgatgacaataaaattaattaaccattgagaatctgattcacacgatggatgcgtggaattttagttgggtcaataccatgacaaacatagtcaacatcatctaactgtgaaatttgaacaactaactgagttttggttgaattatattcctatataaaggatgtatccccatcatcgtcagggaaatctcacacattccgcgggatgtactcgttcataatcagttagtctttaccattctaaagatcagggatgtgatatatcaatatttcttaagatgcaagtatgaacgattcattttagtaccactcccggttaacacaaacgctagtaaaaacaccatcattatccattatactcccatttgttaaaaattataatatcactttatcatattttaacttacatattacacattataattaatttataattttatttcacttattatttaaattaaaaaataatttatttttaaaagtttataattaaattataatttcaattcacttattatttaaattgaaaagtaattattttaaaatttataattacataaaacataatatgtaacatattataattaatttataatttaatttcacttattatttaaattaaaaattacttatttttaaaaatttataattacatttttttcaatttgaattatatattacaaattataattaatttatatttttttaacttatttattattttaatttaactataattaattattaattaattttattacattttaaccgttaaataactatattaaaatttataattcaaaataatatcatatatatttagttatcttagtattaaatttaattaaataatttaacaatttattatttaaaaataaatattattgtgttgtaaaattttaatttgactttttttcatattgcattatttctatcgaaatttcagtattataattacttaaagattataaacccaaaatttttaaaacctacaaaaacatagataaacattctaaaatagtatatgaaccaaaaaaaaaaatgatccacccatcctatcgtaatcagatctgcctcactatggataaatatttaagatattcaaactctattataacatgcataaacatattaattaatagcataaactatgaaatttctaatatggaaaaaaatactaacccttgaaatgcaaaagcaacgcaaagcatctagaggatagtagtaattcaggacggtaaaacaaagactaatttaacaaaatataaaatcaaatcaaaatattaacatatacatatactatacatatacatatattcacacacacgtacacttacatatatacatatataagtatattttttacacacacacatgtacatgtatatacatatattcacacagtcatatatatatttacatgtatacataataaatatacatatatatacacatatttttacacatatacacatacatatttttatacatacacgtatatatatatacatatataaatattcacacaca

SEQ ID NO: 52485 - DNA, 904 bp, Cannabis sativa
gtacacgaccataaaaaaaattagactgaataaatttctcgaatgctgaaacaaatagagatacataagtgcaccacttttagagaattgcattgtagaactcactaaattaaattttttattttataaatacaattaataatataaacatatataaatattaattaaaaaatccaaaatggatgtgtgtgttacaatgcacaacttagtgtgcttttatttatgcaggcgcattggcgttgctctaagaacaaagatccacacaaaattaatgattttttatctcactactacttgtacaacaaataatcaatctatagatggcttacaagatttttgacagatcaccacacgggtaatttttttaaattttattattaaaactaatagcaatgattaattcttcattctaatttcattttgtacgtagaccctaacacatgtccacgggcatgcatcattgcatcatggtgggaatcaagtttaaaaagtagtgtaaaaagtagaacgtttagataaaagtgtgctagtttttctttgggctggcgatcgaaaatctggataataatgcgcgtgaaggtcggcttttgtagctgatcatctcaacatggaatcataagtgtaattttgactttggaaatggaaagaataatggaatttacatatcgctctcttgtcggtcagaaatcgatgcatgtggtgtgggcgcgcgctttgccatgtacaaaattgcggcaccttacctctatttactccacctatattttatacatcacgttacgtatttaaacttttatttgaaatttttatttaacaccaaaaaacttttattcgaaattaatgttctacaaatatctaattatagcatggagagtggtcaatccaatttttccccatattggtg

SEQ ID NO: 52486 - DNA, 741 bp, Cannabis sativa
  modified_base (26)..(48): a, c, t, g, unknown or other
ttttctaactttatatgtgtttattnnnnnnnnnnnnnnnnnnnnnnnaggttgttaatccaacatacatgatattaaatagatcctggtaaaataattccaacaccaacttctttggcccctacttcgaagattttgctctggtagtggcaggggttgacatggtatggatgtgatgaaggtcgaggatttcttggtcaaatccaaagaaatcgtgagtgtgaaggtcgcggagaacttcactcatctgaaacagaatatctagcagttagcccccatatcaaaccctaggatcaaaaaggggaatgtgggtcccttaaccgttggaaagaggccccctccggatgcttgccgaaaaagggaatctagagattctccaaggcaagcatcgggtgcaaaacatcctagcaaaaaagaaaaagggtatggaagtcgcttaaaacacccagaaggaagcgaaaaggaaaccaccattttcaactctcagaaaaagaaagtcggcagtgcatgtacaaagaaagcaataaaaagcataacagcactatcactgacgtcaaaaagtcctcactaaaagtaacattattaccaacgacatttaaatgtcctcagcaataaaaatgatttttttgtttaagtatgcatcaatggtgacaaaatatatcactaacgaaaatttcgtcattgagatatatactaatgatgaaattttagtcagtgtttattttattttttttaaaaaaa

SEQ ID NO: 52487 - DNA, 1814 bp, Cannabis sativa
  modified_base (1372)..(1393): a, c, t, g, unknown or other
gtcaatccttagtagtggaaagcagtctttaggacatgctttatttaaatctgagaaatctatgcatctcctccatgtaccatttggttttggtacgagtattggattagatatccacaagggataaaaggcttcttgtatgaagttatcagttaataacttatcaacctcttatttgagcgcattttgtctctcgagtccagtggtcgctgttttgacattttacaggatgattaggatcaatattgaggtgatggcaaatcacattcgagtttatctcgaccatatctgaatggctccaagaaaactgatcttggtttgccttcagaaaagtgattagttgctagtttagttcttcccccaaacttttccaaatattaacacacttaatgggattatttaggtctaaactcacctcttccaactcctcaatcgaccagagttggttattatcattatggatcctacgatccagatcttctattttctttttgttctcttctgtcaaaatcaccatcagctggtgactagctcttctgtttttaagttccaccctgtagcattctcgggctaataactagtcgtctctaatagttcctacttaagagtgtgtagggaattttaaggacaaatgcttaatcgagcttattgccccaatctaattaaagctggacaacccatcgacacattatagatagaggggatgtcgataactaagaactcttgcatttaggtcacgaacaattaatggtggtccccccatggttaagggaagttaatttatgcccaaacttgcgacaatgtcgcctgtgaacccacacaagtttaccatccagggtcttaattttgctttttctaatcccatcttctttaatgtttccttataaaggaagttgatagagttgccattatccacgagaaccctctttactaggggtgttcatcaaactgctcaaaccgcctgcaccgcaccacaccgcaaaaaaaatgccatttgaaattcttcgaggtgcagtagcagtttgaaatttttaaattgttaacatgcggttcaaaccgcattgcacattataaaaatactaatttttatatttatttaggtgcaatatgtgaatgttcaactaaaagtccactaattattgtattgttgacacttaatttttttttcatatttattttcaagctttatggtattttgacaagttttgctcaaggtttgttgtatttgtgatagtttaattatttagtgataatccaaaccgtaaaaatcacaaaaaccgcaccacatcgcactattttttgcggtgcgatttctgcgggtttttagtttcacggtgcgagtgcggtttggaaaattggaaaaaccgcatgnnnnnnnnnnnnnnnnnnnnnngtcaaaaaccgcaccacccgcaccacgaacatccctactctttactctcttattagcgagttagattgttttcaatagagggttcgcatgtgggtatcgtacatgttttgagtcttcttcataaaagacaatgggtagttcatctgattttgctttcttcaaaggttctggggtgaatgttgatgcctcattttttacctcattaatgtacctcttttatgcactattgttgtttcctatgaggtgaggctctccagaaataactaagatatcctctccctctaaagggggaggttgtatccttgggttattcaggttattgggctagttatgttaatttccttgtgtcctcacatactgctttaaatattctcgcgagattagactctcaatttcatcttttaactgacgacactctttc

SEQ ID NO: 52488 - DNA, 1805 bp, Cannabis sativa
agaagaataaaaaaaggatctttttttagcatgtgctgaaaattttgtatttgaattttatcagaagtaaaaggactggtgaaaagaaatttgagtaaaattttatggaatgcgttcaatttcactttatgcatattatattggggttagagacttagagtaagttatatactacatatttcaaagttgaatgctaataaatgatacagtggagcaatcaagtagtatatttaatacaattaaatattaactcatatgatctaatttattatatattattccttactcctatgataccatcttgttgtggtattgaacactatttggcaaaatatatgagattcaatattacgtcaaataatgttatacaccattaataatcccttaacaatatattcagaaaaattaagaggtatttatttaggagcatattgttatatgacaccttaaagtagtacataatactactatcattctacactatttggttagcgattatttatattatttatatcaaaatatgtaaaactcaatattaaaatgtacaataataatatgacacttcttgtaatgcttggtagattaaaatatttttttagcttgttaaatacaattttagaaattgtgttttgtaagtattatcaataagactgtctattcggttatatatgaaaaattgaaccctatataaaaaagtgcattgagctcaatttttgtcttttctttcaaaagaaaaaaataaccaacataaaaccgaattctaatacaaacagatgtgaaaaatacaactagtctagtaataacactttcaagttaggttattattattatattttctcttgacataaaaatagcttagggtataattttgtagattttgaaaaattcaaaatttgaattgtcatttatcaaaatacaaggtcttatcaataacttttataaaatattgagtctagaataatatttacaattttagcattgccttattttattatgatgtgttttgggttagatcattattattaagtattttagtgatgtctaggaccactttagaagtaatattttgtaattagttatacttaaatgtaccatagttgtataatatgagagagtgataaggtccacctattgcattaaactttaggttagggtgcaaagcatctggtttgttgattgaatatatatttatatatatatatatatatgcatcggtcaaagagttgacttgggtagcttttattaaactaacaactatacatttcatttataattaacaacctttgtgaaaatgtttgactagggttactaaatgagaccctttgaccaacgcttaaatggtatagttgctactttaattcattctatgtgagactgtaattaatatgtatagttacactataaatggaagttatatagaatgaattctatataattacactataattaatgtataaatggaagtgaatgaatggattaatttcctttggccggccacacacatatatgcactaacctagctaatgcactagctaaattggatgtcttagtcagcacacaaattatagttgtcttttgaatatcactaattatatataatgatattaagtttggctgaatgtcatatacggccattatattgtgttttggtaatttgcggttaaattttttgaattttgaagtatggtacgattaacctatcatattaaaattttgggggttgaacttcttaatttataaaattattttattcggtactccttccattcactttagtctggtaaatgctaaactaaattatcaca

SEQ ID NO: 52489 - DNA, 969 bp, Cannabis sativa
acacataattcacgcataaatttatacatatttatgtaataaataattttaattaattatttttatttaaaacgagtttcacttgttatataagtatgtgtcctatgtgtaaattatatttatatatatcattactcaaaatacacttttaaagaaataattttctatctttgctgttaaaaataagttattcatatcttgtatttaaatgcaaaccaagaaaatagttatgaactccaaaataattttttaatttttaatgtgaaatagttattaattggtgaatagttgcaacatattagacgttattttttttttctcacctattttatattatattttttttaaaacatattattgtaaattcacacgaaatattctcatcatgcagtgttgaataataatcttacttttgtagtacaatctagaatgtactcattatataatactaacaaacttttttatattttaattattaatgacaacttatatgttaaccatcaaaattttataaaaattaaccccaaaaatgaatgactaatagaatttaaatttatggtcaattttttacattaatgaatgactaattgaatttagtacgtacttaattaaaaaagaaaatagaattatgtatttatattataaatttttttgagagagttaaaaaataaaggtggatatttattcaaaaaataaaaaataaaggtgattatgaggcaaaaaaaaaaagagatgccactagctaaataaagtaatccaaatataagatttttttttctatttattttggagaagatccaaaactaattagttcatttcaccttttatgttttcttgttaatataatgagtttttcttaaagcaatgatttcatgacatctttctctaataaacgaataggaagtattgactaataggtttattttaaaaaagaaaaaaattaaagttatttttcttcttcttcaatat

SEQ ID NO: 52490 - DNA, 1103 bp, Cannabis sativa
atatattattaaattggttgtcgaaaacctcagtcaacattttgctgctttcatttagagctgaaggaagcatcttcaaatagacaacaacctcagaaactaaaacaagaatggttgaaactcgtaacacgcgtcaaccccgtcctcctcaagacgcccaagatcttgaagatgaggaggtggcctcaagagttaacgtgggtccaaggaaggagaaggaacccacgacgacgaatatgaagggaacttcgatgagtacgacacctatgacgaaggtagttatacagaaatagtgctcttaaggaaaaggctgctgatcatgaggcaaaaattacagcccaaaaagaacaaaacaaaaagatgcaagaggtgatggttgccatgcagaaagccatggaggcagcagggatccatgtgcatcccaaagccatccctggaggacctggaggaacgccagaagagtcctcaccaagcacccagaagcagaagtctagggaacctagccctataaggtatccctctgaggggaaccagtagaaaaatcctacttccactcctggaaaaagaagaaggtgcaggatccgcgaaagctccgctcagatttcccgaaagggaaaggtccgcagaggggcaaactctaaaaagggagtcttggccctcaggatcgagagggccgaaagagcgtttctgtgcaccaagaacacggagggagaggaagaaggggccaaaaataccctcccgtcaatctgagacatcagattaacggaaaacatggtgacctccgggatcacctagaccaaaagaaacacgccccagcggtctccacaagaacgctgaatgaaggaatcatggttgagcttgccatactacgtaaagacattgctcgggtctcccggagacaaaatggtgatgactgtgactctgactgcaaagaccgggagccatgtgccaggcacatcttggaggcagagctccacaaaaattttaagatgccaaaaatggcagcttataccgataactcggaccctagcgatcacttgtcacggttcaaccgagtgatgacggtcatgagagtcagtaatgatgccaaatgtttgtgcttc

SEQ ID NO: 52491 - DNA, 758 bp, Cannabis sativa
agatgaatttggaaaaaaaaaaaaataaataaaagaaaaataaaaaaaaaatatttttatttaatgatttttaatgtttcaaaaaaattaatttatttttattttatttttaaatatttatttatgtggcccaataatattgtgacacgtgtatattgtgtccatgtggacaatatcttatatacacatggacagccaccctagcagttaattgtcaaaaatgaacggtaagggctaaatgctaacagaaagctagttttaggggtttttccgtcaaaatttaagttttgggggttagttgctactaaaataaaagtattgggggttaagctgcaatttacctttttttttaaagtctctgcaatttagcagatgctccaattaatattcatattaatattgtctaaaatttagtcacgcttggtaggttgtattaagttgtattgtattttattatattaaattggattatatatttttcttatatataatgggattatttcaccaatatacaaaattacaaaaatacagttatacagaattttaaatatttttacaatttttatgattttatttacagaaaatgtggtctttttatattgtactcttcttaatttgttgttaatttttttgttatttgtatgttatttctgttgatgttttgatgttacttttatatgtttttcttgttgtttttgtgttgtttctatagaaaattgtaaaaatatatatataaaaaaaaaaaaactttgaacgtc

SEQ ID NO: 52492 - DNA, 1280 bp, Cannabis sativa
gcagcgcttgaagctcaatttttgccagcaaggttcttggtgcaatgactgataatattttggctacaactctttcaatattgctcagaatatggacgattcaaaatattttggaaagctgaaaagatctagaactttattctcaacatttttcctcaaagtgaacgcatcatagtcaaaaattagcttggagttttagtcttgattttcgatcacaaacggagcgtgttgagcgtctaaaatttagaattttttcaccaattatatcttagaactccaaattctatgataattcatcatgttcatctcatttaacatgtttcttctcatttttaatacacattatgaattttactatttaaacctgaaacaaatagaaaacaagcgtaattttgtacaaaatgaatataatcaattgaaacacacctctaaaacactttataaaatatacctaaaactagcctatcaaatatcaaatgggtagggcaagatcatcatgtggagttctatcggggaaattctcgggatatgcaagaatctttggcatttatcacatttctttacaaactcatgtgtatctttgttgatggttggccaataatatccttatcgaattatcttcttcgacaaacttttccaaccagcatggtctccacaaaagccttcatgaatttcctttataatgctcttgaattctgtctgtaatacacatcgttgtaaatgcattgaatatcggtatagctttgcctctacaatcgcgtatcttggtactttatacataagttttcttgcctcatttttgtctgatagaatttgacaagttaagagataattcattattggcgtcatggaagttagacttgtgttaatcatttctacatcttgtttctccatctaaaatattcttggtttttgtagcttttcaattggaaccaagttgaggtcgtcagattcagattgcgatgccaatttggccaaaacatcagcattgagatttggttctcttaatacgcgttcaattttgtaataatcaaaattttctaagttcttttgaactttttccaagaatttggccattttaattctccaagcacttgatttacagtcaattgagaatcgctaaaaaatgtactgctttagcatttacaactttaggtatccttaaacctattagaagcgcttcgtattctgccttgttgtttgaagctggaaattgaaaccttagcgcataatgaaacctaaagtttttcaggttataccagtattacacatgtccccga

SEQ ID NO: 52493 - DNA, 1407 bp, Cannabis sativa
tacctacacatgcaaacaatatctttgagtcgataaactcagtaagaaaagcataatcaataacataactataagctagattataatcaggcagccaccagttgaagtggtcattgacctctctgaggagcaaattgttgtagatccctctgccccaaaaatgactaagtccaaggattctcaaggaggcagctcggacaggccaaagcaggcgaggggcgaatccgagctgatcagggcccctgctccacctcgggtactgcacccggagaccaaaagaggaaaatacatgctcactcactacatgactcggttggtccctgaggtgaacgagcagctgagcggggcagacaatgacctttctctggagctggtgatgggaggagtcctgaaggcatttacgagggtaagtctttcttgacagtttctttttgtccttctttacttagttcgtcttttagtatactttctctgtacagaccagtctgaagatggcttatgcttattcccgagctaagtcgattgtttctaagaattccgccctttccaacaccatgcgggcgtaagtggacttgtctaggaaggacgtcgatgaagctacggttcaacttggggtcgtccggatggagctaggggaggtcaataagaagcttcttgctgctgagaagaaggtggccgaactgaccaaagatcttcaagcctttgaccagcttgaagccaccattgcctccttatccaaagaagtgaccagccttcaagaagaaaaggagattctccgggctgtcttctgcaggttggaagaagagaagaagaccaaggaggagtagcttaaagtcgaggtcaaaaagtataagtcagaggtcggatagcagagatgtgaagtggagaggctcggagggaaagtgaatgccttagagacagttggtctcgagattttctatgacttctagaaggctaatccccacacaaactttgattacttgggcgattccaaagacatgtttctcgagtactgggcttctcaggtggcctatggaaatccgaggtgaccacttccccctctggccaaaatgtggacgtgcctcccgctcagacaaacgaccctccactccaactgacccaaaagacccatacaaagagcctggggctccagccgtttgaatgctttctttttctctcttttttttatctgtttggccgtaaggccttttttaaagacaaagagaccgaccaaaaggtctttaaacttagaattatttttcattttttagacaactagctaaccgggcagcctttaatcccaggttggcatacttttgttatctttaatgaatttcattctctgtttataatcatcatgcaactgtgtttgttttatttttaccaaatgttttgtacaggtatagg

SEQ ID NO: 52494 - DNA, 1606 bp, Cannabis sativa
ccagggcgactcaaggaaacaatgcacagaaccaaactgatcctggagtaataaggccataaggtagacctcgaggttcaagaaccaagaggcaggaaacaaatcaagaaaatccccagaatacccaggaggaacaacctggggaaactagggatattccaacagacgaacaacaaaataatcaagcacctcgttgaggagtacctcaaagaccccagggatttacgaatcaggggaatgaaaacaatgacgtgccagattcttctcgtagaaacgagaacataaggcaacccaggactagggaacaggagatccctcgtaataacgagagaaatcttgagactcaacctaggatcaatgggttaccaccgagatacccccatcatccttctcgaactgatcagggaggaagcatacacatacctcaatagagggcgtgtgtccaaccttttccgaaggagaaggcttgtgcaggacaaggcaagctctagctcaggacattcaagattctgagggcacagtcgatcagaaaggcatacagaaggaggagataaacctcgtcgttatgctgatcaagagagtatgagcaatacgaggagctactaatatgagagttactcagatacaaggtctgtgagtaactatgaacgaagacagctagatcttcatgaacatttgaatttgagacaacccgatttacgcgagtgcttaaatcagaatgcacctaatttatgccaacaactcaataataaataataaccaacagcaacaagaggatccaatccaattgcaaatcattgagttggaagataaatttagaagataccaagatgggaatacgagaaactgcctggttatgactcagatgaagagcccaagcctttccatccagacattatgaactctgaattcccccaagaatttaaaaaccttcacgtctcgcaatacgataggacttcagaccctgttgctcaccttaacaatttcaataccataatacgagccagcaatgtctcgaataatttacgttgtattttatttcctacctcgctgactagagtggcgagtagttggttcaataagtttacccatcattcaataacttcttgggaacaactatctaaggactttaagaaacaatttcaggcagcaagagatagacgacctgaagcatcctcccttactaatataaaacaacaaccaggttgagttgatttagtactatcactgctaaagttagatacttaaacgacagtattcaacttactgctcgtcaagcaaaaattacgactgaccaagagaaatgcatgcatcatttagaattagtgacatttacaattaaatttggactttataagatacgagatataacaattaaggacgcaattttaacgttttgaacatgtttaaaaacttcaaaattttcaagttttaaaaattatttctaatttatattagtgctttgataaaaacttgatagaaaaagttttttacttcgtgtatagtgataactcttatttttacagtttcaattatgaatatcgtataaattatactttgcaataagatagaagataaatttttaaggaataattacataaagcac

SEQ ID NO: 52495 - DNA, 1168 bp, Cannabis sativa
atgaagtttgataactacaattatacggtaaatactatttcttcttcttcctcctattcacagagatccacttcaagcagtagccatttccatccttccatctcccaaccaacctctctcgtcttcagtcctctcgtccccaacccctcgatgtcatgtaaattctctactcaaccttctatatcgtggtctagggagaaagaaaactagtttgagtttaaaatttttggtcaagccatctccctctctttcaaactttttttgctgctattaatattttttcaagctctagtttgtaaatttgtcttttcttgttctttcttttttttgccatttcaaattacattaataaaattttagatttgaaagtttaataagaatattgttgtagtgtgattgtttattattgattccactcatttggcctcaaattttgtgaattattttttcttctttaagttgaattttttgatcatatgtatataaggcacaccttccatgtgtttaccgaaaatacataacatagttactcttaatcattagcctaattaaagaaagaggatatctttaattgtgctattataatttttattcttcttcaaattgggctttttatattgttcctctaatgttatttatgtttgttttgattttataaattagtcaaattatcaataaatttgatacagtgttgtttatgcattgcttataagttgtatatacgtattgttttgctactgcagtagaaaggaaaaaccgtgattcttagtgttgaagtacttccaagttgattaggatagactttgtgacaatttctattcctttagtagaatgaagtaagttgaacacattgagagtgttcaagaaaatgctctatagttaagcgtgcttgacctggggtaattttaggatgagtgacctcctaagaagttttctcaggaagcgtgcgatttaagacaaagcatgctagaaacactcgtgttggtctgtaggatcagtcatcagtccatgaagcggccagagtatcgtactcgtgtataagagtcattattttatgggtataaagatccaatggaggcttgaagcaaggatgttacagaatgtgtacaagaaaatgttccaatcttctaagaaggttcaagccattgtgcatggattagtgattgag

SEQ ID NO: 52496 - DNA, 750 bp, Cannabis sativa
cctttctattctcttaccagtatcggctgtcctacctgatctacattctagaatgcaagcacttatgtatgaatgcaagaaagtctcaaccttatagtctaatctatttttaatttattacaatcctagccgagctagaggatttgaatattttagcatttaatatctaagatattatggaatgattaaacatatatataaaaataagaaaattcgttatcaatttaagaatgtaatattgtaattagtatatatatgagaagatcacaatatagtcaattacacacctttgtacttgcgaattcttttcggtttcaagcccactttgtagatgggatctctccaaactatgtccaacttattctgttggggtcacattttcatcattcaaagtaggcccaatatctttagccacatcacccaattcaaccacagtagcaaaagaggcttgactttcataggctacactctcatttaattctggatgactaaaaaaacactcaatcacatgatcattaaccttcaaagcagctgtaattttctcagttaacacaatgtctgtggtcacacaatctaatgtcacacaatctggccacttgaaataaaaagtaattgaagtagtatcttccacataacctaaatcccctgttatcagctctaactcaaacatagtcatatgtctcaaatctacccaatgaacatagtcaactactccaccattgtaagtagtaggaatattaagtgtgtaat

SEQ ID NO: 52497 - DNA, 1386 bp, Cannabis sativa
aagtgaaacgatagtttggagggtttagttgtcaaaaactcttttctagtataatgatatccttgctccagggccagccctgagagtaggcaaataaaacgtgcgcctcgggttcacgaactctgagtgccccgaaattatacgtaaaaaaaattattaacatatggataaaatattaaataataagaaaatataacaaaaactcgttagtagtggtaaagagggttattttaagttaagaggttaagagattaattcccaatatttaatgtgtagggatgaaggattgaactttagaactcttaaattttttaatttttttttaccattacatcaaaacacactagaactattatttttatattaatcaaattatttatataagggctcaaaatttaattttgttttcgtccacatatattttaggaccggccctaccttgttctttgataaaaaaaaaaaaaaaaatctgaaagtaatggattttgtaaaggattttcattttgctccaatcttgctgttaaatattttgaaagtagttttatagataccaatttttttattttttagtattagtattgtcaatcggatcaaacaatatgatattgccaaaaaaatgttagaaaattacaaaaatggaaaatgagtgtattatgtatttagatcaaaatttatctcaaatgaagaatgatataaacattggtatataagtggcaaaaataaaaagcgtgaataataataataaaaaacgagaaaaaggcttgaaaaaagggtatgcatgccaaatgaaaaagactattatatatttttaaataaataaatatatgtgtatttacgaagaaaaaaagtttcgtaagtggatgtgttttataatgtcaaatagtggatactccataatataagcattaaatttgaagaactatcacccgaaaaacaaaataaaagttagttcattataatttaattaatagaaaagaaattaaagctttttaatttattcaataatgttgttatattataatcaatgcatatagatatttttcctaataaagaaagaaaaagatatagagggcagaaaatagacccctctcaccaaacaagaatgacttgcattgcattatatatctaaaacaaataattataaaattagtgaaaaagagaccaaattaattgggtttggtgagtggtaacaaccaaaaataaaatacaataaattaaggacttttttcagttttaacaaaaaaaaagtaacaatattacaaacatatttttagctggccatataaacaaatatatagcccaaataaaaaaatttacacaaataccacttacacacaccttcaactcaagatccatgcttcatgggcaactatcgtgcaactacgc

SEQ ID NO: 52498 - DNA, 2054 bp, Cannabis sativa
acgcaaaatcttgcttccagtaacgctcttaacctgagcaataccgtgagagtcacgaagaatcacaccgatctgagatggtgtaagacccttctttgcaaacttgcaaatgttgtcctcgacctaacaccattatatactcaatcaattaatgcagaaaattatagacatttatttacgcttgcaattaacaaaatatttaaacatacatcttgagaagagatcttgagccaacttggtgaacttctcttgtatggaagagctgaggcggagatacccttactgaaaacagaatcaaaaacaaaaagaaaaaaaagaaaaaaactcaataattcaactacacagacaaagataaatatgtatattatcaacaggtatagatacaatacccgcggctgtgcatacgacccatggttggaggcgctgatgagatccgtcttcaaccttgtctggttactgagttagcctttctcttccaaaaccctagcctaacaagtaaacagggagcttcttctagctacttatacaaagccctaaatatttggttttgttgttttcgctttaatcttactaattttttgggtcggcccgtttcttatatggacctcgctagtgtatttcttttagatattcccctaagtaccttatttttagtatttatttcgacttataccttttctttttcaattacattatttatcgtttatcttaagaaaaatgaattttaatattaatattttcaaaaaataattgtttgattaagtaaaaaaaaaaacataaattttgaaacattaattttttttggacctttttaggttgttaattaatataagtaatagatatatatattaataataatgtttattgagatttttggaaattcaatataaaatggatgaaatagagatggagatttttatgtggtttaggtattaatgaactctagttcacgagacaattgtagtggtgtgcacactcttatggtctgacgcagtggacaataccttgatattgtaggatttagtgtcaaaggatcgccacatcagcataaccttccatgacgtctcttggagtgaccttctggaagcatcccaataactcatccgaagggtctttgttattcttcctttttgttcgtgatgtcttcctgactcgaagcggttcgaatcaagatgcatgtgacttataatctggatggacttgcagcctatctctccatgtgatttcagcccattactttacctgggcccgtcttcgggctttagttgactattcgtgacttgaatatgtcgtgtgtcctcctttcgaaaacacatgtaacatttaccctcaagctttcgaaacttgagagttatggaggcttgcagtcctctctcttagattattatggacatgtggggaaatttaaaagagggtaaacatttttatcttctgtaactttaattgtggacagctatggaccttctagttctaacgggtggattacacttgatagatagtgtttgagtaatgatttttcaaccctttacatgaaaggataatgtagcatttataggctagggttcgggtatggacataccttggacccgctagggtttgtgtgtagcatggcccactaatggggtaaatacatataatacactaactttgagcccaacccgtggggctgtgatttttgtaagattgaggaccatttgatgccgacaggtgacatgagcgtgttacctttgcgtactgtaaatgccacagtagtggtcgtcggacaaagggtatgttccccttggtggtgtgcatactcttatagtctgacgcggtggacaaggccctaatattgcaggatctggtatccgaggattgccatatcagcataaccttccatcacgtctcttggagtgcccttccagaagcatcccaataactcatatgaagggtctttgttattctttcctttctattcgtgatgtcttcctgacctgaagcagtccggatcagggtggatgtgacttataatatggatggacttgttgttggaaatattttaccaggatttagat

SEQ ID NO: 52499 - DNA, 1832 bp, Cannabis sativa
tcccactttggggttagtgtgacacatttttgtaataatatgtgtgagtgattcaatggtaccgaatccatattgactactaaggattgacctattcttactatgcttgaaaagattagaatgtacttgatggaaaaaggatgaacaaaaataaaaattcagttgtcatgtggcagtcaaacattgcaccaaggatatcagaacaattagaaaaaaaaaaaccaagtagatgcaggggtcactttcttgttagttcttctaatgggtcttaccaagtggagaatatgtatggaggcatgttttgtgttgatttggcatgatgggtctattcttgcagaaaatgggaactgaatggaataccttgtagccatgttgttactgcaatctagtctaatagagaggatccaaataagtatgtgagaaaattgtacacaaaagagtactacatgaatgcatactcaaaatagatgtaccctattaggaatcaagaagagaggctaaggagtgggaagttggtaatggtaaaacctgtaggaaaaatacagcctggtagaccaaagaaaagtaggaggcttgaactagatgaaattgctccatcaagaacaaagagactgaggaagagattccatagaatgaggtattctagttgtggtttatagggccataatttcaagatctatagcaaaaacaacaataacaaggtataattaatgtacaattaaactaagcttgtgtgatagaaatatgctctgctatggctattatttcatgtgtaattctaattgtaggcaaatgaagcaccagcagacctggggactgctctaggaatgtcaagccaacaaaaaaccactctttgagatctacaaacaaggatagttcattgtagtctgcaactataccggttgaggtacattttagaaacttgtaacttataaaatttatttcaatatgtatcaagttattcccttattaataatgttgacatcgtatttattattgatgcttgccacgtgttacacactaagaataaaaaagtatataagacacgagattttatagaggtttggctcccttaattattgggtaatgacatactcccctattggttgtattaataccagagataataccactcagatcacaagggttattgaatctgaagtggctctcttacgattacaatatatgaatcaagtaggaaaatctcaagtaagagagcgagagagctttgggtgtgtagaagagaggggaagagagttagggtttcgaacttagagcttgacagctttagtaaggcttagagacttaggacttagccttaggcaaatgctttttatataatagagcttgcatcccaaatatccctcaaaatagttaaataaagctatatttacataattaattaataaaattcaaatgacaaaattgtcctctaaaatagggaagttgctaatattttctccctatttttgtgggatgtcaaggtccaatgcactacttaacttgatgtctacggatgaaagttgcgcaccaagagccttccaagaaaaatttggtcagccatgcacttgccaggtgcaggctggccagccacataatgtctttcagttggggtctggctgaccatgttcctgctagggcctggctggccatgctcttggcaagggcaggcaggttatgttctttccaaggtctaataggtcatgttcctgccagctttggcaagtgttggccagccttcataggtggtggccaacctttataggttgtgactagcctttgtagatgttggcccgcctttgtactacttttccttgccgagctccaggttt

SEQ ID NO: 52500 - DNA, 980 bp, Cannabis sativa
  modified_base (560)..(573): a, c, t, g, unknown or other
  modified_base (635)..(636): a, c, t, g, unknown or other
tcatttgacacgtatagaaagtcaccagacaaagaaaactgcagcattcctatctcttagcctctcatatatatatttttttagcatattttaatggatgctattacttacagttgaaggaaaaataatgctaagtataaatgtctaataatcatattcaacgctaaataatattttaaatcttgcgcttacaaaagttaataattagactttttgttttattaaatgataaaatagattctgtattttctaaaatggtacaactagaattttgacctaattttttctcaaaataaagtttaataataattcgatctaaaagtggtatgacaaaattatttacattttctgtatgtgtttgtattaagaattgtcttcaagttggttatattaaaaaaaaaaattgtcaaaaattaaacccagggtcctatttttaccattttggaaaatacaagaatcatttgtcatttaacaaaacagaggtccaattggtaacttttacaaaacacagggtctaaaatagtatttacctatctttatatcttattattattattatnnnnnnnnnnnnnnttattattattattattgtaaaattaaaaaaaataaccatttaatatatattaaataataanntaatattattttaataatttttaaaagtgattaccattaaaatattttagatcagaacataccaaaaataatgtgaaagaaagtgtttacaccaaaagtaattctaataacgtggacatcaatatttgatgtgtggcaaaaaaaataaaatatcctggatttaagtagtcccgaatcatagcaagttgggaggggccctagccctgcgcctaggttgacttcaagagtttcaaaatgggtgtttgaattctgccaagttgttttcaactcactatctttcagtattctgtaccatgaagatatgaacaatccaagtccaaggcctgggagctaaaaacacacga

SEQ ID NO: 52501 - DNA, 846 bp, Cannabis sativa
ttttgaaaataaaattttaccattattatatatgtgaaggttaatatagtatagttgacaagtttttatttatttatttattgttatgagaaagtatgaagttgataagtcctgcttatattgtaatgattttagcaagaagtatgaggaaaacagagagaaaagaaaagcttgaaagctttgtattttattaattgtgtaaatgaaattgttacaggagcacatgtagatagcaaccaagagaaactgaattagtttggaaagaactaatctagcttaaccaaataacaacctaaatactgaagcttaaaacttcctataacataaatacttttacatatcaactaaatctaataagaagcaactatctatgttctgctggaaacaacttgaaactagttcaacccataggacggtataaatctaataagaagccagaagccactatctacttactgtaattattattattattattattattttgatgaactacttactgtaattattattagatttttttacatttccttagtgcggtcttttcgttgtcgctatcccttaaaacatcataacactctttaattagaatatattttccaatcagtacttttcaaatcgagaagcttctgccacatcaccacgtaatagcgaggagagagaaacctacaggcgagtcaaggagttggggggtgagaagtcgagaagctttgcgataatcgtacaggcgagtccaggagcgtccctggcatgtagacaagtccaggtgcgtcgttggcatgtagatgagtctacgagcgtcgccggcgtgtgaacgagtccaggatcatcgcctgcgtgtcgacg

SEQ ID NO: 52502 - DNA, 819 bp, Cannabis sativa
aacggatccatgttcaattcccacggatttcggaagccttcccattggagagtattctgctgctcctcccgaagaatcttcttcaaggcctccacctcagcatgcccccgactgtactcgtcgagggcataattgtgtttggccactcagagattctgcctctcctcatccgctggaaccggggtcaacactatgccgtgaggcacagtgtattcctccgcctcagaaggaatcccggagtcgttgctcggtgccggagtgtcccccctccgggtccgcttagaaggctccacctctaccatcttgcccttctgcttaagctcaagggcggccggatcccccacttcaccttcttcaacttcctcctcctcgtccaccaagacgattgtgcctgaagggacgttggaggaggacctcccgggagtaaccagctgggaggtagacggaggtggagaagcatcaagactgtaagcctcagcaagagtagccaagaggtcgtccatgggcctggctgctgcaataaaaaataataagtgctaggacattcaagagacagcatacacttagtaaaaaagcgataaaactagtcctaccctgactctctaatcggccctagcaaagtctcgaatcatagcactggcttcatcatcccccagaaaactgtccgagggaagaaaccagctggaagatacgtaggttgaatgatccaaaggaacaggcgccggaggtccggaacccatccgggaccgacctaaataatggcctaagtgggaaaagtaatactccttggcatgatccccccaccgggtagaaggcatt

SEQ ID NO: 52503 - DNA, 901 bp, Cannabis sativa
tttatataaaaatctttattttttcatataatttgaaatatattttagttatctctataatttatttgtatagttagttatttttaagttatattatggtaaattataatttaaaatacatttaagtaatcttaaaaattattttcgaaattaataagttgtcatataatataacaactaccatttttatatactaattattttatatattttttattttgaaagctagttaattattgtataatacaattaacgaaattctaaaatgaatgtcaactaagatttaaaaaaaattataaaacaacctttcaaaaaaattataaaacagtaactaatcgatatattagtaactaactatttcttttcttaaaatagcgctacattttgaaatattcacattgaagagtagatcacaatgttattttttttaggttcatccgaataacgacgtgatcagaaattatttttaaagtttgaaagagaatggaaaaataagaaagagagaagcataagagaagagaaaaaggaataaaaaatagagaaaaaaatgtataaataagggtattaaaacatactcaaacaaataaaaatgttattgatacttgatcaagtcaattttaacaattaaatcaaaaaaataatgtgtgaaatgtaaaattttaagggttacttttatattttgtgtacctttttttttgcggcaaaatcactttaactttatgatttataacacttaactctataaactcattttttgacggtaaaacttaattaatctcaattctatttttgtatttacacttttgtctaaaaattccagttaagtgtcacagtaaattgtctacatgtacacacatagtacatttttagtagtccacataattttaattattaaaatatt

SEQ ID NO: 52504 - DNA, 1061 bp, Cannabis sativa
cattgtcagatttttgctcctctccacctgtgaaattagctgatgcagttttcattggaggtcctttgccatttttacttggaaattttccatgtaacttatggcctggtggataatatccaatgatcttgaagcatcgttcaatagtatgaccagacataccacagttggtgcaagagtatttcgatcgaaaaggctggacatttccagcaaactgaccttcattattcgacgaattgttgtctggttcagtgctggtgctgctgaaattagtcaaatttctttgcctttcttcttgaattacagtggcataagccttgttaagactaggcagtggatcacgcatgaggatttgcgatctaactatgctgtaagagtcattcaaaccaacaagaaactccaacagacgatcctcatcttgataatcttgaataaccttcatagcaccacaactacaaacaggttgtggtcgatattccttgatctgatcccatagagacttcagtttagtaaaataggttgtaaccgagtttgaaccctgagtaagtctctgcatcatcttcttagcttcgaaaatccttggagcattcttttcattgaatctttcatgtaattgctcccaaatctcagctgcattgtcatgatacattatactatcagctatctcacctgaaatagcatacagaatccacaaaatcacagtgctgttacatctacaccagctatcataatcctcatgttcttcgtctggttgaggaagttttccattaacaaacttcaccttgtttcgagccacaagagctatcagcatagatcttctccaggtgctaaaattctcacttcctgtgaggattttgggaaccaatacagcacctggattgtctccattggaaagaaaatacggattggaaagatcattgaaggtagtcgaccttgaattctctccaagaacagaaaaatgattagaatcatttgaattgttttcaggatcacgactgtttcgagttctaactcctcctcctctagccattaacacgacacagaagcggaagcaagaagaa

SEQ ID NO: 52505 - DNA, 710 bp, Cannabis sativa
ttttgttgttagttataagaaaaagaataatttttttttttttgaaataatccaatattaaaaaataaacaaatccaaaataaccaattcattatgtacttttatggattggattagattgagtttttatggagattagattaaattcaaaaatatgaaaaataaaattatttaatataatatgatagaattttaaaaatattaaattaattgaaatcttaatttaaatataagtaaagaaaacaaatattattttcaaaatattgaattcatgatattttaattattttaagagtgattattataaaattattataagttaaatatgttataattttctataagtataattattattttaaaaataaatttaattacaatatttttctatgtaaattcaaaattaaaagaaatatataatttgatttaaattttaaatagacataaaaaaataggtttagagtttgttagttgaacttataattaataatattcaagattaattataaattaaaaaaatatattaattatgatatagtttttaaggattaatttgagccattagataaaatcaaaaattataaattactatctctattgatatgtaaaatacccaattcctactataatagccccacaaataaatatatatttatatatacatgttaaacatgattaataaagtgagagttatttagaggttgtttatt

SEQ ID NO: 52506 - DNA, 981 bp, Cannabis sativa
attctataaatggacctattgagcttccaaactttctcttcctgtcctggaagtttataaccttttggttgctccatatagattgtctcatcaagaattttgttaaggaagctgtcttgagatccatttgccaaatttcataattgaaagtgccagctatggagagaagtattctgatggatttgcgcatgatgactggactaaaagtatcctcatagtccacaccttctctttaggtataaccctttgcaattagtctagctttaaaagttttgacttctccacgagcacctcttttctttttgtagacccatttacatccaattggatgataatcatcaggtgcatctacatattcccagactttatatcttttcatggaatccatttctgaatccatgtcagctgaccattgtttccattccagacttgccattgcttatttataggttaatcgatcgtcatcaataccatcaccaatgaccgtattgatttcaccattcaagccataacgagctggttttgtggaaaccctcccactacgatgagggatcgtgaccttttgaataggaacatcattggtagttttatcagttgtaacaacttgcattggttccaccaaggcagtgggattatcctctatttgagtagaagatgatggaacatcagttggagttatatctgaaagcattttctccaatactactttactttgcagcttgaagttcttaatatagtcatcttaaaggaatgtgacatttatagaaacaaacattttattgtccttgtgactataaaatagtccacccctagtctcatcgaaattttcgacaaacatgcaaacctcagtttgcgcttccagtttaccttctttctttattaagacataagtatggcacggggctggccttgaaaaaaagtaggccatagggaaaaaaaaaatttgggcccttatgttagaaaaaatgtggtatttttcaa

SEQ ID NO: 52507 - DNA, 1475 bp, Cannabis sativa
cattattctattaatatagtttcaacttcaacatatggataaaaattaattaattacaaattcaatctagttccaaaaaaaaattatttaattacacatataccgagtgaaacatatttcttttttaaaatatattaattttttttaagtcaagatcaataggagaaaagtaaaatttacatgatactcgatcgaggctaaactttaataaactaaatattaataacggcgttattattaatttttatcataacaactttagaacaggttattattaatttttattttgacaaaaaatcataataattttagaccaggttattattaatttttattttgacaaaaatcagttcaatgtactattttaaaaaatacaaggtccaatttataatttaataaaacagagtgtccaatcagtaacttttgtaaaacacatgatccaaaatagtatttaccttataagtatggctgtttggcaccactccatcaccttatacaggtgccaccttatcattggttacgatattctctaaatttttttacattaaattatatgagaccaaatacttaattgtaggggtgggcaacatccaatccaattcaattgaactgaatcaatccaatcaaatccaattacaaaaaattggatatctaattataattgaattgaattggatgctaaaagttaaattctaattggattgaatcggttattggatgtcaatctcaagatccaattaaaaaccgatccaatccaattacatttgtatatgttaaaaaattatttatacttatttatataataaaaaaatataatgtatattaattatatctttattggattttatttttgtaaatttgtaacagttggttgtttagtgtatttattttcatgatgttttgttctattttattacttaaaaacgttgttgttttaattatttgaaacttttagttgcattatattgtaatgatggtatacttatgaagtatcaaatttaaataaaacgtaatatttaattttttacatatttaatttttacatattcttcatacttaatttaagtgtgtaattagatatccaatcaaaaaaccaatttaattcaattagtaattggattagattggatcggattgataattttccaaatccaattactaattggattggatcgaatgagaaaaaaaatattaaattaaattagatgtctatccttacttaattatactagtaataatatgacacttaaaaaaaagtatgatcccttctagcatttcccttataaccctataaaatatgatttacaaaaaattagttgagggctggtaccccacgttccttttttttttttgaaaatgtaccctacatatttaattgcattaatgattaatatatatatatggctatataaagtatgtgagtgagaaagagatcgatcgatctagagaaccaataatactatatatatatatat

SEQ ID NO: 52508 - DNA, 2378 bp, Cannabis sativa
taaaattattattttgcaaaaaattatcaataaagtgaaattaatttttcactcattactcttttgatggatatggatttttttacaacatccaattttgtaagaggtctaatgctttaaaatgtattttttttttttttgaaaaaaagttagtttaatcgtgaggaacaaaataaatgtgtaatgagagtataactttgtatagttgtaactttaattctagaatccgatctaattataagtgtcagtggatatagaaccaattcaatccaatattaaatagatgttggatcgattgaatgattgaaattaattggattatatcggataataaaacctatcatttcagatataattggtctggatctgaataaatttaaaaatatttgatgtggtccacttaacacctataatcacactattaccacacttagatatacaagtaaataactataatatataattatagataaataatatactataaatataagaataatttacgccaggagacgttattttgtttttttttgcgaaaatggccctatattatttaatcctattttataccgttattaagtttaaaaatagatgtctcgtataccgttctttttgttccatattttatgcgtgtattacacgattgattataggctttgagcgatattttagctttatttgaaaagctactttttttttctctctctctctctcaaacgataactttcccttctctcagtccattttttctttctctttctctctctttctctagctctgactacttttctagtcactagctaaggtggtttgtgaagtgagtttctctctccaactcacagtctatatattgtgatatgagctagcaagatcataatcttttcttctttctttttggtttttctttcattttctctgttacttatactctagcttgtgttttgggttagagttgattttagggttttgcatttgtaaatagttgttaaacgtgttgcaatggcaattactagtttagtgctttttttttttttttttcatatatatattttagatatttatatcatcgtatatgtatgatgtgtagttactaatgtaattacttctttttaaaaattatgtaaaaaattgcttctatcttggttattattttttatacagaaatatatatatgttttccatatttcaaaatatatattgaaattgttaaaaaaaaataatgtcaatgtatcttaaacaataaaaaatataatataacctaaatattaaaaaaaaaattatagtttcaaagttaactaatcaaaataagtaactagaagtgtatgagataaaaattatcttaaaatatatatattttttaataaaaaataactaattgatatattatttacatcaaaagcaaccaaaaggttaatatatgtttatcacatattaaaaagttattttattatttatatatgtgtaaaattttgaaataatttttttactagaaaagtaaccaattgatatcttattcagatcaaaagcaattaaatggttactttttttaaaactgccaaaaagcgaaaatttttggaaaccgagatttttctagccttttctattttcggtatttgttttgaattttggtatgcatgctgacgtggcacatcggtattcgtgcaaataattttcttaaaggtatttttataaataaaattaattttaagtataatattgaaaatctccctaaatataatatataatatgggtaaaatattaatatactataaatataatatgaataaaatgtatactataaatataatacaagtaaaatgataatataaatttgacaaaagaatattgtatatacattagtattgcacatttgttaaataatttttggcaaaaaatatattttttactaataaaaaaaagttacatgattttaatgtaagcaaaatgaattgagtataagacaagacgcaaattttatacttataataatataactttttataattttataaagggcaaaataggtacactaaaatttgacttttaaggttttaaatatagagtatatttgtcattacaaataatacacttttatgaattgagccgtaagaatgataagacaaaaatcaaattttaagcttataataatgtaattttttataattttgtaaagtgcaaaaaggatatactaaaatttaactttcaaatgtacaagatatagaatatattttttattactaataatacactaattaatttaaatgatatatgtgtcatttaaatgaaaaaaaagttacatggttatagtgtaagcaaaatgacttgagctaattgatagggataataagacaaaaattaaattttatacttataataat

SEQ ID NO: 52509 - DNA, 1806 bp, Cannabis sativa
taataattattaaacatgtgtaaatataagtactcttaaatatataacatacaatgataattttatgataatattttaagttttcgaattgtttatgttttcaaaatagaattttatcgatggtttattgttgttagataaataataaaaatttataaacctaactaataagtataatgtcaaattgattattaagatataataaggtagaatactttgcgaacaaagaaataaattgaaagaaaaataattttatttattaatttttaaaaaatattgctcatataaataaaaatataaatgaaaatttcacactattttttaacaaatataaaggtacccaatataatacattaaaattaatacaaaaaattaattttataggagtaaaactaaaattattataattttttatataaaattctaatttatgaaaacatgagtgggcccaaagatggtataattttatttacatagaaacccatatagtattcaatgaaataaaattaaaaaaaatagtatttagagaaatttttatttttttttaaaaaaatatatttaattatcatatttctagtctcattattattattttgtttaaatagtttcttataagtaataagtctcttattcccctcagcttaatttactttaaagcccctatctcagctgcttcgtaaatttaattgtattttcacactaaatcccttataaaaaattaggaaattgacacgtattcttccattttcttctgactaccattttaagtttaatctctagcgatacttatcttctactttgtttcatctataattttttttattagaataagtgggtttgagttagtttttttttttattattattttgttcttgcctctattgaattcttatgttacaatcctttctctcgatttatccctcttccctctggttcccatgctattcgtctacacctctgtctaagattccgtcgacatcaacaaaaccacccaaagaactgggagaaccccaaaatctcgaaacccattctttgaacttcgcttcgcccaatgcaataccacagagatggacaacgcatgcgaacccaaccccataaacccattttctttgttgaagcccttaaatctcaaacccaatccacaaatttgctacacagctatttaattttgttggtgtatttcttttaggcgattttgggatctccagaactcatcttctccccgtaacttgtctgagggctcctttcattgcaattgttttgatcagtttcttccatctccaaatcttcgcaacttcgcccttgatgtagagtgatgtgagttttgttgctcctgatgtagattctaggtttcttgctaccagttaagagtagtttattagtttattttatattctaatagatattgaggttagaggaaatttaaatagtttattagttttgataaacctatcattacttcttttaggtgttatgatgtgtgaatatagctttagatataactcacctaggttacaactattttgtttttattttcattaaatctctgtttccatgctcttagtgcttttttcttttcctcgttgagctttttgaaattggactaagaaagattttcatttgttgattccaatgcatgtttgacaaattaacatatgataaatggaaggaagcaagaggcttcaaatctctctagaaaagcttatttaaaatctgaaatcgtgcacctatatctctctgttatgcctgtgtgtaatatttctaaggtttactgtgtatgtgtaattttactaatgttttgagggt

SEQ ID NO: 52510 - DNA, 3797 bp, Cannabis sativa
aaacaaaataaatgtaaagagaatagaacagtagtttggagttttaagtgtgatactgcttaagatgaataacgttccagctatttttgatgttgcgtttggagtttgtatgctccattaccaactacctaagtgattaggttggaagactcttcaaaatacctagtctcccaccttgaatgatcgagtgctagcgtgcttgttgttgctagacctatgagtttattctctgagtactctaattctctaaacctcaaatatgttacaatatactttacattttaaacctcaaatctgttacaatatacttttaaacctcaaataaatctatactaagcaatcttactctctaaacctcaaatcggtactaagtactcttactttctaaatcttaaatctatactaaatattcttactttctaaatcaaatctgtaccaaagtgttcttactttctaatctcgaatcagtaccaaagtaatcttactttctaaactcgaatcttcaccaagtaattttaatttttgaacctcaaattagtaccaactattcttactttctgaacctcaaatttgtaataagtactcttactctccaaacttcagatacatagcttgctctctaatttctgtccaagattataacctaagtagtgaacttcatcggtattcataattgtttcccgaggcactagtaaagctttggagacgacttaatgtgtgaagtccttttccaacttatacaaatccattgaaaccacttgacagtgttgctatgaggattacacacaatataggttaacaaacaaggccaaaaagatgaaacttcaaactcacaagggaagagtgcatcaaaataatcaaagagcacatgcattgaagaataaagttagtcatggaaagatcacaaaataagatgtatgaagcaaatgataagcaatgtcatgactaaacaaaacacaaagctgacagaaaaaatgaccaaaaaagtgaaacatatgtgataagaagaaacctgaccacaagctattagacacataaaccgatcgaatttcccaacctattccccttgtaatatatcctaatcatagaaaccaaaccactataccaaagctagtcgcttaaggagcaattcaaccacaaattaggtagccttcttaacgggaaagagtggtgtgtgcgattgtgcctcatgggagccgcaacggccccctccctccaatttttttttccactctcaactcatttattatttcaccatgcactgaggaacccttcaccctttgttcttatgatttttgatgttgtaggggtagtagaaaggttagcttttccctttaaactttttaatatttcattttgtacgggaaagctttcactcatcgatgcacagtagccatcttaacaagttggtgcattgtgtgattgtgcctcatgggagcaacattggccccctctctcaatattttttttctctcaaatcctccccatcacagctttcactctaactgcggtgcccaactcacctttgcaaccgtccttaacataggcgtcgctatgcaaatgataattacttagaaaatagagaaagaaatactctcagtaaatcatccaaataactagtaatcaggtctttctatagaaaatggaaccacagtttcagcagtgaataataatcagctaggtgtcttaaatagaaataacataaaccgatcataagattcataaatatgacaagtgatactaaccataacactgagctaaaattatgcagatactaacgactttttctttgcacaaaaccaagtgaattcaaagttttgattaaataaaacctgtttgtgcttcagaatggtgtgttagttataatgactagcaaacaaccgtctcagtagccaatgcagtgtttctctttgacttccaacacgatgtctgctgcagtacgattcgatcatttagaatttagtaagtatgagttaaataacacaaaaaccaaataataatcaaaattaaaattaaaatgctaaccttctccagttgagcataaaggtatatagcttctctaacttacatgtttgctctatacctataaatgaaataaatacaagtgagataattaacataagagttattacacaatcctagtaaattctccaacatatgacaaaacaaaaactaaaacacaatcaaaagaaaagcagcataaaatcattctattcgtattccttatcttatgtacctaagtctgaaaatccaatttagactttcagaagcagaatttttccataaagttttgatgaaaaaatctaattgtgttaccagatttttatttaccttttgctctaagctaattgatcagattttcttttcgtcttcctccccactcttcaaaaacaaacacaacttttcagcataaaaacaaaacaaaaatccaatcattaaagaatagcaaatgaacctcttcaagagcatttggaggagtttctttttcactttcttcatctgtgggtaccatgctgctcatacctgcatatttaagaaaaacagtcacaatatctattaaccacaaaacaaaaagaaaaagctttcaaaacatggaaaatacttacctgatccatgttgcttttgttctacattgcttatttgggagatccaaagaggaaagtcaaaggggcatttaggtgaaaatggtaaagtagttgtttcttcctcttcctcttcctcttctactacttcagcatcttccggtagaagaagagtgttatcatcactaacgccttctccaatgatttcttgggaaatccagttaggaaaatcaagtagacacctcggagatgatgttgaactagtcttgttgttatcagactcattatcacattcaccaacctcaataccagtaacaaaggggtgatccaaaagcatctcagctgtccatcgcttcttagggtccttaatgagacacttgcttagaaaatctttaccttcttctgacagttcttgtggaatctcggggagctcttctcctccaattcgtagtaacaatgcccattgattttgttgagggtcgttccatataggttttccagtatacatctcagcaacagcacaacccaaagcccagatatccacagggtaatcatactcattctcatttaccgactcgggagccaaatacattggagtgcctcttaactcccttgatgattccactttacctttctctgaagcttccatagctaatccgaagtcacatatcttagcatttccattttggaaaataagaacattgtcgacctttatgtcacaatgtataaaacctttagagtgtacaaagtatattccattgagtatggatttggtgtgtctgcgaatgtatggttccggtaatcgacctccatgtttcttcatctcatcagataaacttcctcccgtggcaaactccaacaacagattataatcatgctgctccttctcaaaagtttcactgtatccataacagcgaattacttcgggacaagttccaattttgtccagaacatagctctcattttttagagcttcagcaccatatgctccactggttttgacagccaattccaaatcaccatctttgagtactgctctgtagacagtggcaaaacctccttgccctatcgcttttccacgaatccacttcatactgatgaataacaaaacaaatcgaaataaagagaagaaacatgtttttacatatatacatagaactcattacacatttgtctaaacaacaatccattcattcatttgagggagtattacaa

SEQ ID NO: 52511 - DNA, 1117 bp, Cannabis sativa
attattataaagtttaaatgtaatatgatctggtcatgtagtttcaatgcaaataaatttaaacatacttactacggtgtatcttgtaaaatttactctcagaatcacattcatgtatcttgctttagcatacttactacggtgttagattttcaattttctactttgaaatattgtgaatttattagacttgatcaagtttagttttgtgtaagtgtaatttagtttctaaaattcggttgaaaaggctaaggtgattcaaatttgtatgtttgtttcaggctccaacatgctttttcagtcataatttggtacttgattaccaactatggtagtggaatctaatacatatgtttttcccacaacttctatccttttatctacgagatacaacacaatcccaaacctaaatgaggtattttaatgttggtttcaaaactagaattgctactgaacttttataatctggttttttacttccttatcattgactttcttgagttaattttttttttttatttattcatttcttacagaggtttgtacaatgagaggtatatataaagggttctttaatcataacaatgagaggtatgtacaattttattggataaattgtctgctaattaggagtttcattatctttgctttaatcactcatcttttgttttaatgggtttgccagattcttgccaaaaattactgagacccttttttccagctgcaatcatttttttttttcaaattctgatttctggatatctgactaactgttcaatgattttattggctcggttttacatcttggtcatatattatgatgtatctatcttttcatcttgctaatttcttctctctagggtaccataaattatcggacttactcggagagcttcaggtactcttttaattttcttattattattcttaattttagatttagcttcgtatatgttgttaaattaataaagtttacatgtttgttaatctactgtcttcttattgttgcgtagatttgattaatttcgattttgtagtttgggttttcaaatggctttgtaacgatcctatggagctccacattagcatataggatgaattaggtcgacaaatatat

SEQ ID NO: 52512 - DNA, 2073 bp, Cannabis sativa
tctctaaattttgaagaggtataatgaataccttcataaaaaaaataaagatttaaatacttaattgtatcgatttaagggcctattgtatcttagatgccttatcatgtatataaaaaaatttggtgtagttataaaattagtctttccttcgaaaagtcaagggttggaatcttatttttttgcatatttatttgggtatttcattttttctttaaacaaaattgaattgtgaaatgttcgaatcttaaatcttgagaaatgacagggaaaactctttccaatgtgctaaaggtttagaatgaatttttaaagatttgctcctgcaggcaaaaattgttgggtccacatatatttagagtaaaatgatctatccttttgcatctttctatcatggaatgctcacgacttttaatgtgattgggtcctcctttccacctaacctgccagctttatctgccatttaggctatgtttagagattgaaatttgttgggtaatgaaaatttaggaaagaaaaaagtgaaaaatacataaataaaataatttttcatatttgatattaaattttttgttcaatcaactggttttccatacaattattttcataccaaacatgaaaaattgttttttatttttatttttcattttcctgactttttttccaccaaaatctaatttccaaacatgaaaaaatgttctgatcactaaactacaagctttctgtgttttgcgagagcaggtttcttgacaataaagaggacattgcgaaattgagaaaatgctttgcaggcctatggagtttggacgactcagatatcgttaacaaagccattgaaagaccagaactatttgttatgaaaccccaaagagaaggcggaggtacttactttgcttagcatttctgtattgaagcctcttttactaataatcgatcattgttgaaattcaggaaataatatatatggaaatgatgtgagggaagcgcttaaagcattacagaaggaaggaactgaagaagatgctgcttacatccttatgcaaagaatattccctactgttttttcgacatttttgcttcgagatggcatttgtcataaagatgatgctatatcagaactaggcatatatggtgcttacttgaggtaactaatgttttcaagtcagttaccaaatatatattatgaataaaagcaaatatctctgagtgtttcttttgcacagaatctcatcactatgctatacatttctcttgcggatgaatttatttgatcttattgaattgggatatgatgcaggaataaggagagagttatcatcaatgagcagtgtggttatctgatgcgaacaaaggtatcttcctcagatgaaggtggggttgcagcaggatttgctgttttagatagtttatatttaacttaatgaagccatgccaatgccaccttactagttgcttgctgctagttattaataatagagagccctagaatttctgattgacccatagacagacacatacatcatttgtcatgctaattgtacaatgtatgaaaatgagagttataaacagtcaagaaatgttggataaagcagaatgaatgagcttctatcttcactgttttcttttcatgttgtcttctttcaaatgaacattttctttttgcaattcatgtatgttaaatcagtttgtgataataaaattctttgaaatggaaaaagggaatgctaaagactaaagcttttaaagtccaagctacattatttttgtttgctcttctaatcattttaaatttcgtcatttttttcttgctggatgaaatcatttgttggttaaaatgttattttgtggagtaaaataaaatttgacattgcccatctgtattagaaggaactaaagaataatgaggagaaaagttaaaggatctaaatttaggtaactatttaggtcttgtttgttgcattggataattttgcctagtgcacacaattttgttcctttggcttggcactatattatcccaccaagagtggttaaaatagtcccgtctatttttttagcagtataagtatacaa

SEQ ID NO: 52513 - DNA, 800 bp, Cannabis sativa
  modified_base (27)..(32): a, c, t, g, unknown or other
gttaaaccaagaaatgccgttagatannnnnntttaatatataaagatatactagtgaaagatggtgctgatggcgcctatcacccgttttttctattatttttatcaataatatgttttaattggaatgtattaactcattaaaaataaaaaaaataaatataataaagcttaaaaaaatatgaaaaaaaaagagaaaaaagacaacaaaaatatatacttaatttgacatgtaattataattagttcaaataaaataaattacatatctcaagacatacaaattactaatatataatcttattcacattgagaaaaaatataaaaaagagcatggactataggaaatagaagagcaagaagtttgacacatgtaagtttttaaatcaaccaatctcaataatttgtaaggaatttttaaagacctaaaaagtttaagagcataatttggtacatgttaaagtttaggaaataaaaattctgatccgtctttattttagagataaaattatattttctcttaagttttcgaaacaattatgtacgaataataaataaataagcacaaaaaaaaagcacaaaaataataattttatgcataatttttttttatttttttcatttaaaatcaaaaaaagttattaaaagtaaacatacaacatttacaaaaatatattattatattcaagtattatcatatgggaccctgcataaattttagggaaatttgcggtaaaagtccccaaaaaggtcactttgatgcggattagtccccaacctccaaaaatagcggcaatagt

SEQ ID NO: 52514 - DNA, 612 bp, Cannabis sativa
agatgtaaacttttgccgagcatggattttttcaaacacatagaatcaacccagaccatatcacactaaaaaacaaggcttcaaatagaaattaagacatgtaaaacaaatgaagattgtaaggagtgcatagagcctaattcaaaagctaaatatttactctaagattacaaaggaagaaacaatggaaaataatttaaagctatagagtaattatcaaatatcagacaatctctctcactgagaagttcaacgagacttgaagactaattaaaagttcatctcacaaatcaaacaaaaacttatattaaaaggcaagaacataaattcgaattcaacgctcacaatttgattttcattgtgtgaagatgatcaaattcaacagttatatgaaatctgtaagattgatgatcataattagaaagaatgctttgtgatatagatgtttaactactatgtcagtatattcatatttttgttcaacttctatcaaatgactatgaaatctgtaagtttaagagttggaaagaactctttatggttagaaagtaagtgttcaaacaaaaagtgttcacaaaataatgataagcaagtaattcctattaaactcca

SEQ ID NO: 52515 - DNA, 761 bp, Cannabis sativa
  modified_base (704)..(708): a, c, t, g, unknown or other
acaaaacagaccctcctcactgcccaacgctttcacaaaccattgcattataactctacaccagactataaccattatccatgatagcaaccaatcaccaaccactaacctttcaaacattttcacactaaatattggaactgcaacaagtcctatcttctctatagccacctatcctccaacaccgacagctatatccatctcaaataacatcttcactaggaccccttccttccccttgtccacacctttaataacatttactccattgatcacaaaaacacaagtttttcaccaactatggataacaaaaatgtccccccttccaacttaccaaagagacaatgtgagtctctaacaatgagataatttcttaaatgacgttactaatactccaccatagacgcttctccctcgtcacaaggagaaagctctagtcattttgtttcctatgatgacataaattcatatgggtttgttgacaactcaacggagattgcattacaatcttgcaactcatcataaaaatattgagttggaatacacagagtttggggaacccgagtgcgttcaaacaccttcgattgtttgtcaaagaacaatcaccccatgttttatttcttatgaaaacaaaagatcatattaactcaagggcttttttcatatatgtacaacaaaaacaaaataattacaaaaaatgtgcnnnnnaaaattattttaaaaacttatacattttaaaaacttattacataaaaccatac

SEQ ID NO: 52516 - DNA, 530 bp, Cannabis sativa
tagcattaatgcaactgactattttaaaatttattttggtaaactttttctaaaattctattatctttattttgtcttaaatgtttatattacatggaatacaatctatatttttctttatataatgtaaatactatatattgttaaatattttattaattaagtaataataaataaatagtaaataaataaatatttaataaaagataagacataaattgattaaaaaaaattgtacttcacatgtattccttagtgaaaagtacagctacaaaacaatgttctttattatagagcatccccaatagattttggaccctaaagtttaatttagctaccaaaacttgaatacaatgagtcactaactatgtgatttaacctctaagctctctgaagcttgaacaacgtatttttggttgtgtatggaagtaagggtgatttaacctcagcttaccattgacttacagatattgggaagttttatcgattcagaaggtcctaaagtttaatggcggatgcaaacttgagtg

SEQ ID NO: 52517 - DNA, 4141 bp, Cannabis sativa
ataatttccaacattttcttcttatccgaagttgttccccaccagaagttagacatcatagcctcaatttcatgacagaattttactagaagcttgaagcaactcattgaataagtgggaattgattgtataacagctttcaagagtacttctttacccccagccgaaaaaatcttgtctgtccaagtatgtaataacttccaaatgcgctccttaatgttgttgaacaactgctttttatcacgttcggagtaagaaggtaagttgaggtaggactcatgacaatcacatatagacattccaagaatattctggaaagagagcttggcttcatcggtagtatttggagaaaaagacatgacagatttctctgtattcagttgttgacctaaagccttatgatatgtatccaaagctcttttgatggcaccacaagatcgatcagttgcctcacaaaatagtaggctatcatctgcaaataataagttgaaaacagatggagagtgacgagatacagccagaccttttaagcagccaatagactcctcatactgtaaaagtcgagacaagccttcagaatagattaaaaacaagtgaggagataacggatctccttgtcgaaggcctctttgaggtttcacattacccgagacagaaccattaataataaaggagagttgagttgtttgcaagaaattcatgatgaggttgatccaacaaatatttaaacccatctttcccatcacaacggctatgaaagaccattccactctatcaaataccttactcatgtcgagtttaagagctgaaaacccttttttgcctcttgttttatgtttcaaacaatgtactaactcaaaagcaacaaggatattatccgtgatgagccagtttggtaagaaagcactttgtgtctccgaaatgacatgaggaagaattgacttaaggcgtatcaccaaagacttagaaattagtttgtaaaccacattacacaaactaatagagcggacgtctttcatggttttcggttttttgatcttggggatgagagtaattaaggatttgttaagagcttcaggactacccccatcattcagaacatgcaaaactgcttgagtaactaaattgcccacaatatgccaattgtgttgatagaacaatgctgacatcccatcaatacccagactaccatctccattcatagatttcaaggcttcataaacattatcggctgagaactctttcaaaaggaacatattgtgctcttcagaaaccgtggagggaatgacatgaagcacatgttgcaatgcccaatgatctttgttttgggcttggaaaggttttcaaaatatgcaaaaaactacaacaataatgtcatttgttaaattgaacacagtaccattttcatctgataaggacctgatccggttatttgaatgtcttgccgaggctttcgcgtggaaaattttggtgttcctatcccccgattgcagccaatcaacacgtgcacgttgttgccaatattgctcttcattagcaagtaattcatctaagatggattcgactttttgtacttgttgagcatgtgttggagttggagttggaatgttagaaagggctgcaacatcagcttgagtagaggatatcttctgtttgagttggccaaatttatgacgatgccatgatcttaaattatcagcacaagaggagagatttttgtttaaaacatcaatgggactgccatttgaattttgccaacaatctgaaataatatttgagcagtcagcctctttgatccacattttctaaaatttaagcagagaacgatattggacaacattatttgtagacagtaggttgattttgctgagtatagctctatggttagagccatagtaatcaagatgagtgacttgaggtaaattgaagctatcattccatactctattaataaagcacaagtcaagacgttcttgtaaagcttaaggatttcgtatattttttgtccaagtgaaaggtgaacccgagaaaggtaactcaagcaaagagcagagatcaagtgtggtacaaaaagccatcatttgattgtcagttcgtaaggggcccgagtttttgtgagaatgagagaagatctcattaaagtcacccacaattaaccaaggatccaaaggtgaggcatcgacaagtctttccaaaagaatccaagtatgttttttgttgatagcctcgggaaaaccatatatagcagaaaagtgccattttggtccatcattataagagatgtagcaatcaaagtagttggaattcattgataaaagagataaatttacatcatcatcccataataacattaagccacccttaagtcctgaacgaggaatttcaaggccattattaaacattaaacattgcttaaaatgggaaatacaaccagaaaataactttgtttccataagaaacaaaaggtggggagtttgctcacgaataagcaaacataagcgacagaatgcacttggattccccaaaccccgtgcattccaactgacgatattcatgatgaaaagcggtattgctgagcaatcaccgctgaaacatcctctaaatcagcagaatcttcattaaagtcagaaacttgttggtttgtgatcacttcaactaaggaaagagaaggactatgggaacttgaggcacgacatctcttaagcattttccttagagaaaggttatcaaattgtctcttgaaagatttgttcggatgacaattctcctgatcttccaattcatccatattagcagtgagtgcaattggttgagatgaaataatagtaaacacaatggatttcgcagccgattttgaagaaaggtccatattaattgaatggcgctgtggtaagttggggatggtaggacatgggggatatgtggcatagtttcagacattgtgaagctaccaatatctggggtgaaaacatccttcagatgggccacattattgttgtgttgagccgaattgttaccttgggagagatttgtggaagcagcagtaatggtagtaggccactgacttattccaatagagtgaatggatgatggagttgtagcagtaggtaatgttggaggatggttacttggatgattgtttgatgattccccctgaagtaactgtcttggatgagatggtggcctttaattgagggattgtggcagtcaaagaggatcaggccaacttagtcaagaggggccaagcattacctttagagaagtcggtcctgtaccaatcataactagaagtaggcaaaggttcatctttaaggcttggtctatatgctaattcggactcaatgccattgtccatattttcaagatgaacaagacatttgttaaaaacatgaccaatccaaccacattccataaaataatctggaaatcgttcataacgaaactccacccaaaattcatctttaattattggaagagtaatcatttttcctcagagtagtggtttggtgatatccatataaacccgaaaacgaaggaaaggaccccaaccctcaaagcaaaagtcttgaaagacttcaagaaactctccaatgagatttcctaaggctttggcaagggattgagattcgctaaggaatgggagacggtaagcctgaacccaaaagggagtgaatatcatttgatgtgaagtaacagtgttaagggctgatggtgaaaacagaacaatgtggtgaccttggaagtgccatggttctttgtctaacacccttatcttgtcgcctatgcagccaaaagtaataagaaacaaatctgagtggtgttctgatattgcagccttataccttccatctcaatgttgagccatttgtgtttgcaaagttgacaaccagactttcttgggagaaagtattccaacaactaaaaccaagtcaagcctctcattggaatctggtgtaccatcatcaataagggctaccagtgatcgctcatcattggtcaaggagattgttgatttcattctgttaatgaaaggatccatgattgaagaactaaggggcggaatgcaataggaaactgaaagtaactggagaaaactggaaaaagtaggaaaatgggggaaaaatgatcataagaatttgaa

SEQ ID NO: 52518 - DNA, 1409 bp, Cannabis sativa
acaccccaccggtgctcccaattgaacttttgtctctctctttgttcttgacaggttgctggtgcccaaattccgtaattgtagatttcaccctctacaatatgtaatcatcatgattacattaatttatttttaagcattaaattaatgttgaataattataattaatttaaaaattataaaaaaataaatgataaataatttatagtttgatactttatttctttataaaaacttacattaaaactaaatatattcaaaattaaattactgataatttttaattaattttatgtaattttttactaagtaaaaatcttttaacatttaattattttaacttaaataattaaaatatttataacaaaactcgtaataatttaaaattgttatacacatagtcttaattaataaaaaaaataataagaataccatctaattagatgtaattttatactcaatattatttttaatacttttaagtgtcaaatcagtgtgtcagtccaagattgttcaagttatttagcaagttatttagttttttttttttaaaaaaaaaagtttaaaatataataacaattataaaattaaagattagttaactatttttgctccgttgaaatcatattcatcagtctagagattgtaaaaaaaattccaaagtagattatcaattaattgagattgttcttctttttcacaaataagcataaattgtaggaaaatagcaagtaagttactaaaaattaaagagaaatctaaatgcagtagagatgtataggagattcgatcaaagtgaaaaattcacatgatgttaggttgggacaaactgatcaaccctaatttttgaaattggagatttttttttttatttatttttttttatatgggagtaagatgggtcaagcagttgctgcaaaaaaaattagatgaaatttttacaaaaaataattaattattcaacatttattttacaagggtggaagtctaatttttgtaataaaaatataattttattataaatattataattaaatggtttaattgttaaaaaaattataataggaacttaaatataaaaatagaatcatttataaatattaattgctaaaaatatcttcttaaatgtttacattaaaaattaatgattttaaaaaataattaattatagtcattttaattctaatttttttttacctattagtaacctgctattacaggtaaaaaaaaaatataactacatggttacaataaaaatataactattaagtagtcactatatcatcaatacaaatatagatatattattatttcaattttcttttaatgggtgactattcaatggttacatttttattaaaaccatatggttacgttttttttttacttgtaatagcatgttactaata

SEQ ID NO: 52519 - DNA, 1433 bp, Cannabis sativa
acatggtataaatagattctggtaaaatataatccaacatatactaggcgtggagtacgtgtcacaggcacgtagcccccgttaaaatcaatgggttataatcatgcatcttatttttatcaattatgtttaaacaattgttaaaaaaattatatttaaacaaagatatagtgtgatataagttcacttattgaagataaaatcatcaatcgtcttgtctagatattatgttatgtgatttgctctactattatctactaatcagtaaagtttagaagaaaataaaataataattaacaaaaatttgttcattgttcaaaaaaattttaaaaaaattattaaaaaaagaaaaataacaataaaaaaagattaatatcatatgtattctcatatagtcttctacatctttatatatagtcttctactattaaaccagtaagaagaaaaatgaaaaaaaaaaaacagtagaaaagaatggtaaaaaaatatagaaaaatcttttaaaaatatttcaaaagataaaatggagtaaacaaaataagagagattttttgagaaaaagaacaaaaaaaggtgaggtttaaaaaaaaataacaaaaatattaataattgatacaaaaaaaaaaaaaacatacacacacacatacacaacttcaaacatgataaaaaaaatataaattactaagataatcttatttagtttgagaaaatacaaaagattaaagattatagtaaaatctcacctaagcagtgcgcaacaagtaaaaaaaaagctaacgaagttatgtataattggaaaaaaagttaaaattctaattaaagtgaataataatatatgtacatattaaaagcatccctaataaagagctaaaagtgtggtgtatatgtatattttagtctatttttataaaagtgaactctaatagttgtgtataaggtgattcaaatgttacacatgctaaaagttataccaaattttgcataaaatagaacatgatccaaaatttacatacaataaggccatctccaatggatggtgtatatctcgggttaaatttggcccaaaatatactataaatgcaatgaccgtttaattttaacatgagagttagcaaataattagggtttaattcaaaattagacttttaattattaattatccaaatgtggagatatatttaaattctaagtgtgctgattatattatatgtaaaatttcatatttttcatattttatgtccggtaatagtagaacgcgatgtttggccgataaagtcactttttcttatggtttagtaattttagaaatggcggggtaatttagatagacattaagaatgtcaaaaatatttgaggttatagatttgaccaaaattcccttaggtgacaaggttacttcttgaggatgcaaagggtaaattggtcattttacc

SEQ ID NO: 52520 - DNA, 1771 bp, Cannabis sativa
atggttgttacaaattcacgcaaacaataattcttctctaatttttttttagagcggagtggatcgatttgcaacgttgtgtggttctcatgcctgcaatgaatgaaccccttaaataagtttctgcccactgttgtcttgactcgaatgttgtttggcaccattcattatttgttagttgttggctttggatgacgtctaaacatcttgcatcaaattcttcctcctcgtagtagttgtacatcagatccttaaatgtttttaagaagatcggatctttaacctttttggaagcatctgtattgagatgcgaggcgcatagatggtgtgcaacatctggcatgtgttccaagacggcatgtttcatggccacatcttggtcagtaactacaacatttggtttcttatctccatggcattagagaaatttttgaagtagccaacaataggatggaagcttctcgtggaagaggagagcaaacccaaagatgcatgtgttgaaatagtggttgacgccaatgagaacagtgagaggcttattgtactcatttgtcatgtaggttgtgtgaaaccctagtacatccccaaaagcaacatagtccacatgtgagtttctatctgcccaaaataagttagccaatcgattctcctcgtcaacttgatagacaaccaagaaatttggatccttctctgggagataatcaagaaatcccagcgccccttttgagttcgtctctatcttctcttctcgcttggcaccagtaaccctgttgtacacatctcaaagttgacatggcattctctcgtaacctccactttgcaaagcaacatgagacattatgttggcagttttaattcctaccgagttcatggacctaacttgggcaagcaagccatcagacataactcggtatgatctcaaaaattgtacctcagttggtgaagccagctcatgattgtgtattgtgctgaactctttacatttctaagtgttacacagtcttgacagtaaaatacgcaatgctgcctgacatccggttctagtgagatcatgaggtcttttttttttctttctctgtccaatgatgtatttttttcaaacctttggaacaacaaacccatctgtgcattacaatgaccccatgagcacgtcgtacatcgtctattcttgtgtcgaaacctatctgtttcgcgtacaattggtagaatgcttcccatttttctagtttgtcgagactcttgcctagcacgtcagatatttcaatctcatgcactagttttgtgatgtttagctctgttgatatgctttcccatttgtaagtttgttcctcattcatgttctgtgatggagatgcctcatccatattgtatctgttataacaattaataatttaaataacacaaataagggaaagatagtgatcatgatattaataatgcattacaaaaaaaattgaaaaataagagcttagaaatggtttttggaaaagatgaatgaaaaaggacttatttataagcaaacaattgtacctttgacgttaatctacttgagaacaatgttggcttgttattgatatctaaaaatttgagataaaaaataagggaaagatagtccagaggggagtgaaattagattttaagttttaaaggcctgagattatagagttgtatgggttggtgatcatatttaaatctgttgggttgatattaatggccctttacaatattagaaaatgaattcaactcttatcgtacgtcagaacagtataat

SEQ ID NO: 52521 - DNA, 839 bp, Cannabis sativa
atgtatttgttaattatactacaatgaaatgtgcaatactaatttctttttatatctcttctaatatttaaataaaatcatagtagctaatttatataaagattgtattttcaaaaatgaggtataaccaccacaaccactacctctacctttggtttaccctaaaagatgaggaaaaatatgatctttttagatatatagttttagctatgaaaaatagaagatttagaaacaaaaatgagctaaaataatggtgaaaaaatggtgatagaggggtgattttctatggtggttggtgaagagggtttggggtttctctagtttgggggtttctgggttggctgatcgaatgaggaagacgaagggctgggctagaattataaacccttttggcgtcgattattttgaaataaccaacgacatagggggcacaccctatgccgtcggttatttccaaataactgacgccataagtggcgtaaaattctcttctaaaaaattttcaaccctatgccgtcggttatttattattatgctgaaaaaagaacctctaaaggcttgttttgtagtagtggttcttcccctaaacttttcccaatatatacacatttaataggattgtttgggtctaaatttaccttttccaactcttcaattggcttgagttggttattatcattatggatcctaggatccaagttttctgtttctttctcaattttttcagttagaattaccattagttgatgactggctcttctatttttaagttccactctgtaacattctcaagctaacagttagtcacctcttactgtccctactctagaatgtgtagg

SEQ ID NO: 52522 - DNA, 745 bp, Cannabis sativa
tgggtcgtccagcactaatcggactaggggcagttagctcgatcaagcacctatctttaaagttctaaacaccagatggcatgggagtggtgcatggcgatcagatgttggcttgcaattgctatcgcatagagttgcagcataaaaaggccagtcatcagctgatgacgatcttggcaggagaaaatgagaagaaagatgaagatcttgatccctgagttcaagatgaaagaaacctgctaaaaccaattgaagaattgaaggaggttattctagacccagaaaatcccaccaaatgtgtgtaccttggaaagaacttgggcgagcatctcaaatagtaattagtaagttttttgaaggcgaaccaggatcaattcacctggagtcatggggatatgatagggatcgaccctaagattatctgtcatcacttaaatgttgatccaaactacccggtgaagagataaaaaaggaggcccttggattccgagaggcaagaggcactaaaacaggaagttgacaagcgggttgtcaacgattttatacacgaggtattttatctgtaacgccctaactattaggcacactatgctaatcaataatgaaaccctactcccctaaaacgagattactagatagataagagaaatttaaacttttatctaaaacataatgaaaataaaacttgtaataactttaaactttataaacaaaagtgacataatttgggatcccaaaaatattt

SEQ ID NO: 52523 - DNA, 512 bp, Cannabis sativa
tgtcttcaattgctcaaatgtcaaatccaatacatcgattgaatctgaaatggtcaaaatagggtaggagacctcgtcctcaagttcagaagccttggaagtatcaaaaacaaaatcctaggagctcgggagtatgtacctagcgcccaggttgacaaaaggcatggtgcgttggaatctgcttattcaaatctaatgtcgtttcgatcgtccgtctagcttttcacaatgacaataatcaataaagtcagagaaatcaaattcacaattttgcatttatcattttcagctcacccggaaatgaagagtttcaagtctctcatatgtcacatgggcgctcagtcatgaattgtcttcactaagtcataactcactaaaaaaatttccaattgacgcgattgaacttgtgtttcgaagcaaattcaatgttctatcaagtcatgtttcccactgtagacgttattttgaagctatcatcattaaaatttaccccaagggagttacaaaaataa

SEQ ID NO: 52524 - DNA, 1333 bp, Cannabis sativa
aaagtgatttgcatagtatattagaattataagtttaaagtttggctcactaatttatgcgacaagttacttttccaaaatgacatataaattttttaaattagattttaagattattcatcttttaattaagagaatgcaactggaatttttgaaatccgataaacgaggtaagagttatgcgcgttttatgtcaaaaaaaaaattatattttgccattgtgccttaaatggtttaccgttcgacaagcaatgaactatttggctcaggtaacagttacccattcgtgaaattgtgaactgtttaagcccaattttgtcttgaatttcgtgctaatagctataaacaagtagtttcttcatatgctctatataaacagatttttctcacaaaaactaagaattgttgagattctattcgtcttattatatcattctaagtgttctagctaaacaattatcatcttttcgtaaacacactaaccacacacacttgagccaaactcgttcttatcttctctattatgctttcaattctctctaggatttcacattgtatttcatcttataagagggagaattttctttgtatttcaaaattacatattcattgtattgagaggtgatgttggcaccaatagaaaaataactcgattataggtgaggttgacaccggttttgtaaacaactaaagtagagtgagattgtcactacaacaatccgagagtggaattgtcactacaacaattcgagagtgaaattgtcacaacaacaatctgagagtgagattgatacttcaacaatctaaagaggttaatagtcttttagaaaactattggttgaggtgaagttgacaccagtgaaaaaataacccggttgacgagattggcacttcaacaatccaatgaggttatgtggctcaattctactaaaccttgtaaaaattgagagtttgtaatttctatcccaaaactctttccatctcaactttgttatttatttatacttgtgtttatttgtgtaattgcattaaattaaaatatttgcataaattatcttttggtgtttttaaatttctaattcactcctgaaaaacttattgtaggttaacaaaattgtcaccgctaatttaaaatattgcctttaaaagtgtgaattgtagaacaacccaatttttttaggaaaatttgcgtcaaaagtccccaaaaaggttactttgatgcagattagtccccaacctctaaaaatagcagcaatagtcctcaagatcacactttttatttgtccgttagtcctaattttaactgagtcgttttttttttaaattgccacgt

SEQ ID NO: 52525 - DNA, 2039 bp, Cannabis sativa
tatgtttttttaaccggtttctgttttgtgtttcaaggttaacgttgatccttctgaccaagattttgtcgtacatgttgaatctggaactagttctaaagttccagttgaaaaagaggctcagccctctatcagggaaacacgtggccggaaaaaaaaatgtctttatatgtttacattattgttttttgttaatgtttgtgaatgttgtttttcttttctttttttaactttttttttcctgttttttttcaggctgcagcgggtgattctgatcttcccaatcctccggtacgtcgtacaagacgttatggtgttaaatctgttgcatcgaaaggccctagtccttcgatagctgaagagcccgtgataaaatccactagtttttcagatgtggttagtgctttaagtttttcattttacatatatgttcagtttttatttttaatgtgatttaatttttgtttatggaaccagttatttttatttatgatgtgctttgttgttgttgttacaggctaaatcttattttataactggtttttttttcaggatgtttacttaaagatgaaaccggagcatcggtgtagaacttgagagaattgtcactcagtagcttcattggtgttgtcccgggcgatatctggtacgatatgtctatgttgcttctggtgcagttgatctctgtttttatcagctccatcaagtttgctagtgatgaattggttggaattagaatccccgtcattgtgtagtcatcataatttgtatttttccctccactgactcccatatttgatgacacacatgatttgttccatacctgcaattttagggaaaaagtaatatcaaaatattattgtaatgttttgtttggaaccggttattttttaaaaaactataggtgttattgtttttgttttaggtttttaactggtttttttttttctaatttttgtttactgggttttggtttttatttgtcatttatatttttgataactattttgcattttgaaaggaaattctttttaaaataatttaagtttaatttttttttaactggttttttttttcttttaattttctaattgtatgttttgctatattttttaatatttttcaagttttttattgttttttaactggttttttttttgttatgttttgttatttgtaattttctttattttttaaccggttatttttaaattgtatttagagaatcaatgatataggtgagttttttaactggtttttaagttttaactggtttttttttatgttatatttattgttgtatctgttttaattttgtttttttgtagcattgttaaatgtaatgtaatgtaactggtttcatttaatttttatgttttattgtgtaagttagttttttaactggttttttttgtttgttttctggttttaggtgttgttgttttgtttgttttggttaaaattattttttttaactggttttctttctattttttttattgtatgtgttgttatatatttttaactagttttcacgtttttgattgtttttttaaccagtttttttctgttatgttttgttatttgtgactttctttaactcttttatgcaaaagtaatattatattgttatatttttgtatttggaaccggttattttttaattgtttttaaagaatcaatgttataggtgagttttttaaccggtttttatgttttaactggtttttttttatgttatatattgttgtatctgttttaattttattttcctctagcattgttaattctattttaatgtaatgtaagtggcttcatttaatttttatgttttattgtgtatgttaggtttttaaccgattttttttgtttgtttttttggttttaggtgttgttgttttgtttctattggttaaacattattttttttaaccggttttttttttttttttgctgttatgttttgttaaatgtgactgtcattattttttttactgtttttaactggttattttggttatggtatatatttgttttgc

SEQ ID NO: 52526 - DNA, 1289 bp, Cannabis sativa
agcaccttatcaatgtaagctgcttgtgagagaactaagaatttgttcttgcagtttcttatgatctggattccaaaaacataagccgtttcacccaaatcctttatttggaattgagtgctcaaccattcatttgtatatgataatttcttaacattatttccaatgagtaagatatcatctacataaagtactaggtataccagtgtttggtttgtgttttattgatagacgcaaggttcatcaaaattttgttcaaagccataggttttgataatctcatctacatatgctttcttggtcagcataataacgttgagatctacttccttctcacgtttgtctactcgactgactatgccctcgagaccttaactgtcccgtgcttgagcttgattcatctcgcaccggccttcttctttggaagagattagacacatgttctctatttaagtacatgtgtacattgtctctatccgctcgggattgatgttgaggatgtcttggaggaaaaccacttatccttggttaatttctaggatttctctcattatcatgacaaaatccatgattccctggtctaggaggccttgcttcttcattcatccgggatgattctcgcatgtcagttcgttcattcccttagttagcaaaatgggaagttcgtggaacatctcgttgttgttcttggttcctcatgttattaggatttggttgatttgttcggtccataggaacatctctggtattcccaggttgttcctcctaggtatttaggggattctcttggtttgtttcctgcctcctggttttagagactcgaggtcttcatcgtggtctccttactgcaggatcaggttggttctaagggattgtcccttgtgtagccctagctgttgcggcttctctctccaactcagcgtttcgtcgattaaattcacccaattgttgtcgaagttgtctattctataactctaccaatggcacatatctggttggatcataaatatcctcactcctaggcacatatctggtagacttattgacatcctcattcatcctttctaagttttgatcatcattaccatcgttcatcctcaaacgtggtatttcagatgtgttatgtctttgagatcccatgggctctttactaggatgatgggttgtttcttcaagagattaccgtcttttttattgttatcagccattgaatatggatagatttatatttataaggagggatttttctgagtttttatcaccaatgctctcaatgaaagaaccaaact

SEQ ID NO: 52527 - DNA, 927 bp, Cannabis sativa
agtattataggtttgagtttatggtggcagcttctcaataacttcaactttcgctctatccacttcaatgccctttttagaaactttatgacctaaaacaattccattttgaaccatgaaatgacatttttcccaattaagaactaagttcgtgtcctcaaatcttgctaaaactttctccaagttagctaaataagtgtgaaaacatccccgaataccaagaagtcatccatgaagatctcaagaatgttttctgccatgtctgaaaaaatttccatacacctttggaaagttgcgggagcattgcataatcctgatggcatcgtccgaaaggcaaaggtgccatatgtacaagttaatgttgtttgtcttggtcttccagagctatggcaattttattatagctagaatacccatcaaggaaacaatagaattcttttcccagtaaatgatcgagcatttgatcaatgattggcagcgggaaatggtctttccgcgcgtccttgttcaacttttgatagtccatacaaacacgccaacctgtgactgttctcatgggaatcaactcattgttttcattagctaccaccgtgactccttcctttattggaacacattgaattgggcttacccaagaactgtctgaaatggggtagacaatgccaaagtccatccacttgattacctcctttctaaccacttccttgatgatggggcttagtcgtcgttgtgctctacagaattgttgcaacaatcttcaaacataatcttatgcatgcaaatcgaaggacttatacccttgatgtttgtcaaggtccaaccaatggctcttttatatttcttcaaaacatcaatcaacaagagttctctttgggtacccaacatagcagaaataattatcgacaaggtctctccatctcccaaata

SEQ ID NO: 52528 - DNA, 1092 bp, Cannabis sativa
cattcgagtatactttattacttgtctcgttgtatttcttactagacagagattcccttctatgaaagcacctggtgccaatatagcaaggccctccattagctagagtcaaatcctcgaagatcaaccttgggatcatcatatacatgcattggtttggtcttatcaaatcaaattaaagaaaatggtgctcaaaaatctctggctatgggcaaatttacctccattataggtctcaaggaactgctgtaaatatcattctctgtgaggttctcaaatgcttgtggaaactgaacatatgcaatctcatgacccttttctttatccaaaaagaagtacattgcatctctcactgattctgagtagttcgaatacatgtcacagtccacgttgagaattatcggagcattgctgatttgggccgatactcttatctagtaggacacagaaagattagcttttaagttttctttcttggatagctataaaaaaaagtattcagccaaagaaaagcttaaaatcagtgagttcatcgcccctgctttgaagttgtggtggtattggggtctcttttcacgtgccaaatataccaaagttggcaaagcatgcccatcaatgtccacagccttgggatctcttccatgttccatcgataataatatgtacaaagcatatatgcatgggaaaggaatgagcattcttacatacataatataggttacttgttatttaaccttaatcgcagatggttacttttacaggatttaatgatcaagatcctaatttctacttttagtaagtagagcattaataccatcagaattataatggtagtaggatattaattaatatgtatgaataggtaaatggtaatgcctggataatggtgtgatgatctcgttggcttgaaaccgagtcccactcaagaaaccccttgtgtgttcttcgtaacatttctgaaattttgccaacttttgtagcactttcaattcttgtcttcatgtcttcatataatctctataaaaaagaaaaaaatacatgatttttttcacatataacctaattaatcttcaaataaaaatataactactc

SEQ ID NO: 52529 - DNA, 973 bp, Cannabis sativa
aataacaaaattttaaaaattaaaagaagcaagattaagaaataaattcaggttcgcacatgattttatttgaaagatcatgatatgctgtcaaaagacattagagctagtcatatttttttccatcaccttaggaattccaaaaaatataataacaaaaatactgtaataaataaaatattttaataaacaaacattcagtagaaattttttcttaaaacaaaaaagaaagaaatatataataacttattaacctaaactaaaaaaaatcacttatattgtaatcatgattattattatgtattgatatcgagcattttttgttaaaattttcttaaagttatgttactcaatttgtaaaaagctatataccttgtttcataaataagctttagctatatgagaatttccttaagctttactcaatttggcgggttgatagtataagtgctattcctcttgtctcgagtgatctaaaaaaaacaaatgagtgagcaataataaaaaacaatatatatttcatgaacactaaactcaaataaaaataaaatttgttaaggtaaatactcattaattaaactttttatcaaaataaaataaataaatatgaatgatataaataaaaagtaataagaagatatttacttaaggaaccttgaagccatatcaaattgaaaaaaaaatgaaactaagagaagttaaggaagagagaaatgagtaccacagaaatacaaaacatataccaagtgagtgatagagagtttaaaagataaaacaataaaatacctctctaaataagcctccttgctatttaccttcaaaattgcagcaaagttttcttttttagtaattatcctactacatattatttatatagaaaatgtgaatatatatgcatcaattattatagaatactgaatttaatagaaagatttgtatcaagcgttacgtatatctattttatataaaatgt

SEQ ID NO: 52530 - DNA, 695 bp, Cannabis sativa
atgcttacctacaagagatagattgggttttgttgggaagaagtcgtggccgctttgtgatatggatcccgagactgctttgcatatcttttgggattgtccatgtgctcgagccttatggtttatcagccccttcccggttatcggtggtgtggggatgggtaattcaatgaaggaaaggattgattgggtaatttcgatcttacctggggagcttactttccaatttcgtgctttcctgggttgtttgtttgaaggcatttggaaagctaggaatgatctcctcttcaagggatgttctgctgacatttcatcagtgaggaaagacatcatgggcaagttttcggagtctacattgctactggatatagagttgggtgataagtggtgtgctacgaggggcattctgtctgtttgcaaaatcccaaattctactaatttgatctgccttacgaacgcctcatgtaatgagggtgatgtagggattgttgtgggaatgctcgacagagagaaaaatcactcgttatggttactaaaaattgcagggcctccttagcagttgaagcggagctcatggcaatcttttgggcgctgcatcttggtagggagggaggttacaggtcaattgcaattgcttctgatgcattggtggtggtcaaggcttttggacgagagcaggtgcccaccgatttggg

SEQ ID NO: 52531 - DNA, 683 bp, Cannabis sativa
  modified_base (73)..(78): a, c, t, g, unknown or other
tatgttaagaaatgtgacaaattcagaggcctatgttagaagttcatatttatgttgttaaatcaacatactnnnnnntagatctaagatcctggttaaattaattccaacaaaagattcagaggcctatgttaagaaatgtgacaaattccagagattttcaaagatacctcatgctccgcccaacgaggtaacttagatgcaaagtccgtggcctttcgccatctggggaattgaattgatcggacaattacccaaaggcaaaggaggagtgcaatatgcagtggtagcggttgattgcttcactaagtggacggaagccgaaccactcgcaaccattacagcttagaaagttcaagaatttgttgtgaagaacataatttgccggttctgattgtcgtagaaaatagtttcggacaatggcaaatagtttgacaaccagtccttcactgattttagtgcgaaccacgacatcatcaaaagcttttccgcagcggtgcattccgaagcaaatggttaagttgaagcagtcaacaagaccctgaaggatacactaatgagaagacttgaagatactaaaggaaactagctagataaacttcctgaagttctatggtcatatcgaacaactgaaaaaatatccgaacagactccatttgccatggcatatggatatgaagcta

SEQ ID NO: 52532 - DNA, 1116 bp, Cannabis sativa
tttacttatgtccactctgttatgaatttatatatatattaaaaatatagtttttaatagaaactacgtccactaaaattctctgataaaacgtctaagtctacattttttccccttttctttttcttctttcatctcctattcttcccaagttcttctttcttctccttttctttactataacagagaaaccttctcctttcttctccttactaccttctgataaaaaaaaggaatctgttcaaagctgaaaactttaaggaaggaaaaggaaagaagcaatttttttaagctttcaaggtaatcttttctctcttctttgtaataagtttttaatataactttacttttcattcaaaaaaatatagcttttcttatgtccactctattatgaatttatataaatatatattaaaaatatagtttttattagaacctactcaaaaatcctctcataatacgtctaagtctacattttccccccttttctttttcttctttcttctattgttcttcacctgttcttcttttttctccttttctttactgtaacagtgaagacttctcctttcttctccttactcccatttaaccatttaatccaaaaataaaaaaataaataaaaagaatcagctcaaaggtgaagcctttaaggaaggaaaaagaaagaaacaactttttttttggctttcaaggtaatcttttctctcttctttgtaataagtttttaatatagctttattgtccgtacaaaaaaatatggctttacttatgtccactctagtatgaatttatttatattaaaaatatagtttttaatagaacctacgtccagtaaaatcctcgtataatacatctaagcctacattcttccctattttctttttcttctttcttctcctattcttccccttcatctttcttctcccttttttttttactttaacagtgaagccttctcttttcttctccttactcccttctgatcttaaaaagaaaaaaggaatcagcttgaatgtgaaaccttcaatgtaggaaaaggaaataaacagcttttcttgacttttaaggtaatcatttctctctactttgtaacaagtttttaatatagcttta

SEQ ID NO: 52533 - DNA, 851 bp, Cannabis sativa
aagtttcattgtaaatattatagtaatggcttaattattaaactagttatagtcgggatttatgtaaaaaattatttataattattaatggatatatactcatttggtaccctgtgttttattaaaatatatttagataatgaacaattagtaccatttattcacaaaaactaccactttagtaccctcaatatgtgtaaactttaatattatcaaagtacttaattttaaaaattattattatgattattattattattatttaataatagaaaataatatacaaaaataattcatgtttatcattgcaagagatcgacacggcccctctaattctttatttgagatctatgaaataagaagaaaaatttagagaaagatcaattgatcataaataatggtcttctattattatggctgtttacaattacaaatatacagaaagaggttcttagtatgattaatggataataattgaattggtggtcttttattattatggttatttgcaattaactaatattcatcttaaatctaatttcaacttgcagatcttctatatacatgttatatatgttaatattaattatttttgtactagttcgtgtttcttcaagagtataaataagatagtgatattaatatttttgtaataattgtattttacttttttatctttaagtaaataaaataataataatgataaattaattattaaaatagggtagtttgggaatattaaaattttatttatattaagggtgctaaagtagtaatttttgtaaatagagggtactaattgatcattatctaaaatagagggtacaaagtgtgtatttaaataaaacaca

SEQ ID NO: 52534 - DNA, 2567 bp, Cannabis sativa
gtagcagaattactttatgcttctgcagacgcatactgttttatattttcttatatataattgatatttgcaaaaacaaggtttttcaaggtgtaagttaatttttattagtaggagactcaatgtttttgctgatggtttagctaagagtgttaggctctctagccagaatgctaaattcttccaaagggagggttcaccccatgttggcccatcttttcctttttagttgaatgaatcttcactttcaaaaaaaaaaagttttgctttggtcttatttggctttattttgtattgagtttgtgattaataaaattcttctatcctgataaacatatatatatatattttcaaactactgtactcactaaaagtcacataaaataataaaataattttttttaaaacagatgaattttttattattattaataaaagtatttatatgttggaacttattttaccatgattttaatttactaattatgcctgttgattataaatctactaacatcttcaatataaattattttaaaataataaataacatataagagattagaaatctttatgttggttgcagaagaatataatgtctcatttcgttcagtactctaacctttgttcctttatgttgcaaagtagtaacaagtactgagcctgaatctccttccttaacccgataaaaagtgacgattcttcataatcgtccacaaaggtttgagtatcaccttgaatagtgtgagatgatactcaattcacctttggagcacattttgagagagaaagactagtgaattttgaatttgctataaagaaaggaagagagaaagttgtctgacatagaattaggttagaatagcactttcaagctctctcatcacttagggttaggtttgaatgagatgggcttaaaataaagacttgggcttaaataattctagggacgaaataaacaatgggccatcgagttagattattgtcactttatttcaattaatgaaacaaagtgtgttttttctattttaccatttatctcatctaattatttaaataccaatttttattttaataattataaataattataaaaaattacaatttaagtatatttattaattagatccacgaagtgtcttgattaacaaataaacccatatttctcttttcttctcaaaatggcccaaacttagtaaaaaatctcaaataagacgtagtctattttcaaatttgttatccacgttttcgacattggacacgtggaatccagatcagcatccaaggcccatcagtgggtccctaaaaaaagataaagtgggataggcccatttagacaggaccttccaggaacgtacttcagctccgtgatcggataaccttccgccattgacagctcgtgtccgaaagtaggtctagtaccatgagacaggaagggtaagacaacatgatctggaagactggtctgatttctctttttattccttcacacaaataaggaaatatctatttgccaaatctcgacaaaggattgcatcaagccaaaaggagaaacttcctaaaatagatatcagacaattaattcacagttaattgctcacaatcgtggtacacggttttgactaaatctaaccaaaatctcatttacctagtcaacatatcttctcctttatgggttggacttcacaaggcagcccaaatatgttcattgtaaactttccaatagagaaaaaagagaaactaagtgtaattctcaaaatactataaatacccagtgaattctatggattaaaggttgaattctctggaaaaacttgctcaagcaaacttgagaacttacattgtattccccaaagaattttcaagctaaagagttatataataacattgactcgtggactaaggctagttaacgccctaaccatgtaaaaatcttttgtgtctttcttactttttctcttttaattgtttatttattcagttctgattgtttataattagtttttgaaaatctcagtaaaaaaattcacatttacttgttaaatcaattaattgagtctacaaatattatcctagacaatctggggatcatggacctatgctccaaataagtagatccaaaatttactaagtaaattttgtagcttattaattcatcctgactccattatagattcagaattacactattgattatatagaacgctctatataccaaatatagatacgcaattaattatccattgttacaatataaacaatcattgatcctctatagacggtttacattgagtatagcaaaaattttatcgttttactcttctatataatttatccttgttcaaacacatttattggatttgaaaagttggtatggaaaaaaaaatcgatcaatcgatgagctcttaattaagtctaacataaatagggttcagccacctaattacaacatgtaaaaataatataagttgcaaatattacactacaaaaaattgtaacttttagtgacaactttttagtcacaatataattttttttacgactaaatgtgacttttagtcccaataaaa

SEQ ID NO: 52535 - DNA, 898 bp, Cannabis sativa
ggtgccgttaggttgtaaatattgtttggtgcaatatttatcaaaaaaaaaaaaaatcttgaaccgtatcagaatagacatggttactatctgtataggtgcggattggatatgatcacttgcccgcaagggatatgactctgataccatgttaagaatcatggggttccatctcaaaaccagatttaacttgttccgttagttgctatataggttactacgtggatttccgtaaaaaaactatttaaagtgtaaaaataaaaaaatttctaaatataatactgaatattataatttttaattaaaactattaaaatgaaaaactaagattatctattaatttattcaaaggtgtgatataaaaatttcagtatttataaataaatatttaaattttaatgatgctaataatttttttatatgattatctctaaaatattattgaaaagtagaaattacacaatatatgagaaaattataacagtttacctttttatggcaaaaataaataataccatgagattatgagttttttttttcttttacacatttatatggaattttttatgctatatgtttgtaaaaaaaagatgaaaatctcatatttttaaaacaataataagtttcgtcagaaaattcaccgacgccgaaaaaattaaagtcaccgaaaaagttaccggaaaaagtcaccagaagtagatatctcaaatataaataaaaatagaaccgattctataacataatgaataaaaataatcatacaaaataactcaaaccggttataattgaaatatgaccggttataattaaaatataatacatgcatgtaaaaaataatacctgcatgtaataaattatatgtgatttagttatttatagaaattttcatctacctttt

SEQ ID NO: 52536 - DNA, 881 bp, Cannabis sativa
ggtcttttcaaattttaagtgcaattgtgcaaatgacttaagttgcatccttttatttttggcatatttttttaactaaaataactataccatatttatattgattggaaaaataaaatagtaaaatagaatgccataactgaaatcaccactagtgaataggtttattttatttttacgtacatatattttaattaaatcgtacagttgccttttaattaaaataattgcatttttggacaactaattacatattatcatatatatataattaaataaaatttgtaggaaaatactaatacgaccaagaactcatgtgagtttggtctagatgaattttttaatttaatctaagtacaatttactttaattaaattatctttcttacttttcatagttaattaacttatttgtattgattaaattcctattttaaattaaaagttatttaaaatataattataaattaatttgatcacataatcaaagttaatttattctctctaaacatattctatttatgtttttcctcttatttgtttaaaatctcaaaatgtaccgtgtcaatttcttttgtttcatttgtcaactaagatagtagtttcgaagaaaaaatagggaacatagctctatgaatttaagatctaataaacattattgtaaattatgaagtaaattttttattttattaatttcttatgactccactattagactagaatcacactcttaaagtttgagaatactatgcagcctatagagataggttatccataattataaccaccaacaatcactcaattctctataggtgatctacatatgtgagatacatttttactgttctatcccttaaattattttatccttatagtacttag

SEQ ID NO: 52537 - DNA, 1177 bp, Cannabis sativa
aagcaggcacctaagcaatgacataagaaatttgacaatttagttatctcacacggctttaaagtgaatgaaagtgacaaatgcttttactataaatttgataatgacattttcactattatatgcctatgtgtggatgatctgcttatatttggttcaaatattcatgctgtgaatgctttgaaatcattattatgtgctgactttgatatgaaggaccttggggaagctgatgtaatccttggtattaagattactaggtctgaaaagggaatatctttggatcaatctgattacattgagaagattctcaagaaatataattactttgattgaaacctacttacacacaatatgatccaattgtgaagctgtttaataacactggtgactgtttgagacaagagacacgacattgcctatgtcgtgggattattgtgcaggtttactagtaggcctagtatatagcattggaatgctattgagatggtaatgagataccttaagagagccatgaaccctggcttacactattaaaggtttccaactgtctttgaaagatacagtgatgaagactggaacactttgtcagatgactctaaagcaacaagtggctatatttttagcatagctagtggtgttgtttcttggaagtaaaagaaacagactaacttagcacaatctaccatggattatgaaaatatagcactatcctctgctagtgaagaagtaggttggctaagaagcctgatagttgagatccctttatgggaaaaacatttaccagctgtgttgatccattgcgatagtaccacacttattgcaaaagtcctgtaccattattacaattgtaagaaatgacaaatttgtcgtaagcacatcactggtagagagttcctctgagcaggagctgttatagtggatcatgtacgcactgatgacaatttagcagatcgtttgatgaaaggactagctggagagaaattccataaaactttgaaaggaatgggactatttcccttagaaagatgagtcactcataatggtaacccaacctaatgactagagattccaagaattaggttaaataggcaataacacattatgaggtgatatgtgttgatcatgctattgttatatgagaagcatgaagtcttcaagcgataagaggatgagt

SEQ ID NO: 52538 - DNA, 788 bp, Cannabis sativa
ttaggatgttaaataacatacgtggtagtaaatttagatccttgtaaaatatattccaacaagtttagtgggtactttgtatagtaatatcttatactttaggaatgtcttcatctctatcaacatatgtctttttctacattcatccctataaaatgggaaaatgagtcttcaatatgctaaagcatcgctcagtgatatttctcaaagaagaatgttgataatgaacaactcccttttttctgaaggattgcgatctgcatatttgattcaaatgatatatttcccctcgatacgggaaaataaaaccagacatgtttgtgtatccaaaattaactagataatatttttctaaacaatgttaattgatattaatttttccatataaatattaacaaaaaataatctcaataaacctaataaatttgataacacaccataaggtggagctagaaatttataatttgggtttgtggattttgaaagaattcgtgcatcattagtcgatccttcccatccaataaaaacatatgtgaatttcatgtcaaatgaacatatacacatgacgttttgagctgtattcaccatcccacctcgatatggtatttgttcatcaatgggaacatgagcagagatgtaggtaatatttgaaatatagataatattttgaattgaatcgaatttcggaggaactacatcaaacgaaggtggagtaattaactctttagataaacggcatacctccttcaaaattttcataacgtattcagatgtagttgaggtggagt

SEQ ID NO: 52539 - DNA, 694 bp, Cannabis sativa
gttctcattcaaataacccctttgtaagaatatttgccaatcaacccttttctttctaaagtggcgatccgctcctacatgtttggttctatcatgatgtatagggttatgagtaatactagtaagtgactgattgtcacaataaagttaatcaagagctttagattcaatctttacttcttctagtagtcgtttgattcatattggttcacacactcgatgggccatggctcagttttctgcttctgcattgctcgttgtaacaacaacgagatgtggacttcctatcatcaaccaatctagcccaatcatcttaaattcttcaaccaatcctgtttgactttggactcacttcaaatgttattttgggtttggtatttgaaagttagatgagctttcccattaattgatggtaactagaccccctttaaacattctaattttgtctagccctcttcactaggtcttgattctattttatcgtcaatcaaatcactgctcactttttttctttatctcgttcaataggggttttgctcgacttactacagatcaatcctgtttcttttaagagatcaagagtgtatatcctttaagatacgtaaataactcttttaccttgaaaaagttctttgtccaaaaaatatttggtccaagattcttgacttcaaactcctttccttacatttctctg

SEQ ID NO: 52540 - DNA, 2661 bp, Cannabis sativa
tttgtttgatgtttatctgtatatggttattcactaatctgttacttttaataggaagaagaagtttgttaggggaaagaacatgttggattcacctttggatttctcaattgattctgttagtgataaatggtagttttatgatctattgacgcctgggagatgtttgtctgactctgtgagtatttttatatatatttttgtatctttttttattgtttgtatgtttttttgttgttgtctataatttatataattttctttttcagcatttggatgttatattttactacttgagaaagaaactgaagtatgatcctcgggttactgtttctgcaactacgacagattttaatttttacaacaaggtggttgagttgtatgaaaactttgtgaagtctaagaaaaatattgattctgtgcctaagagtaatatggtaattgagtatatggaggggtattgtatgtatgctaatactcggtggttgtttgttgattatgttttgatatatgttcatgtcaaagatgatcaacattgggttttagttgtttttgatataaagaataggtgtctcaatgtctataattcaatgtggtcgaaaagagatggtgacaagacgacaggattgtatatcaggcctcttgctgttatgttgccaatatgtttgcatttgatggacttttatagtcgaagggaggatattgaccggagcaaaggttggtttagagggaagaaagacagtgacaagcttgatgtgtttactgtgactaatctgcctcagcaattggataagtaagtgtatgtttttttttttttttatgttttagtttgtatatttttatttattttgtttttttttttgtttgttgcagtgattgtgggttgtttgttgctaagtatgctgagttttttatccacggtgcgattgatttacttccaaatccattagatgtgaagttctttagaaacaagcttgctgtggatctgtatgttcatgctaagaagaaggagatcaatgggtacgagtctgaatctgagtttccagggaggattggaagaagtggacagaaatgaaggcttaggtttagaagtggacagattggaaaatgcatagtaacttttttggattgtttgtaaatagttacaatatagtaactcttttggatatatttagtacctttttgtatttctaagactaagtacgatttgctgttgttattttttgccttataatggatattggcaaagtattatgttggatatatattttggatttttagtgtgatatttttgttgaagtttataatgttttgttgtatgtatgttggtttttttttttttaaagattgatattattgaattatttataaaaaggtgattctattatttatttattttttattttttttacaggagttataattagcagttgggtatggcataggaagagtgactgtatttttatgagattaattataattaaggtacacattagtaactgtttcttatatgagatttatgattgtatcttcaaattttccatgtggaaatctttatttgatgttgaattattcaaacagaacatacatgaaaaaagaagaaatttggttgcagatagtaattggaacgtattgttcatgtttatttagtagttgtaggaattcaatgtctatttagtatctttttctctttgcggatggttccaatggttcattcttgcaagtccttcggttgtgtcctcttttcaagcattgtgtgcattgattctgtgttgctttctccattgcggtcttataccgttgttttcttggccttcctgctggtcttttgtgctttggtggcagtacttcaatttgtctaatatgatcaggtaactcccatgagtctcggtcacctattggaaacacagtttcttcgtatgttgcaaggaaggcttgttttgtgtagaaataagagcagaaattgtagcatttgaagtgtctttttgatattactgccattgcatgagaacatggcatttcgtcatattggaatctttgacatgtgcatgtctttttttgaatgtctactatgtacgaactttttaactcattgactgtatatatggcatggtttgatgtttcaacctggaaagttataggaaggtaactgttaagtatttttcacaggttataatgaagtattgttgaaaagatatattacctgcaattttttactgcgatctaatttgtctttgagttccttttctggtccttttgctagtgttgtgagtgtagcaagagctctatttttgtttgtccaagtccatctttgaaccaagcagcgtagacattctagtagtgtgccaatgggtaactctcttacttctttcaaggctgaattcacggattcggatatatttgaggtcattgttgagtaacgcttgtttgtgctataaacccttgtccatttattgaggccaacttcatttgtcaagtaaggacgaattcggttgtctatggtgtctatttctttcatgaatccttcaaaatcagcaagattatatgcttttgctgcacaatagaatgcatctctcagctcatctcctccttttctaaatcttgattttatattttggaatagatggaagcaacataccccatgcatcaagttgggaaata

SEQ ID NO: 52541 - DNA, 889 bp, Cannabis sativa
tcgagatcaacaactaatgtgttagagactcgaatattgtggtgaataaatacataataggaattaaataaaacaacaactaaagaattagaatggcagaatcaattaatgacattaataaaaaaataaatacggaataaattaaatgtaatagagataaaatttaacgaggttcattacctttttgtggtgactaatccatgggaagaactgtcatttagccaagctttattcgatcttcaataatggaagaatacaaagttaatctcatcaacagggatgtcttgcacattacaaatcaactcacttgagagatgttagttctatttttggcatctttaatgtgataaaaatattttataatttcttatttaaattcggctgaggtgtttattatttggtttttatattttgtgtatttaacttttacatttgtgtattaattgatttatacatggaaggaaagttgtctaacttttatatttatggaaaataaggtatagaatgtaattttggtgactcatccattctctatctatctagctgtgttgagtttcctattatgtttgatcaaatctcttgatgacaaaattgaagcaaaacttttattttctataaaaggaaagtcccatttattgctcacgattttgtaggtacagaaatagaaatttctgggctgattgaagatttattttaggaaattgtctagtgggttgtggtcttgttcagaccgtgtgttagctgtcaataaggtgtatattgattataaatacaccttataacagctagatcatgtactattgggctatgtaccctaaataaaactctatttcaatgtaatcttttatattaatttatcaataaagaaatagatttattttcattactt

SEQ ID NO: 52542 - DNA, 2091 bp, Cannabis sativa
  modified_base (602)..(611): a, c, t, g, unknown or other
  modified_base (670)..(672): a, c, t, g, unknown or other
  modified_base (1248)..(1251): a, c, t, g, unknown or other
tacaatttattaaaactttcaatatatttaatctttttttttagaaataaattataaaaattagtattagtcttcaattattaatgattttactatataaataaataagtgtagcttgaaatgctacttctttagaataatctattattttcgttgcattagatcttaaaagttattttatttcgtgaccaaacataatcatagatacgattctagtattgtcatttatttgagcatataatcttgcattaaaaatatagttatttttacacttggatggacttgtatgtacaaatgacttataaccaactatcacttttgctttctagtcatatattgttggatcgatattattgattgtggtctctatattgtttaatttttgagattaataaaattaaaggtatattgttacaaatataaatatttcataatagtataatttaaaaataggctaattaggatttttacccccgaactttgacatgtatcaaatcatgccccttgaacttttaaggtcattaaaaataccactgaactattgagattgttgaatttaaggatgttaaagttcgagggatatgatttggtagatatcaaannnnnnnnnncatggtttagtacataaataattactgaaataatagaattaaatgaaattagacaaaannncttaaatctaacaatctcaatggttcaggtggaatttttaatggcgaaaaaaatgtaggggcatgatttgatacatgtcaaagttcggagtaaaaatctaattagccttaaaaaatttaaatgcatattatgatataattaaaatattaaactttaagaaatagtaatattgtgttataaatagtaaaatacaattataagatatataattataaaattaaaaaagtgtttctttaaataaatataaatcttgttttacttatatatttggatgttccatcttttaattttatttttctctaactttcaaatttttttaatatattaattattttttatataaatttaacaatgaacttttgcatatatttccacatgatggtgttgacattattatttttaaaaatttccctaaaaataataattaaataaaagttgacaaatttaaacgtttttttttaatttattttattcttttaattgcaaggacaaaataccgtgcacaatctttgatacatttaattattatttattattcatttatttatgagaaaaatataataataataataatannnntaataataataataaaagaaaatatctcaaaaaaaaaatatcccaaacaacctttgataataaccattctaacgatcctctctttcccataaaactacttttcttcttcctacatacctagttttatattaatatataaaaggaatggattcaataaacatattttatgatattattcttagaccatcaaattaaatagaatttatgcccaaataaaaaaaaattacccctggattcaataaacatattttatgacattatttttagaccatcatattaaatagaatctatgggcccaaataaaaaaaataataattatccccataaatgtatctttctccctcatctcatttgcatcagttttattcctcaccagtactttatctattagatttcatttattttaaataactgaattggtagcgttgaattgatggtgggacgacgttaactgaagagttttaaatacaaaaatccgattaggcgagggaatagatatagttgacaaagcttttaatttttgtttacttgtttgttttaatttgggccatggtctaaaaatagtgttaaaattaacgtcacattgaacccatcccatatatataaaacttcctttccatcctccactacatttattgtatgatacttttaagcttttatgatttatgattttatatctaaccatcatcagatttttgtacatagaaagttattgaatcattgaatcctcatcagatttaatgaagagtttttagcagatacccattccatttaacgcttatatatacatagagagttattgaatcatttgtgatttgtgcgaataggtgtttgtgaatg

SEQ ID NO: 52543 - DNA, 1408 bp, Cannabis sativa
ctagaagtgatgatggtgtaattttaagtaataattaattattattattatagatttgatgagttgtttaactaggaagttacatatagtaaataatcatgatgcatgttgaccacagatttattcaatcacaaatatgtaaagccataataataaatcagaattgaactgaaaaaaagaaaaaaaaaacagatgaacttaacccagttgagttctttcacttaagtgcgtgcttgataaataataaagtcatcatgagacttgtatttataggctcatagctgtacaagatgagccatgggccttagctacatcctctaagcgattcataagtagttcacacacgcttacaatattaaaataacaaattaaagtcatataacaaaagatcaactacaaataaaggatatttttacttagtttgtaccaaaaaaaagtgtatcaacctccatatggttggtgtgttaaatttcatctgtcggtctcatcctcaaccagaagctctctattattgtttggttggtccccctaaccagatcaccttaatcaacgtctaatacatctgacaccgtgttaagaaataactcttcctaattagtgttaattatgtaatcattggtgtggttgtaatgagtttgttacatcgtttttaaatttgtatttttcaattagtgttggtctcctctttaccaatattaaggccacttgacacatttctattagagcttatattcttttttcagagtataaatagaatatgaagcactcagcttccattgagctgagaaaatcattttatcaaaattttgtaaagtttaacttggtatccagagcattgaaaagtctgcccaatatcgtcccattctcagactcctctgaccaccaccacagctgcagcaagtgttgcaagctcaacagtcttagtttgttcctcaacagaattacactcagtcgtttaacaagttgaactagccatttccttagaagcttgaccaaaagagctatgttctctggaaaacaatagtgtcaactgtgatacgaggacattgtattgatggctttgtaaatggaaccttatctcgtagaattcacctgagctccaactacaaaagatggagaacttggttttggtgtcatcaccatcaatctactgttcgagcattggattgtgagtgaccaattattaatgggctggttatatagctcgatgattgaaggaatcgcaactgaagtaatgggttgtgaatatgcagtcgcattatggaaagctctcgacaatctacatggagctcattcaaaatctagaatagatgatacttgtactctaattcagatcactcgcaagggctcaacctccatggaagactacttgaagcagaacaaagcatgggcagactctcttgctttg

SEQ ID NO: 52544 - DNA, 1043 bp, Cannabis sativa
aacgcgactattcatcgcgttgaccgacgtgaatagtaccatattaaagatattcgtcgtttgtaaaatgacacaaataataaatgatttgcgtcggttgtatatccctcacaaattagataactgacgaaaaaagtataatgattaaaaaaaatacataattagcgtcattttacaagcctcacaaattctttgtgtgtcgtttttaaaccgacggtaaaggatttgcttaagtgagaaaatgacggaaaccctcttaggttcacttacccccaaatttcttacagaccaaaatcattccttcattctgcgtgaacccattttggtcagccgcctcagctccgaaggtcacgcaattttgcagacaaaatttttctcctcagctcacgcaattttgctctactgtgcctcagatttttcctccgtcggcgccgtaagtcccctacgctcacgctgttgtggtctcgatctccttgacctccgtaagtatccctctttctctcttgttttctttgcattattctctctctctcagtcatgccatagctcaagtgcaattttttttatgaacctaaaaaaaacccaacactgtggaagatttttactaatagaaatgttttaaaaattaaagcttttcaactacccaactcacatgaaggaattcttcaacttaatagccctaattttatgagaattaatttgagacagagattgaaattaaatctgaagatttaccgataatggatttgttgggaaaagtcgatccttatgttattctcacaatgaaaaagtctggtacaaaagtcaaaactaggatgagatttttttcagttgttggtttgtatatataaaagctcgtctgtaaaaaattgtatgtttttctcattttcttttttctttctttcattaggttcttaatgataatttgaatctaatatggaatcaaatatttgactttgtggtacagaatgcattgcataaaatgttgattttggaagtttggaaccatgagtcttttgtaaaggtatcgttattcttccctt

SEQ ID NO: 52545 - DNA, 1196 bp, Cannabis sativa
tccctatgctctgttttaaatgtggtttctttgaccatgaacaagtggactgcgggttggaggaggttaaaaccagacacagttctggtgctatggtgccatattatggaaattggctaaaggaagacagtaaggtcaagcattgcttcgaattcttaatggctcatagcatcaagaagcggcaatggaaggtggaaggaaacagtttcatgagaaggtcccaaaccaatggtaataatggagatcgccctattatccaatgtgttttggaataggaggtaacagacaagtcacccaaggagcctacagaactgcagtcagctagagctgaaaaagttggtgagattcgaagttgttgcaaaggaaatagatcattgggagaagacacgagaaaagaggagttaaccttaaccattggagaagattcggtggtccatgggaacaaaaagaattttgttgaagtagtgcctagtcatcaaaagaggtatcaggttaaagaaaaccaggttcttaggggtaatttggagatagaagaacgactggttgttcaaaaggaaaagttataggaacgacagagtagctaataaagaaacgactaaggctgggagtttcccctccaaacgtggatctgaaagtaatttgtctgacacttgcgaaggaaaagaactagattcatcgaaaggagtgagagaagagggacgagaagagtgggcgccagagctgggggaagccagagaagagataggaatggggggaaagaagagggcattatttccagaaaaagaacgccagaggaaagagatggaattagtgagatggaaattgatgagataccggaggggaaaataactaatcgagaaattattcatgggaagaccaatgatgggtcatcatctactaacacataagatggagggggttatgccaaaggttggcacggggaaaagaaacaacagaggaaggagtccaaagggaggaaaaataaatcggccgaggagatggccagactcaaagctcaaaaatagggggcaaactcgacaaaaggggaagttagtagtgcgatttaggagaacactggtgaaggtaagattgatttttctaaccttgaagatttatcagtctgaagtgatgatgataaagcgacggaccttgctagaaaaggtcgtcgatcataatgttagttttgtggtggaatg

SEQ ID NO: 52546 - DNA, 1320 bp, Cannabis sativa
  modified_base (314)..(318): a, c, t, g, unknown or other
  modified_base (716)..(722): a, c, t, g, unknown or other
  modified_base (1024)..(1027): a, c, t, g, unknown or other
taaaataatttccaacaagtgcataaacttttttgggccgatgcagtttccacgacatgctttcttattaatcgcatgccatcctctgtacttaatggtgaaattccatttaaaattgtttttcctaataagtcattgttttcagttgctcctcgggtatttggcagtgtttattttgcttgcgatgtccgtccatttgtcaccaaattagaccctaaggcactaaagtgtgtctttcttgttattctcgtcttcagatagggtatatgtgttattgtcatgatctcattaaatatcttgtttctattgatgtnnnnnttgtagaaaatacaccttatttttcatcttcaactacccctactcgtcagggggaagatgatgatttggtggtatattctgtcacatcctctggacttgatacatgttctgacgagtctcttgttcctttacctgccttggtcataactcccacaatgtctacacctccaccacatctaccactccctcgatctcctatagtgtccccaggtgcccccctcctccaccttctgtttcatgtcctgcacctgcatcttcgtcattagattcagaaatcaaagatgatcttcccattgcactacgtaaaggtaaacgccaatgtacttttccttttcttcttttgtttcttataatcatttttcctcttcttcttgctcttttattgcttctcttgattnnnnnnntattcctaaaactgttcgtgaagcaatatctcatcctggttggcttgctgcaatgatagaagagatgaatgctttagttgcaaatggtacttgggtcttggttaatttaccttcagtaaaataggtcatagggtgcaaatgggtgtttagggttaaattcaatcatgatggaacaattgctcgcttaaagacccgtcttgttgccaagggttatgctcaaacctatggagtggactattgttatactttttctcctgttatgtctaaatctagtgcggaattagaatatagagctatggcannnnctgtgtgtgaggtaatatggatttttcagcttttaactgaatttgagtttaagacttctatttcagtaaaattgttgtgtgataatcaaactgctcttcatattgcctcaaatctcgtgttccatgagcgaactaagcatactgagattgattgtcattttgtttgtgagaaaattcaacaagatctgttctccacgggatatgtaaagtatggagaataattaggagatacttttgcaacagctttgaatggggtgcatgttgattatctttgtaacaagctgggcatgatt

SEQ ID NO: 52547 - DNA, 890 bp, Cannabis sativa
actgtagaactagttattctacaacaagtggttcaaatcccttccagagttgtgggggaaggagggaatgcttggttgtaatagttgagctaagattagagaatcctgagaatgaattaggaatggattgatttgtaaagtttaatggaagtatcaattgtgaaagaaagatggtaactcttggaccagaaggtgaggacccattcgtgtttgtgggaaaggttcaagagtcctaaatttaattaattttagtgtttaaggcaagagatttaatgtggaatggatgcatcagtttcttaagtagtaagatatatattatgaagaatacctacgggaccagaatacgttccaatggtctgagaatttatgagtgtctttccagaaattaactggagttactattaaaatgggagattgactttgaaatggatctggtacttgggtagaaattatatcttaaactccgtatcgaatggtatttgcgattattgaagattcagttacgagggatgctagatgttggcttgaaatttgttggactgggtactccattctggagtacgttagtttgtttgtgaaagaggaggattgaaccttataagaatgtattgatcattggaaatttaataaatttgtgatgaatagtaagtattcctttttgaaggatagaaatggtgattattaagagaagtaccatcttctctgagatcggtctttgatctggttattaccagttgaagttttaagagaagggtatttctaaagcagtttagagttgaatttaacctaagtttacaactaaggttagaagttttctggaattaacagtatgctacggaatatttgttgagggatgtttacactcttagtgtaatacccggaattatgag

SEQ ID NO: 52548 - DNA, 714 bp, Cannabis sativa
aacaacacttgacaagattggtcctaaagataatttggggaaaaaattagagtcaatagagaaatgggatacattctttcgaacttatgcaaggtacacgggtttccgtgttcgaaacgaagatatgaggcaggtggataatattttcacaatgagaaaataggtgtgctctaaagatgattatcaaagagaaaagttcataaatatgccagacagacaaagaacaaccaagccaataacaagaaatggttgtaaggtagccttaagagcagtgcgtactagggacggaacctcttacattgcaaaagaatttgtgtcacaacacaatcacgagacatcttccatttcagaaatgaactttctaagatccaatcaaattgtaccggacagtgtagttgcttaagtaatgtctaggaataaggtagggataaagacttctaatatagtctcgcatatgggattacagtctggagggttcgaaaatatccctttccaactaaaggatgtgtacaacaaggttggggaataaagaagattggaaaattcaaaaacggattcagaatgggcacttggttactttgacgccgccataaggtcagatcccttcttctccgtcgagtatcaagtggatgaagacaatagattggcaaatatattctgggcagacgggaaatgtaggagagactattctgcattcggcgatgtaattgcttt

SEQ ID NO: 52549 - DNA, 2018 bp, Cannabis sativa
tagggccaaccttgccaagttacgccaaaacattcttcgcaacaattttgaatcttcttatattgaggacttcattaacaagctcaaaactctattgggatgaataatggtgagagtaatggtaatgcaatcaaataagaattgtaatatgaattgattacaatatttaatttattgctggaataaacaagttttatctatctatctttctttattttcaccttttagtttggttttttgttgtttgaattactcataaaaattgaaaaaccgaaaccgaccatcaaaccgaccagaccgtaaccgaattttcggttccacgtcatcaccgaatttggcggtcggtttcggtttcgatttttttgacatggcggtcggtaatattcttaatgtattaagtatttcaatatcatactttaaatgataacaatatgtaaataattctatacataaataattatattatatacattcatgataatccaaaaccataacatcatatgtagaaatcataacttttatatcatactcatagaataaccataatactatgaaataaacatatcacaaccatatcatgctatttatcatatcatggccattacatacataatcccgacctatactggctctataataatttggacacatttagccctaccattggtatagaataaggtatctctacattcaacaacaacgtcattgtatcatactttatcataataatgtcatacacgaatcaaacaaattcaaggtagagtatctctacattcaacaaccttaccccgtatcatatcccactatggcccctcatttatacttgagatgttagcatacaacatacaacatgcaacatatacaaatcataccaaccataatatacatcgattcaaaaatttatatattgtgatagatttatttttctttataatatatatgtcaattaaaaggcactatatatgagttaatgtgaatatgaattaatagagaaaaacaattagaaaaaataaataaaaaattgaaacaataaaaaaattagaaaattgattttggtatatatacgtgatagtcaaaacacaaaacaagaaaaataaacaaaggtcgactcaaaaacaatattagacgaattccatatgttggtatatattgggtcttagtaaatgtattgatataggattaaataaatggagtggttgtggtacgtaaaggaaaacatcactccctttaataagttcatcaaaaggtatttaagtaccaccaccaaacaggtttcttgcatttatcttgaaatctcagtatttctctccctcaaataaattataataatctcagatctgttgtgtttgggtgtagttttatttttgagcgtagagatgtgaaccttcttactcattgtattgccaagtatgctttagagtctatagctactccttgttggttaggggaggtccctagttctattagttctgttgcgagcattgctatgaagtaccggtggtgtttagcattttcttggtatgtcgcgtagtgattggttagcaatacttcttaaaagttattatattaaattatataggattcgatatttagttggaccaatagcgatattgacatgtaggaaggtactaggcaccactgatgtccttcaacatttctcttctgttgctgttcaggacttgtggtcctctttgtgagggtcctggtttggtttgttctgcatcttttacttccaaaaaaaaaaaaattataataattctctctgtcatttagtggttaatttctgtctctctcactccattaaagatagtgaaatttagtggtccactcgcacgtcatgtttaaaaacaataaatgtaatcaatcaaactctggataagtttgtacagataattatagataggctaattaatattttggttaccgaaatttttatatgtattaaattatgtactttaaatttttaaagttattaaaaatctctcttaaactattgaaattgttagatttaaagattt

SEQ ID NO: 52550 - DNA, 3004 bp, Cannabis sativa
ttagagaagcatgataagttttgatataaagttgctgagtatatttatgcatgtacggtaatgcttattagcattagttttagttagaaagattctaacaatgaaaaagggaatgattgcgagtgtactagaaagtgtacctgaggcgatctagtaagaataatggtgagcttaccaggctcgtagtttgtattgtgagtatgaatcctctactatcacaagactgggaataaaagtatgctataaagtaagggattatctaggtggcaaggtagtagaacttgcatagttgagctcgggcattgcggtgatggaaaatgatatcaagcatgactgattggtaaagttttatgataatgaagcggctgctaaggccgctaggaaactaaatccaatcaaaggtaggaatagtatgtcacacggaattgtgatataatggttaaacaactaggagttgtcccgttttatgctcaggtgattgagctaacacatactgctgagggagtaaagattaaatcaaaagagatatagtatgaggaaagattcgtgaaagcgaatgttcaatgttagatttaataagggtgcagatcctaatgaacctaaggaaaaggactaaggacccattagttatgggtcgtggatagagaatttaaggtaaccaaagttttttacgtggtaggagcgaagatttgtgaacccatctagaaggtagagatgcaagagacaccagcaagtgaatgctatacgagagcatgctttcagggtggggtagcaggtcatttgaaaagagactgcccacggttacaataacagaaatggtaggatgactgaaagtttgtgaaaagttaatggtgtgttactgactagtcctagtaccttttagcctattggagaacttgttatattttttagtatatggtctaatctctttccatgtcgtgagggcaaggaaatagtggttgtttcaactgtgttgaatttagagaattctgatattatacatgggttaaactggtttgcaaggtatagtgcaactatcgattgtgaatgaagatggtaactcttgaatcggaaggtgaggacccatttacgttttaggtaaggttcaagggtcttgaaatgcattaatcttggcattttgagaagaaagtacattgcgagatggatgtatcaatttttttagcggtatggtgagtgaaaaaatatatatatatatatagcttacacttaaaatgctatgttgaacggtaaccggagatttcaagggccaagtaccccattttggagtatgctagttttgtttgggaagaaggagaatgaaatcttaccagtgtatattgatcgttggaaattaaataaatacatgatgaagagtaagtattctttgccaaggatagaagttgtgatggttaatattaagaaccgttttctctgagatcggtcttcgatctggttatgaccagttgaagattcgagagaagggtattttcaaagtagcttttcatacccgatgattttgcgaatgatatttttaatgacatcctgatttcatctaattcaagaaggtatatgagaggtaattcttggatggtgttgtaatactttgggagcttaagcttcatcctaaattccggaaatgtaaattttgccaacccaaataagtaaatttcctagaacgtaagatgattatagatagtatattgataggttcgacaaggattaaagcagtttaaagttgacttcaacccaagtttacaactgaggttagaggttttctggaattaaccgaatgttacagaatattggttgagggatgatcctagtggaatcaaattgaaagaattgaaatagaggttaactattgtatcagtgttaacattgtcggtcagtgaggagaaatttatgatttatagtgacacttctaaacaaggattagattatattttgatataatccaaagaagttattgcctgtgcttttaactgattgaatgagtgtgagtaatagtaattcagttatgatattgaattgaaagtggtggtttcaattttggaagtttggcacttttacctatttggcaaaactgcaaagtttatatggattcataggagcctcaaatatttatcatttggaaagatttaattaggaggcagtaacgatagttagagttgattgaagattataatggtatgacttcttatcactctgggaagtaaattggtagtagatgctgtaaatcgaagaggtctaggacaagtttgtaaagagaaaagatctcaccaaaggttgttggagatataaccagaactgggattgagttcgtggttagagaatttgttaatatcacattgtagtttgatttattagggagaactaaaatggcccggcagggtgactccgaataataggggtacaaagaaagatatgggaaccggcccggtaaaggaccttttgatttcgtctgaaggaatttcatgatatgaaaatagggtttgtgtaccagtcaaataaggatattgaatagaaggttctgaatgaatcttatattatgtcatactctttacttctgggagtaactaagatatatcacgatgttaaaaacccttttgctaagtatgaaagatgatattatgaaatatgaattagatgaccaatatgtcagcaagtcatggaacgatgggtttctatgattctatctgggtacgtaggaacagagtaacaaagtcaatacaattttctttatcagaacaggatatgattaaaacggattagtgtgctaaattatttgttaaggaaataggttaaccctatggtgcttcaaatgtaattatctcagattgagatttaaagtttgtatctaaatgttgagagagtttgtgacaagcatgtgtgatagatttagaaagttcttgaaataagcaccatccgatgaatgagttttcatataataatatttatgagaatactgttaatgtggcgctgatgtggtttaaagattcaagtt

SEQ ID NO: 52551 - DNA, 1717 bp, Cannabis sativa
  modified_base (542)..(544): a, c, t, g, unknown or other
agaaactagatggaggattgttgcagatcgcccatgctcgctccaagagccttctttttttgtttttagggttccatatggtctcccctctaaaatttgcaattccctttcattaaaatagagtttttcagcccaaaaacgagaaaagacgaagttatccttgacctgtacaaagtcggcgctgcggcgcccaatatcctcactgcgacggttatagaaaagtgcaaagacgggctttctgtagtcccccgctgcagcggcaaaaagcaccgcctcggtcactggaccaaattttttctacttcgacctctttcagtaaaatgggcataactttctcatacaaactccaaatgagctgattaaaaattagttggaaagataaaaaaaatgatctataacttttatgttttgactttgtccaaaatatgatcaaaacatagtcgaattgaggcttgaagtttcagctttattctctttcaaaattttctctattttatagatttttttttttcgaaatttgtccaatttacacattccaagtnnngaaacctgaaactaaagaaaacaatcataattatattacaaaaattataataaagaagaaaaaaacctataaaatgtgacccaaaacttacgctaaaaatagcctaacagaaataaacaatccccgacctgggaagaatctggagctagccactgcacttaaacctcaaccaagtcaaatacaaatctctgttcgaggatgctcagtcttggaggggcttgggccttagagggtcttgattttagtgtctacccttggagcttctcaaatcttgaggagctcaaattttagagtgctttggcatcgacgcatctcgccattaaacttcaaagaaattgtaaacaacaacggtatcggaacgagatcgcaagtcctatgatccacaaaatcaagcagatgaattgttatcaatacgagaagcagaattgaagaaagggtaaaataaaaataataaaaaaaataataataaaaaaagggtattgcacaacctcaaatgccaaggcagaggctagaagaatttactgaatgtgctgcaagcagcgattacatgttgtttcaaataatcacaaagacaaatccatacggcccagttgtagaatcaacgacaatcatggagatgtgagaaactcagtgtagatctcaagggcttagctagaaaaataacatgaagacaaaggaaaatagaaacatttccattatcttcctctacggaggtctcaatacgaaggtcattatgcagcggtggcaaatcttacacaaaaatacaatggcagcaggcgatgaaagtaatgacatagtggtgaaaattgcattaaaacgaatgcagcaacaagaatactcaaggaaaaggaaaataaaatgctgccacccacctgcttgttgctctattcgtccgaggaaaagatgatcagaggattcaaagagctacctctgtgtttgaattaaaacgacaataatgaaagtgttgttgtcccattaaaagagaatcaactttgtattgaagtaaaacgcaatatcagagaatgcgtaaattagaaaagagcattattattgagcccttgtagtgcccagtgtggtgtgctgccccatggcacacctacaatggggccattttgtaacatgagcttgccttggtgcttgatcattagtcgagtcttgcaccaagcacctcat

SEQ ID NO: 52552 - DNA, 984 bp, Cannabis sativa
cataaaacccaacagtaataaccattacaatgtaatgaattacaaaatttttaaaaaaaaaacaaataaagtaatgaacatattgattaccattacaattcccatttctataaactaaatacaccgttaatgtaaaaatctctattaaataataagattcatactttccaaaaaaaaaaaaaaacaattcacattaaaatttatggtcataataattaatacatactaatattttatctaaatatactattacttgttatttaataaaatagtatgaacaaaaagtactaagaataatgtggaagaaaaaaggttttgagacacttaacaaacaaaaatgtcaccaatactattagtaaaatgtgattttattatcttgaataataataaatgtacacagtaaagtgatttatatagggggatatccaaccctagaatacacaccaaacccaactaagaataaccttatctctatacccaaacataaaatatttatttaatatttaatatgcccccttaagatggagtgtacaagtttgtaatattcatcttggaaaataaatcctcgaaatgagatgtaaaaagagacttggtgagaaggttggtaaggttgcgtttggtgttgacatgaagaagcttcaactggccactttgtacccgttcacggacgatatggcagtcaatgtcgacatgtttggtctattcatgaaagaccgggttttcggaaatatgaatatcagctttatattcatgaggactagatgtggatgagagatcctaaagtctttcaacaaggcgagtaaccatagtatcttgcaagtagtgccatggtgcagtattcggcctcagcggaagaacgtgaaatcgtgttttgtttcttggatttctaagaaattaaagagtctcccaaaaagatgcaataacctgtgacagaacgtctagtataagggcaagcaccctagtcagcatcagaaaaaactttaa

SEQ ID NO: 52553 - DNA, 1355 bp, Cannabis sativa
  modified_base (610)..(623): a, c, t, g, unknown or other
atttatgttgaaaattaatttatcaattttggatcaacataaattaaaataatttttcataatttattttattttattttaagtcaaatttcaaaaaaggtatttattttaaatacattgaattttgaattttactatatatatttattgaaaattaaatttgagttgaaaattattatttttaattaattttggatcaacttaaattaagtaattttcgtaatatttattgagaattaatactaagatggaagataattttatttattttcagatctatctaagtataattttataaatattgaattaaaatatatatatatttagaattttctatattgttaatttttattaaataaatagattaaaataaatattagatgaaaatacactttaattaatgagctttattataaggatattcgatctccattgttgattctacacaattcttgtaatagtgagattcatccccaatagatggacgttcattagcaatttaacaccgtagaatctcaaaatataagtattattgtaactgttttattcttagtaacgtccatccgaatagtgactgctaagagtaggacttacaaagtatgaaacaatnnnnnnnnnnnnnnaaataagaatgaccttgactctcaactaaaatgaagcaatgtcgaattcgattttcgatcgaataaaaagtaactagaatggtgtccattttagttgagttgactgctctattcaatgaatgatatctatgactctcgcccaatacgaatcactgtatcagtttgttggaaacctaggaaattatttaggattgctttttttttttttgtattttcacttgtcattcctatttgctaaatgcttaataatttttgaatgtgtatgattttgtattaaaccttgatttctatttattgatatttgtagtacgcaatatgactatgaccaactactccataatgtcactgttgattgacaacaagctctctggagctaactttgtcaaatggaaagagaatattaatattgctcttataggtgaaaatgccttctttgtgttgactgaagaggcttttgagcagccaggtgagaatgtgaccaaggtagttaaagaaaagttcgagcattggcagaatgctaacaacaaagctcgatactttatgctatctagcatggtcgacaccttgaagacaaagtttgctattagtcttacggttgtagatatcatgaaccagttaactgaactattcgagatggcatcagatcaatctcggtttgaggcgaccaagaatttcatcaatgcacaaatgaagcctcatcaaaacgttcgtgatcacctgctccagatggca

SEQ ID NO: 52554 - DNA, 514 bp, Cannabis sativa
aatttattaaagactatttagcagtctaattattatgacttctcactttcatgacttgataaaaactatacaccgaggtatacaaagatatttaattaactacttcaagtagcaattgtatttaagatttctttaaaaagcttttcaaataatcatttcatgattcttcatcactttgaggaatctaactatgttaaattatataagatcacacacaaaatttaatataatattagtaaattatatattcacttctacgaatatacaaaactaaattaagtaataaatgtatatgtacatatcttatactaacaataatataatgaataaataattgtatataatatttaaatgaataaataattgtatataatataatgtataattaattttttcttttgaaagaaaatgtgcttcacttccagatttgctagatgcaaatgccatttaattaaaaaaaaaagaaaaaaaaaagggcttatagctagctttgttggacatgaaaggggtttca

SEQ ID NO: 52555 - DNA, 1642 bp, Cannabis sativa
atgagctcttcatcccactctctttgattcactttcatcaaattttgaactgaaaagttactcaagctaggatgagtagatattacaaaaggattagagtcattaggcaaccatggggtccccaaaatactggtacgttgtccattaccaattcgaattcgggcacactctttgattaaagattgtgtctcaaacaagcttctccatatataactcgggttattaccaagtgatgcattcaggagagatcctcttggataatatcttgctttgaagaggcgaccaacaagtgagttttcctgctgcaacaaacgatgcttgctttcccaagagtgacaaattgtaatcccgaagactacggaatctcaagcctccaacactcttataaatacacaactgtgaccagctgacccaactaacaccacgagctttctttgaattcaaaaaaaaaaaaaaagctcagagagaaagatgccacctctttaactttctcaagctacttagtttaacttattagatgataaaactttttagttgaacattcaactactaagtttttaagtaaaattttaatagatgataaaacttatttgttaatatttaactaataaattttttattttacttaagttgtatctataatttataatctataatctatctataactattgtataaaaataaatgagttatggtacagttataatctatctataactattgtataaaaataaatgagtatgagttataatctatctataatctatctacttaagttattttatcatttagtatagtacaattatttggtttaacaaattttacttttttctgttaaatttaacattaaacaataattttcaaaaattttaaaataataaataaataaaaatattggcaagcagttgaattaaatcctatttttttttaaacagttttgaatagttttttacgttcatttcccaataaaaataaaaaaaaataatattctaataactacctaaatttgaatgacatatttagtttaattttattcttatctataaataaataaaccctattcactttgagttgcagccataatctttagtttagctattatccatttttatttatgtattggtcataaatattggtggtctccatacttcacataagatattcccagaatatcagtcgtggatccaacttttaaaactgcttaccattttcaaccttaaaaacattggattaatagtctgttcttctttttaattaatacttatcatgcatgcattgatcgatgcatatatatataataattttacgtgtgattttttgtttctaaatttttattcaataaaattagagttgcatatatatattgtatacatatatttatttgtactattatatatattaaattttctttacttggtgaatggtgatgaattcttgtttaatttttgttcaatgaaattataatatgtggtatattctgcttttctgcagtggtgaaatcttaattttttctattaaagagagaaaatataatataattattactttttgcaattacagaaaataaaataataaaaaatgttaacatcaatgaaaatgtatatatagatctactaactctttgtgtttaattattattatt

SEQ ID NO: 52556 - DNA, 1127 bp, Cannabis sativa
taggaaaattaaatttgaggggtattttgggtagaaatgagtattagtggaattgttttgtacaaattaatggagggtataaattttgatatatggtattttattatggtcaaatagtgaaattttccttccaaaataatatgcttgaatgaaactaatctcgaaattctttttttttttttcaattttcttgcgttttaaagtaacattttagttacttatgatgctgataataaaccaataagtaacttttcataagaaaaatatcacttttatattatataatttgagatacattttggttacctctaaaatttatatgtatccactttaataatcaattaattatttaagttatattaatatatttgagtaactttcaagtttatttttaaaaataataaattgtcatccagtaagttacgattttagtaaattgtattttaaaaaaatatatatcataaatatttaagtcattgatatttttaaatataaattgatatatgcattttgattagttaaacaaagaatgatattacaaataacttttaactcattacaaatacaacatttttttggaccaattagttatgatttctgtaagataccaattggttacttctgataaaatcatcaattttaaataaaaagatgatgaccagaccaaaaattctataattaaatatgtctatactcatatatgtcaaataaacttattagtttattttggcatattgaaacaagttttcattctttgtttatatttttagtataacctaccatcatatatgctaacaaatctattggtttattttgacatattgaaataaatttttatttttcttttcgtatattggaacaataagtcatttttattttatatagcctaccattatatatgtcaataaatctactagtttctgtttgtttgaacaatattttatttttttcaatacagaataaactataattaaacaaaatgatatacaccaataaacctattagtttatttttcatatattggaataacaattcgtttttctcaagccacatcaaatctgattgtatacaaagtatataattgtaacatgtcttacatactcacatagtaaacctggataacaata

SEQ ID NO: 52557 - DNA, 1357 bp, Cannabis sativa
acccaacttgaatcgtcttcaaattcctctgaaacagataagttttgatgactttctcaatgaagatgagaagaacaagatcaaccagaaggaaagaattaaggttcggttcattcaacccaacctcgaaccattaccaggagaagaaaccaacatcatcatcaaaagctgcacacatcgcattgttcaatgtcgaacacaaaataaaaatcgagtcttgtcaagaaagaaagaggaagggtctctccatctcactccctactccgaagcgacgccggattgctcctactccttctgtccagtcctatcgtgaagaaaccaacaatatcaacttgaaaagccaaatacaaaacgagtcgtgtaaaggtggcgttattaatggaccagaccctccacccccaatatctgaagaactttcctacattatccgtactatgactcttcctgatcatcaacaacaatctcctgatctcaaatttgttattcagaggaaactttttcaaagtgatactcaacccaacttgaatcgtcttcaaatgcctctgaaacaaataagttctggtgactttctcaacgaagataagaagaacaagatcaaccagaaggaaggaattaaggttcagttcattcaacccaacctcgaagtagggccatctcaagcttttgagaggcctagggcgaaattaaaataataagccttttttatatgaattatttcattaattaaaattgacaaaatgtttatattatttcgaattaacatttctttttatgtttgtacgaattttaattttttttacaaaaatatgaaatgttaatttttcgttgtttctaaaacaacattgcttttatgttgctgatacacaaaaacaaaaattttttacccaaaaaaaaaataaataagtgaaaaatctataaaaaaaaaagttagaaaaaaaaaatgtatgtttttaagtatattgttaaatgttcttttttatattctaaaactaaatattagataaaattaggtagtttttattcttatgattattttttttttttggcaaagtactataaaaaaaatatatatattctttttttaaaaaaaaaaaaattctgatgggataaattgaaaaaatatatatatttataagaaaaaatatttagaataacatgggatacgtaattatcttatactcttttttaaaaataaaataaaataaaaaaggcatataatttgtaaaaattatataaaaccctataaaatgtgtaattttacataaaaatttgacactaataatttaaatttctaaatcatttacacaaataaatatttcttcgccgtctgtgttttttttttataaattgttactgc

SEQ ID NO: 52558 - DNA, 794 bp, Cannabis sativa
tcacattcataaatatatatatatgtgcgtatagaaacatttatatatatgcctcctaattcatcgataaattcatggaagaacagtactgcttcgtcatacatatatacataaatatatataaaattaaaaataaaaaaataaaaggttttcaccgtgttcgtagcgtgcgtgtcgaaaagaaagagaaggcagagttgaatgcataccgatcgtttgagaggctgttctactaagctgtagacaatagcaatggaaaaccttcagaacagagctttgatggcggaagacagagagagagagagagattagtgtaaagatgaggaaaattaacgaatagaaaatgagccttagatggtgagcaatgtaccgatatttttctgaagaagacgactgaaactcgacctgagataatggtggaagtattctttgaggttttctttttcttctctgaaaaatctgaaaagaagttttggggtatactagcaatggttgtagttatataatatttagtagaatattgctattgctgatataaatctgttattagtatttaccagagaacaccaccatgcagtacagcactctctactcacttgaaatgacataaatatccccgacacaaatacccctaactacaatactgtaatagtacactataatatacactattaattagggattaattaatacaacttagaatatttgttgttcttaaatgccatccgtatattaattacaacacagaattacatgatttaattatggaaattaataagactcttcttttccta

SEQ ID NO: 52559 - DNA, 1002 bp, Cannabis sativa
  modified_base (709)..(710): a, c, t, g, unknown or other
  modified_base (817)..(820): a, c, t, g, unknown or other
ggagataaaatctagttgaccttcaacttcatatcataggcaaaaccaaaacccatactaaaacgaaaaatttcaagaagaaaagaacactattcaaaggtatttatcattttttttactaaaacgaaaagtaaagttatcttgaaaaaaaaaagtaaaatgtgaaagatacttttaaatgttgtttgagaatcaaccatttaatttacttttaactggcaaaaaaaaaatattgaatgaaaaagagtattgttattaggcaccagtggtgattagcacctttttgacatgttgtgttgtgattggctagtgatacttcctaaaagctattatattaaactacatgagacctgatacttagttgaaccaacataggaagttgcaccactgatgccctttagtatttctcgaatgaaaaggctatcaacccaacatataatcaaattaagtgcacctaatatattcttaaaaggaaactccaaaaccttataataagttacattcatggtaaattgaaatgtcgttgagaatcataggattccatctcaaaatcaattggtgattagtggagtagcccatgttcttatatatggctcaatatttttacatttgatccatgtgggacaatattgtcaaatattcgccgtcaagatggttgttatttttgctcaccaatcttgaatcaccttatcataagtagtgtcatttnntcacttatttttgtttgttttgcgactgggaattccattgtctcgcttattcttgtttgcggctggaagtaccattttgcttgcttgtggctggctaactctttgannnntgtggatcgaaagcccgctagggatatgactctgataccatggtgagaatcatgagattctatctcaaaacgaattagcaatgagtagagagtagcccatgttcttttatatggctcaattctctaccatttatttcacgtgggacattgtccacaataagaacctctatttaagaatactc

SEQ ID NO: 52560 - DNA, 1394 bp, Cannabis sativa
gctcccagaagaatgaggatgttattgaaacatgattacataatagtataaaaatgaattttctatttctttcaagattttgttattaatttctgcccaattcactttcattcatatgtcaacatgttttaatccttatgactcttaaaatgctgcagtaatttggcaataatatatttctttacgtgaaaattcagtcactttcggactatggagctaatccacagatgctctttacatacacagaaattactaattaaattcatctgtaaatagttatttattgctataattatcaattttctagatctaccaaacagagtgatgttatttgttgctgtgttaatattacaaaacaacatcacatggttggtaggtaggtcagttggtgcttctaatcaaaatataacccttcagttggaggaaaggaccaaaagtgttgtgggttttgagtaggccatatgttattctcaaatctatgaggggctcttattcataataaatccatgtgatttatggtgtgactgattttcaaattaatcaaatatatggatggagatcagccattaggaattatttaaaattattgtgttacgatcttcaatataaaagaaaaacaatttttccatgtatagagtagaaagaaaattattgtggttttgaactattctttttgacatattatttaccataaggattagattcaagagcagaacaagcattccattctcttgtaagttttattattattattattatcaatttctctaatatgacaaacaaatggatctcctgaattaagaaacaaaattagtgtgatttaatcattcaaatgaactatcaaaagtagattactgatttgaatcttcttgttttcaggactaaaagtatttttcacataaatattattttctgtgtattttcttattaaattaaaataaaaggaataagctatacataatgttatgtggcactattaagatagacaatggctgtacaagttgtacagctggtactgatatgatcaattggatgagcagataaagattttaaacaaaagctgctttcatttcaattataattatctgtgtgacccttcaaattggggcatgtcttagacatctttatacaaattttgtgatctgtgttggtgtggtggggttgggaattgaagagcaagaaattttcaaagaaaaatgaaattatgatgagtaggaagacagtaccatgtgattgcccaatggctaatgcctcctcaccagaccccattgattcttcagtctcatctgtcctacagcattattggttatatatactcatcaaaataggtttcttagcaccacaagccttcacattctaaactatcaaacttttctttcttctctgtgatcttt

SEQ ID NO: 52561 - DNA, 871 bp, Cannabis sativa
aaagttcgggagaaaaaattgctaattagccaaaaatttatattaaattccgaacatataaataatcacaaattatagtgctttttttttttttttttaaattttcttaactaattaaagatatatattttctattttttaagaaaaaaaaattaaaataaaaaatacattttttaaaatcattattttgtgaataaaaatgacacaatttagtagtgttcaaagttttaagggacaaaatttctccttcatcaaaacttcactttctctattttaccttacacaattatattacatcatatatcaacttctctatattttctctatttcatttatacattatttatttaatatatttatttattttaaaaattaaattaataaatataataatattcacacacatatactacaaaaaaaatatattaatataatatttaaatagtatttctctacatgtaactaaacacaataaactaattttttttagctaaagtagctcatttaatagagcattatttttcaccaattttaacctcttaactacattatttagctattagctattttagtctacaatgtaacattgattgcgttaacgattgtcacattagcatcaaaactgttatatcaatattttcttaactacattaattaggctagctcaagtggtcataatagaatgcgtgtgtgttagaaattttgtgttcgaatcctaaattatgtattgtaatatataaacgcttaaataaaaaaaaaagatttcttaactatattaaatagaatttaatataaacttttgagtaatgtgaataagttacttaaaattttttaacatgatacacgaattgtacattacggctcactcaag

SEQ ID NO: 52562 - DNA, 940 bp, Cannabis sativa
aggagatttatttgattaagctaggtatttttctcttcaactccaaccataactcaagtttattgaatctaatctaatcaaataaatgtgtatttgtggaggccgtgaaagaattgggctggtttggtttgtttatataatgagttgatcgatacacaactagtgctatagcttctatatgtgtggaaagatatttgcaaattttaataccgcgttgggtccactaatattctcattttaggcctcacttcattttcgttgaattgatgcactggttgaaatttgatgagacaactccatactaattagagccattttatattttttaacacttaatcatataaattgatttttttgacggcaaaatctattcacatcttattcttttttgttctttacacttacatctaaaaactccagtgaagtactacaacgtactgcccacgtctatagtagtatacacgtaacaaatttttaatagtctgcataatattaattattaaaatattataaaaaataatttaaaacttataaaaataaataaattataaataactatatatttttttcttttcattctttttctctttatctccctgaaaccctttcactttccatagaccacacccactaaaaccctagctcttttctttgtgaggtagccttcctctactaccaccactaatccttagcccaaacaggccacaccaattttatcctcaaccccgagaaacccaaacccccaatgactccctctcgtgtcatcgtcctatctctcttcctgatgaccgatcccccatttgttttttcacctctctctttctcatcgacaaaaaggacagacagaggtcaatggaggtcttgggttttaccttttagacacatcttctcctttgttgggatccatctttctttccttgcaggtcaacggaggttggag

SEQ ID NO: 52563 - DNA, 3339 bp, Cannabis sativa
tgaaatcatcaagtcatacgatttggacacagtgatccaagcatggcaatcaaatttgtgtttcacctcatcatagactttcttaacaagagtagtcttgccaattcctccttggcctaccactgatacaatcatacgtgctgacattccttccaccaaagagcttttcagtttcttctgagccaaaggaacatccaagtattcatcatattgcccaacaaaatgagaaccaagtcgtgtgtcttgctcttttatgcacgaattttcactagttgacccttgtactctctgtagagagtgacccaaggcgaatccttggcctgtatctttgattctccgtaaagataagttaatgtcttgaatatgtgaagacaaaggataacgggatttcaaagctttgattcggccacctatgttgtaaaaaaagccaatgaaaccactcttgtcagcagtgccctgcgccaaatgccatctgtattcatcaacaacatcctctatacgatcagcttgttctctgagctgtttcaaccagactttcacagcattactggttagttccctttcatctgtgtctttgaaaagagattgaatgatctctagttctttctttaagctttctacttctttatggacactctttaaggacttaacttcgtctttaagtagctgaatcaagctctcgataactggagtcaagaacgtctcagccattttcttctttgatttataacataactcccctttgaaagagcagcagaaaaataattcctttaattattaacgaattatttcagcacaaaattatgaaaattaaataaatgaaagaactatttgaagaaaaagaaaatagttacctgtagaataagcagagtgaatagtcctttatcagtgaatattgaagaaataactcaaacttggcaaagaaaagaaaaataagatagtaaagaagattatggatatccagaaggagaaaaggaaatgaaggcttggatttttctcttttttcttttctaaagttgatcccacagtcaacgttttttaagagttggtgggcaaagaaacaactagctgagtgtgtaacagctagatgacataaacaactagctagctataataattgtagtgtacaattttcgttattgtagggtaaacatttgaataatatggagaattgctaacctatatctatgtcctctagtctggtctcattttgtcgaactcatcaatacatacaacaacactatctgccaaaaccatgtctccttcaaatttgaatctcactaccccatatcgcctttagattagctttttccaacataaatagagttaatcaaaactttagaggtaataaaaataacttagtaaacaattcacttgtgaatggtcaatcatccccagctctagcaaaactttttttttgtatcatgaattataatttataataacaaaagagagaaattaccttctaaatcagcgagtcaaatataattcttttgctaaattttaagatgctaagaaaagtgcctctaattgtcatgcaaagcaaagagagaatgttcaatttaagtaacggcatgagatttatgattcataccctaaacataatagcatcaaaaaccaagttttttcatactgactgctggctggctggtctcaagattctcctgaattcaaaaaattcctttcaatgagtggaaaattcttttgaccttttaaagaaaccttacaaacaataatagttacagagagaataacataaaaactaagggagatatttgtttcatcattctgttcattacaacaaacactttgccccataaacctagtggtactatatatctcctctaatggcacaattaaattattcatttaatgttcaatattggcaaatgctgaattttggagtaatcaggaccttcacttggcttcattcgatccataaaatccattgacatgctccggctaataaattcttttagctttggtagatattgaataccagagggaagcccctccattaatgggcaagaatttatgtacaatgttgtaagaagaggcaatgctcctctatctatcttcatcaacttcaaatttggcaaacatattaagtgcaactcgttgagctttggaaaacatccttcttcaaagtgtagttggtctccttcatatgaattgtcacgcaatcgaagacttattagattgggcaaatctttcagatatttaagtggattcactgtcaattttgagccatataaaatgaatgcctctaaattagtgagatgtgaaacccaatgaggaaacttgtttaatcgaccagacaattgaagcacctccaacaaaggaggaggagatgatgaaattggttccaaatctaggaactcctcagcatcgttagtatccaaattcaaatatttaaggtgactcaacttcttggctacaacaccacaaacagctctagaagattctttagtcacattcgtcacacccaaactcttaaacttgctcaaattctccaattcctttgtgaaaccaaccacgtcttgatgcaattcaacaacttttagctcttctaaattctccaaattaccaaatccttcttgtatcttcaccccaaacaaatcacctgacctcccaggtaagtcctttatacgcgaagcaaaaagacttttaagattgcaaagcttatttatctcctttggtagctcatgtaagagggtattgtggagattcaaagtaagtagattgtgaagcttgcctaaggattttggaagcttatcaacctgggtatccttgagattcaagtgttgtagattatgtagcttaccaatggactcaggaagagctttaatttttgaaaagctcaaatctaacaacctcaggtggaacaatttacccacttccttgggaacataatcaagagtttcatcgtttatggccaacactttcaaaagctttaaacttttaaacaaagcaaccaaaaaatctttaccactccattggtcatcgtcattaaagttctgaagaaagattgagcgaatggttgtgcattgttgaattgtttttataacagattttggtatgcttccatggattgacaagcgacgacgaggtttgttttcctcaaattccgatttcttagttgtcaaaatttgacaaaaacataaatcctttacctttaataggatgaactcgtgcatcaaatcatgaaccttgcaccctctcactcttccacccatcatctcaattgaaactaaacttctctccgcaagctcattcaagtatccttcggcttcttcctctaatgattttccttcccttgcttgaacaaaaccctcagaa

SEQ ID NO: 52564 - DNA, 1574 bp, Cannabis sativa
  modified_base (213)..(213): a, c, t, g, unknown or other
ctctacccatttgcaatatgaattgatttaattggggcactacccactgggtgaggaggagaaaattacgcagtggtggctgtcgatttcttcacaaaatgggcggaggctaaacctctggtttccataacctgcaaaaaagttctcgactttgttgtcaataacataatttgtaggtttggaatacccattaagatagtatcagataatggnactcagtttgatggtgaattattcattgggttccgcgagaggaacaagataatcaaaagcttctcgtcagtatccaggcctcaggcaaatggacaagtggaagctgtcaataagaccttgaaggatactatcgagaagaaactagacgctgccaaaggtagatgggtcgatgaactacctcaagtactttgggctcataggacaactgagaagatagcaacgggacatagtccattctcgctagcatttggcttagaggcaatgttgccagtagaagtaaatatctcgactcacagacgagagttttataatcaagaagaaaaccaagaacttttgaaattgtccttggatctacttgatgaaaaacgtactgagtcgcaaattactaattcagcataccaacactgagtaataagatacttcaacaaaagggtgaaaaagagactcttcaacattggagacttggtgctaaggtgagtatttgaaaatacgagagatgcatctgcaggagtatttagcctaaactgggagggtccttatgtgattgaagtgatagtaggaaccagggtttacaaatttgctcgattgaatggctcgctgataaagaactactggaacgtggaacatttacgaccatactaccaataaactaatgctataactcatatttctaatgtaatatgttgaacttcaattattaataaagttgaatcattttttcaagtaattacaaagtatcatcctttaaaattacttgaggggcttatgtgtataattaaccagaatttatctagaaatacatgatatattacaaacccattactttagcattttttttaaatttttgattaaagaacatttctgacgagaaaaggaaaaaccaaaaggttgaaaatgagatataactcataaactacatgtgcagttgaatactaacggctcacattttgtgggaaagtattaaacgagacaccaagatgttttgaaaaaaatacttaaacctaatatatgaatagaagacataactattcatgtaagtaatcaaaaatatacaaagtgaagaatcattaaaagtatattcaagtttgcttaaaatagattaaaactgcttatgcgaagcagaattgataactgctcgcaagtcaaaagcatagcagataataactgcttgcatacatagtagattactaactacttaaataatatcaaaggaaattacgagcaatggaaaggcctaaagtattttaaatctgatcaaaatataattgtttaagttaatgaaatcgcaaacaaacagatatattaagttcaaatataaaagtacgaaacattgaataaaagataaaataatagcaagattg

SEQ ID NO: 52565 - DNA, 1863 bp, Cannabis sativa
gcgataggaacgcaacttcctggacctgcgctccctgctgctccacaaactagcggagtacaattttctgccactacgagatatactcataatcttgccctcactccagcactatcacactgggggccccagtaagcaatccgtccagggtgaacaaaacaacttccagctcagtccgtgccagccacaagcatggcaggattgccccaaagtttctggagtaagaggtcttgtaaaggtagtacgcggtccgaggacaaaaggcaaaggggagggtatgcgccccaatatacacagtacaccgagctcacgaacacccaagaatgggtatacttcgcgacttggaaaaatacgcattaccagaaaactcctcctttgtatcgagatagttcccgaagagatcccaactgtgactatcacaacgacatcggtcacaccactaacgaatgcaaaaatttgaagcatgaaattgagagtttgattcgattgggccacttgtacgagtggatcaaaaacaggttgccacacctgaacccggcccaaactggagtctcagtgcctcaaggaggggtcacagtagtattggaggggcaggtacctcccggagggatgccccatcaacaggcacccagactacccctggataaatggaagggtcgctatgatctctaaaggtcctcatgttgggggaaccactagaaatgagctgaagcgttacgctggggccctgaaacatgacaatgagatatgggaagtcacttagcttccggctcagaggcccaaactcatggatcaacccattactttcactgaggaagatgcagagccagtacgctttctgcatcatgaccccttggtcattgagactctaatcgcaaacaaggtcgtggcctgaatattggtggacaatggaagcacagtaaacctgttgtttaaggatgctttcactgccattagactcactgacaaagattgtgatgaacacaatcgaaggaggagaagatccaggttcagatcttgataatgctctgctatagacaggaatcaagggctagagatttgaatggaatgagtcattttattctactgccatcactatatggattttttaatccctaatgtgtttattgatcgtttttaggaatttcatagttaggatgttagattatacaattacaatcaatatacatgttagtaaatttagatcatagtaaaataagtttccaacatcatttcccttagcacactatcagaaagattcatgataatggctggtcgagcttactttatcaaagtttttgcatcacctttcttggattcatctgagtctttctcaaccttctctatcttttcttttagtgttgaatccagtttttaatagatcaacacaaccatcatcttctccttacatagactaaagtttccagatccatcaaatctttcgaaatcgaatctggttgatgatgattccatttcaactgctttcttgaattcttgataatattcaaatcaaatcttcgatctacacaacgactgtagtaattctattatagaggacttaacaatttaaaagttaatatcaaacataaatcaaagaaaaacacaaactgaaatcaagcaaaatgaaaaaaaacagaaaagtaagaacaagagaacaaagagatttatcctggttcagtcctcaattcaagacctactcgagctctccctcgagaaattttctccactataataagctgattacaatctccaatgattgtgtacacctcttaaaacaacacacaaagaaatcctcaagaactctcacactcgaactcacaaaaccatacaatgactattataatttctctctttctctttctc

SEQ ID NO: 52566 - DNA, 2018 bp, Cannabis sativa
atgccaaaataaaatcccaaaaatatattttgggccccgaacccagttcggcccttaatacccaattgtgactataccgcactaacttctcagaaaatatttacaaatagacaaaatatacaaactataaaataatatagtccataagcacgatatatcatataaattacaattttacccttctcaggttaaaattacaaaaatgcccctggcacaccaatggggtcgtaaaataccatttatcagtgcagttttacatattagattatataatactataattccacattaatacataatcaaactagttagggttgctaatccagtttctaaatcttagggtattacaatatcccctccttattgaaattttgtcccgaaatttacctgaacaactctggatatttctacttaatatccgtctcgagtttccaggttgcctcttctactttactgttccaccacaacactttcatcagtgcaattatcttatttctcatgactttctctcatctatctaaaatttgcacttgttgttcttcgattgaaagatctagctgaagttccaatgcttcataactcagaatatgagatggatctgagagataattttgaagcatcaaaacattgaacacatcatctatagctgccagcactgggggcatagccaacctgtacgctacatgccctatcctctcggggatcttgaaaggtccaatgattctcggcctaagttttcctttcttaccaaagtgcttcatacctttcataggggatattcaaagaaacaccatatctctaatttggaaatcaacatcccgtcgcattggatcaacatagctcttctatctgctctaagttgcgagcattcacgctctgattttatcaactgcctcacttgttctctgaataacctcaggacctaagaactttctttcacctatttcatttgagtgaataggtgatctacatttccttccataaagtagttcataaggagccatcccaattgtttcccaatagctgttgttgtatgagaactcgatcaggcgaaggtactttacccatgatccttcaaaatctaacatacatggctgaagcatgtcttctaaaatctgaacggtcctctcggactgtccatccgtctgaggatggaatgctgtgctgaatttcagttgaatacccatagctcgatgtaagctctcctaaaatcttgatgtgaactttggatccctataaaaaaatggactttgggacactgtgaagacggattatttctctaacatacagttttgcatactgatcaatgaaaaaattcatccgaataggtaaaaagtacgttgacttcgtaaacctgccaactatgacccacacagagtcgtactgccccgtagtcctaggcaatccaaccatgaagtccatggcaatgtcttcccatttccattctggaaggttcagtggctacatcaaacgtacagacctttggtgctcaactttcacttgctgacaagttaaacacttaacaacgtattcagctatatcattcttgattccaagccaccaaaacatgggcttaagatcttggtacatctttgttgtctccggatgaacagaataaggagtcgcatgagacttatttagaatttccctcttaatatcatcatccataggcatacaaacacaattcataaactgtaacatcccagtattatccactataaagtcaataatcttcccagccaaagtcctatctcaagatttcgttaagtctggatcttgcaatggtgcttctttaattcgttccagaagagtagattgtagggtaatgttagcgaactgccccacaacaaactcaatcttagctcgggtcatctcatcttgtaacaccctgatacttaggcgtggtacagtgatttttcaattaaagtaccacctttgctaatcaaaggattttcttcaaaatcgtatcaaactaaaactttagatttaattgctaaacttttaaacatttatttaca

SEQ ID NO: 52567 - DNA, 1053 bp, Cannabis sativa
gtaatagaactagcagttatgctgttcattttttttagctaaacttgctgtaggaattaatacctacacctcagcaagagaaaaatcaggaaaccaaggtcaattaatatctttatgactcagtcaaagcaccttttgactctctgcataaaaagccaaacgacagcccctttaagcagtgctacaagtcgtttgaattaaatagaaaaccctagattttaaattagtcatatatatactatcttttccacaaacaattcaatacaccagcccctactaaataccctagccgttccctttgttcttctctgaagaacataggaaagacacaagcaaaaaaccaacccagaaaattaatctcccaacccagaaattaaccccaacagaagaacaaaacaacccagaaattaatacgctcagcccagaaaatttcctctacccagttcgaatcaatcccagaaccaagccaacttcttcgatgttcttcactgaagaacacaaagaacagcagagataaaacccagaaaataaccccttcccagatcggtttaataccccagaaatcacatacacacataaacacaatatagaaaaaaatgcagaaaatttaaaggaaagaatgcaccggatttatagaggttccccgaaattgtgcaggtacgtcctcttgagctcgcctcgattcactatcaatgatcagagtttacaatggctgggatttcaaacacacaggtatgaaatgatatccctaatatttacaatgcttttctcctctcttttctctcagtttattctctctaacactagtgctgatggtgttttcttttccctttgtgcatgaacaactcccctctgagtttggatctccgaaccctgtagtagctataataactcccctctaatatttataggctcctttttcattaacttcagctccttcaatttaaacataaagcctctaatagcttctgtagtagctatatattcagattcagtagtggacaacgccactactggctgtaattgtactttccaactagtacaattcccccc

SEQ ID NO: 52568 - DNA, 1308 bp, Cannabis sativa
tacaccatgagacaaggagtagaacttcatcagcagcaaactttcactgaccttcgaattctcaacataacttactccatcagaggaaggaccaattgattcactctcagatttgttgttggagagatccttaagcctaacaaaatccaaagagggtggccactcctttggtatttccaagcatatcaataacacaatatgatgggagagtatagagcaaagtttaattagcaatgttagctaggaattattcaaacgcaaaactacctacccattgaaaagtctttcattgcacaggttgacaaaatcatctgtgtagttaccaaaaatgttatcaaggcgttttatcagttttggtacatcatccggagacaagacatcccatatctttagtacttggaagtagttcgaattctttgcgatgtccactgtactaataacaatttggccatcaaccttaaatctcattatctccaaagaacttctacttcccgattcttcaagaaatcttttaggccgccaaccaccggaaatcttaagaagatggtttaaaattgacttttttttccgaataggtgttaactttctaaaggacttcaaaaagttatcactgaaaagaacctgaaatttggaatggcaaggacagaaataaaaaaattagaatagaaatgtcatatatgtatgtctgtagatttatgtctgacaagagcaactgagcactaaaaattaccttccacttcgaatttctgaaaagcatgctatcagcattaagaagatcatcgaattgatcaagctctttctttatctctaacatagccttcaccaaactcacatcttcatcagcattatagaaacagagacgcttttttgcatcaatgactagagcttcccaaatagattgactattagcaagggttctttcattaccaagtatccacaagcaatgcctggacagatcaatagaacagacattttttactcacgcttatgaaaaccaggcaacaacatgcttggggaaaaacatcagtggcatacctagctctagtgaaaaacatcagtgagagcaacattcgttctctgaggtttggatatgaaatccaatgtctggcctatatcagatcttacggttgacattagtataatgtcttcgtccccaccctggaacccgtcaattgttttcaatttcactcgaaagccattaatatagtcatacttctttccaaccttctctttgaattgcaacaacttgagcagaatagggagacaccacaccaatactaagtttagctttggtctcatgccatgatg

SEQ ID NO: 52569 - DNA, 1523 bp, Cannabis sativa
tttgacggtaaaaaagaaagatcacttctacattgtaagttttatagaaatagttgcatattagttttataatagttgcaacaactgacttgaaaaaacgcagggtttacaattggcaataactaactagaaataacaaaaaagatcaacagctcccaatcaatccaaatcagatataaacaataaagataaggtatattcagttgcatagtcgtttttctgatttccaaatagaatcaagctacaaccatgttaattggagttaagttccaagtttttcaagttaatttatagttgcatcatcatttcattatggttttattcaatattgcaggaatttattgtgacagagaaaaaagagaaaatacttcgacaaaatagttagtttgtttaatatatttaaagtgtttcataatagttgcatttcagtttttttatagtttcataatagtattcaaacaaaaaaaatgaaaaaaatagggttcagaattgaaaatacaagacttgaacagaagaaaggcaatagaagtaagtttcttttctatttcataaagatcattttattttttgtttaaaaaattagtatcaaaaatgttcggaaacattactaacattagcaataacagaatcaaaatagtttcaaaatagttatcttacactaataataatttcaacatcacaggacaaagaagacattccattcctagtcttttgcaatgggcaatttgatgatcgaataaattatgaaaagtatgaagctacaagacaatacatctcaatcgattgtaagtatgatgaactaatacagaagctgaaagaggacttcgaatggaaccaagaaaatattgtcctgcaactgaataccaagtgaaagaaggataccaaccgttgcagataaaggatgatcaaagcctacatttctacatacaactaaaactgaaggagcctgacttcacaacatatccattgtatgtgaatgtcatcaacaacccaacacataccatcaattcatcattcttggaaaataataatgcattagttgcatagacaaatgcaatagaaccgatggtaaacaatgcatcaacaacagaagactcaacaaatcaacaacaaacaatgaaagggacaatgctggaagatgggggaaaaatttaaactttattgactacacaaaacttgtggcagaggagatggttgagcaacttaaaacaacaaaaacatggaagcaaaaatcacagattatgacgaactactaatcacagatccacaacatcctgaagtagaagaagcacaaatatataaggacaaagaaacactttaaagtgtgcttggtttctatgcaattagaaacaatttccaattcaaagtgaaaaagtcttgcgccagaacatacaaaatttattgtttgaatccaaaatgcaagtgggcactaacggcatttagaaacagagcaaccaagtcattcataattcaaaaaaattatagaaaggtgattcacacttgtgatctaaacatcagatttg

SEQ ID NO: 52570 - DNA, 1465 bp, Cannabis sativa
aaaaaagtaaagtatataaagtaattcccctaatatattttacttagaaaaataaattaatatcctacaaaataaagtcctgaaaagaaatcattgataaatttatagaaatcttatgatacgatttcaaaactgttatcatcactgtacttcacttgtatatattcgctacaacattaaatttgttgtcattgtcgtatctcaattatagccgcctattccactttaagttacaactaaccttactaataagtttgctctgtacataaaataaattagtgaattagttaactgctcactttttataaataagtaaattattttgttataaattcatcacttgtgtatttccaaatactttgacagatgaattactcaatagattttgaatctccaagaaatttctaactcttgaccgaggttttcagcaaccgattaaataatatataggaaaggctgtaggaagtttaatgcatgcgatttttacgtggttggtgcattaatgagccttagtccacgattctttgttattaatgagattatttattacagagaatgttcttggtgaatttctctcctattttctctctttgattcctctgaacccagaatcctcaacccctgcctcagtgcgtttgtggggtatttatagtattttgctggggtgatctctaggaatgaatcacttgtctttctatccaggcttaacaagggcacatattcccagcatatacaaaataggaaataggcccatgacttggataaaatgacttagagtactcgtggatgtttttttttcccgataatctatgtttcttggccgttacattgaggtgaacaaagaagaaattttttggatcgagtttaaatttagaaaaattggtgcgttttgttaccactgtggctgacttgatcatctacatcgtagatgctctttctctggcctagattcttttactagcttgaatgggtcgtacttcccgttatttggtcaatggctcaacatcgactcctcatactctcacggttccttcgacaaacctatctattctttggtgccaattgatccaaagggagtgactgacctggttctcccccaagccatgcaaccgtcatcatcttcccgacgtgtgattaagaacagagaggtggtgctccaatcatcattgccagtcgtgcttaggtctcgagaagatggaaaatgacaactcctaggccttgttcggttaaatctagaggaattgaggtgatttggcttcccgaaattcccaaacgcacgcctgaaaagctctttacctctactggtaatactgccacttgtggaagagctgttgaagataaagctgaggtggactccccttattttaatatagatcatttgaatgagaggggcccatgtgttcaaagtggattttcatttgaacttctctcatccttgctggcaaaaaatgtggagattggtttt

SEQ ID NO: 52571 - DNA, 885 bp, Cannabis sativa
tgggcatttaatgtttgatcagactctccctctcctctatctctctgtaatctctctaaaatctacccaaaccatcctttctatcttctcaaacatttactccggggtcatcatttctcctccgcctctgcagattgccatttcaggaatcaaagcgatgtttcacacacaactcccctcatcacctgacgcgcccatccatctccaggtatcttctacgctctcctctcctttcttttctctatttattcttggtttgccatgttggttcgccatcctcttccaatctcacttcacctactgccctattcctcacttattattcaatggcctcttcctccaccactcccaactctctcaccccactctcagaagaagaaagtctcattcatgactttgatcacatctccatatcttcctcgtctgacccaaatgccttctgcctcatctttaagctcctctcccccagaactgctaagcctgcttggatcgaaaaggctatgtctgaggcatggacccttcgtttcccaaccaaaatctccgaataccactctgggctttttctggccactttccaatgtgatggggatcgtcgtcgcgttcttgaagagcaaccctggcattttgataagtttctcattgtgttcactcaccccgatgtctcacctacccccacccctgaaagcatccgctacactcctttctggattcaagcccaccgtatccccttcggtcgcagaagccttcaattggccagttcatagctgatgaactgggtgaccttattgaaatatacccactgtctttgcttgagaattccggtcctttcctcaggattagagttttgctcgacattaccaagcctctgcgtcggggaatgactat

SEQ ID NO: 52572 - DNA, 731 bp, Cannabis sativa
aataaactactcagaaaaatctcattcactctatcattttcttcttctctttgtcttctctcttcttgtattaatgtatttattccatattattttataatatgttatcagcacgagcatttgccacggtaaatattttttttgttaaagtacttcaaagtcataatagactaatatatatttatatatatactcacttgactaaaaaaaattcagaatctttttacttttttcacctttttctttgttatttattatatatatatatatatatatatatatatttgacgtagtgattagaatcactcatgaatatacgatggagatatccacaaactgtgcaagaatctcctcaaactagcatagctcatcgtctaactgaagggcatgcctgtcagaccatgaactataagcgagcaacatgggacaaactgctcccggagatttagataataaaactataacgtcctcaaacagcacaccaatggctagagctttaacttgtaacatccaaaactacacgccaactcgttaatatataaaatttctccacaaaatatctacaaaacaaaagataaagaaaagtggattaacacttgatgatgaaattaaaaaccaataaaagaaaatcttaatagtaagaagatgacaactctcaaataaattatatttaaaaacttatcagcaaaatctctgtaacagtaggtgttggaaatattttgccaggatct

SEQ ID NO: 52573 - DNA, 2009 bp, Cannabis sativa
  modified_base (1139)..(1141): a, c, t, g, unknown or other
acaaccacaccaagactatgcttcttcagattaatatcaagtgcagcatcggtattgatcttgtatcggtatggagcaactgatgaatgaggactgctagaagattgctgcacattacgtctaacatcagctttaagattggcaaactcaaaatcctgcaaataagtaactgcatgatcatatatgaacattggagacaaacatctatgatggtgaaaataattattcctttgtgaccacaccatccaaagaaaacaaaagaaaatgcatagcatttgcttatcgaaaatctcaaaggccttagaaatataggcattgatgttcaaagacttgtgttctgcataaaaaatagaaaaggaagaattctttcaggcagttttaactctataacattcaaggaaagcatgtgttaccgtttttggtgctacatgacagagaggacaaaagggtgcagggatgatgtgcctatgataaagattagaagcaacagggatagaattgagaagaatacgccaaatacaatgcttaaccttagcaggaataggtgaggaccagagcttagaccaaaaacgtttattacccaaaaaagatgaagaagatgggatatctctagagctaatagcgagatgataagcagatttaacactgaaaatcccagaattttccttcccccatattaaaacatcaggacacatatggccagctataggtatatccaaaatattatcaatgacgaaatcaggaaaatgacatctcagtttattcaagtcccaagcaccagaaggagaaataaaaaatgacaaagaaggagaagggagagtggctatcaaatcagagcttttaagagcaaaattaggcaaccagcgatcttcaagtgtattaatagtttgcccattgccaaccttccaaagaagccctctcttaagaagatctctaccccacatgatacttctccaagagaaagaaggactatgacatgcaacagcatcaagaaaagaagtgtgtggaaaatacctagccttaagagtaagactgagtagagaattaggagtatggaaaactccaagcctgctttgctaacatggcttgattaaaatgaaccagagacctaaagcccatacctcccacaaatttagatnnncagatcatagaccactttttccaatgaattgaaggacgattaggggaagagccccaccaaaacttagacacaatcgattcaagctctttacagattttggtaggaacacgaaaacaagccatagcataagaaggaatggcttgaaggacagccttgaccaatatttctttgccagtcttagaaaaccatttatgatgccaggattggataacagacaaaaccttatccttaagaaaagcaaaagattgatatttagcacgagaaaaacattgaggaagtccgaggtatttagagataaaaggcttatcaactaattgaaaagtatgcataaacatgtctcgaacattagccaaagtattgggggaaaacaaaatggatgatttatcaaaattaatcaattggcccgaagcttgagaataagtatgaatggctgaattcaaagcttcacaagaagacggcgtagccatgcaaaaaagaatgctatcatctgcaaacaacagatgagtgagagaaggagaagtgcgagagatagcaacacccttaaggaccccttgacgctgagaatgatgaaggagtgtagagagtccttcagaacagaggataaaaaggtaaggagaaagaggatctccttgcgttaaacctctggtaggaaagactttgccacaaacctcaccattaacagagaaagatatagtagcagtggttaggcatttcataatattagaaacgaacttaacagggaaattaaaatgatacataagactttggagaaagccccattcaaccctatcaaaagctttggacatatcaagcttaagggccgcccaaccaactttcccattcttcctattgttaatggcatgaacta

SEQ ID NO: 52574 - DNA, 809 bp, Cannabis sativa
  modified_base (68)..(72): a, c, t, g, unknown or other
tttaaaatgcaaccaaataaataaatggaataaaaattgtttcttttccattctattctatttcattnnnnncaaccaaacgccacctaagatcatctttaactagaaaaagataccgcacttggcttggtttttataacaaataaaaattacacgtgttcaaagaaaattatacattttttaagattttcttcaattttttttttttttggaattgccatacataatgtattattttatttttataaaaggtatttttatttaggttgtttttatatgtacacgggtagctgaaatattattcaaatatactatgtacaaaaatttattccatttatacggttaaatgacattttatttgtaaatataagacacttttttaaaaaaaaacctgctattccagaaaacctgctattctaaagcttcacagttcacacaacatcatctctttggcttcggcaagatttcaacatccattgccggagctactgaatttaaaataggctatctctctctcccgaaaaatccaaagcatcaaatgttcaaccttctaattttttcttcaattacattaaagttggcaagaatttcaacaatatggggaaaacttagatttattggaaaaaagctttctatcccttcaaataaaatcagcagaggtcattaaattcatgttgaagatttattacagccatactaaattctaattgaggtaattaaaagcttaaaattctcttttattaatattatgggtaaatatgaattttggtgttaaactttgtttgtttttcatcttgttcttaactttg

SEQ ID NO: 52575 - DNA, 1785 bp, Cannabis sativa
aaaaaaaaaaaaaaacagatagaagtcatggaaagtaaaacggaagcctaaggcagtaaaacaatagtaaacagatgaagaatttgaacgaaggagactaaaacttgaaagtttgtgtgagagagagattatcgcacacctcgatcagacttgaggtcagagaaaactcgctccgctttggcagccgcagaatgtaaggcagtccttgcttttgatacaaaggaataaggcgcctccattatcttaaatatgcacaatcttaaaattatggctggtttggcctttcactgcaaatccacgagccaccactctaccactaatggtgacatgctttcacagagagataaagaggaagaaagatcatatgatgaaacttttcgtcttttttcttttccaaaagaaatttaaaattacacatttatttaaaaattaaatatatttggacctacaacgctttgtgtgtgtgtggggtggggggtgttatggtgtaacagagagagctattaatacaagatagcttacacatgcacgttgtaaggactggattgaagctatctattgatctaactatgagcactgtgtgtgaagggtcatgagaaactccattttggtgccctcatccatgcttttcaaagcactcacaatccatggttgttcagcaaatgcctattaatattcttctaaatacgtatgtcttgcaatcatatacaccacaatgtttgtctcgtccacagctattaaagaaattaaaccaagaaattgtaagcactcatgatcgaaaaatgtcacccaacaaaattaaagaaataacaactagaatggaaaaatcaaaataaaattaaactgcagcggtatgtctatttttatttctacagttataaattgaatagataaaacaaatctgctcactacatcttttattcatttcatatcattgcaagcatcttttgtacttcattcatttattacactaaaaaaatcggtaaagaacaaataaatagataagatcttgcacaatctctatatatgcaaacatgaaggaagaaaaaactaaataattatgtttggctcaaagtgatccgatagctctttttttgaacaagaataagatagctcttggtcacatacaaaagtacctgaaaagtgtgctcaatcccttgtttaatgggatttgaattgacccaaactaacaacctaagagaaaaactaagcacccactgtatacatcgacagcacacgatatagaaaatcatacacaccaacaaagcctaaaactacctaaccatctatgtttcagacaagaataacaaatacccatttaatattattctattaatttcacaaccaatacacacatatatataatcaaaagaaccaggtttacttgtgttatatttttcagataacagagaaatctctcttggatatcttctattttaacaataaaacaataaactaaaatgtattaaacaaatatcaagcaacaagtacaccatgactctgtaaaattgataaatggaaaaataccgatgagtttagtccaataaaattggctgaagaagagatacaaaaacaggctaaaagaaattaatattaacttagcaaattagaaataatagaagaaaatacctgatatggggaagcttaaaagcggtggaaagtgagagctcgatggcagtgcaaccatatattattataagcttgctcaacatcaatcaataccagcttgctacatgtttgaacagccacaaatagtttgcgattattcaaatatcaatcaatgta

SEQ ID NO: 52576 - DNA, 1299 bp, Cannabis sativa
gtattgtagagctcctaatgtactcctgtacaatgtgatgttgtcaaaaggttccccatcaagtaagctcagtttgaaagtggaactagtaggattggggcacacctttgctctttccatttgaactttacagagtatatccgtgatgtacttgctctgactaagatacatacccgagtgttatctcgatagatttcaacccctaagaaatagtgtacttcccccaaatcttttaatgagaatgcagtgttcaattctgagatgaaggtgttgatgagatctgcatttggacctgtgataagtatatcgtccacatataccaaaagatacactaatgtatcaccagagccatgaataaagagagaggaatcagattttgagccatgaaaaccccaatgtaacagtgtctgtctaagcttctcattccaggccctaggggcctgtttgaagccataaatggctttgtgtaaaaggcacacatgagtagggttggatgtgtcaacaaagcctggtggctgctgcatatgtaccacttcatttagatctccatttagaaaggcattactcacgtcgagttgcttgacagaccacttggcattgactgttagagacaacacaattctgactgttactggctttactacaggactaaaggtatcttcgtagtcgatcccaggtgtttgaagaaagccccttgcaaccaaccgagacttaaatttattcaaagaaccatctttgttgagcttaattctgtggatccatttgttggtaatgacttgcatatgcttttcatagggatcaagtgtctaggttctttgctttttgagagcttgaaattctgaattcattgcagctagccattttgggttattgagggcagactttagagattttggttcagttggtagaagagattcagggagaggatgtttagtggcaagataggatttgggttttctgattccactttgagatcgagttctcataggatgagttcgggtgactgttgtggtaggattatttgaggttataggttcaggaatagtggatgaaggtggtatatggtttgatggtattgtatttggtgagatggaaacaggtggtggaatgtggggtgatgagttggggacaagtggagaggcagctggctgtgctgtatgagtggatgatgactcattgttgatcacgggtgaggcagtagtggagatagatgtagcatcaataggatcaaccacaagagtattagtatgtgatatattgggatctgtagtaaatgaagtggaaggaaaacacagagca

SEQ ID NO: 52577 - DNA, 1101 bp, Cannabis sativa
aatcctgataagattggtcatcacctacgaatagatacacttccttaattttattctcaactataaaagttaagcatttatttaggatagtagcccttcttaagtgataataacaaactgtatcaatctttaaactagttatacctgaatcaacaacaaaatgcatacttttcttaagatgttctaaaaaattatagaaatagctagacactctaagctctcaaatgagcattgccctaaaacttgaagttgaaaggaaagaaaagtgttcttaatatatttttattttctatttttaaaatttaaaaacaaaaataattatagaacatatttttattttctaaaaacacaatatttaaaacacaaattttacttttatttttataattaattttttttttaaaaacattgttacaaaacccatccttagcaaataaatatctttaaataaccatttttaaagatatgaacgatcccatacctacccgtagtgccgagtaccgatacaaatcaaagtacaaaccgcaaagagaggacacgtgtacgatcagaccaaaatagtgtacgtctcagatcgaaaatacgtgtttcttgttttcgatctgaaagattgaaaatacgtgttcattagttatagataaaacgaaccgcagagagcgagcttttcgatattacttatctttgtccaactacgcacgcttctttctttattgcaaatataaatatctttgtcaacaccttctttccctcattttcatccttcttcaacctattctgcaattcaacaacaggtctgctaattttctatcaccctctttctaattttctaattcgtttcatttctccgattagatttactcattgatttctagacaagcttttggttctctttattttcggtgatcgaaaggtcttaatatagaaactttaggttttttttttttgttattgggtcgctgagaaaaaagttgattattcaatttttagttgattgaatagctttctgtcttgaaaacaggagaaatagctagtgacttgtgtatgtgagttttgatgaaaatttctttacaattttgattacaattagtttttttttttttt

SEQ ID NO: 52578 - DNA, 1217 bp, Cannabis sativa
attgtctttggggtttttaaatttatgaaattagtttaaatttccagttcacccccctcttggaaacatatcttgggctaacgtacaagatgcttaatccagacaaataagtcatgtcattttcaccgaacataactatggcagtccaagtgtatgcctatgtgcgatgtcatgagagataccttggccttctagcatattcaggatgagatataaaagaaattttcagtgacataaaagaaaaagtttggcgtctcatgcacacatggaatgaaaagatctattttgcagggggaaggaggttctacttaaagcagtagtgcaagcaataccgacgtacgccatgagctgcttcaaattaccggccactgtctgcaatcaactagaatccttgatgtctaattttttgtggggttcaaatgagacagactcaagaatttactagcgtaattggaaactcctttgtaaaacaaaaaatgagggaggcatgggttttcgctcttttatgcactttaaccaagctctacttgcaaaacaggcttggagacttcttgagaatccttcatcaatgcttggtcagctacttaagaatcggtatttccctaataactctttccttgaagcttatcagggtcacactccatcaatgacttggcaaggaattatttttgggagagaattacttgttgttgggctgcgatggaaaattggagagggcaggttacttgtagatcggctccatggattcctagtcataacactttcacaccagtccattatatggatccaaaaaatgcagtggttgctaatctcatcagggcagagagacaatggaacactgagttgcaaactgaatatttttctcaaattgatgtggatagaatcttaacaataccactcatctttttccacaatgaagacaagttgatttggcatcacataatctccggttattacactgtacagtccggctatcaccttgcggcttctttggtcgatgaatcttctttgtcatctggctcatcttcggttacatcttggtggaaatatttatggacactaaatctaccacaaatagtcaagatctttgtttgtcatgttctacatgacgccctacccgttgcataatcacggactcaacatgctcaatttttcatagagcttgggaattgataggacatgcactctttagttgcaaatatgcttaagcagtttgg

SEQ ID NO: 52579 - DNA, 704 bp, Cannabis sativa
tacttatttatatagttgatcaattaattaatccataacctgcagaggaaaaaagtcagaatttttttcccagattgtgaaatagaaagtgtggtgttgatcgccaacccttatacatacttgaatgtcagtgcagggtctccttatatgtacttttatacagttgagcacgcgatttttgaattagaatcgatttcaatttgttgtcgattgatccttttgagcttcagaatggtcaattgagtcgaacgattgggttgatacgattgagctgtctatgtttgattcggaattgattgttgttgattgggttgtggattggtccttttcagcatcggaatggtcgatttagtgttcagtgtttagcaaatgattcttgattctgaataggcgaacgattgggtcgatacgattgagcactcaaacccttctaatcttcttcatagcagtctgacatagtaatgcttttcttgcaggcagagatgactcttaagcaactagaaaacctctaaagttactgagagtattttttgcttttaacatctgacttttattttcttttattttatatggcaacggtttggtacaaaatatgagagtatttagttttatggatatatgtatatccttagttcattttggctctaatcaagattctgtgacatattgggggtttgtttagttagagagtattcaattttatg

SEQ ID NO: 52580 - DNA, 958 bp, Cannabis sativa
ttgagatatttacgaaaatgtcactgccatacaaacgagcatgctaccagcatgtacaccaacatgcgccaccacttgactattacttggccaacttgtgggtatcactaagcttgtaatgtgccatcttgacacgcacgttacacgtgacgtggaacacccttttgtcgcttctccattggtcggtttgaaaaattttcttgtgagcaatctgatggtgtggttggtgaacagagttgggatgaaaaaatcatcactgatctcttcaatggcagggattgagagcttatcttaacatttagatttcacaatctgaaatgttagattattggtactggtctcatcatattttaatttggattttacactgctaaagatgcttatagatttcttcattgagtttacttgtcaatggtgagtgatgatggaactttcatttggaagaataatatgtataacattgctaactattaccaaggtgttatctcatagttgtattgggcgcaactaataatgtatgtgtagcaatgctcaaatatatcattaaatgaacataacaattattattaattaatgaataattatgttagagcatctttaatggaaagttataataaattgtggtgtattgttattttttaaaatattttgctaaaacttaactttaatagtgatgtaaattatgtgtgcgttcaagctaaaaattatgtcaaattttgcaccaaaagatagcacgagccaaattttaacaccacaataaatactagctttcttaattactcttttttctacttattaatactattcattgactttgaataaatatatttataagatattaaaattaatataaataaaattaattattttgtatattttgaatgggcattaatagtaatattaacttttatagctaatttacactttgtacatcatagcacaaaaaaaaaaaaaaaaa

SEQ ID NO: 52581 - DNA, 765 bp, Cannabis sativa
actgcaagtatatcatgtactgaataacattaaaataacaatataacaactaaaaaataacgtaattataaaacttaataaacatgcaactaaaataattctaactaaaactaaataaatataagacctaacctaatgatctagttttttttaaaaaaaaaaaaaaaaattaagcaaccgttagaataagaactgtataataactaagttaaaactaaaaaataactaattggaaactgagagtgagagacataaactatttaaggttgaacaattcttctaactaaatacatcagaaaaaatataaacataacaaaacaggtctttgaaaccagacaaaaacaacaaaaactaatacattaatctttacagttgcaacctcatcatcgttatatcacattttttcctgaaaagcctcttcaatggatgacttggtgaaacaacaataatagaaaaaaaaattataagataaacaactataaaacaacttgtaaacaacgttaaatcaacatagtcattaaaatatttagataaaatctctaattcataaaaaagataaaatatagatcaacaaaagtaatatcaaaacaatactacgaaaatgcttaacttaaagttgaaataaaatcacatttgaatatgccctattcctttaagctagtgaagaattctcttgggcatttcaccaaacaccaagcaagtgtacttttatatctatatatataagaactcaacttacagtgttagacaaacataatagtgtta

SEQ ID NO: 52582 - DNA, 2125 bp, Cannabis sativa
gggaaagctttagcgctagaaataaaattgatactaataaaatttctaaaggcaaacgtggacctctttgcatggtcatatggagacatggtcggaataaatctctctgtgatgaatcatgctcttaacgttgatccaaacttctaaactgtgcaatagaaaagagggttgttggacaaagaacacacccaagtgctcagagatgaagtagaaaggttacgggcccatgacttcatcaccgaggcattccatccactttgggtatccaaccttgtgctggtgcccgaatcaaacaaaaagtggtgagtgtgcatagacttcaccaaccagaacaaagtatgtctaaaagattgctttctgcttccaaggattgactagctggtggatgctacagctggccgtgaaatcctaagtttaatggatgcatactcgggttacaaccagatcaagagaacacaagcttcatgacagacttggacctatactactacaaagtcatgcccttgggactgaaaaatgcaggggccacctaccagaggcttatgaacaaaatgttcaaagatctcattggctgcaatattgaggtgtataaggacgacatgctggtcaactccaaaaaggcacagggggaatatggaagatctagatgaatgcttcaagatcctccataagtacaacatgaagctcaaccccctaaagtgttcttttgggataggctcaggaaaattccttggcttcatagtcaataccagtggaataacaaacccaaacaagatccaagcctttctggacatgaagtcacccataacaatcatagaagtacaaagcttgatgggacgcattattgcattaagctaattagtgtccaaatccacaaataaatgcatacttttcttcaacattcctagagggaacaaaaaatttgagtggatagagaagtgcaaaaaagtgttccaagagtagaaaaacaattggctcaacctcctatcctatcaaaacctctagataatgaagagctaggcgtgtacctagctgtcgcagaacatgctgtgagtccagtcttaataagagaagaagacggtatacaacaccctgtatactacatcagtaagacactgatcgatgctgaaagtcgatactcactcatggagaaactggcctacaacttactcctagcatcaagaaagttgaggccatacttcaaagcacacccaataaaggtgtacactaactaaccattgtgataggttttgcaaaaacttgaagcatctggccgactactcaagtgggccattaaacatggccaatttgatatcacatatcaaccgagaatggccataaagggttaagcccttgcagactttgtggttgaatgtacaaacacacccgttgaaatctcttaatattcatgagaaaataaggagctagagaagaagcgagagcaagaggagcagcaaaaacctgaagaatcaacatggaaactacatgttgatggaagctgcaatgaccaatcatccggtgcaggcattaccctcataacacttggggagcaacagatgtacagagcaatcaaattcagcttcaaagcctctaatagtgatgctgaatatggagccctgattgtttgcctgaagctgatgcatgaattacaggctaacaaccaggacatatatagtgactctcaactagtcataaatcaagtcttaggtgaatacacaactcgaggtgaaaaaatgattgcctatttgagcaagatccaagacttgataagtcagctcaaaggctatacaataaggcgaatccctagagaactgaatgccacagtagatgtatttgcctgtctgacaagtagaaccattatcgacaaggcaaacatggtgccaatacagtaattgaaggaacatagcattgccatccctgaagaactcgacatgttcgacgacagtccaacatggatgacatctcttgttgtttacctacgaattggagccttgcctgaaaacaagaatgaggtaaaaaaacatgagaagaaaggctgctaagtatctaatcttagacggagtaatatacaggcgaagcttcacaatgctgctcttaaggtgtgtcagcaagaatgaagtcgagc

SEQ ID NO: 52583 - DNA, 1525 bp, Cannabis sativa
ttagcgacagtccccgaaaaaaatcgttttaggaccgttgcgaattttgatatttgtagtagtgaaatgtgtgaggtaaaataaagaaagtgagattttagtgagttattttaaaggaaataatacagaagctaatgggagtgctcttaaggtaaccaattattttatactattattcccatattatattagggataatttaaaaaaaaacacacaaaagcaacaaaaaaaattacaaaaatataaattgaacgaaattttcaacaattttacggttttttagattttatttacataaaatacggtcttttaatatatttttatgttatactcttgttattttgttgttggttttttttttttttttgtatttgtatattattctttatgttgttattttgatattgttttgttgttgttgatgttgttttttgttactttcatttggtttttttgtgtttttataaaatattgtaaaaatacatatatataaaaaatttaaacgaaaaaatataaaaattggtattttatgtaattattctattttttaaatttataaaaaatatatatatttcatcatttagctcttttaaaaaaattacaacatcattataaacttgggaaactccttaggtgagagcatcactgctctcacttatgagagcatagaacatataattaaaatgggttagtatacatacaaatatatatactattatttatattagcatttttaaaattcaatttttatttttttaatcaaattatggaaatgacttttgaaagtgtgttcagtaaattttttttatataaatacagtgtgttaggtaactcaattttattttgtgtttttttttttaatttaaaatcaaaattttgaaaatataattttgatctttttaaaatattttaaaactttttttttctctctcccctacttttctctcattttcttcgtatgtctgcaatttcatatagtggttgttaattttaacctcagatgttggtatcaaaaatttattgtctttatttactgaatataaatctaatcaaataccacatgtaaaattacttggcgaatcattatatttatcattcaaaactaacttataagctatattgtgataattatattgtgacaaatcatgattctcatgagaaaactaaagtttatcgccatggagttgtggatgcttgtaatgagcaatctgaaaaagaatttaaagtgaatgagcagcatctaaagaatttgggtggtgaggttgatcgagcaaagacatcaattactttggaggatgcatgaagcggaaggtagttgagttgccttgtgcttagattgtcaattcctttttaaggcaatccaatgttggaagaagaacaagttttgtaaatatttttgttaaaaaaaataataaatattaaagttaaaattataaataatcatatttaggggtgttcattggatcacatccaatgtttttaggcttatccagatccgatccaatcatatattggatgttggatt

SEQ ID NO: 52584 - DNA, 822 bp, Cannabis sativa
gattcttgccaaccagttttcacacgtagtactcaatatatagctattttaacagtaattatctcattattattagatattacttacatatatttattcatcatactcatgcagtggtaattatctgtatctcaaaacattgtactccacacattataatattgctcacatatttcaacaatgttatatatatatatatatatataaaaatagaaacgaaaaattatttatatatatttatatacgattggatgatcaggagaaatgggagtacattttagttatagtgtagcataatatatttacaggaagattttaatataaagcatcctatttattgttcaaaattaatataaaatatgcataattatattttagtataatgtttatttgattgttagataaatgttacaaattaatatatttattacaaatattttgttataatactttactctaatagagaaatgttttattattttgtgaaatgagtagtataatattatgtattaaaataatgtactaatataaaatgtgtcggcaattaatttttggtgtacaactttaatttcatcaaaatgttatattttgagatgaagaacaaatctatttaccaaatttgtaacaactttgttgatcaccaaatttatttgggtaataaaacgtgagttacatatatagattttgaaattcaaagctatgatattatagctattataaagcatggattaatgctcaatattatagagcatgcatggattaatgcttaatgatatgattaagggtttgtttggtataatttttggaaaaattaagcaatta

SEQ ID NO: 52585 - DNA, 1194 bp, Cannabis sativa
cagccacaacattaccattagaatcccaaattacagcaccaacaccgattataccttcggtagagtcgactgcagcatcgacattcattttgaagtgactatgatcaggtggtcgccacagttgagcagcagggactgcttgcaatggaggctgtggtgtcgagctttgagcagcagcggcagaacccgggttctggtacgactggtgcagaaaggaagaggcagaaggtgttgatattccatgccgtagctgagcagttctgtagttggtgaggtagatgacagcaaaggaagctaactctttagcaggccttgcttgttgtccatgaacgacacgattccgttcgttccatatagtccaaagggtacaaaacagttgctccatttcagccttagaatataatgttgaaagatgaaaaaggtagtcacctttatacatagcagcagcatgttgccaatcaaaagtcaaaccagagtttcgccacacagctttagcataacggcaatgaaaaagagcatgtccaactgattcccatgcttgtttacagactgagcatgtcgagtcagtaataacttttcttttgaccagcgaagtggcaacagggagcgcatcatgaacccctccaagcaaagattttaacttttggtgggagttggaaagaccaaaagaatttccaccaagatgagttcacactattgcttgaaccttgatcacttgcatcaagactagcagcaagatgataacccgagtttaccgtatagaagccattactagtatgatgccaaataagaaagtcacggctaccgaaaaaactcaaaggaatggttaaaattctttccacatccaaaggagtgaaatactgatgaaggaggggtacattccattgtctctcctcattaataagatttgcaacaacaccattgggaggacctttgtaatgataaggcaagaaagtgctatgccccggtagccaaggatcaaagcccgactgaatagatctaccatcaccaacgtagccctttcacaaggagctctctagcccaatgaatcccttgccatgtaagagacggggagtgacccaaagaagcctccaaaaaactgttattgggaaagtacttgctcttaaggacacggctaaggagtgaatcaggtttttcatagatgcgccaagcttgtttagcaaggagtgcttg

SEQ ID NO: 52586 - DNA, 752 bp, Cannabis sativa
aaaattcctaattagccttaaatttttgtcaaactactcacaaatttttgtatatataatcattagtcattaactttatttactatttcataattttcactgttatttatagtcgtcataatctatctctccaaaactcttagtttcaattttttaattattattttatttaaattgatggttactcttttgctttactatttttgcattggaagaaatatggaaacaagtaaattaattataaagttatacttatttaatgtctattaattatttaatttttaatcattagtccttataattttttataatctttgtgggaatttttttgatatatatgctgtaagtcttttatagtttttcctctaaatcaagaatgatatattattattattttttttttttaaaaaaattatatattacatttaaagtaacctatttgatatagttctttctctttttttctttgcatcaaaaattacttaattattatttttatatatataaattaggaagcaaacttcgcttcgcgtgcagctatattttatttattgataattaaattataaaaatacattaagttgttattttttttttatagtatgagtaattattatactaaaatttttcataatttttatgcagaaaaataaattaatatggtagaaaaatttatcatataatttcttatctaaaaaaaaccaacaaaaacatattttcaaatgttatagtaaaatttaaaaaaaaaaaaa

SEQ ID NO: 52587 - DNA, 1021 bp, Cannabis sativa
ggagagttggggcacaaaaagagaacatacaagagaagacatcaaacatgaaagaagcagaactaaaatataatagtggaacaatggaggaaaaactgaacatatattggagcatagaatactgaagaaaataacttacatacaaatttattatttttctattacaattaaaaatagaacaacacaataatatttggaaaaatatgataaagaaatgtaagaaaacaacattaaaacaaccttagaacaataataaaataataacaaattaaaccagtaatagaaaagggtaagttagagaaagatagtggacttggaagtgcggtagagatggagtcaacgctttgagagcaaagagactgaagaacatgaacttagtgggagtttctaaaagatttctataagaagctcatcacagagtaagctctccgtctctttcatatacacacacaagcacactcttatctttcccaaatcttcttcttcctcctcgtccttcacatactctttgtttttttttttttttgttacctactataaaaggagagggttaacttttatttgagtaatgttgtagacttgaaaaaaaaaagaagaaaatgaagaagaagatgaaaagtatatataatgaaagatcacgtggacttgcctaagtttcaaaaaaaaaaaaacaaatattttatgataaaaaaaaactgtcactttttttagcaatcaaaacaagtattcaaaaaactgtcagttgttgcccaaagtaaaagaatatagtatacagtataaaaaatagtaaataagtaattttttccaatacaactataaaattgaaagaaaataagaaaaaagagtaaaaggtgtaaatttccctttatattatattaagtgtagttttcttaatttcttttgcttgacagttttggtttgggttagtgatatttaaaaatttttaaattggacttcaaattgaatgaggattatgggctttcaaccttgaacatggaaagccttcaactccaccacctaa

SEQ ID NO: 52588 - DNA, 934 bp, Cannabis sativa
aggcgaagaaattccaattattctaccacaattgcaccaacgctaccacttacatacctaacagtatctaccaaattaatctcagaagccttctctcatctgaagggagggttctaacaaaataaattgatgtattcaaattcaatgaatgagtaccaatcgaatcaactaatgacaaaaaacactcacatactcaaaactcactattttttttttttaaattaagcaacaaaatctcatttcagaaatcaaacccaaaactaatttgaaagattaaatctaaaatcctaataaaagctaagaacaatttttctcaaataaaaaccctaaaattaaaataaaatacaaaagaaaatcatacctgtaatagcaaaaagatctttctctctaagaaaccactttcattgtcatgctcttctcattttttcattttcaaatctaagaacgaaggaataacaaaaaaaatctgagaaatagggagagagagaggcgagatacatagagagagagagagagaggaaaagagagccatataaatatacagagagaaatagagaccgagaagaagagatttaccttgtaatggtgaagttgaagccatggaaactactctgaagaatgactaacgagagagagaagtaaaagtgtttttaaaattttttaaaatcatctaaaatctgtttttaaaattcactgaattctgttttttaattttaaaaacaaaaaataaaatggagttaccaaacacaatttttatttatatttttaaatttttgattaaaaaaacaaaaaaccatttttataatggttaccgaacacaccctcaactttttaaaaacttatttttgactataatataacattttaaattgagattttttttttctatttctttgctcaccgatgatttagctaaattattggtaattatttc

SEQ ID NO: 52589 - DNA, 1449 bp, Cannabis sativa
agagagagagagagagattgatagagcgagaggtatgaatagaaaaagaaaaagaaagaaaaaagttattttttatttataattattttttaatttcaaattaattttattttaatttttgaattttttttaaataattttttacgtggaccaataaaattgtgtcacgtgtacactgtgtccagtccaacatggcacagaagttgtaaattgctaacggtatcgtagttttgggagttttaccacccaaatttaggttttgggagttacgtaaaaccaaaatgaaagttttggaagttttgccgccatttaccctattttaaaattagatatgaagtggtaattttatatgaatttctaatatctgacaaaaaatttagtttttacacaagaaaataatactttttagtagttaatatttaaacaggaaaagttatagtaagtgtaattggaacccctcaatcacctccaccaaccaatcacacagttataatgtaattacatggttagacaaacatgcagaatcatgcaattaactctaattacacagttggctttccaaacatgtttttagtgttactaccttagtaattacagagttactttcaaacacaccccttctaattttttgaaaaaataaaagagaaacaatacaagacaccactaatgtctaacacgactctcggtgtctattagtgtaattaagtatcgaatctcatataatttatgacaataacttatgcataggctggttaggcctgtgctcagtgcccacctagcctagggccccaaaaaaaaatattctccttttaaaattacaatatttttttttaattaattttgaaaaataccatattttttttttctaaataagagcctaaaaatatttttttttctatgaccctctaaattttagggttgactgtatctataggacatgacttatagaaggtgttggacactaatagtgccgatgctaaaaaaatagaattgctaaaaggcattactggtctctagcaccttcatcagtgtcatacttgatgtaattaagtattgggtcttatataacttaaaaaagataaagtttaagaaatattgttaaccaatcgtaggacgccatctatagaatgtgctgaccactagtgcccaatagtaatgctaaaaaaataggggcttttacaaaaatactaaattttgggtaaaagtttacaattttattgtcacacaattttttttacaaaaatattgtctttttataaaacaaccgtaaaacaacaaaacaaaacaattaaaacaatagtggaacaacttaaaaaacagctgtggaataacaatgtaaacttaacacagcatacagtataaaacttacacaatatttttaaaaaaaaatcaccccacaataaaaaaataaaaagttagaaatttcatggtgtaaaacacaaaatatat

SEQ ID NO: 52590 - DNA, 864 bp, Cannabis sativa
tctgtttctttattgatgttgaataaaatagattacattgaaacggagttttatttagggcataaaacctaacaagcgtcatcccgaagaaagaaagaaatcacctttcacgagccgtcgaagacactgcgtgtcgttcacgagccgtcgaagcccagccgccatccacaagccactgaacctagccgtcgtccaaatgagaagagaaaataaggctgaaagataaggaggctagggtttttcattgtttaaagagagcagatgagaaaagtattatttattttattatcttttaaaaaaaacaatgagaaaagtatgtatctgttataaggatagagagaattgatattttatcatatgcattatttaatatttactttattattttttattttttattttttaattaatatggtaagttaaaagtaataaaatcacatgcttcacgtccaccattgcattggacgaaaatgtaatccaaaattaataaaaaaaaaatatttaatgagatttttaaatatacaacgtctttcttctctttgtagtcaaatattcacagacataatgcaaaaaaatttctagtccatcattattggacttaaaatctatttaaaaaaatttaatgtccaacactatatttgttggactagaaaaagagacatagaagaggttatttgtagtagtgctcctagccctataaataatgatgtatgttgactgggcaggggatcagtcgaaaagcagttgagctaagactataccttaaatatattatctaagaattatatattcagagatatagttgtaagacctataagaaaaataatatttctccttgatcttaagtcaatacaaataacgagg

SEQ ID NO: 52591 - DNA, 1004 bp, Cannabis sativa
ttggattatatatcatatttttatctaatactatgttaaactttaatttatactaaaatattatatattataatattttaggtgttcataaaaattaaaaccacatatagtttcacataaaaatattgcataatatacaattcaatataattcaatatgtagagtttcagaatatgaaacttgagaaacagagtaacaaagaaccagagaaaaagaaacagagtgtatgaaaagttaaaaccagaacttgtttttcttgacacttcttaatgtgtttatatacaagaggaagagagaaagctaaaacgtaacagacttaagaaaacagttacaaagttagttataacagataactaactctacaagcttactcaactatactaacacaatacaatacgacctaatacggcgttccaaacgagcccatagttgttaaaaatgtacacattttctataaatattttttttattttctttctcatctacataatataacttttcatacaaaaattacttaaatagttgacaactctaaaagttacctactataatcgcacatgctactatttaaataattaaattttattaaatattataaaataataccacaaaataatttttttttaaaaaaaaaagataaaataatatagctgatgttaaatataaataatagtgttgataaaattacattaaaaatgatgaccacattatatatgtgacaaaaacaactccatgagcaaccttaattgaagatgctctaataaaccttttttttagcataattataagggataattacactacatactcaaacttttattttttttacttttatactatgggatgaattttttttttcaaaaatactgtgtgttgtgttaagtttttaatgttgttttacagttattttaatgttatttttagttattctgttttataaatatacaatatattttttttttttttgtaaaagttaaccgagagtgtataattggtgagataat

SEQ ID NO: 52592 - DNA, 3551 bp, Cannabis sativa
  modified_base (49)..(51): a, c, t, g, unknown or other
  modified_base (908)..(912): a, c, t, g, unknown or other
ggcaaataggatcatttatatatccttcctttaataaatattcactaannnagttgtaccacatgcgtcctgattgttttaatccatataataatctttgtaattctattaagcacatttcttgattgcttgaattatatgcattaggcatcttaaatccttcagggatcttcatgtaaatatcactatctagtgatccatataaataagatatgactacatccattaatcgcatatcaagtttttcactcacaactaggctaactaaatatcttaatgttattgcatcgacctcagaaaaatatgtctcttcataatcaatacatggtctttgaaaaaaatcttgtgctacaagtcttgctttgtatctcacaactttatttttctcatttcttttacatatacatacccatttatatccaacgggtttcacaccttcaggtgtttggactatgagtccaattactttgtgttagcaagtgaattcaattttacttgaattctattttagctaatcttttctattttgacattctttgatagatttaagttcaagatcctcattttcatctataatttctagtgctacattataagcaaaaatattatcgataattactttgagccggtcccgttcttttcctgtattgatataatttattgaaatctcattatttctaatatttttaggtacctgaatctcttcaagagatttgtttatgtaaatatcttcctcgaaatttccagcctctttattagggtcatctttattatttgctcattttcttttttgagaggcccaaccattaaggttcttcttaatctaaaaaactattaaagttttttagattttatttacagaaaatacgattttttgatgtatttttatgttgtactcttgttatttnnnnnttgattttttgttatttgtatgttgttttagtgttgttttcctcttaatttcatgtattatttttttgttattttcttgtgtttttataaaataccgtaaaaatataaaaaagaaggaaaaaaaactttaaacataaaatgtaaacttttttaccaaaaataacaatttatgtaattttttaaaataatagccaccaaaactagacccatatatattatttgtatgaatcttatcgatatttttacttataagcaaaaataaaaatttaatattaatacattttcccgtaaagaaagacaacaagttcaaataaaaaaaaaaattgaagcttcaagaaattgtttagacaaaaacgtattcaaagacttaaatgtagcatttaaaaatataggtccaaaatgtaagcaattctaaactatccaacttaattcttggtgaaaatgataggcattggttggcatacagctctaaaggaatatataaatatatatatatatttatatatatattaatttatatgaataattgctgagaaaatggctaaactccaataatgctttcatggattgcccagaaatttctattagttaagtaaaaaaaactttcccattctttttttgggattcattgattgacacgataacttcaagttgcaacactaactgagccccacataattcatgatgaatttgagcacttgtttcttcctattctacccttgccattgtcattggcatggtcctatcatatcatttctttagagctagccttcagtcctcttcatggtctgtgacaccttcccctgccatggatcccccagcaaatggatttgaatcttctgaagaatctccaaactcttctttgtacatttcttctatcattggcttccaaagcctcactcgagcgtttatgaaccaatttgaaaccttttattagaaaaggacacttgattagacatttgacaattgacagtaatataacaaaacaaaaacttatttttatattttagagggctttcattcattacttggtttttggagaggcctgtttgtgatgccaacattagtttttcagaatcatttggataactgtcacaaccaaccaccacagagtgagaaaaaaataaaaataaaaaacttgatatcaaaccagagaaagaaaaaaaaaagttatatcactaaaataaataaacgatatgggttttggccattaaactaaagtttctaactttgaagctccttacgggtgaagaaagtgttcgaatagccaagctctaaggattgccacagaggtctctggtaggcctctaatgggtctccaagcttggcgttggttttgaatcattccaagatgttgaagagggattcgattatttctcgtctctctatcgaacaggctgagctgagataggcctgtactgattttaggcaagtcgtgtgataattttcgtttctcaacattaatgcgcgaaacaacggcgtcccttaagctacaaaaatgcctagacatggcttgaagtgctaaagctgtataagacttggctgcttctgaacctgcaatcatctcaaacgcacccatgatttcctccatttgatggtagtatttctcatatcttccctccacctgaaaatgataataacaaaaaataagctacgtatgttttaattaagaacaacaaaacaagttgaagataactaacatcttccaacaatgagatgagctttgtcattttgagttgggattcttgtttctcgggggatacaactccactattgcagaactcagctcttagttcagaagaaaggcttaaacctctccctccccctcttcgattcccacgaagtaacttgtcaacatatttttcattgctcatttcgactgctttcccaccaacattgacaatctcatccaaaagggactgtgtaggttttaaatatctagagtgggaaataacagtggataaagtatcagccccatacaacgtcgaataagatcgattcaacgatgccgaagaggaagctattgagcttcctgaaaaagggtagttgtcgtttacatgttccaagcctggaggattacacgcttctcgaacttgttcttctccagaaaccatataagctggggttaagagatctgagttaaacgacctctgcctgtattccacagaaggaacaaccatgtgagaaccgagagatagagaaagcctctggctctggctctggctctggctgttatggctctgggcatggtagttgttgtcgtttgatgcaccaagaagatccattaaacgcctggtgtgactgagctgagaatcatctgtcgtgggtggagcttggacgaggtccattgatctagacattctttccccaaccccaagtgattgtatacctggtataattccaagatgaggaggtgggtatgttatgctgtgacctctatagttggaaccataagcattaaaatgttggttctggaattgggtttgagtggtaattatgggatcagatatgagaaattggtgtacgatattatttgtgtctggatgtggatgtggatgtgggggtgagtcttgtgagaccatcgctgtaaccagaaacctgaaagctcaatgccttgaatttatataaatatatatata

SEQ ID NO: 52593 - DNA, 2185 bp, Cannabis sativa
aaacaacacgacatgaacttaatatgaattattgtggcttcggatcataaaaaatagaagtgagttgaaattgagttgaacttgaataatacgatttttatttaggttgggttaggattaatgcatgcgacaccaaaaaatcgtttatatctaatatattattaaaaatattaatatataattaaattattatttatttttataaaaaataatatagattaaaaagaaaattatttacaataatttgtaataaattattttaattaattaatattatttatttgtaacttgatataattttatatttaatttatcatttaaattggttaaaaaattatataattatacatatgtaaaaattaaatatcaattgtgttagttaacatgtgttgtaacatacgtatagtcgacatgagaacacggcaggtcgagttaaggttgagattttttgacacgaaatatatataggtcagattaggattggtcaaataaacatgtcaacatatgtaatgaacacaaatataataggacaccacgaattgccaatcctaaaatatatatacactagtggagaaaacacgtgctatgcacatgcctcatataattaaaacaaaataaattatttaaaattaatttgattatgatacatttaaaaaaaaaaaattaatttataacatatattatattcatcttatataaaaaaaaaaaaaaacttttattattctaaaatgagaaaagaagacttaaatttttgtaaaaataatattaaactaaactaaattatttttttctatatatattgtttgtaaaataacacctcataataattattgtaaaaacaactgaattacctattaattaagtaccacgcacatttaattttttctagttgtaaagctttacaaaattatgtacattaatttttattaaattaattttaataattatttttaaactgattttttaaattattataatacacttttaaattttcaaataatttgttaatgtaataatgtacgtatgttagaaatatttctaaattttttaaattatttttcattttttttttaaaaaaaaatacatcattttgaaaaatattgaataagttaaaacaatgattaactaatttaatttattctattaatataatggagggtggataaagactaccgtaaagataaaaaaaagtatttagtgactttattacttaatagcttaaatgcaatgctggaaaatactaattgattttgctacaaattaattttaaaataaaattaaattgcataacttatttaaacattgatttttaataaaataaattattaacgaaacaacaaaaattttataaatcttatatataaatttgtaaaaaaaacaaaaatacaaaaaacttaataatttctttagtattattaaaaaaaaatgtatatcattaaaatttaaatatgtagatttaataaaagaaaaatgtaatgatgataatatattcatatattttattttaaataaattttaaaatattcaaataatttgaataattcgtggtattcaaataaaaataacatattacatcgtcaaagatattattttataattaaattataaatttattattataaaataatgaatctgtcattttatattgtatagttgttaatatttgaaactaactcatacatgaatttgtatgagaataaaaatattttaggttgtcttattaaaaaaaaaaaaataactcttgtgtagcaaaataagtggatatttcttttttagttttttaagataataaaaaaaataaaaaaaatatttatttactaaagaaactgttggaaattatagttctaaccaacaccttaaagaagcaaataatacaatagtatacaaaagtgatatttttaaaaaactaacacaaattaccaatgtttgttctaggcccaaagttcaaagcaataaagcctcaccaaatgaaccacaatgttcgacccaatatagaatgagcccaagagagactttctctctccaatcaacacattgcaaccttgaacttagctatctattcggccagagaaagagtcaaacaatgacccttaattcccttcaatttcggcccaacaagagagagacttttcactcaattaatggtccagcccaagaagaccaataaaccctaaatgtcttaacc

SEQ ID NO: 52594 - DNA, 1268 bp, Cannabis sativa
aaaatttttaaccctatggcgtcggttattaattattatgctgaaaaaaatgactctaaaggcttgttttgtagtagtgagaacacgagtattgggggttctgctgccaaaatttgagttttgggattaagtgcaagcaaagtaaaaatattaaggattttgcagcaatttacccttaattaattcacgttttcatattttataatttttacgtcaattaattattttctttgttatttgtaattttataatttttacattttcataaaactaagcatatatttttataaaactaagcatatgtgcattgtacttgtgcaatatttcaaatttcaatagctaaaaaaaataaaattctcaaaattaaaatcttaaaaatattttattttatttttaaaaaaaatacattatctaattaaaaaaattaaatatacacacttaacatcacctaattaaaaagaaattaattatacataggtgcattacatgtaacatcaacttagtatatatatgtgtggttcgtagcaatttaatattatttaaagagaattgctaaaagacattaatggtgcaccgctattagtgtaattaagtatttctataacttttaaagaatatcgctaaccaatcatataacgccacagtgttgagctactgttgcccaatagcaatgctcttatatttttttatttttttgaaaattgcaatgctcttattcaaatcactatatttttgttttgaaatagtttttaattaatgaatctgctatatatgctataactaatagataataataaatatttatttgcaaagtgcaagtaatctctttgaacactctcttggttatcatttctccatgtagcaatcaagtctacgttttcatacgtacatttataaaattctgatagctagtcggatctgatccgacccatgtggtctgtgcaacacattttttgtggcatacgtatattatcttctataaatatatatatatatatgtataggaaaggcaccaaagagagaaagagtaggacgtctcagctagcctcaaccaattaccaattaactccctaatggattcttcggcaaacgacgtcgataatcgacgaccgctgcttcaacagcccctccttaatcatgaatacgactcctctttgctgcaaattattctgtcgtcactacaagaaatgtcactttaccagcacagttcgctactgtgctagtaaaagtaacatttcacaaaatgcactggcaaagaggtcaaagtt

SEQ ID NO: 52595 - DNA, 788 bp, Cannabis sativa
tctaaaaagatatataaaataaaaaaataaagcaatgtacattactaaaattagtagaaattagatttatacctgaatagaagttgatatacaatgttttctccactaaaaacgaactaaaaatggtggctagagatataaccaccacaaccactacctctaccttcagtttaccctaaaaaatgaaggaaaatatgattttttcaggtatatggttttatgtatgaaaaatagaagatttagaaataaaaatgagctaaaatggtgaaatgggggtgattttatgcggtggttggcggagaggtttggggtttctctgatttgggggtttctgggtggtggctgatcgaatgaggaagacgaaggggtgggctagggttataaacccaattttggcgtcggttatttggaaataaacgacgccataggggggcacaccttatggcgtcggttatttccaaataaccgacgccataagtggcgtaaaattcacttctaaaaatttccagccctatgctgtcgcttatttattattatgctgacaaaaacgcctctaaatgcttgttttgtagtagtgggttttgttgtaaaacgagagtattcacatagcttatgtgacttttagattattgcttaatgtgaattgtatgttattctatctcagagatacagtagttggcatgcaatttaggacctttatgatctaaaaagagtttaggttaatttataatctgtcatcatatataggaagaagaagaatgatgaattagtattaacaattgggtaat

SEQ ID NO: 52596 - DNA, 2093 bp, Cannabis sativa
  modified_base (1360)..(1364): a, c, t, g, unknown or other
aacttgattggagttctctgatgcgttatgtggggaagtggcgacttgctgcaaggctctggatattgcgaaggagcttggctccaagtttattattgtagagagtgatttgagggtagttatcaacgctcttaatgggaaggagtcccattgggtgcttgagaactatgtctctttttgtattagatcctctcattcgttgttagttgtattttcactaatattagtggaaactgtaactttgttgcccataatgtggctaagtgggtgtttacccaccaaagatttggttgtattccagtttcctccatccctaaaaaccttttttgtaattgttagaatttaggataagatgaatgaggttccatctcaaaacgaattggcaatgggaatagtagcccattcatcttatatataaaaatttattttcacacataagcaatgtgggactaactctaatacactcttctcacgtttgggcctggatagtgtgggtataatgaacgacctttaagagaccacaagatcgaacgtgacattgaaaagaatcccacaaggccaaatattgagaaatttgtgagtgtacacgtcgagaaatttgtataattttgaaacaggtcagagacccaacattggaaactggcacacattggccgaaaggtcccaaatggaggttaaaggggagacatcgaaagtatttttttggaccggcaacacattggctcacaacggatcacaaatgacttttttggaccggtggcactttgggctcacaacggatcgcaagtggctatgatacagagcatttgaagcttctcaaacatattgtttttctcatcccttcatttcttaaaattagggtttggaggctctatcctaaaagattaattaaaatgagctttctattctcatttccaacccagggagcttgtcccacctccgatcggaaaaacccaaaaatatggtgtccatctgagctgcacatgggccctacgtgccacctccatctatcgcgactctctccatgcatcggcacgtgtacgtgtgtggtagtctccagcgatatttttctcgtcgtctctctcgggtttcttcatctctggctcttcttcaactccatcgacgttttttctagcgtcctctatctttgtttgtctcctctggggttctatacttgttttgtcttggtgtctttctccctcgcagatgaaaactcattaagatccatctctttagtcgcaagacaatacaatactcatgcacttcaggttattcaaatccctcatgacccttggattgtggattttggtgcttctgaccatatgacaggtgatagatcactattttcttttctaagtannnnntctcatgaaaggactgttcgcataacagatggttcgtgttcaataatcgatgaaattggaggaactataacaatctcaccaccaagtgttgtcttaaattcaatcctttacgttccaaagcttgattgcaatttactttatggtaagcaaattgagtagtgatcttaattgtgaagttaagtttgctgataagttttatgttttttcaggatgtggaatcggggaagatgattggctatgttgagttcagtaagggcttgtatctgctaaaaatcaacaaccccatgtttaatcatagaaattgttgttgtttctcccaaggtcaatctctttcctcagtaaattagtccaataaaatcagtactatcatgttatggcattaccgtctaggtcatccaaattttgtatatcttaaacacttgttcccatccctatttatcaatataaatcctcagtctctcaggtgtgatatttgtcaattttctaagcactctcatcactctttcattccaagacctcatcagccctctcacccattctcactcattcacggtgatatatggagaccgtccaaaattcaaaatatcagtggggcacgttagtttttattacaagttgataatcacagccgcctaagttggacattcctcatgaaagaaaaatctaaaataagtcatattttccaaaatttccacaaaataatctaaactcaattccaaacaaacatcc

SEQ ID NO: 52597 - DNA, 903 bp, Cannabis sativa
tagttagggtgttacattaacatttctctcatcccacacttattaaagtacctaactaatggtacatttaattatcacttttagataaacactctatcagtagaagagattattccaatataatctaacctttatcaaatattcccacaacacgtttctaatattccattgatcctcccaggttacccatcgtgcaagaataaaatatcatactattttactttaatctcaatggttctcaataaccttcttttaatattaatatcatagacaaagatatcaactttgggatttcacaaaattagattattccttcgtatgaactccatatcctcatttattgtataaattgtctacactgatagacaaaatattaactcgtatgtccaattgttactactcaatcgaaatcataagatcccacaatacactattcataattatgtctttctattccttgtgtgggatctcctaagttgatgtactgatttaacttattaacaagccaaatattcgtttctgatagatattcaattatagatttccttacttccatccactaatatatactcatctcgatgccttgtaatctttacttataaatacattccttcctcttgataatctctagaatgactgttgattctgcatcctaatacaaatctttctagagtactttgtcctcactcgtatgctttccaagatgacactctgaaagatttcctattttgagattactccaagttaagtatacttaactctaaggtaagctcatggtgagttatcagaaagtagatgcttctttgtcgttcctaattataatgtccccgcttctagcctccattgggtccttacacccacggaaataatggctcttatacacgagtatgtcactctggctgc

SEQ ID NO: 52598 - DNA, 1500 bp, Cannabis sativa
cagccagcaaggtgaaatcccatcccaaaggctaatcttcattcggctaggtctgagaacgggtggaaacaccaaaaaaaacaacttgagaagtgtgtcttgtcacttcaaatatctagatcaacctaactcctgtaattggtgtaatctacccctatcaatacaatagttttaccagccaattagtggataacgagtgcccaagccttacttagcatagggctggccgacccaccataccctctcctagagaatggccagtcagaccctaacacatttagggttgcagctcattcaagaaaggccaatcagccaagtccctgtagcaacggatccttctatgcaagcacagttggaccaaataagggacacgatcaagggcctagctagtctaaaacctttagaccttaaactagataggtcaaggggataaccattctcgacatatattaatgccttacccttccccaagttaaagatgctggtgtaaaagatgaatatcgggcaagaagacccgctggcacacatcaaatattttaagatgccaacttaatttctagaaaaaattaactggtgatgtgcggtgtcacatattctcggcaactttgtcgaaaacacctcagcaatggtatttctagatggtcctaggaagattcaattcctagaacaagttttctcgagacttctacacacagttctcatcctcgaggtttataccatcaccattggaagacctagtcaagtcaaacaacgataatgagaaccttcaaaggattacatccagaggttcatgactgaggccaccaaggtcaaatgactcatagaaaaggccaatatacaacaatattggaaggaatcctgccactaagtgacttctagaaagatatttggaggatctcgaccaacaatatgaaggagttccttgacagagctgacaactttattaagctagaggaagctgtcagacaagcccagacagggaaagtcgacaataggcagtcacagggcatcttacagccccacgacttgccagatgtgcaggctggcactagcaactctgcccaaacctctagtggtagaaacattagggcgatcgcagcaaaaacaactttggaagatacatttgaaaaaaggggaagtacaataattctcccacgacacgaaacagaaaattcaaggaggagaagtacacctgcttcaccctcctagcggagaaacttgaggtcatcttcatggccacttagggaactgtcctatacaagaagctccctcccatcaaaagggagttgagcaagagggacatgtcaaagttctgtcggttacacaattttagccatgacaccaatgagtgtcaaaatttgaagtgggagattgaattcctaataaggaaaaataatccccacctgcatcgttatgtacagaatgaccaaacttaggcacaaggtgcccaaaatggagaccatatgccaactctagtggggggtcacttagaatcattat

SEQ ID NO: 52599 - DNA, 2276 bp, Cannabis sativa
  modified_base (2238)..(2244): a, c, t, g, unknown or other
gaaactcacacttatacaaatgtggcaccacatgtagtttttaacattatggaaactttgtccatatatttcactacaaaaatgttaacttaaccaacaaaatcatgccataatagtacttcaacaccctaccttcttttttttcttttgccataaatacaaacaaagatcataaaaaataaacatatccccttattgtgctaaaatgtttttgtgaaagtattattcaaatgttagtgaacctaaaaggaggttataagtgactcagaccaacgaattatttctactttttatggttaaaaattaaagcctattattttcaggcaatatgtcaattatggagtatatgattctttgcattgcatcaactttggcttatagagtttgtttatcaaataataatataaaataaaaaagacataatttttttttgggaggggggacttctttaaatttaaattttctactagaagaatccaatacttaaaggaatatggtatcatactatataatagtaaatggaaaagcaaaaaaaaaaaaaaaaaacaagaagaaactcatcttacttgaacttgaagacatcatttttctagccaaaattctcagaacatttgttagttttttttttttatatataatatataaatgcatatgactatcttgtaatagattgtatacttccacaagaaaaagttaaacaatgttcaaaacaaaacaaattaaaaggcattatatatgaggtgcacaaaaaatctatattgctacaagttcaaggtactaaaatttgatcagttgcgaagaaatgaagaaggaaaaatgccctttcacaaacaatgaatcccttgatcaaatgtggcctaaagtattttttttctcagagaataagctacactactactactattttgataagttcccattattgaatgtgtctttctcggcttattcaatagtcttcttttcctagacctaacttttttggatacactactcaaacaaacaccagaagactcagcaggaaaacaataagctatagtgacctcttctggtctcaaagaatttagtgatgaatgagcaaaaagagaagccgttgttgctttatctggagatgaaatatacacctctttaattactttataagatttctatgaaatgcagaaatatcaataataaaccacataaattcacacacagtaacccacagaccccacagacccatcccctaatagattccaaaaattattctctaaccatgtgcaatttgaccatgcaaacagagaaattaccaaaatcaacctcaactacttcctataaagcttaaaattactctacacaaatacccacatatgagaccacttttcatatttagttgaaatgtaccaaaaaaaaaaaaaaccaaacttaccataaaatggaggtttggttctctggttaatggggagcccgaatcccttcttcttggccaagcttttctttcccatgagtatttctttttcaccaccacaggttgcccctcactcctacaaccactgtcacctccgcgcaaccagcgtctgaatcgcctaaaaaacttcgaaccccaccagccacgttcgacccccaccggtgaccttcgacttcgaccccactagccaccttcgacttcgaccccaccagccaccttcgaccctcaaccccgatcagccgtagccccttcttctgaagtgacgttgtaaaaatagccctttttcaatttttttttttaaaagagttgaacagcccgttgaacagcccgttgaacaacacatttaattttccaactcaaacccacttttcattttattttagtttcctaaataatttttatttattaatatttttggaataatttgttatttgataattaaattgcaatgccatgtcattatatagtttctttacatgaaaaatgctacatcaattttaacaaaagtgaaacggagagtaactgaaggatgacatttaattagtttaaatagtttgaggagtatttttaacaagcagaatattataggggcaaaagttggtagggtaaaaagttcaggggcaaaaatactatttattctaatatttataataaaatatcataactaatatcataaattggttttcaacattaatggcagccatgatttcattaagagaaataattacaaccgtctttacggtaagttggcaaaaattgaacatgtaatagttggaatatgttttaccaggatnnnnnnntactaccatgtatgttatttaacaccctaaat

SEQ ID NO: 52600 - DNA, 533 bp, Cannabis sativa
tattttaatcacaatatacacaatataaaaatatttatttattattagtcacaactttttcatttttagtcacaagttttattactaaaagtaagactttttgtagcatcttaaaacagtgttatttcagtaagtccctatctgtttcgacattcaaatgagctttttcgtatatctcttttcatgatcatgtattctagttatttaggaccacgtatacatttttagaaaattcagaatactactttacaatcgaaaataaaattcaaacaattgcttaccacgtatataataagaaaaaatagtcacgtgtgaaatttatttttgaatactaaataattataatgtacaagattataaaaataatttgaaatgaaaaattctcccaaatgccaaaataaataaaaaatatactatttccatatttaaaaaagtgtactatatatataaacttaccctgcataatattataatataattatatgtaggattggaggtatcctttacgagtttataaaaaaagataattaaaa

SEQ ID NO: 52601 - DNA, 1509 bp, Cannabis sativa
gggcaatttgaaagaatcactcacttctatgaatagatgatgatgaaggtgatgatctttagtgggtgagccactaaactgtcccacagtttgaagcatctggaacataactggcttcaattcaaactgtggagcctaaatttctggcctcacaatgcccgaattaagctcattgaaaagaggtgttgcatactgttagatgacttgatctctatcatctgccatgatcactgcattttgaccattattaggggccatttctctttgagctcactgtccatctccttggttatccatcatttctatttccccttgtgctctttgttgtactcttcttctttctctcaatgtgcgctcaatttcaagatcaataggaaatagattagtattaataaattcttggtactcattcatataaaatattcacctctcaatgcacaagagtaaaaaaaaataagaacaaaataataaaccaatttccaagctaattgactatcacaataaaatatatttacagtcccaagcaacgacgccaaatacttattgtgaaaattagatatacgcaagtgaacgtagtcacaaacaagtaatacaatgataaataacaagtatcgtctccacaaggactgtaaaaaataaaatttctattgtaaaagttaattaccaagcaaaatgctcaaaaactgaattggaatgattaatgctttaactaaataaactagaaagaaagtaaattaactcaaaagtggctgcacaatgaaaataaaaatgaaatgtaaattattgaaatgtgaaaggcctgaactattgaatccccctatgtttagcaaaaattgtgcggtttgatgcagcaaaacgttagcaaaaccttaacaaaaatcccagattaacaagaactccattaaagtgcacaaaactcttccaaattttatgctataaatctttgaatctaatcaaacatattcctatgccaatcaagctcaagaatgtcatttccaagcacagttctcaaatgttacacaaggacataacatatttctatgttatctctaatctaatctaacaagattaagaacttgcatcatccaagttaagtcctttacatttaacctttccagaattaaatataactcaacatcaagctattggtggccaatcaataacaagaaattaacataaagcacactcgaatgaacatgagaatttttactaaatatttgcataaggaaattactaaactaaaacatagggttcttcaacaattcaaacaataaaaagtttagatcatagctaacttataaaccaccattactgtaacgaccggtttagtaattttagattagtaaaggacattagcattaatttctgttattttatgattatttatgaaaataattacttgtggaccctaatatttagaaatgaatattagagttataatttatcaattccagagattttattaaagtctaggggcattatttgatttatatgtgaaatatgttattt

SEQ ID NO: 52602 - DNA, 1562 bp, Cannabis sativa
  modified_base (1269)..(1270): a, c, t, g, unknown or other
agtattttcttcacgaacgaaattacacagtaatattgtataatatataataacatatgaacacataacatttaatgaaattgaaaaggcatactgagtctgcgtaagatcatcataatggcagatgctgttgtttcttttgtgattgaaaggcttggagacttggtgatttctgaagctcaattcttgtatggagtcaaaggtcaagtggggaatgcaaaaatcaagcttcaatgtatgagtgctttcaagaaaattttctgatttcccatcgtttcgatttttttttgttggggaaaattctttgattcatcgaactggaaaagaaaagggaaccctttctttgattaatctgtacagagatatggttgatgtagctgacaaggtggcttattttcaagccattacaggtttagaagattccaatttgtgtaccgagatcctcgccgcccatggttgggacctcgaactcgcgatctccaattacacttctcccaattccattccaccggaagagattcccatatttcaaacgtcatcgaccgccggagttgccggaggaagatcctcctcttcctcttcctccggttctgaatttcctgaatctttggtgagagtccctggtcaacctagtttggcttggaagataattactttaccgatttctgttatttttggtagtctagggttaatctctggtgcgattgggctcggattgtgggctgccggtggtgttttgtcgtattcgttgggtgttgttggattaggtcatggaaggaatggggattcttcatcgtctacaacgccgttggtttcggtttcggctgctgcatctgaagcaatggagttcgttgctggttttgagagggattatggtttgagaagacccaatttcgttagtgaagggtttatggatgctttacagagatcgaggaatgagtttaagcttttgtttgtgtatttacactcgcctgatcatcaagatactcctttgttctgtgaaagaacactctgttcggaggtgttggtggcttttgttaatgaaaatttcgtgtcttggggtgggagtattcgagctagtgaagggtttaagatgagtaatagcttgaaagcttctagatttcctttctgtgctgttgtaatggctgccactaatcagaggattgctttacttcagcaggtatgcacttatctcttcttcaagttttcttgttggttaagtagttttctttcctaatgcaaatatgacatatatatatatatataaanntatatatatatatatgtatagggagtttgttaggtgacggcatcactttaccatatagttatatagttgtaataggcacttgattgttttcgggaatagtttacaatatcgaaaataaggttgaaaatagtctgttgcatgctatttgaactctattttcggtattgtaaactattcataagatctgtctattataagtataagaaatgctcctactgtaggatatggatatatatttatgtatttatagggagtttgttaggtgacagcatcactttaccatatagttata

SEQ ID NO: 52603 - DNA, 1206 bp, Cannabis sativa
acaactcgttaataatatctttcgaaatataacttttataattcttctatcatctttttttcaattttattggtagttgatatataaatggatacaaatttaatattttaactctttttactttaatgattaaaaaactaaaaattattatataagaaaaaagtattctattttattattcattaatgtaaaaagggtgaagggtatttaatcagtatctatttatcaactaccatctactacctcactcattttacgataaaattgaataaaatgtgatggaaagaatatgttatcataaaagttatattttaagagatattattaacaagtcatatactataaggggcataacttgcaatgtaaaatgtttaggaaataaaaatactaattatttttcatttttaatgtacagttgtgttgcgttattactttttattaagaaactattagaaattgtcctgacaacgtgtagaaaataatactatatacaaaataaatgtattattattttcattgtcaattaattttgagatgaaatcttatataccataatgacacactttcaaattctaacagaaataatttcacaaaaaaacataacataattaacaattcatgcatcactctcaacaaaaagacaaagaaaccaagctgcaaggaccatagaatacccttttagcaatactccaaaaagcatgaagaaaaaaattaaaaaaaccccaaaaaaagcatagcactaagtaatatcaataatgcaaattaaaatcaaattccacatattttgatttaaaatagaatgtatgtatgaattacaccaagtgaccatcatactattattatagaatagaatgccctttagcattattaataaccatctctagataaaggaagttagttagaattgtcaattaatttttctcaagtaggtaggatttgaaaagataactaataatagctatggtagtactagtaatatggaaagagagagaaggttgatgtgagttaaattagtgagtaagccttaaccttatatgtggtggtagagtactcaaggttgatgagctttaataattgataaagcaatttatatatatggaacatttcttaataggtattacatgtgaatggttattaaaatttaactataaatattaattttaaaaatacgaaaccattgaatttaatctaataacgaataattaa

SEQ ID NO: 52604 - DNA, 6191 bp, Cannabis sativa
ttaaaagtgtatttaattagtagagatcagactgctgctgtaaatgtaaagcaggtggtatatggaagcttgactagcaagtttaatctactattatgacattgattttgtgaagttctcttaagaaacaaatcaggaggggttttgtaaaattatttgtacatttcaagaattgtatgcattggcaaaagcatcgtagatgaggctgtagaatcttggtttataacaataaaccaaaaatttctgggtaaacaacaatgatttttttttatttttggtaatgtgagtatatatttttgtgtgtgtgtgtgtgtataacttgtgcctttcttgaataagatcttaatgagatataagataatgaacttcttcagtgaatggttgtattcaagattgggtaaataattaatttgtcatggactgtgtaggtggtgaccctctggtacagagcaccagaaatattgcttggatctcgtcattactctacccctgttgatgtgtggtcagtgggttgtatatatgctgagatggtgaatcaacggcctttatttcctggtgactctgaaattgatgagctgttcaagattttcaggtgaatatatttccaacttaagtacacaaacctaatccctccctgtttccttgcttttctcttttggtgaaaaattgtactttcgcacaaaaaattgttaatttgactcaataaaagacaaatcaaactgctgatgatactatttacaagtgtgtatctaattacagaaaaaaaattataatacgcattcatgattgtcttggcctctgaagttgagtttttgagcagcttgggccatcaaaacatactttagacaacaaaaacactattagttgtttttaaacaaataactgaatgctatatttttttaaaattatagacttcattatcaacacttgtacaaccaaactccacttccactccatgatagctactaaactagaaaattctctctacacataaatgtgtgtttttaatttactttcaaactagaaacatgactatcccaaaacgagatataaaaataggatttcaattaaaaattagacattctaaaaaataaattgataacataacctttatcacatggttaaagaatgaaccataagaagtattggatctgaaaaatcaacttttccttttcgtatctctgaatctttaattctttttcctttgagaactggtgagaaaagacaccaattttaaaagaaagtaatacctttcatgattcttaatgaaaattttcataccttgatcttaatcattttgaatgcatccacatgtagttgatatgttgctttccttgaatttctttactctttagaaatcagaaccaattcatcagttgtctattaaacctcttgtctaattgatgatgaattttacttttcatcacagtaaatttaattttctttaggctcgtcgactttaccatttcttgtatatctgtatgcacttgggttgggctccatgaccacttgcttcctttatgtaggttggcactgataccaaataatatgcatgtgtagtctttgagttagtgttgtctcaagatagatttttttgagaaatttggccttcaaactcacttttgacatcaaaacgcttttcacacttcattaaatcatgtattataattataaataattgaaaagaaaataaaatttcctaaacttttattgctacccaagttcacttaaaataacagaattacaacaaccaatgactgtacgtcagtcatgtggtcaatgacggtaagcgtatccttaggacctctgttttcaattactaattgtggatatagtagtgtggtgacatgaaaagaaatatttgctgaccttgtggaagttgatttatctctcatcactgtatatcattcacattatatggttgtgaataagtgcaaaagagtttattggtgacatttgttcatttagatacaaaagatgttctgaatttgcatgtaatatattctaacatggttgatttttacgtgaagaatcttgggtactccaaatgaagatacatggcctggtgtctgttctttgcctgattttaaatctgcatttcctaagtggccttcgaaggtaactttgcttttaattatgttaaattagttgtatatttgtctttgtgattctctaaacacttgtgtgaaccttcaataatgtatcatataattggcaggacttggcaactgttgttccaaatattgggtcagctggtgttgatcttctttctgtaagttcagatctactgtgggctcttactgttatatctttattttatttttaaaaaagtgtcgtgtacatttatagcataagaactttgctgaggagggggaagttaaaaagattaagaaattatacatctcttgctccttacaaaactatcttacaacatttggtatcttttcaatactaaaaagaaatccttggatgacacttgaaagttcacttgtactatacagtaaaacatttgtgaaaagtacaaagattctatcatgtgatatattatacattataaatttggtttgctgtttttactaagtactttgtttattataattattattgtaattcttttggcaacttgacagaaaatgctttgcctggatcccagcaaaagaattacagcaaggagtgcccttgagcatgaatacttcaaggatatttcattggtgccctgacctgaacccaatttccatttctttggcagacaagacaattgtctataattttatgcctagaaatcttgtggatattgatgtgtgagaattgtgtgctttgtgatttattttttctctcaaattctttgacataattctgataaatgttgattagatcctttagctgatatattattagcctcattgtcttgtgagagagcctgctctcaggtctccaccgtctcttgaaatatatacataaaattgtgtttgtaatggactatctatgtttcagtgttttcttgaaaatctctattattttttccctttgaggaatcgaaaaatattttggtttaatgtgtgctcactcgttttttcactctatactgattatgaataagatgaaatgagagctgggcaagtaattcatcgttaccaggtcgaattatttttttagattttgttcgatagatttcttatgttcgttaacactaagtacatttgattaatgcaaaaaagaaatttgctgctcggggctgttcctccaattcaatttgttctattttgcttatagtacattcgattttcactatgtgtagattttatatttggattaaggtgaaaaatagtcctaaatacattgattagattagttttttttttttgaaacataatgcattaatcaaatcaaacattacaaggattaccacctcaatccacatagcactatctttacaattcaaagcatttttggctaacaaatgggccactctattagcttcctgatacacaaacgaaagacctgtgacattagtgcacaaaagcaactcctgaatctgcatcaataaaccatcaaactcatgacaactttgagcctccttattgtgcaccagtaggaccgcctcacggcaatcggactccaccccgaacacaggcagccttcgctgtaattccaccatcagaccgtccctaatagcaacgagttcaacaactaacgctgaagtcggcaaagcacaccacttgctagatgcaaattaaacattaccaccatcattccagatcacaattccaatacccgatgcccccataagctctcgaacaccagcgtcaacattaatagtgcagcaactaacatccggcaaattccacttagctgtagcacgctgctcttggagcttcctctgcggcccaacctcacggaactccttcatgtacctgccacactattctaacacatcacccggtgtaggagccaccccaccatgaagaaccgagtttcgaatggaccacagatgccatgatatcaacaagaacaaatcaaaaccatctgcagacaacccagcttccaacacccccaaaaaagatacaacatcaacatttttatgtaccttcatttgctcccataccccactgttcctccacacatccctgttaccccgacaaccccataaagcatgataaacatcctcatcataattctcgaaacaccgaaaacacttcttatcaatttgcatacctcgattcgcaagagccaccttcgttggaatccaggaatggctaatcttccatatgaaatgtttgaccttcggaggaatctttcattttcacatacgttaccattccatcatctttttattgtccaactgagcctctctttccaacatatcactcgccagcagatacccactgcgaacagaatactcaccattcttactatagtgtcacattactttatcctcaacccccgcaccaatactcagaatacccaaaatgagctccgcatcatcaccattaaagacagctttaatgaaagttgaatcccaagtaccatcaacccattttagattagtaacatacatttggctaggaagaaaaggtgtatcatagatcttgaaactcactggccgcgacaaccacagatcctaaagcacacacacattactaccatcaccaatgcgccatctatacccttgtttgataagctccttatcccacaccaaactcctccacacaaatgaggcattagaaccacactttgcctccaacaccaccccattaggaaaataacttgctttaagaacttgagtacataacgactccggaaatctaatacaacgccgaatctgcttagctaacaaagctttaataaacaaccccaagtcccgaaatcccagtccccccttctccttcggtctacaaagatagctttatttgcaccagtggatcttattagcgttctcaaacgaaccccaccaaaatctcgccgccattcggtgaagactattaatgatactcttaggcaaacgaaaacaactcatagtgtaagtaggtattgcctgcaatataacgttaattaaaacctcatttccagccattgaaaatagagacaccttccatcccctaaccttgctccaaactttgtttttgatcacattaacgagctcttttttcgtacgaccaacaaacgagggaagtcctaaatacttcccataattctcaaccactcgtacccccatgaccgcagccaatctatcccttattacttgaggaaccgccttcccaaagcacatttcagatttatggaaattaaccaattgcccaaaagctttacaataattatccaatatctccttgaaagcctcacattccttatcattagcttcaaaaaacacaagactatcacccgcaaaaaataaatgggaaactgtcaacccatgtcggccaaaattaagaccccttaacctacctgcattctccgcatgtacaatcaaactcatgaaagcctcatcacaaaaaagaaacaagaacggagagaggggatccccctgtctcaacccacggccaggactcacatttccgaccacttctccattaagcataaacgagaaactcaccgaagtaatacaagccatgatcttatttacccacacaccatcataacctaatcgcaacatcattgccttcaaaaattgccactccacccgatcatacgcctttgccatgtcaagcttaagcgcaaccttcattccattccgaaaccgatttttcctcatacaatgcaacccttcaaaccccacaatagcattatcatgaattaactgaccatgaacaaaggcactctgagaagtagaaatgatagaacccagagaacacttcaaccggttagccaaacatttaaaaacaattttacaaataatattacacaaactaatcagccaaaactcctccaccttcttaggcttatccaccttggggattaatgtaattaccgtatcatttatacaatcaacagaaacatcattattaagaatgtttaaacacaccgaaatcacattatccttaatcttagaccaaaactgttgataaaaaagaacaggaagcccatctttacctggtgctttagccgggttcatctgcttcactgctgaagtgacctcctcctccgtaaaacctcacacgaactcgctattcatctcagctgtaactctatgc

SEQ ID NO: 52605 - DNA, 1417 bp, Cannabis sativa
ttcctttcttcaacatactaagaggaaggaaacaaaacacttgattgagtagtggacaggggagtgtgaaaaagcattctaagagctgaagaagcaattggctcaacctcctatcctatcaaaacctctacacaacgaggaattaggcgtatacttagctgtcatagagtatgttgtgagtgctgtcctaataagcgaagaagacggtatccaacatccagtatagtccatcaacaaaaggctaatcgacgttgaaagtcgatacccactcatggagaagctgacatactatttactcttagcatcaaaaaagctaaggccgtacttccaagctcaccctgcaagggtgtacactgaccaaccattatgacaggttttacaaaaacctaaagcaactggccgactactcgagtgggctatcatgcttggccaatttgagatcacataccaactgagaatggacataaaaggccaagctcttgtcgactttgtggctaaatgtacaagcatatctcttgaaatctctcaagattttggagaaaagcaagagccaaagaagaagcaagagtaagagcgtgaagaatcaacctggaaattacatgttgatggaactgcactgaccaactttctggtgtaggcattgccctcattacacctgggggcaacatctacacgaggcaattaagtttggcttcaaggcctccaacaatgaggctgagtatgaagctctaatcattggtctcaagctagcgcatgaagtacgggctaaccacctagacatatacaatgactctcaactagtcataaattaagtcctaggtgagtacacaacccgaggtgaaagaatgatagcctacttgagaaaaatccaagacttattaagtcggctcaaaggttatacaataaggcaaatctctagagaaaagaatgcaacagtcgatgcactccctcgtctggaaagtagcaccataactgacaaggcaaattttggtgcccatacagttcttaaaagaacaaagcattaccattccagaagaggttgacatgttggatgaaagtccaacctggatgaaacccatagcagcatacctccaaactggagccttgcctgagaacaaaaatgagacaagaaagatgaggagaaaagttgctgagtacctaatcctagatggagtagtgtatagatgaggcttctcaatgttgctcctaaggtgtgtcactaagacagaagtcgagtgattattggtagaaatgcatgaaggcttctacagaaatcatgccatggggcaaagcctatctaaaaagatactctgacagggtacttttggccaaccatgatcgaggattcgatggactatgtcaaaaaatgtgacaagtgctaaagattctcaaagatcccgagagctccaccaaacaa

SEQ ID NO: 52606 - DNA, 741 bp, Cannabis sativa
gtaaaataaattccaacataacaggcgtccaatgttcctttactagatttgactcatacctgctcacaatttccactacatagcaaatgttaggattagttgatatcatagcatacatcaggcttctaactgctgaagcataaggaaactttctcatatgttctatctcttggggatcactgggatactgctccttagatagttgtaagtcatgtctaaaaggcatggtttcccctttggcattagttattgagattctgcagaaaaattgctccttatatctttgatgaagtaatttgttgatatagagcctgagattcaggagcagtttttcttctttatgcagaatctcaggctctgtatcaagctttgatttggtgttttgcagtgtaattcccgatttctaatagaattggagagtattcaattagttacgaagatcaaacataaatggaaggaccgttcctcacttactaatctagtgtccaaggttgttgaaccctaattttatatttcctaatgtttctatcatgtaccaaggaatgaaaatattttggcacataatttagcaaaaggtttattaggcttagataagattttggtttggagaactaatcctatattctagtcttatgtagttgcaattatccaaaaaaaaaaaaaatgacaatagtatttaaaatatacttaaaatataattatcaatatatacttataattatcaaaatttctaccatttat

SEQ ID NO: 52607 - DNA, 1055 bp, Cannabis sativa
acatgtttatagatataggtgcatacaagtattgctccatatatggtgtcttctcttaagttgtggctaatttgtctattacatcagtcaatggtagtgtggttcgtaagaagatttggcatcatgagacctcggttttatgctcgatgaaacggggttattggcttgcaatggtgccttcttgtgggtttgttagattggattctggcttttgtgaaatcttaagtggcatggtatggcattgtatcatgctgaaggacattagaaaggcagtgagtgatcacttcttggtttctactttctattagtagccactggtttggacttgaatcaattgttcattgtcttgtggcggaattcggtatggattctgacggggtgcaacgggtttggttggctttctcaactgtttcgcctgttgtggatggctgaagttattacgattctcaaagagcttcaactatgccataggatagggcacttgagtcttattgttgaatatcattttctgtttgttaaaactgttaatgctaattgttagagatgcccttcttatatgtaatgaattcttttatgttactttttctctattgcttggttttttataattttattaaagtaaaatgtaagatttgatatttccttagtatttttcttgttgatattttattttagggccaaactttattaaggaagtattgccctatattaaaaagatttcttcattaagacacgatttaaataagttctctcttttttgtccaacaaaaaatataattaattaaggattattatataatatctatgtagtggaaattgtcactctttatcattattgtccactctaagaaggagcataatcatgagtcttgtgatattatacacaaacaaatttgctcaagtgggaaattaattgcactatgttatcattcatgggtgagtggagactttttttctccctactttcacatttaatcttaaatttttcacaaatactacattagaattggttggtgtgtttcctataaatctaaaatttaaagcttaaaggaggt

SEQ ID NO: 52608 - DNA, 1057 bp, Cannabis sativa
ttggagttgacgttatcctattggcacatttattctcgaattacagtgtagtgttcagattgttttgaacaatcctttcttgattcctacttttaaagtaatttagttttgcttccgttttgccaattatagtgttgacattatgtttgacttcgaataattggtaaatgttattactctaatggttttttcaaattatcattgacttccttaacttcctctttcattattgtgaatattatgggtaagacatcttatattaagataacattcttattattatggcacgatagattgggtcatatttctaaagaaatggttgatcgattcattagagctgaaattcttcctcctattgatgtttctggttgggatacttgtgcttattgcacttgtggaaaattgactaaaagaagaaagaagattgctaactgttcaatcttttttagaaattatccatactgacattagtgcatcttattccactacgttaaggatacaagtatgtcataactttcataatgatttttctcaatatggcttcacttgattcaaaaaaatctaacgctcttgataaagttaaaatctttcgaaatgttcttgagatcatttagaaagagtcatcaatgctgttctttcagatcgtggaggagaatattatggtcgttattcaaaatctggactacacatgaggccttttgctgaatattttctagaaaatggtgtagtttctcaatacactatgtcaggttcacctgagcaaaatggagttcctgaaaggagaaatcgcactctcatggatatgctagaagcatgatgagtatatcaaattttccagattttttatgggatgaagcacttatgattgcaacttatattttaaatcgtattcccaataaatctgttcctgaagccccttttgagttgtggactgggaggaagcctagtctgaatcatcttcatgtatgggattctccagctgaagtacagatttatgatcctaatttaaacaaaagttagacctgagaacaaatcgttgttatttcattggttatcc

SEQ ID NO: 52609 - DNA, 1771 bp, Cannabis sativa
ttacaatctataaaataggaaattacaatgattacatagttacaatacacgaaacaggttgccatatatctctgactcaatcccacgattatagggattgtcttcatgtctagacattacgagatcattctaaagtaattatctcttgtaagtagctcgatacaaaagacttctacctagttggatgttctatctaccatcctgcttgggtaatcgacaattatagatgttgatgaattatgcgcaggctattagggacatttacctccgcccaggtatcaaaaatgtgagacacttgtcgcttagtcctcttgcaatgtcaatgtgcaaaaaataggataacatttgcccccaagtttgtgcgggacctttcaggtcggatgtggacttcactcaatgtagagtcttgtccaaacaggtgacgcgtatcctaggcatggattgacgaaccaatgtgaccctgaccaatggtctcttaaaatttggctcattaatgctgattgctagctttgcctcgattcgcatcttaatgtccgcgcgtgaagagagtcattctgccagcaatgagtacataacgtacacttttagggggaatctaaggcatttaaaatttgaaatgattgcttcttcctttcaaacaatctataaataggattgaaaatcctaattaatcattttagtcattttcattcttgaaaaaccagagcaaagaagtttttctctctcaaattcttcaattaatttctaggaaactcttgccagcaccatccaagcatatcaaaagattcaatttagtgagtaagttcttcatttattttttttatacatttgcatgcttaattttttgggtttctattctccgaatcttaactattcttgaacttgttctaggatagccataaaattctaggtttaagatttagaaatttggattatacttaaccacgtgtttgattctaactgcgctttgattctaaccccacgatattcattttcagttatccatttggagtttaatgagaatcagattccaattcagagttttgaacttttgggttgaaaattctgtttctgaatgaaatttttgtttttgattcctcaattagacctggtcgatataatcaacctgtttttttatttgttgcctcgacaaattctcatcttcttgtctcttaacttttgtagatgaaccctggtcagttttagggaggtaaacaccatatcgaccaggatctacttcaattgttgtacgaggatcatcctcgtctccattcctatttgtcctcatccacttataacctttctaaatctagctttgaaaactgggagataagtagtgagcacatgccttccccaaaacctgaggtgcaacaccatttttatcccggccagatctaaggttaagggtacggtcgctttatttgggaactcaagaaagggtcgagatgctatcttttgtccgactaaacatacatagtccgtctagacattgttgatacttatcctgagggccatccaaacctttctgctacatgtaagcatgttgccacttttgtcgtgactatcactaggcatacaaataaagttccatccacaagtagaatgatggcacaaactaagaagattatacggaaatcttcattgtctgacccacacgtcactcgtctcaccaccttgcctagtgctaaataggtctgacctgctagtgaagaggaggacacaactggggatgttgcattccaagagatggaggacatagtcaaggtctatc

SEQ ID NO: 52610 - DNA, 504 bp, Cannabis sativa
aataaataaataaaatattaaaagtatgttataatatggtattttatatgtattattacttacatgtgttcatctgcagtccaacgaccatttttagaagttgagttttggttaagaatttctaaagaagaaggaacttcttgttcttgatttgcagtagtcggaacaagagtgtgattgagaatgggaattaatgtatgggtgttcatttcaatttgtgcttcttgcttgtttatactttcgtcccaactactctcactattgtagttcaaataataatgttgggcaacttcagatactggttgagatgtatagaaattgtggtaggtgtttgtatttgtaactgatgatgacgatgtactctcatttaaaattaacatggacggcatgatttttaaatgattgtttatttgatcacccaaagaagtaccactcaccaaattatgatgatcacgatcctgatcagtttcaatgaattggtcaggaatatgatctagtattctg

SEQ ID NO: 52611 - DNA, 2475 bp, Cannabis sativa
  modified_base (2191)..(2208): a, c, t, g, unknown or other
aaggtatattctgttaaaccaagaaataccgttagataggcacttttaatatataaagatatataaaaaatcaccatcaatcaaaaaaaactttgctatagtttattttttttaaatattagtcaccaaacaaaaaaatcgttgtttatttctttatttttggctttaggtactgtaataaaatcccaaaagttaacttgtcatttgaatttcaaaatagttttggttaccctatctatgggtcaataattgtttacattgtcgtcctaaaaatctttatccatttgagagtcaattaatatatcttttcaactccaagagtgacaacccttcctcttttcaaatatttcaatacatgtgaggatttagagttgagcctttttactttaaagatttttcaatattatctgtgtaatgaccgcttttataatatggattagtaaaggcaattaacattaattattaattattaattattttctcgataactgcatcatagtgtttatcgatgacatcctcgtatactctcaaccaggagagtagcatgagcatcatcttcgaatggtattacagtgacttagagacataagttgtatgcaaagctcaaaaagtgtgaattctgattgtcagaggtatcttttctaaggcagattgtcagaaaagatggaattatagtttacccgagtaagattgaatcagtgaagaattggccgagagcaaaatctgtacagaagttcgaagttttctcagtttggcagggtattatcgatgtttcgtcaaagaattctctaagatctctatgccactaaccgagttaactaagaaaaatcaacaatttatatggtcaaacaaatgtgaagcaagttcccaagagttgaagcagcgtttgataacagcactcgtgttagttttgccatcaaatggagaaaagtttgttatttactgtgatgcatctagacagagtctgggatgtgttctgatgcaagctgacaaagttatagcttatgcctcccgtcaactgaaagattatgagcagtgctatccaacacatgatttagagcttgttgctgtggtatttgctctaaaaatatggcgacactatctttatggtgaaaaatacgagatttatactgatcataaaagtctcaaatactttttctcccagaaagatctaaatatgtggcataaaaggtggctagaattggttaaagattacgactgcgagattttgtatcaccccgggaaagccaatgttgtggcagatgcactgagtaggagaggtcccgggtaggttttcaccactgttatgatagctcctcaactggcctcagagaggagtaggagaggtcacaggcaggttttcaccactattatgatagctcctcaactggcctcagagatggttaatgcaggaattgagtttgtagttggaaagttgcataacttgacactccaatctgatttgctagagagaatcagaaaagcacagttagaagatccttagttgaacaagattcgagatgaggtgatggccggtcgacctaaagacttttcaatctcaaataattaaatgttattgtacaaagctcgggtttttgttcctaatattaatgagcttaagaaagaaatcctcgacgaagcccacactataccttattcactgcatctgggaaccacaaaaatgtaccatgatttaaaaccctacttctactggtatgggatgaaaagagatgtggtagattatgtgtccaagtgcttaacctaccagcaaatcaaagttgagcatcaaaggccggcagggttattgcaaccattagcccatcctgagtggaagtgggaggacattgcaatggatttcgtggtttgtttgcctagaaccataggaatgtatgattcagtatgggtcatagtggaccgattcacaaaatcagctcattttttgccagtgaaaattacctatacagtggatcagtacgctgaattgtatgtaaaggagatagttcgtctccaggagctcctaaatccattgtttcagacatagatccaaagtttacattgaaattttgggtgagtcttcagagggctatgggtacaaagttgaagtttagcacaggtttccaaccttagactgatgggcaatcagaaaggactattcagataatagaggatttactgcgagcctgtgtcatgnnnnnnnnnnnnnnnnnnagtaagtacttgcctttaattaaattctcctacaacaacagttaccaaagtacaatagggatgggtccctatcagatgttgtatggtaggaaatgtcacttcattgggacgaaattggaaaaaggaagtacttaggtccggaattagttcagaggaccaatgacgctatagacaagaccaaggctcgaatgattgcttcccaaagtaggcaaaaaaagttatgctgatccgaagcgtagagatgttacatttcaggcaggggaacat

SEQ ID NO: 52612 - DNA, 2232 bp, Cannabis sativa
ggctgcgtgaatgagtgccaatgctaacttctctagctgactgttcctagtttctacatcaagtaagaagttagagacataataaatcggaagttatttaccttcatcctctcttactaggactgcgctgactaccgcctcagagacggttaggtacataaagagggtttcattgtcttttggcttttacaatagtggagggctagtcaagtatcgctttaatttgcctaacgcttcttcacactcggctgtccatttgaatgtctttaattttctaagtgtgttaaagaaagagtggcatcgctctaaagactttcagatgaatcaacctagcgtagtgattcagcctattagttttttgacatctttgatgcatgtcggtgaagggatccttaggattgagtcgatctgagctaggttggcctcgatcctttgttgtgtcaccaagtagcctaagaacttgcctgcagtcacaccaaaagaacatttagtaggatataacttcatgttatattttctaagcatttcaaaagacagttttaagtgattgatgtgctcctctgcaactagtgatttcactagcatgtcgtcgatgtagacttccatggtctccccaagtggtcagcgaacatgcatcttgttcacgaggcattggtaggttgctcctgcatttttcaatccgaacgacattaccttgtaacaaaagattcctaggttggtcatgaaggctgacttctcctggtcttctggatgcatgaggatctagttataacctgagaaagcatccatgaagctaaggagttcgttttctgttgtggcgtctactagcatgttaatatgtggtaatggaaatgagtctcttgggcacgtcttgttgagatctgtaaattcgatgcagacttaccacttgccacttttcattttcacaatcactatgtttccagccagtctgggtactggacttctcttataaacccgtttttgaacttctagacttcttcatttacttcttggtttctctcaggaacaaactttcttcttttttgtctcctgggtgggtaatttggatatacctgtaacctatgaacaacaatctcatggtcaatactggtcatgtccgcatgggaccgagcaaattgatcacggttagcaattgataattcaataagtttagatctcatgtcggggtccagctgggctccgatttggactttgtggtctgggaagtctgaatggatctggacttcatctagctcctccacgttaggttggtcagattggaagttgggtagctctcgctactgtaattcctatgactgtgctagctttgccttcattatggttcagtagccttctcttgaatctttctactcccctctaatttcttttggtccccatttggttgggaacctcaaagcttggtggtaggttgaaggtacgacttccatatcatggatccatggcctaccaaggatgacgttgtaggcagaaagggagtcaatcaccaagaacctagtgcacaagttgacttcttcagcatacacatgcagcttgatctctcccaaggtatttttctattcaccactgaatccaattagaatagttaccttcctcacaattttggattcgtcaattcccatttccctgagagcacttaaaaaaagaatgttagctgaactgcccttatcgacaagtatacatttagtcaaacaattagctatataaagagaaataacaagagcatcatgatgagggttaagaatcctagttgattctgatgttgtgaagctgatggtctattctggtaaggaagatgttcttctactaaattcactggtcacccttttggtccagttggcctgacgtgcatgtttctttgcggccgactaggtgattccacttacttctgagccacctgttattacgttgaccgttctctcatgaacaagtggcctgcgtggtgttccgtccctctggttctctaccgtgtccctctgaccttggtaagtcttctttcctttgtcgttgaggtggtcaactaggtggtcccgttttatcaagttgattacttctaatcttaaggcaatgcactcttctatccggtggccatgcatggttgttgtggagctcactgttggaatatgtttttagcaggatctaaatttactgaaggctcaaatacaagggttagagatctgagcggaaggagtcattttaattccgctgcaccca

SEQ ID NO: 52613 - DNA, 650 bp, Cannabis sativa
ggctggagtttgagcacaggatttcgctcgtgtccaatttgccaacgttttacaaattgtttaataattcgagataaagtgtgttttttgggtcaccgtcgttacttgtcgccaggtcattcttggcgaaagcatagacaatataaggagaattactttagagacgatgccttaccgccaccgccagtgtattgggaagacatgttggagcaacttgactctttaccaatcacgacacccggtaaaaatccaaataatgaaaacagaatgttatgtcgtggcgacacatttttccataattggatgaagaaaagtattttttttgagttagagtattgggccacattgaaggtcagacataacttggatgtcatgtacgttgagaagaatttttgtgaaagtattattggaacattattaaacatagagggaatgacaaaggatacaaacagagatcgcaaggacttgtctgatttggatttaagggaagaactgcacttcaagcttcacaagaaccgtttgttgaaaccacctgcatgttatactttatcaggcacaacttattcagatccagataaattttgtaaatttttcaagtctgttaaacttccagatgcttatgcaatagacatctcaaaaaaagttagtat

SEQ ID NO: 52614 - DNA, 953 bp, Cannabis sativa
aatgtcttggcatctctttataaaccaaggttgggaagttgcaacctgatcgatatctcattcaattttatcacgaggtggacattaaaagaaaatctagtagcccttggacttttaatttggatgcaattgatattggagagactgaagaacgatggcaagccttagatggtggttttaaacaaattagacatttggatttagatttatgatatgcaatcgagatgtatgtttgggagtgttctttgtaatgtggccaatgtgatgggaaagttagtagaaattgatctgaagaattttttaggagtgtggcatgattatttttgagttcgggtcatcattcgcacatttcttgggaaaacttctccagacagtgtgagattgcatagcttacccaatatttctccttactgatcatgggatctactgactatcataatcacccccttacaggattcgacatcctcgttgaccatacttccgattgggtcaagactctgatactatttgtgtaacatctccacttcaagcctttattaggcatttagtttttatataatagcagttatcagagtaccaccggtatggaaccttacgagatgttgtacggtaggaaatgtcaacacctatctattgggataagaccagtgagagacattaccttggacctgaattgttctagaggactagtgaagccattgaaaggattcaatctcgtatgtttactttacaaagtagacggaaaagctacaccaattcgaaacatagtataaaattatgcaggggtattttagtcttatgagatttcccctagtttgttggagaatgaaacaatctcaaagcaatcattacatcggtcacgtcaattctattagcactgaattctaagattccatctctgtaataatttgttatatacgtgtaaggttgagattgcccttttgtatctctct

SEQ ID NO: 52615 - DNA, 1302 bp, Cannabis sativa
acagggacatcttgtccatttggtaatgtaacaaccttagggaaagtaacattagtaaatgaggaaaaacatttaatgttgaagcacatgtggtgagttgcaccactatcgattatccaagaaaaggaatgagaatttatacctgcatgattcgaaattgcagggttgctggctgggttttcagcattgctggtatgtcctagctgctggcttagaagtgatatgagatgctggcagtgagaagtaatatcagcatgtgtaagctggtgatcattctcaggtttcgggttgtgtgtggaagcagtatttgccttcccttttcccttgtcttgcttcttcttatcaccatagccggggggaatccatgcaaaaagtaacatttatcaaccaaatggcctggtttgccacagttagagcatgatggcctaggcttctttgctcttgggggattggttgaagacgaggcagcagcaaaaggaacaatttcagaggatccaagggatcgttgacgcacttcttgaatgatcattgcaaagactcgggataggtttggaataggttcatttaatagaatttgagccctaaccgaggcataggattcattcaaaccagtcaagaattgaaggacttggttttggttgtagtaatccaagaaaattttcattgcaccacaagaacaagtggttatgggttgaaattctttcaactcatcccatagggatttcattttggtgaaataagcagaaaccgaagaatcaccctgctgaagccgagtgagttgggtttgcaactgaaaaattctagggccattgccctcattgaaacgttcagcaagatcgttccacatttcagtagctaaatcaaagtacataatactttgtgcaatctcaggggtgacagaattaactaaccaagacattacagtattgttacaccttaaccaagaattgagagaggggttaccaggttctggccgagggagagagccattgatgaacgagactttgttcttggcagccaaggccattgtaatacctcttttccatggttgatagttggggccattgaggactgtggacacgaggacaaggccagggtggtcaccggtgctcaaatagtaggggctggaatgatcttcagcaatcgagcgagggtgagaagcttgaactgcgttgtcgtcaacaatggtggtttggtcctggggagaaggatctgtcgattgagattgagtccgaatctgtgggttgcgaacaggaatggcggaagaattgggagcttgaacgggatcggaattgatctcga

SEQ ID NO: 52616 - DNA, 1465 bp, Cannabis sativa
  modified_base (669)..(686): a, c, t, g, unknown or other
acagagcagttgccgaaacaataacattagctttccttttctctatcaatcatttacccaaacactatagctacatcagctatatagccccaatgaacacaacaactaatttggcattacacagtcaaagaaacacaaatattttaacaataatcaacacaatattttaaaattaagcagtgattcgacacttgaggacaatcatctcatttaatttaatgaataccaacaactcaggaaatatatatatgtacatacacacaattacacaaagatatataccaagattaaaaattgcaggtcagcgttaccaagagagagggcaggagtcgaaggagtttctgtgactgtgaaagagagaggccgagagagggttgctgcagctgctgtgagactaagagacgatagagaatggttgccttccctgtctccgagagtgggtggctaaggccggtgcaggtggaagggtgggtgctgtccctgtgcggtggccgctggaagaagcttgtttcaaaggaaatgtattccctctcaacttttaatatcagttttaagtgatcaacattgggtctaattttttttttttttctttttgagaacacattggtccaattcaaaaaaaaaaaaagttaaaattattttacacatacacaacaacaacaacaacannnnnnnnnnnnnnnnnnacaacaacaacaacattataaaaatacgatttcacagaattttaaatattttttataatttttttgattttatttacaaaaaatacggtcattttatgttgtactcttgttaatttgttgttatctgtatgttattttttgttatttttttaatgttattttcatgttagttttacgtaattttcttgttgttttttataaaaaatcgtaaaaatataaaagaaattatttaaaagtaaaaatataaatttttttacaaaaaaaaaaaatatatcttatgtaattatcccaaaaacttttatacctatactctgttctgcattaaagaatttttttttagtttttcttttcttttaataatgacttaacacatcattttaaattttgaaaattttaaaataatttacaagataaattaagatattcaactaatttatttcacatacatataaaattaaacaatcatgttagataatagtcatcttcgagacaggacaaatctcctaaaatgcactcttcaagtcagtatcaaactccaattgaactaaaattctattttctatttttatatctaacaatagctacataattacatatttataggcttttacatttacaaattactaataaacccttgtagcattttcatagtctaacactttctaacttttaaaatcaccttgtcctcaaatgacatttttttgcttaattataaacgagctcaactgacattttttttacttaatgcttgtaggacatatttattatagcaaaatagt

SEQ ID NO: 52617 - DNA, 1674 bp, Cannabis sativa
  modified_base (46)..(57): a, c, t, g, unknown or other
ttatttctgatctttattaataggtaaatctgattatattgaaatnnnnnnnnnnnngggcacaaaacccaacagttatcaactatatccaacaacaaccgaatctttgtaatcacttgaaccagaaaaagcttgatctttgccaacaactcggtcaaaagaggatcctatccaatttcaaattgatgagttggaggataaatttaggaggtatcatgtcgaaaaataggggaagcagtctagatcggactcgaatgaggagctcgagcctttccatccagacatcatgaatactggattccctaaggattcaagaaccctcacgtctcgtcgaatgatgggaccacacatctggtcttgcatttaaataatttcagtactataatgcgagccagcaatgttacgaacaatctacgctatattttgttccccacttaactagttggagtagcgagcagctggttcaaaaaatttactcgtcattcaatcacctcatgggaacaactgtctatggacttcaaaaaacagttccaggccgcaagggataggcaaccagaggcatcttcaatcactaacaaaaagcaacagccgaacaagatgcttaaggcctacttaagtcattttatcatagttgctgcgagggtgagaaacctggaagatagtacccagtccactactcttcaggcacgatcactactgatctctccactattggaggcgagctatggggtgatatacagggtcatcgagtgaaaaacattactgagttcaatgaaagagctcaagtatttgttcaagaagaggaagccaaaaaagagatgaagttgttaaagactagcacgacaagtaccgtctcgacccagcactgtctcaacaagtaccgtctcgaccaaggctgataatccaggagcctctagttcaaagaggaaagataactctaaagagttagctaaggaaaagaaaaaacaaaagaagcacgacaagtatgtgccaatctacaccattcatatctatcttaatgaaactcgggaaaacatctatctcgcacatgagcacagagtcgcatttcgtaaacctgagcccatgaggcatgcaagacataagagagatgcaaccaaattttgtaagtatcacaaagacattgggcatacaacagatgagtgtcgttagctgaaagatgagatagagaatctcatcgcacgaggccactttgggcaatatgtgaaaaggcaaggcaatggacaaaataagccaaatccgaccaataacctaggtaaccagggattagaacctcctcctcctgaacgagaggatatcctggttatctcgggaggaccacatattgcaagagaaagaaacaatgcccaaaagagatatgtgaaggaagtgaagaacaagtagtctgcctttgcttcggaaccttccaagaaagctaagaccgaagaacctcttattatattttcggaggaagatgaaaaatatgtgagatatcctcacgttgacccattggtaattaccatccaggtctccaacaaaaggataaaaaaggtgttggtggacaagggaagtttagtgaacatcctttatagggatacactaaagaaaatgggacttgaaaaagctaagttaaaaccttgcacggtaaatctgtgtggatttacaggtgacaatgtc

SEQ ID NO: 52618 - DNA, 1581 bp, Cannabis sativa
gaaaataaaagacatccacaatgaccaaagtactcttgatttcaagttatcataacaggccatcttctatgctgaactaacaaatataggtatctcataaaaaaattcaaaattcaacagaaaagaggaaaagaaagtcacacaataagatacatacacatttggcgacaaacaaaaatacaagcaatttaatactgcatgtgttgcttaagcaatcaaaatgtcaaatatattcaccgttccaagtcaacaaagagaagaaaaaaagcactacaacaacaacaaataaaggattaaacaacagaagacacgtctgtacctaattgcgttttagaaaatgctggaacatttccaggatcaaggcatcacattcaagatccaacatcaccacacaagacctgacctttgcaacagtctcaagaattgaggttctttttgtgtatgatcggcttgacttgtcacatagattttcaaatgatgatacaataagccgaaagacctcctgaatacacaaaaataaacaaaattcgaacccaaaaaataaatgactatttggcaggccttaaacaaaatctaaaaacatgtacttatattttaagtaccttcatctggtcatcatcataaggagcatcaggtgcagtaattcttgttatctcactgatgcaagatgcaactgcaactttaatatcaacatttgtatgtcctaaaagtgtttcatcaaccaatgctttcaatgacggagaaagtgcactttgcattgattcagacggagactgctccacctttgatagacaattctcaactctctgtcattaaccaaaataagaaaggcataagagtggtattggacgcaaaaacacaaaaagcaaacaaaattatataattttagggggaagaattattctattagattcaatcccatatctctaacccaaaaaagaacatcaatttggcatgtaatagtatttaatatacccaacaatcaagactgtaatttgtaacgattcttctcacatgttgggtctttagtaataggcttaacacgcggcttatcaagcaagtagctgttaataaaatggcaagaaaataaatttatggattcttcttacaaataattacatggaactgaatattaagcaaagagacaaactcgtttagtaaccaagtggaagctttgcaatattggctttactaaaattacctagtaaataagtttacccaaaggctcaagtcaacattaaaagttgaacatacatcatattaaaggagccattgacaattgtctcctcgatttcaatactgcaataaatatataaatatatgtaaaactcaattatagaatcagctcttcaactaaagttgaaaacaaaatatccagaagagactgcttttttattgactaatatcccattttaaccgtataattacctcatattcaaaccagcttgttcctttatcgtattaaactgccctttgatataacgagacttctttaaaaccatgtcgcccatcctattaataacgcagctcaattaccaataattaacgcaacaaaaagtatacgactccatcaaatacaaa

SEQ ID NO: 52619 - DNA, 724 bp, Cannabis sativa
ttgcatcaagatttacaattatgtattaaaacataataataaaagttgatacaaaaatatcacaaaataattatttgtaccaaatataataaacaatattttttatatctttattgttctaatttccattcttacgatcgaggtttatattttgatgccttgaaatcttattagagtaggaattttcagtgagaataatgttagtggatggaaatattctctttcattatatataatattatggactagaatttaattaaccaagagattatatagttaaatttaaataacttattaaatttcataatattattttgatataatacatgtaaacaaatgcattttaattaatatatttacataaataatttattacaaataattattatattttaaaacaatggtaattatttagtttaaattttttaaaaataatatataaggttctcatatgaatttagctaaaaatataatattattaattttaacggggtttgattagaaatttccataaatattctctttcataacacctagatgaataatcagtccaacatctaggtattatatatatttaatatatctaggtattatattaattcagatatactgtatcacattattttgtatttatgctgatatgctttatttaacaattttctataacagcaagtcaacggaagaatcatttttttcaatcttttttaagatttataattattta

SEQ ID NO: 52620 - DNA, 1943 bp, Cannabis sativa
gtttggtattgacttgtattgatttgatcgtgtaaagttataatatattttcaatacactcgacctcaacaccaactacaggtccgggtcccgggtcttaggtttgggttcgggtcacggtcccaggtcagggtcggggtcggggttggggtccgagttcgggttcgagtccgagtctcgggtcccaggtccgagtatgggttcgggtctcggtccggtttgggtccgggttcgggttcttgtctgggttcgggtccgggtccgggtccaggtcttggtctgggtcccaattcccaagtcataggtctcaagtctaggtcccgagtcccaagtcctgtgttcgggtcttggtttgggtccgggtccgggtccaggtcaagttccgagtttgggttcaggtccgagtctagggtctaggtctggggtccgggtctaggttcgggtccgagatctgggtctgagtctgggtctggggtccgggtctgagtccgggttcgagtccctgtccgagtctgagtctgggtctcgggtctcgggtcccgaattcgggttcgggtcggagattggtgttgactccaaatcttttataaatattataatataatctaatacagactatttgttatatattaaataataaaacatacattgtattaaaaattttgatcgtaataattaatataataaattactttatctaaacataatgataaggtggtgttttgtgaatgtataataatcttttttgcagaacacgaacataaaacaaaaacaagaaaaatgttcaaaacaaattaaagagctctatataatctaagactttctcaaagttgacttccttgccatttcctttttttattaattttttttactaattaatctttgtttgtgttaagtatttctaatagttttgaagtttatcatctttgtctgatgttgccattattcatttcaataataaataaattagatagtctttgaaaaagactcaattttattctacttgttccttatccttggaactggtcaactggggcttccttcttattaattaaaaattttgtgctgtttcatataaatgattaaacaatttaatgcaatgggaagcttttaattttttactatgcaagtgtgaatagatttataacattaaaatattacctcaaagtaatgaatgggcaagaatccaaccataagaaaggaccaagaaagtgtgtccttacctaacaataagacataactcaacattatttcaatattcacaatgcatattaatataatgtctagttttactagtagtttgttaagtgtaatttttttccaaatttaattggtgaccattagcaatattaattcttaaatattcaccacctctctctatccttccagttttatttttactatagatgtaaagtcggttaatcatgagctccaatcttagttctcaaagataatgatagagaataatggatagagttgaggtctaaacactattactttttctttattttattatatttacattataaaaaattattaaaataatcaatcttaattaaagtagagtgattcgctttgttctcatttgcacacgcttaactgtggagttctttcgtgatgggctactgaaaaacaagatgcactttgttgatataaggagtatcaatcaatccatttaaattattttcaactgtgtaatctcatacctacacaatctcagaatcatttcacttgacctttctcagacgatgtgaaattgtacaacttactcgatatttctccttacggatctctactgtcagagtaataaataaaaagttatcaatttaactttttaactattttagctcaaatttggctaaacaaataccattggatatgctctaagaatgtatgttcgaaagtgtgttcagaaagtgtcttaaagagtagtccaagtgtgt

SEQ ID NO: 52621 - DNA, 1412 bp, Cannabis sativa
ctttttcatctgcctttttaataaaagtaacactttattttgttttgcagacatgggaggttttgaggatatcatggatcggaaagggaagaagaggggaaccaattcagcggtccccacaaatactgaggtggtacctcccaaagggcaaaggaaaaccactgcccgcaaaaagaagtcattgtccgagcctattgatctcgaggtctctaatactgagattcaagaacaagttcctcctctagtcgctcccaacactaacgctccttgtcttgagacagctcatgcttctgcctcctccagcaaggccattgagaccttatcggccgcagcgggggaggctggatctgaattttcccaggcgtatgggattgcttgctggcacaaacttaaggccctccttccccatattgggatttaatcaatcttgggagtccagaagagatgcttttgaagaacttggactacaacttcatggtaagttggccgtaattctccaggcctctttcattctcttttgcttccaatcgacgactctcgaagcggctcaaatatctggagggcgaggtctagaaattactatcccaatgcagggttgtgattaagcaacaagacgatgcctagcaggaaataactcgcctcaaacaagaagccgagaagtcaaaagaagaagtcgagaagaccatcaaggcccaagctgatgaatttgagaagaagctcgctgagaaggaggtcgagaccacagaacgatgcaacaaggttggccttcgtactgtatatcgagcctggatggcaaatcccaatatggacacaagcttcttggaggagaaagaagaggaaactctggctttctgcgagaagtctaggaaagaggaggaggaggtcgaggcagaagaagaagaagagctatccaggtctcccaccatgtagacttggtttttatttatcttcatttttttttatttttgaaaatggcctttcggccgagacaatcgtttgcccctgttggcactttttgtaaagatagatttgcaaagttggatggccaacttttctttttaatacctcatgtttttaagtttagacttcaacatgtggttgtttgcttgtgtttcattcacaatttaaacaatcattgcataaaatttattagaggtatccattgctcgtatttctctctaacgttaagtagttaacaacctactttacgcgcgagcaacttatcttctgccctatcctcgatttgcgagcagtcattgattccgcctcgcgatcctcagaagggatcttatttcaagcaaaaatatattttcaatgaccttgtcactttgtatatatctttattgcttacatgagtagttagatcttctacccacgtgttaggtttaagtatttttccaagacactttgat

SEQ ID NO: 52622 - DNA, 1974 bp, Cannabis sativa
aaacattatcaagagtggccaacaaagccttacaatctaaaattatatgaccataaggagaggtcatatttttattactttgaagatccaaaacaactctccgactatcagactctacaatcacacctgaccaatcattatttttaatccaacttagagcctcttttattccaatggcctccacttcatgaggttgtaaagcaccagccttcttgaaagattttgcttgtatgaccgcaccagccgcgcttcgagccacaaaaccaataccaaaacttccagcatccgcaaaaagtgcaccatcaacattaactttgattaaaggaaaattaggaggggtccaatgctcaattcgaatctgattggattcattaggagttcttaattcttggtttgagcattataccaatcaacaaagtttaggtttgccaatagtaacacttcatcatatataggctatttagcattccaaaccacctcatttctaaccctttaaattgaccataagatcatcccaccctctaaacattcagccatgatctacacacccaaaccttcttcccaccagctgcaaaatgtcatagcagcagtaccaacattgggaacctgaacctgcctccaacatccttgagcaaaatcacagcgaacaagaacatgaagtgtcgtttcaggagcagccatacacatcaagcagctagaattaatgggaacatgtttatttgttagctgaaaccgagtaggaagactattagtacacacacgccataggaaatccttgactttcggagggagtttaagttgccataacttcatccaaacaccagaattattgggttgcaagttgctggttttttcctgatgcaatatagcataggcacttcggacggtaaacaaaccagaagactccttcctccaataccattcatcactctcagcttcatcaagcaaaggaattttccacaccttctcttgatccctcacagtatgaacatcctttagcacctcttcatcctattcacgcacatccactttcatgagagcattcaccattcttcccacaagacattcttgctgagattcaacaaaaggattaacatcatcaactagccaaggttcagttaggatattaacttgtgatccactacccaccaatcttctagctcctgcccaaaccaaagcttgggattccaagacgctcctccaaatgtaacttgggttatttcctagagatgcagaaaggaaattaccatttgcaaaatatcttgctttgaaaattttccccaccaaactactctcacaagtaagtaatctccacccttgcttagctaataaagcaaggttaaagtaacgaaaaatcacgaaaacccatcccacccgtagtcttgtgtttcgagagcttatcccaactcaaccaatatatacctttgttgttatttgatcgccaccaaaacttgctaattgatcgctcaatctcctgacagataccaaccggtatgagaaagacattcatagtgtaagcaggtaacgcttgaaccaccgatttgatgaggacttctttacctgcttttgaaagaaatttgttgtcccaactctgaattctcttctgaactttatcagtcaaatagctaaaaatcgcctttttatttcttccaatggtacttggtagacccaaatacttactacgctcatcagcctcaagaattcccaatctttgacaaatatcatgtctcatagtatgagtagtattactactataaaaaacagtagacttctcaaaattaacacgctgccccgaagcattagcaaagcaattcaaaagacgcacaatgtgggacacttcatcattcgtagctttgcaatacaaaaagctatcatccgcaaacagcatatgagagaccttaggagctccattcgccactttacacctgtaacgccctaaataattaggcacgttacccaaaatacttatgaaac

SEQ ID NO: 52623 - DNA, 1477 bp, Cannabis sativa
ataaggaccaccacagcatatacctagttatatattctttaattttgaataaaaagattaaaaaaaaaattaatacttgtcagtatgctatatagagtgacaactaaatatatagggcaatgaatacatgatattaatatttatatatatattatgggagagagcttcatcaagttttgaactcataaatttgaatatggtttctttcatttatattaattatattcattacccacttttcttcttcttttttgtttttatgttttcaatcagatcaacataaacattggaactttattaatagaaaggtaataatcataataactaaccaattagccttaatacttaacaaaaaaaaaaaaaaatcaattagccttaagtagttacatatattttaattactgaatggttattaaaaaaggaaacttttgtacttgtaaaaaagtttttaagtctattttttttttataatcgtgtatatatattgtaactatttaagactacttgtaaatttttcaaaaattatgaatactttaaagtgttgaaaataagattcaaacaattacttactacgcgataaaaaaaaataatcgagcgtgcaataaaatatttaaatataatattttcaatattataaactacttaaaattttctaaaaatttacaagtgaccctaaataattataactaacgcaaattataaaaaaaaaataggtgtctactgaaaccgaactaatcatttaaggggtgtattataaacttaatcaataataagggggattttgggaagcaagaaatcaaaaaaagtaacctttcatttctatttatgattatatgtaaatctttgtgtcctaactgtcttgtattgtgttatagcttcttaatttagccttaattttaatgaaattttctttatgactaaacatatatattatacgttaataaaatagaacgctaagttagccctatcttttttgtagagcaataatgatttggtggtctgattttttttaatctggttatgatcttagattttgtgttgctagcttgtgttgattcttgtttcttgatactccttttctagtggaaatcaagagagagagaatatgggctcaaaccaaggcccaaaacaaccatgttcttaataatgacataattttaatttttgtagtttttaagtttttcttcaagaaattattttgtgaaaaaaaaaattatcaagaaccttttaatgcctttaggagtctttctaggtggaacattgataattatgttagaaattgctctcttttgtaacgaccgtgagtttaattctttatcttataaaatactttgaaaaaaaaaaaactcaaatttctggcttctctaccgactaggatagagtacgataaattgtgtgatgtagtggtaaagaagccttagctaaacatcttttttaatgggaaatttacatagtatattaagttttgccatttttt

SEQ ID NO: 52624 - DNA, 1774 bp, Cannabis sativa
ttttttgtcactaataattcttttcaagataatatgccatcttcatcagcaaatatagtttcattccagcaaaaagaagtaactatattctgttttatttgctatttattctatgttttgtttatcaaacttatttttaaataattatttcaataataattatatttaaaactattaattgcaggttataccatacacttataattttgatggttatgaagatatgaatgaaacaacgagtatggttgaactattacagcaggtatgtaattatatataaatatatatatttatatgtagtgtttatttttaattttattaaacttgaaaatttatttagtataattttgtttttgcaggctatatcaactcctaccacatttaaaagattttctagcaactatttctaatattatgctaatgggcaatcattttcaaaagccacagtagtgaatttttttttttagaaagagccacagtggtaaattgagtctttgcattttgagacattaaatttctaaattattaaattatgaagtttttagcataaataaattttgttgcttcatagtcaccattttcttttattgaattcacgaactctttttttttatcaaattttgtggctgtggaaacaagtaatataatgaaggtatgatttcattctttgtaactttttgactaaggtatacatggtatagactaagagtattgtactcaatagtggttaggtcaaactcatgtcatagacgtgaaagaaagaaaactatcattttatgatagactaatgcagctagtaggattggatgtatgtagatataagagaaattgaagaatatatttaacagtacagttaataggattgtaaagtctgttaaatgcttatgtggcaaattaaatgagttgtcataatataattggttgggacatatattgggacagggatatgggacagggaatttggctccgtaggaatcgtcaatcgatgctgtagtttctctttttttattaacaccatcgggagaatgcaaaaattaatttatattatttagtactaataatagttttgtaatattttttcacctatttttttttatcgtgcttcaatacattgtaaatcttgatttaaaatgtaatatgtgatttaatacttatttaataatttattaaaaatataaataataataatcatacaatggtaaatataaaatttaataataaaataataaaaattataaaaatcatttaatacaaataagcatattgctaattagatttttataataaaatattaaaaatggtataatagtaattataaaatcatatcatttattgtgatataaattttagctatattgtgatctaaatttaaatcactttttattatgtgagatatttgcatcacaaattgacatattatttattagagtaaacttttaacaaaatatataaattatattttatatttttatatcatgtacatttctattaaagctttaaatacattaaccataagatagagtaaaactctaccaaggcaatattaattattattaacatccaataatgaatcaatgataggtgcacattcacatttcacatatttaaattgcacaatgacgtggtatgtatgtattttattaaagagtattgttttttttttttttttggtacaaagtattgttattaagtattagtggtactcattattttttataggtggcgcccacaattagttagtaatattatttgagttattttcttaagttatata

SEQ ID NO: 52625 - DNA, 1425 bp, Cannabis sativa
atgtcatcattgtgattacgtcctttgacgcgaaatgatttcccgttaatatgtgaatcaatagtttgtacatccttgactcgctaaagactgtgcagcctgcgagttataattataccatattgactatgcatttaaggagttagtccatttaatatttattaatataatttccattacatttgttggtttatattctttgagattaacacgtgtcagctttcaaagtaccaactgaattttgggtataacaattatcacttaaaaagttctttttaatgaaaagtgctttttaaattattactgagggtatttttgtcatgatccattttgaaagaacacatggttttgattttggcagttttgtggtttcaaggcacatcatgagcattaaataaccatcttttccacttctctcctatttctacccgttggatcatttatttcttaatataacggagatcaacccaatggtataaaaactgaaaaaggaaccaccttttcatcatctttgccatttcaaaaacttcttgagattctctgcaaataaaaactccacccatattatacgaagctttgcatgccatctttgtctttaacatatttcttgcaaatttcatcagattggcttttcgacctcaagtgttcaaagagatcaccacgccgttcacttcatcccaagttgcagaatcattcatcgcaccacaactcgatttcaaaccataagtatctcatcccttttttgtgtttttctttacattcctgggtttgatcattattgttatggtctacatttttgtcattccatttgattttagtgattttggtttaaaatcctgggtaatttttagggtttaggcaaagtgcagatttgtagatttatcatatttgtaagttttctggtttgatatactttcatctaggcattgggatagccttttttttttttgcaaaaagtcccaattttgttaagaaatttatcccccagaatctttagaaattgagtgtcctagggaacttgtcatcccatacaaacccagaacgtcaaaactcaagtccaaattagaaataaatgatgcaaaaattagagaccacttaacaaaagcccaccaggatgatattgctaatcttcataggcgtttcttataagaaataacggagggtaaacatcgtttcttacgagatgatgcttggcgtgaacctcccaatttgtcatctattcctttggctaaacccttgtttctacccagagtcacaatttctttttcgacaagtgacatggacttcaaaattttgacttccaagcctcgtaaattaaagactccccaagacccgaacgttaccttcgaggctgaacttatcgagtcgagggtacgagccatcggagactatgtaggtagcattttaaggacttgtggcattgac

SEQ ID NO: 52626 - DNA, 730 bp, Cannabis sativa
ttgaatcggagaaaacctaatttgtgcgagtgcttaaatcataatgcatctaatttatgccaacaactcaatgccaatcaaaagcaagaggatccaatccaattgcgaatagtgagttggaaaataaattcaagaaatacaaggatggagaatatgggaaactaactggttacaactcagaagaagagcttgaacctttccatccaatcattatgatctcaaccgacaagtgcttaccattcttcaatgtgttgcgaggcaacaaagagtttgaatggacagacgagtgcgaggaagcctttagaaacataaataaacatctatcaacacctccaattttggctaaactagtaactggagagactttactcctctacttagcagtctgggagaatgcaattagtgcagcattagtgcgagaagagggaaggcttcagcaacaagtttactatgtaagtaaaacgttactgggggaagaatcgagatattccactcttgaaaaacttgccctatgcctaatccatgcatcttgcaaactaaggccatacttccaagcacatcccataaagttgttaatcgatcaaccactaaggcaagttttgtcaaaacctgacgcttctggaaggttgataaaatggtttattgaattgggacagttcgacataatttatcacccaagaacatccattaaggggcaggctttggcagatttgctaatagaagggacagt

SEQ ID NO: 52627 - DNA, 1178 bp, Cannabis sativa
ttgtgaaacccttgagaaggtagataaattatgtctggttcattgggttccaatggaagccgagagagagaaggtttaagatagatgagtttgaatttttgtattttttttgtctctctatccctatcatcaattaagtaacttcctcattcttctaaccctttctaacacaaatctctaacattctaattaactaattaaaggaaagataataacaaacttaatcaaaggtggaaatttatcctattgcccttacttacactctaagaaagctttaaaactctaagggtaaaatagtgcaattgcattaccttgataaatcccgatattccaaaacactcaataataatgcctcgtcaaataattgatacaatattgtatccatgtgactaaaatgaccgtctgtcgtatttccactgttaccgaaaataaaaccatgaaaatattaaaattcatgtatatcctctatgatacacctagaattcaataaaatctctgaaattaataaattataaatcaaatgtctatttcttgagaataggtcccatatgacatgatacacgcacataatcatataatgcaaataattaatattaatagattactaattctatattttaagtatcggtcattacaaactatatctcaatattaatcaattcacaacaatactaattgtattacaatacaatatactatgcagtatgatatttttttcttacctttaatccaggttcatacatgtcgagcaacccaagtggagaactatcaccggtgatctcggtcctatgtcacaacaacggtaaaccaataagtgtttatcccaaaacactgcgtaatattcacctaagacaatccaaggttttttaccaaatcccgcagtaaaaatacactaaaataaaacttatatttttgctttaaaacatactccctattgtagagctcgttgcaagcttcaaaacggtacatagaacgtccaaaacggacacccgagtaaaaaattatgtcaaaaatacgatttctgatctcctaggaattcctaaaaaaaatgatgaaactcgaaaaatcccaaatttcacacttaccgaaatactaccaaaacttatccaaatcactccaaacttcacagggcatatatataccataaatattaccattcttgcataacaaaaattaaa

SEQ ID NO: 52628 - DNA, 1527 bp, Cannabis sativa
gtgtcggttttagcggtgttcggtaggtcagtttgaatggttttttcggttttctggattttatgctcagccctagtcaaacacacaccagctcaagatcaaatagcagacatcctaacaaaggctttgtctacaccaaggtttacactgttgagaaataaactgagtttggcttcattaccccagctcagtttacggggggtgttagttaggatgttagttacattatttccattctgttatgttagttatataacagcttttgacagctgttctgtatttattttgctttactgatcttgtatataaacaaagcttttgctcattctgtattcaatgagaaatctatttaattctctctttctctttcgttctcttctttccaacaaaaggtacatgaatctgagtaaaagaattgaaatttagaaaaaataacatacagagatccttaattgtagatgttgatggagacggagacttgctcggcctcgaacttgagtctattaagagtagccttcttatgggcaacgatgaagggtgattcggaggaacccatcgtcaaggagagactgagagttaagactagccatttttgatgaagtttggagcttggggactgtcatttcaggttgtaaaagagaaacttaaaatatgggaatacaatctttttttacacatatatggcataaaaaagtccataataatgtaaacaattcaaaatatccatagcccaaagagttatttaaatatgcccataaaaaactaaacacttgaaaaaaatcccataattcatgtaatttcttctatttgtaattattttgaactttttgccctttttattaagctttttttctttacatccttttaaattgcactctgttggtccagagaaatgaatcttcaccttaatcacatgattgataatatttgatatattttattatttgtgctttctcttctaataggctgcctaagcctatttgctcgttttcttgtcaagatgtgttaatcttcacatattttacaatttataatgtaaaataattatataatatccacatttcattaagaaaaaatacaatagagaatgtaattttaagagtaatattaaaagattccaacaagtacatcaaatttagtgtcacactattactaaatttagtgtcaaaaataattttcactctaactacaatactaaaaaaaaaaattcttattattattttaattcttaataaaataaaaaaaaataatattatattaattaactaaaatcaccacaattaatatatctaaataaaagagtcacaagtgcaatagacaatttgaattttatttttggcttgttaaatttttttaaaatttttcaaaattttacaagatgttttacataattataatgtacacgaccatgcaaaaaatatactaaagaagtctctcgaatgtcgaaacaggtaagagtatatgagtgtattacttttaaagaggtacattattttcggcgtgttaaattttttctaaattttttaa

SEQ ID NO: 52629 - DNA, 1151 bp, Cannabis sativa
ccatgggaacaatgggtgatcaaggtttacaggcggtttatgtcaatgggttgaagatggagatacaaggcccattaagactcttgcatccaaatggcttaattagggccatggagttatctgaatcaattgaagccaaccaagccttggtgaggggtcataaagttgggcccaataaaccatttcacagccggcccaactctctaattatcccagagtcacgtgcacctcacatgaccacttcaccaacttactctaccacttcggttcaaagtaaaacaacatcagctttatcatcatcttctccgacccagttcaaacgattcacagaggctgaattgagagaaaagaaagcaaggggtgtttgtttcaagtgcgatgggcgctggtttcgaggacatgaatgcaaagaagcagaattggtggtgattgtggtacaagacgaagcccaagaggagcctccggatgatttaattgctgaaatggttggactaccgccaatgagatcggcatcggaagcccaaactgtggaggtgtcgttgcattcggtggtgggattaacccctccaaaaacgatgaagatgttggggtcgatccttggtcaagacgtggtggtgttagttgatagcggggcaacccacaattttgttacggtggacttggctactaaattggagctgcccattacaagaacagaggcttatggggttcagttgggtagtggacaagcgatcaaaggcgctggggtttgccggggagttccgttgactttgcaaagcattaacattgtggatgacttccttccacttcccttgggtaatacggatgtgattttgggagttcagtggttgaatacgctgcagaaaacaacacaccattggcaagagcatactatggagtttaatctcggtaacaaacgggtggtgttacaaggggatcccaccttacataaaacaccagtttctctgaagtcattaatggctaccttgcaaaccgagaagattggtgtttgggtggaattgggccattcgtcagttatggcagcagaggaagaaccatcggaagccatctccgccttgctacagcgctataatgccgtgtttgaggagccacggtctctaccaccacctcgacaacatgaccatgccatc

SEQ ID NO: 52630 - DNA, 1141 bp, Cannabis sativa
tttgataaataaggagtcatttactcaagaaacaaacaaattatttgtgactaaaatataatatttaatttatttttaattagtcacaacaagtattgtgactaaaaacatatttattcacaacaaattgtgatttttgtgacttataatacctttagccacggacatttagtgacaacataagaattattatttatatagtcacaaccttttcacttttagtcacaagttttattgtcactaaaaatgagattttttgtattaatattacccattgattgtaatttagttataaatattaattttgaaaacattaaatcattatattttgatcaaatgacaaataataaaagaaaaatttaattttcatgcttaatttaattacttaattaaaaaaatataaaaaaatatcttgtttttacaatatatcgaaaatatgtttatatacaaaatatttaagtaaaactcaattttttttaattgttttttttatttgttgaaaaactttttttcttaatttttttttaattgatggaacaatccggtccatataatataaaaatgagagatttttataataaaataaaaaaattaagcataaaaacttaattttttttaataataatcattctaagagtaatacttaatgtatataatatatgtctagctaccaaacattatgtaccattttctttatttaagagtaataagatacataattaatttcagagagagaacatatttcaattggttgggtattaattggtttgcttgtactaattaataattgagctctgcctcctccaacaaaatatagaaatatacaaagccttgcttataataattattaattaataataatattaaagtggagagagatggtaataataataattaataataatattaaagattggttgatggatcaaacttttttcatcaaccaaattacaaaataataataatactaatggacacacacacactagatctacgtacattttgatcatcccaaactatatatcatatattaaccctcaaatttcggtaaatatatatgatatgaatatcacaaaagcaatagtaatagttttctctcaaaactatggcatgcacaacgtacgtactaatatatatatat

SEQ ID NO: 52631 - DNA, 772 bp, Cannabis sativa
tcattcttttaatattttattggacaaattaatattttttcttattttctaatattttaaccaaataaacataaatattgttttattttttattagattaaaaatcatatacatcttaaaatctatatatctatatatatatatatatataaaagagaagtatgaggcggtgacgtggcggtctaaaattacttcaaatgctcttatgtattctgcccttaattctctcattcttttaatattttatatatatctatataaatgaaaagtatgagacggtaacgtaaccgtctaaaattacttcaaatgctcttatgtagtctccttttaattctctcattcttttaatattttattggataaataattattattttcttattttctaacattttaaccaaataaatataaatattattttattttttattagattaaaaaaatcatatacaccttaaaatctatataataccttcaaaaatatatgatagcgtgcgcgggtggttacaaacatttaaaaaaacaaataaattatcatcaaactaatgtggctatataacagaatttttagtttatgagaaattattgggtgattttttttttaatgttttgtattcaaaaatatcttctctgttatctacttctgaaaagagaaaaaaatatttataaccacttatatcgtataatgtggaaataattattttatcgtatcaaagaaccatttaagaaaaaaaatcatggaaaaacgattgaaggaaccacctggcacctg

SEQ ID NO: 52632 - DNA, 1290 bp, Cannabis sativa
tatgttctcggccccataaagttcctcgtaagtaccctgatgttgttcgtgattttccctgggacactaagaaaaatgagaatgacctggagttagagattgatgatccttcggaggacagctctagctccccgagctgttccggtatcttgaagaacccgctggttggttcctttgtgattgatgaatctgtttcgagtgggtctgcttattcccacaaccctgtggaggagaatgttgaatctcctccacaggagccatgagaggacttgcttggaactgtagagggttagggcagacctctacagttcgggaactgaagtccctgattcagactcgctctccggattttgttttcctttccgagctcaaagtggatgctaatcctctggtacgtaccttacaggctttacacttttactttcatatttgtgttccgtctattaataatgcaggaggtattattttggcttggaaatcggggtttagttttgagtgtatctcttgctcgcgtaatcgcgtaatcatatctcaggtcttgtgtattctgacccaccatccccgtggcttctttcgtgtgtctacggccctccatatatgaatgctaagaaaaaattctggtctgagttcttgaaattaggggatagatttggtgggccttggctaattttgggagatactaattttgtcctgagtggaactgaaagagaaggctcctctggccgtgatcccttcatcccggtcatctctaagctaattgagagtaaagggcttatcaatatgcccattcaaggtgactttttgacatgggataaccatcggtctgggaggcaccatgtgaaatcagctctggataaaggcctagtgaatggcgcctggatgaggttatttccaaaggctattctctatactgtccaaactaccaactcggaccacagacccctctgccttcactctgacggcatggagtccaagtttaagagaagtttcaaatttgaagaaggatggacccgtgacgctagaagtaatctggtggttgcccatgcttggaattcggtcacccacaattgggctcctgctagaatatacaagaagattggtgccaccagggtggccctcctcaattggaatagatcccaatttgggaaattggatgtgaccattaaagctcttgaacagaaactcaattcccttcaaagtctccctgctagctcccgggactggaatcaggagcgagaagttcgtcgagagttgaatgaatctctcgaaagaaaggccatttactggagg

SEQ ID NO: 52633 - DNA, 1009 bp, Cannabis sativa
gatgattgatcacaatatgcgagaatactagattgatcggctacgagatcaccataaccattgatgcaacaacttggttatatggaacattggaatggacacgtaagtatggaggattgatcagaatatgcaatagtatgcactgtaggagctttcattatccgattggacatggaaggttctttatgaattcgctggccctactagctagtggaaaaaacctatccttaacacccactggttttggatataaaattcgtttaggtgttgatagttgttgagcacaacataaggtgttcatgctcaccttaataaagcatggatgaattatcacaatatgcgaaagtactagattgatcggctacgagatcaccataaccattgatgcaacaacttggttatatggaacaatggaagaagtttagcagaacatggagcagcttggaaagaaagggattgttcgtagttcgtaaaataaacaaaatgacaacaattattatacctgaataaagagattcaaagggatggaagagttttgttaactgtttgtttggattagtggattaaaaattacaatgcgaaaatcagggtgaaaaaggaagggggattcacaaacttggtgaaaaaatcattgaaacctcgaaaggaaaaaaaaaggattgctattaaagttatcagggggaagaaatgtcagtaagttgctcagacagtgatgatatggaacagtcgggaggggtcgaagagaaagaagtcagtgaagaaatggaagatattctatgtgaaataaaagttttttggcatgaggataacatcatggtgaatcgaggggatgaattgtggcatgaagaaagaggaaaagaacgtgttagtgaagcagaatagcaacataaacttcctataaaggtagatagcagaaatgatggagttgataaaggggaatctaaattgagcaagtcctcttggcataatagtggcaactttgacaaacatgggaatgacaatagtatct

SEQ ID NO: 52634 - DNA, 763 bp, Cannabis sativa
cattgaaaatcttctaaaatgttatacaagtgtagtttccaactgttgataaataaaatagtaattgtttgaactagcaatgaagaaatcatcaagaagaatatctgaaattaagagtatagtatttgtctaattatctgtatgtcaaatgatattttccaaaggctaattaggaattttgctcccttaaactttaacatgtactaaatcatgtctcttaaacttttaaggttgttaaaatttttcttggactattaagattgttaaatataattattttttttttaatttttagcaaggaaagtttaacatggataaaaaatttggaggtttaatttggtacatgtcaaagtttgaagggcatgatttagtagatatcataatctaagaagcatgatttagtatatggacaaataaagaattagtaaaattgaattgaattggataaatgttcttaaatcaaacagtcttaatagtttagagagaatttttaacggataaaaaaattcaggaacataattttgtacatgttaaaatacaaggacaaaaatgctaattagtttttcaaaatttatgagcctttaattttagggtgttggacttgattgaagctagatatatctccacactccctttgcttttctcctcttttaaaatcttcttataaatttattatatagataatataaataatattctaatctcattctaactaatgaacttaagagtaatattctttgaaggatcattgtgtgcaataata

SEQ ID NO: 52635 - DNA, 1085 bp, Cannabis sativa
  modified_base (34)..(47): a, c, t, g, unknown or other
ttagatttaaggatttttttttccaattttagtnnnnnnnnnnnnnntggatgaaagttcagggggcataatttagcgcatattaaagttcgagagacatactttgttagatatcaaagtctggggagcatggtttaatacataaacaatcactgaaatagtaaaattgaattaatttagacaaaagtcattaaatccaacaatctcaatagttcatgagacatttttaacgaccttaaaagttcaggagcataatttggtacatgtcaaagttcagaggacaaaaattctaattagccttcaaaataatataaactcgggctttctcttctccttctccctcttacaaatcatggactaaggttgagttggaaacaaattaaaaatggttaattaagtcccacaagactgcccatgcaaaactttttctccggaaaaataacttatgtacgtatttcatactaaaaaacccaaacttttttttttatctctctctattgcttactccacaaagatagaaaataatgtccattctattaccttccacatcttgagcattattcaaaaaactcaaccactgtccaatattaacaaagttaaaagggagtaattacagaaatacacaaactaaagataattaattactctggaacaacttttttaatgatgagatttggattcttaacgttgataaacctttaattaatggaagagagagagagaactgaaaaaggtttcacaataataataatgattttcataatatagggtacccctaattggtatcacttatgacctctaatatcacagaaagcatgagggcatctaaagtaggaccaactgctacaccaaataattaaatgaatttcagcaataaaaaataatgagaaattttaaattttttaaaaagaagaaatctttcaaaaaaaaggagccatcatattattaaaggaaaatttacatagtatactaattttgtcatttttttttttgcggccataagtgggtgtgtgtgtcttgaaggtcttaggttcgagtcccaagtaaaacatggttgtaatatacaaacgcttaaatcaaaaaaa

SEQ ID NO: 52636 - DNA, 944 bp, Cannabis sativa
tgtattaaaaaaattaatgtacatacaatttatttcacagagagatatagttaatattaaatattataatttttcaaaataaattattcactaatataccacaaaaatcaaaattctaaactaagttatgtttatcaccctctctcccttcacataataaaagtgaatactaatcaatcattgcttaatttattttatgtacagagtaaatctattaaaaattgtgttaataatgattacaagtgagatacggtgatgatattaactttaaatacagttgttactacaaataagatacgatgatgagttgtttaaattatataatgagttttctataagtttactaccttctctctattttaaatctctattttgtataagaattgttgagtttttaatttttttttactataatattgaacattaaaaaaattgcatgattttatatttgtataaaaaattgtataatttttttttttaatatttagagttttttatataaatttattatttttttaataaatatatatttttctttttaaaaattaacataaaatgtatttaaaattgtttaatactaattttattatttaattaataattatataataatttaactgccgcacgcgaagcatggcatgcctactagttatactaataaataatatgataatttggatggtacatcgttgttatcttttatcaatatttttctgtgcagatatatgtatttttagttattgtttgtataacaaaaaattttagtggaaagaattaaacttttatttgaaaaaaaaaaaaaaacctataaaggaaaggccggtaaagccaaactattttgtattttcttttaaataattgctgaagataggatcacttaatccatattgatacttgaacaactaatatattccacacattatcgagatacacatatcatccac

SEQ ID NO: 52637 - DNA, 1222 bp, Cannabis sativa
tagtagatcagcttttgaggtcccataggaggaatagaaagacataattatgaattatgtactatgggttcttatgattttgattgagtagtcgtggttggacatgtcgagtaaatatgttgtctactagggtagacaatttatacaataaatgaggatatagaattcatccgaagggatagtttaatcttatgaaatccctaagttgatatcattgactatgatgttaagaattaatgaaggttgtcgagaaccaaggagatcaaggtgaaaatagtataatgttttattcttgaaagatgggtaatctgggaggatcaatagaatattagaaatgtgatataagcatatttgataaaaatattttaataagtgtggtaaaagaaagatgttgggcacttgttcactggagtaacacaggtgataaaagaacacaatggactgaaaattttcaagaaactttcattgagtatacagaaaagctacactaatttaaagcatagggatattaaacttcaaatgggagactcagtatttcttcaagtatcacctatgaaagaggtgcgtagatttgaaaagaaaggaaaaccaagccctagatacattggtccttttgagatattggggcggataggccaggtggcctatcaattagctttaccacccacgttgtccaaggtgcatattatcttccacatctctatgttgaaaaagtatgcgtcaaattcgacacatattttgagttgcgatgatattaagctccatacagacttatcttatgaggaagtgacttgggaattaaagtcgcaaatgcaagaattgtatcccaagttattcaggtaaattttgaggaaaaaatttttatgaggagggaatggttgtaatatcccaacaagcctaatggtaagtaattagggtttatatttatattatgggttaatcaggtaataagcgggattatgatcctattaatctatttcagcataaaatctaaattttctattagtgagtgaataagtgtaatttaataattacggagatttatttaaaatatgtggaggcaatgtgagttattggtggaataaaaatattttcagatttggtgaccttggagacctgatcggaggccaaaaatgtcacaacagttttagtcagtaatattcatgggaatatcgagataagttgattatagaaatatcggtgtattttagcgtactcagag

SEQ ID NO: 52638 - DNA, 1153 bp, Cannabis sativa
tttgattggggtaaaaggtcagttaaacctttataaaacttgattgctgctttgtaaagtgtagggcaaattgggaaaaatccctacatgaaagatgactgtaagtaatagaccatgaagttttacgtggttttgaagttatatcttcatagtttacgagtctatcttatttttagggtttttgtttatacaaagtacaaatatcacataagtattgatcataaggatctttgtattcaccgccattcattctcttgtctagtggtttctaccactatttataaagattcaagaatggtagttattctatttgttcttatccttataaccgttcatgaaacgtgaataattttcatatttcattcaatggctaatatgtataactatcaaataaccgcttatttggccttatcctatagacacagttattttaccgagatatccatttgtaaagtgctgctcgcaataaacttatatgcagatttgtctctatctatctcccagtatacatgttctttgtaatgattagtctcgtcttcacatatctttgtatttcttatttagaacgcatttatcctatattgccttgcgctgttatggtggcgagacgacacatgcgagatacatgtttggaaattcttctcgcattgatcattcatgatgaaattttggataattcttatataaacttttaaggaagctctataaattgtatcatttatgcttcttaggtcgaactcattattctatcttattcgaccaacaaagtcctttgtcttgtttttcttgtactctgtgttgttcccgagatagttgttattggtttcgctagtctcctagtgagctattataccgacttatccttaatcacttaaaaacttcaatttataaccatacctgactagtatttttgaggcgatatgaataacgtatttgattttttgatatctgagatggttgatttttagctcttatacacgtgccatgatcatattgttgttcaatatatgaatacaataattgctcctaaaaaagtatttataagagttaaaggactttttaagaagaaaagaatagaagcgtaatttttccaagtgtgtaatgataatttcggcagttttaatcccctaagaaactcaacatctaaactcgt

SEQ ID NO: 52639 - DNA, 804 bp, Cannabis sativa
ttcaacccccttgcctagtctcaatctcaaacataacataagagctttcactaaacaatatccattttatgattatcctatttgtcaaggagccatcttgatcttggttgaggattttagtttcgaatgaacttgttgtaacaattttcaagtctccaaaattgagtttggtgaagccgcattatagtatcatagtagaaactattaagcattactcaataaaagtttaatattggctcatttgaagttgaattatgtaatgaacttataatccacaacacaattgataattataaagacattatctaaattcaaaactgtaaccaaacttggccacacataattgtcaaataactattcataaaaccagaaataaaggccgaatttcataatttctagaattaatgtcgctttaacaaacaaatatcttaaatgaagtcttgtctcagatcaaaatctcaaaggaacttggattctaaggctaacccaaatacaacttgaaaaagaattatcatttcttcttctcagtagctccaccagatctgcgagcagacaaaaaaagaaaattaaaaactgaacgaatcaatctttataaattctatttcggggagccaaaaacaacaacaatagcacgattaaaacaaatttaatgttataaggctaaaaaccaactcaattgaagaaaaacttgaaaaaaaacctcaggctcagaacattattctaatactcaagttctttcgaaattaccacaaatcaatctttacactacataatgcataattgaaccatgttataaattcaatt

SEQ ID NO: 52640 - DNA, 2226 bp, Cannabis sativa
cacctcatgtacttcagttaatcagccttgtttttctgtgtaaaaacaatttatgtgttttatcttttgtcaaatagccaaagctgggaagattttcaaatattgtagcttataaatcctgcaaaaatgtggaagaaaaaaaaaagaaagcttgatttatttggactttcatgttatatcccattgagtgtgttatcagctttctctttaggtggtgtttgttttgatgtaatgcaatgtaatgagaataataattataatatgaatggtaatgtaatggaataaaaattgtaataagaatggtattatgatgtttggtttaaccctgtaatgaatattgtaatcaaataaataagttgtatatttacaaaaatactcttagttttattatttttaatatttaaaattttaaaaaaaataataaaaaaaggcaaaagagatattttctaacaatgtaatcatcattacattgattttatgatgtaatgagaattacaatacatagtgtaatggccattacaatgtaaagccattacaaaagtttaaaaatgaaagcaaacaatgtgtaataatgattccattacaattctcattacactaaaccaaacatgcttataattttcattcaactttgttctgttatgggattttttttttttttttgaataaaagttgtacatttattgaatcatttcatcaagaatgtcactcgggatagaagtagtcgagtagctacaatcagcatgtaaccatgagtctctagctaagccatgaacaacacgatttgttcaaaccagacaaaagaaacttgcaatcttcaatacaactaccaaaaggggagatcatagacaccgagcttctaacagcttggatagtgatgagactaattgtttcaacaatgacattggagacatttgatatcatgatccaactaagaacctccttcacacctagagcctcgacaagacctggatcaacacaaccaacccaagagtcagactgagtctgtagaacatgaccccttgcatctcgaagcacccaaccatacccaaatttgttggtatctgcaaatgctgatgcatctacattaatctagtaattatcacttaatggagtacaccattgctcaacccctttaccaatctcaatcgagaaaagagaaggattaaaggatttgttacgagtaaataaccatggttcaagatcacattttgcaaaagcagcaacattcttgactgaattactttttccattccaaattttgttatttcgatcatgccatattgcctaacacaatatagcatcaacttgcttatccttcttactccaccactcaaactggtgttgaaactagtcaccaaaagaagaaaaaacaacactcccgccaagcagtcttgctgcacgccagcaagcagtagcaaagctgcaaaaactcagacaatggcctattgtctcagcctcttggttacatttggggcaataggaagagatcttaacatgcctttgaatgaactgagaataagtaggtaaacaattggacactgctctccagagcatttcttttaccttcgaaggaaccttcaactttcatcttagcataaattatttttttcatcaaaataatttataataatctgactaaaattataaataattataagaatgtgtgttataagataatattattttataaaagaaaactctaacttgtattttacaaaatgcatagatcaaaataatacttgaatttgattttcatcaaaataatttttaatctgactaaaattataaataattatttatacatgtaataaaatttaaaacataagctaaataaaaagtaaaagattaactaatttaatatttgaataaaataatttatttctcctttctctttttctctccatgattataacatcagttctgaaatttcaccatcatcttcatttcaatcattttgatctcctatttttgagctccttgtagttgaggtaccgagcgagctccccaaaaaacattagtgttgagaaaatgtatatagaaagatgactttaatttctaagatttgagaaagagtttgaagaaattcaatacaaattggggttgtagtagagatgtgtgattttttctttttaattaaacaaggtgctaccaaaagttgtggaaaaatgctcaaatgcacatagtgttttttttttttttttgattcaagcgtttatatattac

SEQ ID NO: 52641 - DNA, 1735 bp, Cannabis sativa
ccaacgctccccactgtcataggttcccgaaggcaccagcagtggctcaaattttcttgagttagcgtttttccattgtgctaaagttaaacgagcagtgaacatcacatcagctgcagagtaagatttctggttccatagtacaccatttcgagcttgccatatagaccaacaaagcatcacagcttcctctaacaggttcggtttatttctgtcagcaacatccttaaaccagatgaaaaaactgtcgctgtgggcaggaggagtggccaaaccagatcggttccagcaggatttgctgaagtgacattgcagcaacacatgtgtaatcgactcctcctccgtatgacaaaatgggcatgttaattggacaggtacatgcttcgaatagagttgggtacgagtcggaagacaattggttaaagccttccatatcaaatgtagaacttttggtgggactttaatcttccacaacgtcttccacaccttatcctccatatctgaattccatgccccttttagctcttggatatattgataagcactttttactgtataaaaaccagcagtgtttttattccagtaccaagtgtcttcagtgattgtcgaactcaagggaatgcttagaataatttcttggtctctttcttcaaacatatcccgaatgagctcttcatcccacgctctttcattcattttcatcaagttttgaactgcataagtgttcaaaccaggatgagtagaaattataagaggattagagtctattggcaaccagggagtccctaaaatactggtactttgtccgttaccaatgcggattcgggcaccatccttgataagggattgagtctcatgcaagcttctccatatataactcgggttattgcctagagaagcattcagaaaggaccctcttgggtaatatctagctttgaaaaggcgaccaacaagggaattttcatgttgtagtagacgccaagcttgcttacccaaaagtgacaagttataatcccgaaggctccggaatcccaaacctcccgtactcttatgcctgcacaaccgtgaccagctgacccaactaacgcctctagtcttctttgagttcgattgccaccaatatttagccatcatttgttccaattggctgcaagtttttaagggtaacaagaaaacagacatagcgtagcttggaacggcctgagctaccgtttttaagagtatttctttgcctgcctttgataagaaacgcccctcccatcgttggattcgttgctgcattttctcttttaagaaacccagaataacatctttatttctgcccatggtacttggaagtcccaagtaactagagtttccatcagcctccatcattcccatcatcccacatagtctaattctagttgcactaggagtattagaactgaaaaagatagatgatttatcatagttgactttctgacccgaagccatctcaaagacattaagcagccgtaacacactacctgcttctctatcatttgcccgacaatagagataactatcgtctgcaaatagcatatgagaaatgataggcgctccgttagccactttgcatccatgtagctcaccatgcctttcgaatcttttaatcagtgatgtgaggccctcagcacataaaagaaacaggtatggagacaaagggtctccttgacgaagaccacgagcaggagtaataggacccatctcacggcca

SEQ ID NO: 52642 - DNA, 778 bp, Cannabis sativa
gacagaggaagcgcgtaagacccagttggttgaaggagtttgttaggatggagaggagctgaatcaagcctcacacatttccatttttctgttgtaatttcggttatttttttcttgctaaataatttgttgaatgggatggtataaatccatgactgtaaccaatggcaatttttatgctaagtaattcaaagctgaaaggcaatttggagttgggcactgactcgaagagtgcgtattgtatcattagtgctttcattgttgtactcacgatgaagaacgaagagattgctggattattgcaagcattggagttgaacttcaagcaacattcggaggatcaattacagaagttctcggccctattggagcagcacgtagctaagactgaggagagattcacacagatgccgcaggctagttcggggaatttagagactcgttcgaactctgaaagcgagttgggtcgctcaagcacgaggagatcggaggtgccaacggagaatcgggaagcgaatgctctgctcaagaccttacgcgttaaggtacccaggtttgatggtgaaaatatagatgactggatttacaaaatcaataagttttttgatctgcataaggtagatgatgaaatgaggcttgccatggttgcgtttcacttggacggggcaccttcaacttggttccgatggatggaaaaagggggcgcactcacggactggtcatccttcctccgagccctgcagcaacgttttggaacatcaatttatgatgatccttt

SEQ ID NO: 52643 - DNA, 974 bp, Cannabis sativa
aaattttttgattttctaagtatagaaaatcaaatttccctaataataattaggatttttacgtacaaaattatatcccttaaacttttaagattgttaaaaatgctctgtgaactattgagattattagatttaaagatttttttctaactttagtaaaaaagtctaataggttgaaaattcgggggacatgatttagtatatattaaaattcgaggggcataatttatttggggagcatagtttagtacataaacaatcactgaaatagtaaaattaaataaaattaaacaaaagttcttaaatctaacaatctcaatagttcagggggaatttttaacgaccagaaaagtttaggatgcataatttagtacatgttaaagtttaagagatgaaaatcctaattaacgaaaaaaaataattataaataatagatagagggtatttttgctcacctctatcaatttccccggaagattattatatttagcctaaatctcaaaactaaggccaatcacatcaacattttttctctattctttcaattatatcactaaaattctattttctttatttacatcaagtttttacattatatgatacatcaatttttctatgtagaatattgtaatctagatctaaaccctaatttattcataaaaaactaaacaatagaacaaagattagcagaagcgtactggagtccataaaatcgactttggaatagtttgatcttccaatttttttttttttttttttgtaaaacctatctcttgatgatggggtttcaaaagaataaaaagatacgataatacaaattagggactattacctgttatattgccaactaccaaaatacttagtaatatttattgactatttctatttgacccctcatcaaattagaaattatccttatggtatccacatattaaaatcataacaatcacgctcttaatcataaattttattca

SEQ ID NO: 52644 - DNA, 816 bp, Cannabis sativa
tatatatatgttcttatttttatatgtttgttattgaatttttatatatatatatatatattatgttgttattatttatttataatattgttgggaatgatggatagtaattcaattcccgttcaagatcaatatttgcaggataatacaatgagaactctgaaattcctttcctggtgtgaaaaatcagccacatatggtattatagaacatattcagaatttttggataccttccgaacactaaagacacgccaagaaattatctcgtgtcaaataaaaccacgataaaccttccactataacaataataatgggtacactatattacactctcatgttttgacaaatatttgagcaatacactcaaaagtctcacattcactagtgtagtaatctcacaatctctctacaaaatatttctcacaattttgtaggaactctctttttctcactctcttagatttctcttactaagcagtattctcactatttttcccttaagagcctcactcttcacttttggaatagcttgtgatagttgtggtgcgataaacaaatgaaagagatggagttctattgataggcctccttggatgcatgaacaagacacaaaaaattaatcttctattaaatgcatagttgaatatgtgcatatgcctcaagtcaaaaattatcattgtaacttttcatatggttgaaaaataaaactacatttttacatgattagaaaacaatcattacccatgaattttccccttttctcaatccatgaggaagaattgatcttgtgtcttcatcatcgagaactcatccc

SEQ ID NO: 52645 - DNA, 1846 bp, Cannabis sativa
aaaaaaagctttacgacaaaaaaaaaattatgttgacttaaataaatctagatttttggagggaaaaaaataaagtcaaacttgttctttagatttacagaaatttaacttttaatatacttttttttatatctaaatagatttttgatagaaaaataaatatatttttaaattgcttaattaattttaaaatttaaattccttttttaaatttctttattattaaaaatgatgtttttaagatctaaattaattttttaagagttattaaaaaatattgaatcttttttttttttttttgaggggatacgatttgatagttttcaaagtttaagagtgaaaattactaatttataaatatatgttaacatttaaatgaaataatgggacagaacctaacaaaaagtctaaatttctgtaaatgttaaagtttagggaaaatttttaagaagccgtatattttagcgggcagaattaacattgttgaaagtttaaggggcaaaattactaatcattctttattttatattcatataaaatagaacttttgatcactactttttactaactaaatttatattccgaatttctaaccgattgtcttaaactacactacaccatcatataaatatatatatatatatataattataattattcaaacataaaaaacataaaaaatgtaaggtgtattagtatactcatttttaaaaagagcaccattaaaatattatacaatagtcctacattattgtaatgaccgcatagtttaatcgtgagaattaatagatcattaagagatttaattattattatgtgattataagcttcttagtagaaattagggtttaaagttagaaataggccttaggtaactaatttctcaattacagagatatatttaaattctagatgtagtatatataatatatatgaaattttatgcttcgtaattgtaaaatacgacgatttggctaatggagtcacttggatgcggttgagtatcttaaattagtggggcaagttaattagatatttagaatctcgatcttgtttggattatagtttttgaccattttacctataaacatttaaatttcttaagtattaagaaaggggcattttagtaaattgctacctaagttatcattgataagattagtggattttgaagtaaaatcttaagtgttttttttttagagttattcagctgaataaaacaaaagggttttgaggataaacattaaacaaaaagcaaccacttcttctcttactctatagcttcggaccaaggaaaatccaaaggaaaatcaaagttttccatcctttttacagcaaaataagaggatttcagcaaggatttcaagtgtatagtccctaaccacttcttctctttcaatttttcttgatgaaaagctaggtttgaatatgtaattttggttttctagtttctatctgagcttggtatgtttaggatttgtttcctgtagtagttttgagtttgtttgagctaatactgagtgattattgtggctatagttggatttgatctaggtgtgagttttaaagctaaaaattagctcaataatggtagaattcatctaagagttgtatagttgtaattgtttgatgaattatttgatgcctaagtgatattttaacatcagttagctaatttattagttccggtgaagttttccaccaattctcagagatgttgtttcgtggaatcaagagactcgaaactacctgatttgctactcatgtcactttgttgaaaaagtgaaaatataaagttgcaaatttgacttgtttgagctcatagctcttgcttactatgaataac

SEQ ID NO: 52646 - DNA, 1105 bp, Cannabis sativa
aacttctatattaatgtcacttaaaataaattttttatattactaatatcttacataattcaaagagtatttttataagaggtacacttggagacaagtcaatgttttcaaacaaggcttcctcaaaaagccttttttgtactatatttaggacaatagagatagtatatcttttgcttcaactataacatgatctaggtggtaggtctggactatctttgtgattaaagtcatcaattagggaatatttcacaaatactcaaaaaaataaaaaaaattacaaaaatatggttggatggaagtttaaatatttcacagtttttataattttatttatagaaaatacggtcttttgatgtatttttatgttgttctcttgttgatttgttgttgattttttgttatttgtatgttatttttttttattttgatgttgtttagatattgttttcctgttacttttatgtagctttcttgttattattatagaacactctaaaaatgtaaaaaaaaaaaaaatctttgaacgtaaaaaatataaataatttacaattactttgaaaatctaggttttgaagaacataaatattttttgtattagtttagcttttgtgtgaatgactgttagattttaggattttgaggtttgtaatttcatttcttgagactaagatgaagaagaagtgctcaaaaaaatgttatttttattagttaaatatttaatttttaaataactttttaagaattttaacatatttcttattaagttaaattaagaaaatttatttttatttttttaaaaaaattaaacttatttagcacgtgacctaataatatgtcggcatatgtctcctaactagcatttaacaaccttaactagcagctaacagtcaaagggcactgctccaacaaactcgtgaccaaaaggactatcgccactagaggtgtgcataaatcaatccaatccaatgagaactgatcgatccaattaaaaccgaccgccaaacattagatatccaattatgatcggatcggattggatgttatttttaaatatccaattggatcggataggatggtggatgaggtatccaaaaatccaata

SEQ ID NO: 52647 - DNA, 818 bp, Cannabis sativa
attgtatcactttttaataacgtagaaaaaaactagcataaaatttagtatacgtacatcgcacgtaactttttactagcatatatatatctagctataagtaaaagcaaaagtttagcccatacaatatttcttatttaactgatcatttatttatttattaaaaaaaaagtgtttatttgatgatgatttatttatttgttaaaaaaagagttaaattccaattattccttaagaaattttaaagtgatgagcttatgttttatttgaaagaaaagataaatatatattgcaatttcaatgctgaaaatatattagaacaattatattctaataattaatttaccataataaggggagacacaggtagctactagctagcacctttattaattatcatggatatattaatgtattggaagggaataatcaataacctcaaattaattataaaaaaaaaaaaacaatttcattttaagtagcctactcatattcaaggcgaaattacataaaatgtaactgtaaaacataattatttcatggacagaaagtgatatcataattaggtcctcctctgcatgtaaaagtactagacttatcatcataagcatagctataagcttgaggacactgagtcttaaacatcttagaatagtctgtcggcgggcaagtctccggcgtcccatatgctccggtgcagcagtactcaggtttgttcaaagccaaacacgcgctcttgcaacccactacgctcccatctgctcctttcaacgtcagctccggcgggcaaacgctgttcacattcgcaggacagctcg

SEQ ID NO: 52648 - DNA, 1597 bp, Cannabis sativa
agagggcaaatggctccggtgagggcctgggtgctttggctccggcgaggtcttgggcggtgagatgagatagagaaagagagggccttggagggggttcagtagaaaaagaagaagaaagaagaagaagaaataagaaaaaggaaaaaaaaaaaaggaaaagcaaaaaaatatatttaattttttttactgattttaatttttttaaatatttatagttattttttaaaattaatattacgtgggccactaaaattttggcacgtgtacaagtgtgtactcgtgggcagtctactgtgacacttaactgtgatttttggacggaggggtatagagcaaaacgaaatgagagtttaggtagttttgccccaaaaaaatcgatttttgtggttaagtattaaaatttaaagtttatgtagtttagttgccaatattccttttaatttttatacacttactattattattattaatattgtgggtaatttgtgacgaaactctcctatattttaatttgtatacacataacccttttattatttattttttttgtgataaaatttctttatgtttactaatttgcaaatttgagacgccagttagatacaaccgttaaatactaactgaattattactgtattggttttgaagttttactttcacatatacacactagttatccagttgatatttaacgataatatttagctgacacctcaaatttacaaagaaaaataaacctaagaaaattttaccacaaaaaacaaaaataaataaggagttaaaaaacataagaaaattttgatacaaattatatgttgttattattatatatttaggaaaagatttctatagggctgtcaaaaaaaaccccaatatttaaatttttttctagcctattatgtcatttgattttttttttggctacgtgcatgaagcaaggaattattttgcctatcattttttttttctccattatcaggatttcactagccatcaaacactcttgcccaaaaattcaataaactcagaagttagggaggtaggtgttaagaattgcttcaaatacttctatttattctcttcctaatttttacatttttttttattttactttagattctactctccttaattctctttttcttttattctttttattcaactttattttatagagaacattaattttgtcaaaaaaaaaaaaaaattagagatcattaactaattaaaattttaaaataaataataattcactttgaaaatgtaccaaattatgtcacttgaacttttctgaccgttaaaaatttcccccgaattattgaaattgttagatttaaagacttttgtctaatttcatttaattttacttattcagtgattgtccatgtactaaattatattccccatactttgatatctaccaaatcacgctccttaaattttgacatgtaccaaattatgtctcctaaatttttatctatgttagatttttcttactaaaattgaacaaaaactttaaatctaacaatcttaatagttcacgggagatttttaacaaccttaataaaaagttcagtggacatgattttataca

SEQ ID NO: 52649 - DNA, 1299 bp, Cannabis sativa
aaggagatatttgttgaaagatggaaagttctccattgaaaatgatgaatacctacacaaagataatcgttgggtatttaagaagtcagtgtggagaatacactgcgcgtgtcccatagctgaagattcattaacaacaataggtcaagctataaaatgttatgtagcatggccaaaagactatcttacacctgttagaaaatacttattatgtttcaatttgtttataacttattgtgtttattcataaatgacattgctaactttactatttcttccatatttatagacacaaccacccaccaagaaacttcagaagcaacccgtgaagagaagcaaaaagccgttgaagatttactcggtcctccaacacaacctccaaaacaccctgagaggccgagtaaggaaaaatgtcatggtcgttatgtccaaccacggtaaacttcctcaatcaataccttttggaactccgtcaaaaggtggcctagttgtccataatacaattccaagttgcttatgagctatttggggtcgaagatgactctatttggcttgttaaaagtgacattcaggaattgtgcaccatgcaatatttcagagcccaaccaataggagtttggtgcaagtataatttctaactcttaataataaacttgataatgttcttttgacagcgacagttattaattgtgatgttttttatcaggtacatgaaagaaagactgttggacattggtgggctaaatcgagtatataaatttttgaatccaggtgggattgccaccgatgcagaggctgatagtaatcgttgtcaagcacttgtcactcgaatgactaggatgactaattcacacaaaatggcttattgccctatataataatcagtatatgtagatttaaaataaataatttcaatataactcttcataaaatttattattatgtatgtattaacagtcttacacatatttatttgtgcaaaaagatgtttcactggatgcttgtactcatccaaccaagtacgcagacggtgacatacttagattcaggcaacaacgacataccagatgatctgaacttcatcatattcaatatcaaacatccttatgtaagcgtgttctatatttataaatttatatatgctaattaactttactttttgtgtagatcgttcaaatgataggacaacctgaccgacctatccaatggatgactcttattaatcctgaacaaccagacgacaaatagtgtggatactacgtcatgaaattcattgaaagtttcatgaccgtagaagat

SEQ ID NO: 52650 - DNA, 737 bp, Cannabis sativa
gttagaaaattaaatgcaaaggggtgaagatgaaaagctttagaaaaactcaaaaaattaatggagaaaatggtgttgtactaaatctctaaactctattacaaattattattttctaattcctttacaagttttcaaatggggtttttatacttgacctcaaatggctttgaaatacaagtggtcccaaaaataaggggacaaagttctgattgtactataagggtcagcgtgtaagatggggtagtggtggagtgttggtcagatgtcaacttgtatctagagtgagacaaataatgtctccactgcttgtacttgtattcgttgtacaaccaccttctctctacaggctttcagaggcgtgctagctttaacgagcgcgcccttggtcgtacatccctttggtattctttctatcaccacctatacatatgatgagggagaaacacttggtgatttggctaagtgttgagggagggagcaacgtttggtattttggccaattattgggagagggagcaagaattggtaattttactaagtgttaggagaggggagctcccttggtacatgtggggagtaatgggagcggggagctctcttagttgaatatggaggaaagagagggagagagcgcggagctcccttgcttgaatagggaggaaaggggggagagagggagggagcggggagctcccttggttgaacagggagcaacggagagagagagagagaga

SEQ ID NO: 52651 - DNA, 1227 bp, Cannabis sativa
cccacataatgtgagttataataattacttttgttttccattcattccacctaattattctaaatctttaaataattatactcaatttagtgttccactattctgaaattgttacgtcaaatgagataaaggctaaagaggcttatcacatcttttcatagcacttggtaccaatttcagggcatggacctgattaaaaatacatgttttaggccttggctggttctctaatattacgatcttttgtagttctgccatgttcttcagtatgaatgttgttttaaagaagttgtgtggtttgaatggttgatacctctttatttattgcttaagtttgtttaataagatttctgttaatttaattacatatgtagcatagctgtaaagagggagtcctctatttttggtgaaaaaactattcttaatggtatgtatgggtatatatgcaaccattatatatgtgtgctttttgtatatttgcatatatagcattatgtaattattctgctataaaatgatattattttgacattgttagttttttttaactattattagtattgtgcgatgggcctttggttgggttggaatagattttttaggcatgcttccatcagttgtgtctctgtattgtcaatgtggatttcttttgccaatggtatttatttcttatggtgttgtattatttagctaactcctagcaaacgtaggatttataactgatgactgagtataaaaaatgaagttaatgttagtcatacattgtgcctatgtatttactgtgatataaaattattttaaaatttaaaaatacaagtagggaaaattgcataaaaatttgcaattttctcttacttacatttatgtttcattttataaccgacgcaataggtataaaaaaaattatttcagcaactcatgtgtcattttataaccgacggtataagtttttagtgtcggttttaaaatggcacaaacaattttgcgtcatttctaaaccgacgcagaagataaaaaagaaaagtgtatatattgtgacggtttttaaatgaagagaatagttttttgagtcatttaaaaaacgacgctaataaaaaactatctgtgactacggcatatatgtcaattttttaaaccgacgcaaattctttaaatgtcacctaaaaaccgacgaaaatactcctttttgtagtagtggtaacaccctaatctataagaacgccacgt

SEQ ID NO: 52652 - DNA, 946 bp, Cannabis sativa
tccgacaatcctactacttaaggctcagttgaaaatgatagagaaagtgattccacttccacagattatctttcacaacagatttcaccaacaataataacaatccaaaaacagttaagcaatgattccaatgctttagtttttgaatcatgtgttttagaaaatgacaaatccatctggattcttgattctggatctacaaaccatgtctgttgttcattgcaattgcgaattatttaaaatctagagagttggaacttaaagttggtaatggcgaaatggtatcggttagagctaaaggaaaagccaaactcaagtttcaggacacaattttgaatttagacaatgtcttattcattctaaattttagtagaaacttgatttatgtttcatgtttacagctgcaacaatacaaattgaatttttcgagttctggttctatcatttctaatgacatttaaatttgtgttgcatctatggaacaagggctttatgttctaagaccacatgaaccatctgcacttaataacaaactgtttaaggtagcttaacctagaaaccacaaaaagcaaaagatcgataatgaagacgaaacatatctatggcacttacgtgttggtcatataggctatgatagacttcacaggttaaccaaaagtggtctattgaaaatgtcaccttaggtgaattacaagttttgtgaatcttgtctagaaggcaacactactacaaaattggcttttcccaacagttaataacggggtcaattatgaaaaccgttggaaaaagtaagcagagattttttcccaacggtttagaactgaagtaaaaaaaatcgttgggaaaaactattgccaatggtggagaaccgtgggcaatagtaaatgaaattttttaaaagaaaacggtgaatgccaacagtttataattgttgggaatactaagt

SEQ ID NO: 52653 - DNA, 1096 bp, Cannabis sativa
ctcaaactagtaggaagataaaaatattgaaaactaataaatgattgaagttttgtgttgatgtgtttaagatatattgcaaacaagttggtatagctaggaatataactgtgaaaaacaaaacatagaaaaatgggttagctgaaaggatgaatagaacaatctttgaaagggtaaggtgcatgttgatttattctggttttcaataaattttgggcagaatatgttctatttgcctgttacttgacaaatcactgtccttcctcagcaatcaactttggaactccaattgagatgtggtcagggaagccaacaaggtatgataacctaaggacttttggatgcattgcttatgctcactgagacaacataatttggaactcaaagctagaacatgtccatggattttatcgattgatccagcatagtaccaaacaagtgctgcgggtgcaggtatgtctctggacttgcccacactaaataattttcctacaccaagagtgtctagagtggctaacttttctatgttttgctcaattaagtctgccaacttcatcataatcccccctctcctcatcatcatccacacaaatatgagagtgttgtctcatattggggatttgtattaagaggctttctaatacgaaaatcccttggtatgacaaagttcattaagggccagtttttgacacatctgtgctgtgggaaaaagtaattgtaccggtgctatgagaaaaaacagctgcaatagaactgtggaaaaaaactaagcagagtgtttagtaaattataaattttaaagtgttgtgagttgtgaagattctattatatgataatgttataatctagttcattatgattacaaatatacaaaaacttagtgttacataaaatttttattttttatgtatttttattattttctctcaaaagtataaatttatatgcatttaataaaaataaattatagtttttaaattataattttatcacatgtaataaaaaagttagaaacgcaaatatataagaaactctaagttgatgtggaatgttaatattaaaaatataaaacaaaaaatatttttcaagacaaaat

SEQ ID NO: 52654 - DNA, 1762 bp, Cannabis sativa
ttgttgatgagtatgagggcaaggatgtctaaataggatacctaattgttgtaaaataggttgtaattttctgtattccccaccccaatcagtttgtaaaccctttatgctcttgtcaaattgtttttccacaaatgttctaaaggttaagaatataggaaaaacatgtgttttgttttttcatgggatatatccaagaatattttgtaaaatcatcaacaaacaagatatagtacttgtatccttcagcagtggtaattggggaaggtccccaaacatctgaatgtacaagttctataaggttgagtggttttaatgaagagcaactaaaatgcattaaatgatttttaccaaattggcaagcatcacaaaaatgtaaatctaatttggaaactttggcatttatttcttgaagaactttggtaagaattacagaggagggatggccaagcctattgtgccaaagagtagaaatacaatcagaaatcttacaagaactagaagcaatacaagcagttttattggaagacatagtagtagcagtaatagaagacaaactgaatttatcatgagaaaaaagagtgacagtgggctggaatgagggtagagatagcttgtgaaggccttcagtaagagttccttgaagaaggacctgcttcttcatcttatcaatgacaaaacattggttagtatcaaattgaatgacaacattgttgtcaacacagaattgagaaatacttataagattcttgtgtatagcaggaactaacaagacattttttaagaattagagttttggaagaggaaaaaaaacaatttccaatgccagatatgagaagagaggcaccattacctactgtgagctttcctttgcctttgtaatcagatttgtttgtcaaggcagtaacattagcagtaatgtgatgcgaagcaccactatccaaataccattgaggatcggtgacagaggaggcagtggccaacatggcttggggctcttcagtaggtgattcttgaggattggagtttccttctccttgatagctcaaatcgaagcgatggtagcattttatggctgtgtgtccagatcgaccacaaacctggcagattggacgattgtttccacgaccagtttgatttcgtccacctcttcctctagtagatccacgtccacgactattgttggtggagttgggtggatgaggtcctttcttgtttgcagcagcataattttctgtaggattttttagattcgatgtagcaacggatgtcatttgttcgatccaaagttcttgcgtttgaaccagaaactgaacttcttgaagtgtaattgattcttttgaggtgagtgtgataatagcagagtcatactcactgcctaaacctccaagaatgtacaggatcaattcatcatcggagagagcatggccaaccgccattggagcatcactgagacacctcatcttgaggatatattcatcgataggtgtggagcctttctttgttgattgaagcagtcctctcagttgcagaatacgagcacgagatgtgtttgagaaaagttgtctaagaacttcccattgttcagctgaagattcacatcttgcaacatgactaagcatgttttcagagatcgaattgaatagacaacttaaaaggaactagtcaaggcgcaaccaatcagctaactcaggattcggtagaaattttgtagcatctgtaggatctgttatggtggctggagtgttgggttttatgccct

SEQ ID NO: 52655 - DNA, 1238 bp, Cannabis sativa
gagacacagacttggaccttgacccagaccgggattggagactcaaacctagacccaggaccaagacctctagattgcggaccaaaactcaaaattagaacaacaattaggacccaggactaggactgggacccaagacctaaccccattctcgatcctagacccggacccagacacggacacagaccgggacctaagatccaaattgaaatgagattgtgacccaagattgggatctgaatcttgaccaacgacccgcggctcgaaaccaacccgtagtcggtgtctggatcttggaatcataccaagaccagaacttggaaaaatttccagaccaggacctaaaccctgacttggacccgagacccgaaatcggaacaagaaccagaatcaggaccctggaataggaattggacctagacccaaaactggatctagacgtagaaccgaacacagacccagacccagaccgggatcgatactaggacccaggcccaaacctggagccagactttcaccaagacttgtgatttagaacccgtgactcgagacctcgaccagaacctagacccgtacaagaactcagacccagacccagacctagaccaagaccacgaccaagacatagactgaaacctggactcagacccaaacccggacccaaacctggactagtactataactcgtactcgaacccaggactggacccggactgagatcaggactgggacccaaacccagactaggaccgagacctgaacccggactaggactagaactcagattgggacagggactgggacctgggaccgagactgggacctaggactagatactcagacttgggacctcagaatcgaaccgtgacctagacccagaccaggccaagaatcgagacaaggacaattactgaacacagaccgggacctacacgcggagtgggaccctaaccaagaccgagaactaccactttgacttgaatcggggaccaagacccatgacttggtcctatgaccagaaccaggacccaagacatgagttggaactggaccaggatctagattttgacccgggacaggacccaagacccgaggcttggacccgacccatagtcggtgtctaaattagggaattcgacctcgacctagacctagatccggaccaaaagcgaaacccatacaagaacttgaactagactagacatgtggttggtgtttggattggggaccaagactca

SEQ ID NO: 52656 - DNA, 1935 bp, Cannabis sativa
ttgaatattttctatcaaacttatatataattgtgacaagttatttaattgtatttaatgatacaacattattattatattctttgagttgacttacatttcttttgtaggacacgtgtcatcctctggtacatagctgaatttcgggtttaacaattatagatatgcccttcaaaaattaagtattaatttgtttttaaaatatgtcgaaacagatataaaatttaccaaattaagcttttaagaacgtatactatatacataccttttaacaattaagtgttactttacttatatttaagatatgtatatattttatatatgcagtgactgacccacagtttttactttgtgagggcttatttatcattaaaaaatatttatacctatattataattactcttactagatttatttaattttgtgggggactttttttactattttaatctataattacgaaattaaaaaattacatttaattttttaaaaggcaatacttttattagtgggggctataacccccacatcaatgtccctgtatatatgtatgtataatattacttgtattattctctgtctttgttgtaacactgagttgaactattgaaagttaaatataataatttatgaacaataatatataaatatatatatatatatcctaaattttatctacctaacaaggaatgtccatatgggaaagattgaggccaggtggaatacaacatgtcagtagagtgaacaaagtcactttgcacaacacgtcgattaacaaggtttgcaaatactcgggcgagaccaagttacaaaaaaatgaccaaccaagagggtttggtcggaccataccctagccggccaagggaacccatgtgtcagccaacaggccctaagaaaagggtaggccgacgagcacaaacaaagagcatcaaggggacttcgattgaatgatggagtccataaccatccctttggacgggtcacaacttggtttcagttgtgggacaattctaacaacccatgaaattagaaattcaatctcaaaatatctacgtatcttttaaagatatcaattagctatttttataacttaaatacatcataaaaaagttattttccctattttgaaggaatatttacttatttgaatacaaatcttttgtaagtcctaaaattatataaagaggatttggcaaagtgaaaaaggacatgaattctggtctcttaagcctctctcactccctctcactcacgccacttcctctttattgacacttagtttattttctcatctcacttgttcagaatttttcatccatcagttctcaccattgtaacattcaaagagagtcatagctagaaattacaaggtaaaagcatgtaatctacgtagtattaactctaggattaatacaactaacaagagagtaggtcattacctgccaaataagggggccgaacctctatagatcgttgtgtcaattttatcatttgcttttacactttacatgtggtgattatcaataataattatataaggctctactgtcagttgaccaaatccaaggttaatattttggtactttaactgagagcattgtttgtcctttgaatcaatcatcatggttgtaactaggagaaccactacatccacttcctcgggtcttcctcaagatcctatgatggctaatcccgatgttcgtgttcctcccaccacgtaaggtcctactaatctgactaacaccttcaatcctgccaatttcgcaaacccaacaaattcaaccaataccattaatcctattgatcctactaacctagtgaatcttaatgaaaagcctttgccgcccagaacagatccaccaaaaacaccttgaacaaaagatcttgtcaacacgaaatagcctccacgaagcacaactgggactgttccccaa

SEQ ID NO: 52657 - DNA, 1345 bp, Cannabis sativa
agcaaaattacaacaccgcgaaacaaacgaaaaattacacgataaaaagtttttagagagttgattacataaagagacataattatcaatattccataactgatttagaccttttagcgctttgataataatttctgaataactctccaccaagacaaagttgtggcccctgagtctcatcgagtcgagggcaaggcaacatgcagccgcttctcctatcaacaggtccctaaagccgagcatggaaacaacagcccacagaactttccctgagtgatttctagcaagggctgcaatgcacatagagtttccaccaaccctagcatcataattgattttgatccagtcctcaggcggcagtgtccaagcaggaggagccacagataagatcggacaaaataagaaagccacataatctgtataacaatgagagatagagtcaattgtcgttacaatgttattcgatttcaagttatgtaccttgtcatttcaggttctctaaatagtgtccacgatgactaaaggatataggaataacttatcagagtccacaccagaagcttttaggttccaaagaaacttaacccaatccaaagcccgaccaccagagtcatggattgtgaacacctctaagggaggagaagacctccaccagagatggtaaacaaagttgcattagtagaggaacaggtgttccattgattcctcagcctccccacgcaaagggcaagtcacatcttcaattttgattctcttggccaagataccacggaccggtaaagcattcgaaaggataccccaccaaaggattttatgtctttccaaaattttggaattccatagtctattcaattgtgttggagccaccacacaggcaggggctctttccaaagcttgaatcaaataagcaaacttcgtggggaatttcccgtttccttctttggtccagatccacctgtctctcccttgatcggaaggcctgcccactttcaggatatcattgattgtttcagaatcaaagagggtctcgagcttagggatatcccaattcccatcactcataagaagattcgccaccttagtcaccctctcagggcaagaagtgatgggtttcgggtagtactctttgccatgaaaaacccacgggtccttccaaacatttgtttcttcccgatttgatatcaccttacaagcccctttcctgagaatatctatcaattttaccacatttttccaaaaccaagagtctaaatctttataggttacatcaaacaacggtttgcttttcagatacttgactctcaataccctgcagcagagtgattgatcctcagtaaggagggcc

SEQ ID NO: 52658 - DNA, 1961 bp, Cannabis sativa
  modified_base (860)..(873): a, c, t, g, unknown or other
gatagaaccgatctaatctaacattcaatggatgttggagcgattggatgacgaaattaattagatcggatcggatggtaaaatctaatatccaatatataatttgattggatatggataggcctaaaaatattggatgtgatccaatgaacactcctacctactatgttgtaggttttgttgtttaggtggcgttagttaattaatctgacctttgataattaataaataatatacaatttaaaaaaatactgatgaataaatataaacaccattgaaaagttgttcgaggaaaaaaaacgtagaataaataatattttatcaattatttaattttatcttgactatgagttatcaacataaacttgtatttaaaaatacaatcttttacgcgctcaagtgtttgtccatatcacatctctctcaaaaaaaaaaaagaaaaaaaatgttttccacatccattgtcaactttatattgacactagtttatatatataaatgaaattatataaatttatacagatcgatggagtaattcaatgagttaagggttgtatccaaaaattatatatttttacgtaaaaaatacatataattacgtaaaaaaaatacatataattattagtaatttgcacccccaaattaattaatttatttgtaattagctctcccattttccaattccacaataatatacaacacattatcttgtataataagttttgcataagttaggtatagatttatttatatgtatatggatgaaaatatacattttattttcaagggatatgctaattaagttcgaacctttatataaatctaacacattatagtactatattattattattattatnnnnnnnnnnnnnnttattattattattattgatgtgtagaagtgatcaaattcatggttgagttgaagaagtgttaaaataataaactttaataacactagcatattaataatctgtacatttttttcaaagttttctagctaattaaataataatatgatttcatatatgtgacaagattcatcatttgacaatttcttacatgaaaggggaactaaactaattccaactctcttcatgtatattttcacatatattcagtactaacagtgaataaatcaactatatttgaaaaaaaataataatgttaagtcgacttaatttcaattatatatatatttatataggaatgactcttggtaacattattggtcaacaactcaactacccactaaactatattataattagtataataatattaattatcttcccacttagaatgcttgtgaaattttcaactatatcaccttggtctaaccaatacaccacccacgaaataacctaagtgatctcctaattaacaagagccagctccacccatataaatataatagcattatcaatagatagtacaacacaacaactactaaatcattctatcttctttgctcttaactcagtcctctaacataatctaaaagttcatacttaagagttcttaatttgctctatcttgaattatagatatagcaaaatgggaagcttaggcgactttcaatttcctctaaacaacggtctctccaacatggccaacggggcaaccactaacccattggaccccgaggagtttcggcgccaaggccacatggtgatcgatttcatagctgattactacaaaaacattgagaagtacccggttcttagccaagttgaaccgggttacctcaaaaaaaggttgcctacatcggcacctttctatccagaatcgattgagacgattctgggtgatgtccaggaacatatcgttccaggcataacccactggcaaagccccaactacttcgcttacttcccttctagcggtagcattgcgggctttctcggtgaaatgttggccactggcttcaatgttgtcggattcaactggatgtcgtctcc

SEQ ID NO: 52659 - DNA, 892 bp, Cannabis sativa
agaatctgtctcaatgaaatgaattggaaattgatgctgaatagcccactgcacactatgaaacatcgctactgcctccatttctttagataaaaaacaccctctgtaaggcttagcaaaaccagcaataacatctctagtatgatctcggattaaagctccgaatccaagaagtactcctttctgatcacacacaacatccaagtttaatttatagcaaccatcagtcggtggtaaccatatttgtggagttctcacaggaagttgctggtgtggtgcgtggccaattctattatctggtgcggtagcagatgttgcagccgtgttttgtgctggttttgtcactttatgatatttgagccaaataagaaacagcaaaatttactgatcagatctgctggttaggcttagtaccatgtatttctttgtttcgttcagaccaaatgctccacataagacatgtaatcaactcaagatcagcatcattatgggtagcagcaaggtgggaaaaaatatcaaaaccttttatgttacctatattcggcatgtaaacattgtaacgaaactttttccacactgccttagcacgatcacaacaaaaaatggcatgtcctactgtttcccagccacatttacaaagagaacaagcagtagtgggagtgatctttctataggccagattcatagaggttggaagggcatcattaatcaggcgccaagcaaagattttgacttttttgggcaaccttagagaccataatcggttccaccattgtctatgtgaagaagaagatgaatgttcattcacggaatccaagctaactgttaaatgatacccagttttcacagtataaaaaccagtgtccgagtgatgccaaataagcttgtcttc

SEQ ID NO: 52660 - DNA, 1019 bp, Cannabis sativa
ttgtgaaccacaaatggcatgtagaatagattctcaataattaatttctaaagcaaataacatgttccagttccaattacggtatcccaaaattggagcataggatctcaataaaaaataaaaaagattcacgggcatgacaggaaaaactctttaatgcaaaacccaaccgagtaagtatactacaaacccattttatagaaatttcccaataactaaattcattatttgaatcaattgtaacatttctaacccaagaaactcaagagcgattactgaaagttctaattctgaataacccatgatgggattaaaactaaagcatatgtaacctaacatctacaaattcaaaacaaattgattcgcaattgaaaaggaacaaaaaaaaaaacttcgatcattctgagccaaaaaagaaagtattgaaagtgtagaaacaaaaatcaaatatagattgagcaaacataagaagaagaagaagaagaagaatagaaatagtccaaaatcaaagatttaaaaggaaaattataaaccctaatccgatgaagttgaataagataaagtacctgaatgtagggaagaaaaccaaagcaaacgaggctgagaagaagtcgttttaggcaatctgttgtctgagaccaagacaaccagattttgcttattctcagctaaatttttttttcttaaataattaaaaaaaaaatgatttttccacaaattctcagaggatcattcttttcaatttgataataaattatttaaatataaattaaaataacatttatgttaggaaaattatgtaaaatgagaatatttggtttgttcatttgaagacagcccgtagaaaatccaccattctctaacgagcttgatattaaattcaaatcaggacagtgcctgcctgcttaatgaatgttgcttagtgaaagaaatacagcaattagaattttacccgtattaactacacagacaaattttctagtctcttttaagcataaagttacataactaaaattgaa

SEQ ID NO: 52661 - DNA, 909 bp, Cannabis sativa
  modified_base (698)..(701): a, c, t, g, unknown or other
tatatacaattacaatttaaaaaaatttgagtagggtcatctgcaccgacgtatactttcacaaactaaacaataagttccatttatataaatactaaatagatatccattatgaatgaaaagttgaaaacgatatcttttacagagttttttattcttcttttcaattcatatcacattaattggtcttcacccaataaaaaagaataaattacataaagtacttgttttgataaattttttacacttttacaattatttatttatttttttttatatatttgtatggtgttccatagaaataacaaaaagattatgaaaatagtataaaaataacagaaaaaaccgtatttttaataaataaaattttaaaatcataaaaatattaaaaattttgtataaccgtatttttgtaatttttgtgtatttttgaaataatttttaagagattatttcacaaatacacaaaaaaaaaaaaatttacaaaatacagttttacagaattttaaatatttttacgatttttttttaaaatttatttatagaaaatacggtctttttatgttgtattgttattaatttgttgttaattttttattatctgtcagttattttttattgttgttttgatgttattcaaatgttaatttatgtactttcgtgttatttttatgaaaaattgtaaaaatataaaaaannnnaaaaaattatttaaacgtaaaaatataattttttgacaaaaaaataatatcttatgtaattatcgcttactaaatatcttatccatgatgataattaataaaggttaattactaatttttttcctaaactttgacatgtaccaaatcatgcccctgaacatttttgaccgttaaaaattcccctctgacctattgagattgttagatt

SEQ ID NO: 52662 - DNA, 1197 bp, Cannabis sativa
aatagtaatttaatggttaaaaaaatatagccatgatggttacatatttaatgtaaccattgaaaccttctcatatatgatatatatgtatattaaagtatatgatatatatcagtgaccttgaaggtctttcgtctatcatatggtggttaggccaccattctgtcgttgaatgacgttgattgcagggactatagtcccttggtgcgatcagctcctagactagacgaaggagacgacacccaaaccaagtggttgttggctgcgtcgtgtgcatggctagagcacttggatctcaagctccatgcatggggcttcagacgtgacattcacggtgcatggtggtgttttgagcattacataggtttataaatttttacatataagttaattttcataaacgtgaaaattatataaaaaaattgtataccttataatggcttacattattttctaaaaataataataacaaaacctacacttaattataccatataattaacgattcatcacctctcatacattcacaataatataaccatccattcacatacatatcacctatatataaatatataaaacccaaacatcatttaatgtatacacattcatagaactgttctagtatcaattgttagttttcatggtactaaatcaggtatccagcgaaagagtattgtattcttgattatcattgtaccatagtccaataaatctctagatgtgtgtacattaaatcgaaacataaaatagtaagtttagaacatatacctcttgaagactattagggtatcctcgaaacatctcgtatgttgtatctcttaatccagatgatgaggatgatgcaattggactcacaccagtgtctttcaaatcgatccacaacacacaaggaatagtgtgggctactaggataaagtgtatatttttgttcttattaagttctcaacacatgagcaagaacaattaagagagaaaataattttcttttcttgtctatatattttgaaaataccagtgtaaaagtatgttctgatttctcaaatcgggtttctatttatagtagttaaaagctattttaattaaatcatatttaatcatttagtaaataaatataactgaattcgattactgatatttataaaaaaaatgtaacttccccgcttcaagcccttattgggcccttacacccacgga

SEQ ID NO: 52663 - DNA, 1024 bp, Cannabis sativa
taatcaaatacagaaaaaaaaaatacacaaagacaaatgaaataataatacaaaaaaaaattacacagaaattcaacaaccatgttagatctgctcagggagcttctttaatgaggcagatcgggttgtgaactcgcagctccgacaagcttcttcacggtggcagaacaatggtggtggcttcgtggctcaagggtattgcgtttcagaactcggcgaggccacccgtggcctccattttctcctacggtgaccggagtatcactgtcacgctttgcaaacagagaacccaagaaagagttggtttatttcatcatttattattatcagtaatagagagattaaaacttacaggttagcgtttgatggagccgttcaccgtcccggtgctgcgattggtatgagggtggagagagagtggcgaggttcatcgggttttccttggacttggacggcgaaaggttggtttgttgaaggcctaccgccggagtggccgttgggaccttcatcttttcttttgtctgggctgagatagagaggaacaaagagttaaatgatatttgttccaaaaaaagagagaagttaaatgaggggaggcggctagaaaagaatgtcagctagggttttatctttttttttttttgagttaaatgatatttgttccaaaaaaaagagagaagttaatatattaaatagggtattaaatgtaagcttcgggtaatgggtaatgcaaaggtctatttattatttaatttattttaaagtattctttcccttacaattttttagatttataaaaaacttaaaataaaaatattttacttatagaattttttattatataatttatttaatttaagattatgatatggtgacacgctatgcgtgtgagtaaatctatttaccaacgcgttatgcgcgtcactaaaatgtggctttagtgacgcgcacaacgagttggtaaacagctttactcacacgcatgacacgtctctatatgccatgatttttttttttttatttt

SEQ ID NO: 52664 - DNA, 1293 bp, Cannabis sativa
  modified_base (1016)..(1051): a, c, t, g, unknown or other
gatcttttgatctaagatcaatcagtgatattgacttagaaagatacaacggtaagtttatactatctttaccaaatttatactccatacatccaatactagcatattttactaataccttgaaaaggacataacacttatccaaggtgtaagtaaactttattgctgactatcacattagtgtaaatccagtgcactgatgaatcatggggcataaacttttgaagcataaaatcacaattacctttcactgtgttgacatcactgtaattgtgagttacaatatgttctggatttaacagaaattatatatcaaaccttaagcataaaaaatacatgtaaacataaatgacttctaatcttttattgataacaaataagattgtattgaaataggttttgtttagggcataaaatccaaacactaaatcataggactatattagtaaatgtctcattttaaaacttgtagagaaatgaccattttaaactatttattatttatattattttttaccacataaaaaaattaataattttttttcatatatttttttagaattagaagaaaatttcttaaagattatggtatatctatattaggtttgttaaaatattttttatttgaaagttatgttaatttttttaaaatttttatgagttgttggtttatagattttgttgtacagtatgtttttgttttgttgtatgatatattattattcttagatgatatttatgttgggattttatgccaaaaataaaatttatttcaatataatcagatttactaattaataaaagatcagaaatcattttatgttgcatggttcacatgattgcttacatacttatatgtttaatgtataaattctattaatatccagaacatatagttattcataattatagtgttgtcaacatagtggaatataatcatgattatatgtttcaaaatttttgtcccatgatttgtcagtacactagatttagaccgacatgataatcagcgatannnnnnnnnnnnnnnnnnnnnnnnnnnnnnnnnnnntccaggacattggcaaagtatgctaggatcgaatgtatggagtatacattggactggactgatattaaacttgggtaagatatcataaacttactgttatatctatctaagtcaaaaatcagttagttgatcttaggtcaatagatcttaattatgatatggttagattcgatctcaactgtgttattgatgttcttagagttgtttgttaaagctcaatcggcctaatacttacatcttgg

SEQ ID NO: 52665 - DNA, 970 bp, Cannabis sativa
ttttaaacgtgcttttcctagaaaggttatttatgaggtaacaaactggttgggctaaattaatggcagaaaaatcttgatgagtggctgaacagagcagttaagcctcttaattgggtaataacccgcgtaaccctgatattctaactagtaactacccataaatcttgtctcactaattttaagatactgcgtgaaaaatactaaaattcatatatgacgtgcacaatacatctgaaatttaataaaatctttataatcgagaaattataactctaatgcctttttatgacaatagggcttattttttttctaatgcacaaataattataaattattaattaaatcaataatattctgctaatttttatgtctaattatgctgtcattatattaataatcttagccaacaaacctgttcttttaacacctacccaagtaatccagctagtaaaggataaggtccaagctttaaatcacagccacttaaaaaccaacgccatagctctttgagaaaaattacagtaaaaaaaaaaagatggccataactaatatttatttaacaaagttgaaattatgatttttaaatttagagaaaattagtgaacttttcaaacccacttaaatttgttattttccttagaaatgagaaataatgagattgatgcatttaaaattacttagcttatgattttgatactaaaagaaatttctaccctttaaaaataactcattttatgtttttcatctcaaagttatttatttattttatttatcaacataaacctacaagtttaaacttatttttcaagaattattttttttttaatttttttttctaagtatcatcttaaaatctattctcatactaacccaaaaaaaaaatgatttattactcatcaaaattttgctaatctaattgagatgagaaaaaaaaaatcaagggagaagaaaaaaaaaagtaaagaag

SEQ ID NO: 52666 - DNA, 846 bp, Cannabis sativa
ttgagaaattataactctattattcatttctaaatattggggtccacaaataaataaattcatagataattataaaattaacagaaattagtactaattacctctagtaatccaaaattaaaaaagcggtcattacagataaaacatggttgtatctcttttgcttatatcattcttcataggatatggtttcttgtacgacaccatagactgggtggttgcatataatttttctatgtcatcggttaggactgagaaagtaataaatttagaggcattttctctagaatgctgctcggcattgccagtaaatttgcctttctttgtgttaccctgcctattatcgttgttagaccttttcctatttgaatttgaactgttgggatattatggattctcgacggacactcctgccactgtagcgtgttattgatttttcttttgcccgacagtgtccacgtgtcgtactgcttcttcgagcttaatgaatccatctgcttgatctaggaatacaaccattgatcccacagttagtcttttaatgtccttccatagttctcctagaggctcaatgcctccagtaatacagctagtcttccctcttcagtcaaccccttaacctttgtaactgtggtcataaaccttctaatataagctctgagaggttctcctggcatttgcttcacttccaccaggtcttctaagtttgagggaagttgacgggaggaagaaaattgtgcatggaactctgatgagaaaaaattccatgaattaaaccttcttggaggcaatttaaaataccatttctgggcggcctttgcgagtgtggcaagaaagattctgcac

SEQ ID NO: 52667 - DNA, 1186 bp, Cannabis sativa
gaaaactagttttgaacctagaaacaaagtaataaaaaaacttaaaataaatatacattaacatcataaaattgagcaacctcattacaaaaccttcaaaacccgtgaaacaagtttcaaacctgtgaaccctgtgaaaccagttttgaccctataaaaaatcataacaaaacttgtaaaatcataacaaaacttgtgaaatcataacgaaactagtttctgcaatatcaacataaaagatttaaaccacttagcataataccaaggacccttagagcagcaaaacttaaccagagacaagcaaaccaaactaataaattcacacaagcaaaccagccctctgaaacacacaaactaataaatttcacaaccaaaaacacaaactcagtttgtttctatctaacaacatgaactaacttgttcttgttgttctacaaccacaactaggctatatagtaaataacagattgatataaaattatgattgattatataattaacacaatcatactatacaagaaagttaaaagcgtgttctctgaattagttttgccctacaaataagaccaaattacaaattaaaaatgtcataataatgacaacaaattaaaactaatgtatacacaattagtgtcaggaaaatctcaaatttaaatcaattttattcaattcaactgtgttgtctccatttttgcagaaaaactcaaaattgcaaacccaataaaacccttaaacatttgtattttaacattttcgagcaaccaaactataaattaaatataaattgaagaacaagaaagaaatgcatactgtagcaatatatcctaccataagatcactgcaatgtatcagacccatccatcttcgatgagtcttctttgcaagaaactagttttaaaggataaaatgaagaaatacaatacaatccaaatatggcttaagtagttataataaaccactatggataaaagcatacaggttttttaactgtgttttagctgttaattattattataaaacacttgaaaacatatgtatctatagtatacttgaatcttttcaatataatatctaattatcatgtaaagactaaatattaatatacgaagtaacacaaactattataattatatataagaatctacctaaataatttgtgtcctatatcaactcttttattactata

SEQ ID NO: 52668 - DNA, 1333 bp, Cannabis sativa
aaaaatagatgttgtgtgctctccttttgtgtgttacataacatacaacattcctccacttgtaatccaaacttcacaagtctatcccttgtctttaacctattcaacattgccaaccatagtataacactatgctttgggacatttagccttgcccaaacctcatggctccaagaaacctgatttgtactcggtttaaacagagaataaccagttgagatagaatatttttgtacctgaaacatagcagcgtcttgctttgttttgagagtgtccttgagagctacaagcttcttccaataccaactagagtgaatggaggccgagtagtcccaccagtcctccctcttaatgtacacactttgaacccatcttagccataggctttcttggttgtttgcaatagcccatacgtatttgcaaatagtagccttattccattcttccactcttttaattcctaatccaccatcttttttctgttggcaaacatctccccaagctacagcccctgccccatagaaggtagcttgacctttccacaaaaaggctcgacagatagcctctatattcttcaagatcttcttaggcataaagatcatttggctccaataggcttgaatggctattagtactgagttgatgagagttattcgacctgcaaaggacaaatttctcgaactccaactcttgatcctagcagtcatctttccagccaatagctcacagtctttcccagatatttttttagaggaaatagggattccaagataggtaaaagggagtacctgttgttggaagcctgaattttgcagcagccattgaacttctcctcgagacatgttgatgcagtagcaagctgttttgcaaggattcagattcaagccagaagtgcttgaaaataatttcagtgcttgtagtatgtacttgatgctcctcacatctccattacaaaataacagaacatcatctgcaaacgctaggtgattaagctttaacttcaagcagccactatgaaatttaaagtcatccttttccccaaatccatctcattagcctagacaaatattccatacctaggacaaacagaagaggagacataggatcaccttgcataagccccctcttagattcaaagaatccgtgcaaggatccattgaacataagagaaaacttaggagttcgaacacaattcataataaattgaatgaagttcttaggaaaatcgagtccctctagcatttcttcaataaattcccactctacagtatcatatgccttttgaagatcaagcttaatcatgcaactaggtttattagctttccttccataa

SEQ ID NO: 52669 - DNA, 1218 bp, Cannabis sativa
gaaacagaatgtagggactttctcgtatttgaaattggcgtaaaaataggactcgtttcccctgcgacgaaacttcattctcctcttcagtggaagtgtgacatttatacgtacccttactctgaaatactctctccaaacacctgtgaaattgttcggatcggattctagatattccccaatgaaccggcctgcctcaagaacaactttctcagtacgaaaaccagattgaaggtcgtgaatttgcacccacatatcaagggtattcaacacaacattcttaggattagcccctggtatgagacgctcgattaacaattgtttccgatcataggtccatggactacctttaataactctttgaatgtcaatttcatgataaaactgaaaaaggaatcgatttggttctaaaatcttcacatacatccctttcccaggcttccaaaggtccgccataatgttttgaaagataacaaaatcagatatttttccagtcaatagcttcccaattaagcaccatcggtcgtctaaatcaggttccttgtcgtctgggtcttcctcatcaaaaacgacttcagtttcttcttcttcctctaggcacatatctgcccacttctcatgtaaagcacccccactattgctactagaagccatgatgcaagtaatccaaaaacagaacaaaaagaacagcaagagacaaaacaacacactccaaagagagcgacaaaatcaacacactctaaagagagcgacttagaaaagagtcgtgttttaatattttttaaagatatttttttctttaacaatcgtaccttttatattgttttaaaataataagattttttatttatttgaacagataatatttgaaaataaataaatatttaaagggtaatataattatattaaaaatttaggttccttaaattcaaggagaaagtactaaaggtgtagaatttgtaaataaaaagtagaataattagcaaatttgctccctgaatttatgtcactaccgagttgtggatcctaaaatataagggcggttaaaaaatctccctaatatataaccagtatattattgtaccccttctgttgggttttttaacagacccacgtttatttgctggactggacaagattggataatgctgaaagtaatcctgtgtttggtttaagaatggactggactattttatttattttattttagaaaaaaaa

SEQ ID NO: 52670 - DNA, 1336 bp, Cannabis sativa
tatctataaattaatgaacaaaaatgagcaaaattgtgagagatattacattaaaataaaaaaatgtaatacaatgtaacatatatatatattggttttattacttttcagccgataaaataatcgtaacatatatattggttttattacttttcagctgataaaataatcctagcccatatgtaatattttaagtagaagtattattttgatttgtttttttttttaaaaaaataaatttagttactacaccaaagatataagagcattatttttgttttttccatagaagagctttttatttttgacacctgaagaaattatatcctaattcttttcataataatgtttatataaaaatttaaacagatagttgtactcgtgcatatttttttatatacatgtaatttattattttaaattttattttcgatattattaatcattaagaattttctaaaaatagatagtatatttaatataattattaagaattttttaaaaattatttagtataatttttctagatgccaaaaataaaaaataacgcaaaaataatgttcctactaaaaatctacatataaccaataataaattagtagagttgatcattgtccaaacttcaaaatttgaaaatataaactaggaataaagatagttataacaataaataaattaaaaatcgaaatattaataaaatatcacttaccttaatatgtgttagaacaaaagaaatgatccttgttcttatagcttctcaccaagaactcaatgtgatatttttggttaaggaagacttgctactctcttttattagttttcaactattccaaccttaaccactacccttagttaaattaaccacagtttagttaacactaaccatagttaaatagctaactcaggttaactatcttagaacttgattatttattttttctcattgaatatcacatgtgctaataaattatatatagacaaatattacacaagaaatcaatatgaatggtgtgaaaatagctggcatgaaagaaacacatttgtcatcgatctccaattaattgactaataattaaatttaatcttttgataaaaaaaaataagtagataaaagtctttttttcacacaagtaatatttgtatagtattaactaaaactaagaaaattgtaattaaatataaattatatatcattccattaatgtccattattaaaaaaaaaatagtcacaaacttattacaatttgttatcattaaatgtatttttagcccaacagttattaaaattaaattaacaacaatttatctctaaataattatcattataaagatattt

SEQ ID NO: 52671 - DNA, 2364 bp, Cannabis sativa
ggtttattctggcttatcttactattattattatttattttatttattattattatgtcaactttgtctgtctggataaacttggagtcttaggtattattgctttcatgatatttgtaataatgataccaattatcttttataggtgctgactatccttgttttattatattagaggtatatttatatattttttagtcattttcttatatgattttcccttactatggtaatttcttacctgtgtttttataacaataaagccgttcatcccgaggatcccgaccacccgattcacgggttggtgaatcggggtagttggaatactcgggataaacagcagaattcttttttataatagttattaaattaaaataaattcgatctgatactaaattagttttacctataaaagttgtatttagaattggaacaaaataaaattgatatgaaacaccattagattctcacaaggatttagtcgataagagaaaaaaatccactaccatagatcatataatatagatacattctcattatgtaacaacaaatctatcaaatatcttatatgatatattctttcaagaaatgcccatgttattattttggtcaagaaagtgaggaaaatagaataggggaccactaaggataataataataataataatcataataataataatatactaataataatatcggcgactatgctaaagtgttaaagtttattttgtgcaacgcaatctttttctattgataggttcaaacttcaaatttggctttggcctcttttacatataataataaaacaactcattttattaggtttggtttggtttgaactttactcaaattgtgatgtatgtaatgtaactcaatgtttgtacgttacatcattctatttctttaaaacacccataaaatactagattgttaggtcatttccaatttcacattaaattcattccaactatactttaaaacttatctcttaatgggtgaacaaaatatgagtcaaactattcaatccggctaattcaacctatttttttttttttttttttgtagtaaaagattatgttaagagtaagtcatgattcattgaactaaaaactgataagtcgtacggatattatcgttgctattaataactttgttacccacacaatggatattatcgttgttatgtcaggtgacagctactttaaagagtaattattgaattggagagatttttttaaagtagttgtcacctgacatagcaattcatatattttatacgctggagttgctcttaggaacaatatagatccactccttcttatggtgccagtcggttagttggagttgctcttgggaacaatatagatccactccttatggtgccagggtcggtcctaacaggctaaacttgttcttagggcaccacgagatccaaatttttaaaatgttattttctaacatataacaaaaggtttctaactttttaaaataccattttatatacaatttttcttttctttttttatggtttttcttttttgccaattaacaaaaatatgactttttcaaaaaaaaaatattttatgtgaaaaagttaagagaaaaccaattatccttaggtcaattagagggtaaccatttatctcggaggacataaatccccaaggagctgagttgaaggcttggctcccaccacctcctggttgggtgatgtgcaatacaaatgtctcaattggtaagtcgcaagcagcgggggctgcagtgttcagaaacgaagctagaactttcatcaactgcttcaccttctgtttggctgtctgtgggccactcttaggagagaccatgacgctatgcaagggagcggaggaagcaatcaagcaaggatataagaaagtaatcttccaaagtgactcttccaactcaatttctgctctaaaaactaacttgcaggacatcggagtgcttaactacaatattcaggagttggtgcagaagtttattagcttatcgagcagtttcactctttgggaagcctcttggatccccagaaatttcaatggtgtggcccattcagtggctaaatgggcaaatcataacaactcttttgggtgggttgatttgtctcttgaggatagtcccttacgctctgttctttcagacttaggatgactagaatcctctcttttggttttagttgttagccgaacttggtagttttatttcctcttatgttgtttattttagtctgttaagctggtttagttaggttagcctttttcggttgtttttctttaggccgttgtgccttgtttgttgttttgcgtccactagcgcttccaggggttccattaatcaaaaaaa

SEQ ID NO: 52672 - DNA, 784 bp, Cannabis sativa
ttttcttgaccgtgtcgaaggcttcatcaagctcgaagaagccattcaacgagcggaagttgagcaaaagcttggcaagtcaaaatctccttctactcgaacatcctcccaaccttcccattacccaaataattcaaactcaagtggtaaacgttccaacaacaaccacaggcacgagaatgggaagaagggaaggttcaccggaaaatccgacaaactccctaagagaatcaagcaaagtacactgcattcactatcttgactaaagacgttgaaagtgtttacgtggcaactcagtccctggccccatattagaagccctagcccatgaagaaagatgtcagcaagagggacatgtcgaagttttgtcgattccacagagactatggccatgacactaatgaatgcaacaccctgaagcgagaaattgaattcgtgataaggaaaaataacccaaacttgtagaagtatgtcaagaccgatcagggtcagggaaacaacaataaccaagatttattacctccaccggtagatggacatctgcaagtcatcattgcaggcctacatattgctggagattcgggaaaagctcgggagaggtatgctcgaacagggcagcacgaacaaaaagaagttatcctggctgtggaagaaaggaagcccaaagttccacgagcaggagggctattacaaattttatgtttattacgcaagtgtacgcaatcaagtagtatctcactcaagtgaggtcgaaccacaaggaattggattaagtactactgaa

SEQ ID NO: 52673 - DNA, 931 bp, Cannabis sativa
tttttttttttttttgaacaaaaacagaaacataacttaaatgaaagcaaagataccaccaaccccttgttttttcaaaaaaaaaaaaaaacacaattagaagaagatattaccaaaaatattttgacagaacgattattcaaggtttttttaatgggacactaaaattttaaaaaagtgaagcttagacacaaaattactctaatagaactctaatatgtgggagtctatagtgtcactctaaaaatagtaggacactatagactacacaaaattaccctgcagtctgatttgttagaaagaataagaacgacccagcaaagtgattttgagctacagaggtacaaagagaagttagaaacaagattggcaaaagatttttcactttcacctgatgggttattacgatacaaaagcagaatttgtgtaccgaccgacagaaatatcagacaggagattcttgatgagtctcatactacaccgtactccttacacccggggacaactaaaatgtatcgtgatgtgaaggccctgtggccaggtatgaagagtgacattgttgagtacatgtcaagatgtctaacttgtcaacaaattaaggcagagcatcagagactggcgagtttgcttcaacctctaaagattcctgagtggaagtgggaagacatcgccattgattttgtggtgggattgccaagaacgatcgggtactatgactctatttaggtgattgtggatcgatatacgaagtcaacacactttaacaagtgcagacaacgtatatagtggatcagtatgctgatctatacatcaagaaagtagttcggcttcatggtgccccaaagtcgatagtttcgaatcgagatccaaagtttacttccaaattttagaaaagtctacaacgagtaatgggtaccaagttaaagtttag

SEQ ID NO: 52674 - DNA, 797 bp, Cannabis sativa
ggtttcagcactaggccttttttttcatttccgaaaagttactttactgctgctatgtaagtcttttttccactagcactgacatttcttgttaagctaaatgatgttaataaataattgcagtcatttttagttgttttgctgccaaaatcaaagccccattggcttcgatttcggttggaatttgtttttgtaatataaagaaaatccccaagacttttgggaaaaccatgggaatgtacacagggactagcaaaatacacagagattagtaactatagatatttaaatgtttaaagttgtcaattgaaacacaaaaaggggaaaatcagctgcaaaatgttgtgtagattaatattattattattatgaaagaaggtgaaaaagtaaattattgtgtccataatccaagttgtatctgtttaaaaaaagtttgtatttgtattgattttgaaattagtattaatatactacaatttgtagacataataggaaatatttacaataatatctatgtatatattataatatatcatcctgtaggattttttgctttttctttctaatttggaaaataaaaatacatgaaaaccaaggcaatgacatactttgtatggtgctcatttcccatggctttgtctcaccaactttagaagcctagaaagctactgtttatttctaaaaagaagtagcttgtatagtcatgccttctagggttcatttggtagaccgtattacattgtattgtattgtataatattatattgaattatattttatgcaatatttttatgtaa

SEQ ID NO: 52675 - DNA, 1534 bp, Cannabis sativa
ttgttggtagttgaaatcatcatcgatccaatgtgccgttatcaccatataattgagattctgaattgatgtccatgtgtcagtagtgatggacaccctttgatgtttcaaaatatccttgaacttctccttttcatcacaaaaatacttgagaacatcccttgcaatagtgattctagaagggacttcaaatcttggttgaaaggtccaaacaaatttgttgaaaccttccccctcgacatgtcgaaagggcaactcatcaaccacaatatactttttcaaggtaactctacatgcttctttgttgtaagcagtcgcagctaaacttttttctccttctttaagtggctcgaaacttagcaccttctgcttaacttcataatttctaaaagagctttgcttacaagtttttcgacagtggttatttaagtgagtcgtctcgttgctagtagcacaattgaactcattaccacaataaatgcacatacacttaggagcttcgttcgaatcattaagattaactttgggtaacttttcaaagtgtttccaaacatgtaatgattttcttccatttctacttccactagcactaagtttaggaggcaaaggagattttttctatttgatgttgctttctttgttattttccttttccttgattgattctcgtcctcattgacaaatggtgataatccagattcataaacatcatcttctactatatcgaccatttgtttttttcaaacttgttaaaatcaaacaaataacaaaatggtatatatttaaaatataaaaatagtaatctaattatccaacccaccaacgcagttaatcacagaacctacttctctatagatgaatatttaagatattcaaactccactgacatgaatattctacattcaccgcaatataattaatcacagaacctacttctctatggatgaatatttaagatattgaaactcctctaacaatttatgaacaattttaattttttaagacactaaccttgaaatgcaaagttgggcatcaaaagaaacttagagaaagtgagcgtgagcgtcgagccgttgagcaaatcgaactatcactgattcactaatcactgtcacacataaatacataaataaattataaacacatcttatatttttcaatatcaactaatcaataattaataataatataacataattaacaaaacttaaataaattaacaacataacaaatataatagattaaaaagttatacatatttttttaaactaaagtttgtttaattactaactctaatctctaatttctaataaatgtaataacttatttataaatttataattacatataaaaaaaaatttaaaactaataaaaataacaatatgaaaataaaatttattatatatttcaaaatataaaaacatattatataatatatataaatttttaattaaaaatatattcatttttattatttaacagaaaataaaattataaaaaatagaagaaaaaaattgggttgtgcaatccgtga

SEQ ID NO: 52676 - DNA, 1285 bp, Cannabis sativa
  modified_base (83)..(85): a, c, t, g, unknown or other
tttgagttgttctgctttgtgttttactggtgttttataaaaacacagtatttttgaaaagatttccatgtgacagtattttnnnaaaaattaacccaaattccagtatctttgtaagtttccctaaactaattctccatgacccagattgattgcactgacataaatgtgggttttgtttagactctgtaatgatacttccaagccacttttagattgcacttaacctatactattaggaagcttgtgttctatatagatagtcggcatcaataagtctcatataactcaatagtcttcaataaaatgtattgtgattatatatatatgatcatatattttattaataagtcctctaattaaaacatcaacttaataagaatgttttttaattaattttttatcatctattccttcaagaaaaataagagtatattaatgttgaaatagtaagaaaatagttatcattcatttgttctatttatatgatttgtttaattgtttttaactaatacatatattcacatttttttaaccaatatttacattgattgtgtaactgtaaatttgcactctatttattttattaaatttgtatatatttatatttttttaatcttatattactcacaaaaaatgtcttcatttaatttctttttttttgaaaaaatttaaattatattttaaagatagcatatctcaatttcattaatattgttagagcataaactaaagtaatataaaacttaaataataacgtttaaagattactttaaactaaagtattattgtgcagtgaactgtttacatggaattttttttaaatataataaaataaaattaatttcttttatttggacattaaaataaaatatttagaaatcacaaatttaaatagagtacgtaatacattatttttttaaatctttctttattaattgattacaaatttattcatctcaaaagacatactcaaaaatcacaccaaagaccctttatcttataaaattaacatttatattcaacttttaataaattattccttacaaaaaaaaagttttgataaattattaagtttgaaaaaaaaattgagagtcgacaatattaattaagttatcaataataattcaatggtatggtaaaaaatatgatattaattaagttatcaatattacacttttaccacttgcacacacaatccatgcagccacacacgtcattgattgatgacttgtatcaatcacacattacattattcccttatctttttctcttcttttttttt

SEQ ID NO: 52677 - DNA, 1199 bp, Cannabis sativa
ggtcctggtttagtggcctgggaccatgtatgcggacccagatctgctgggggactaggctttcaaaatatttattagtggaacattccagccttggggagatatgtttgggacatagccaccaagaaagattgtctctttgtcaaatggatccacatggtgtatttgaaagatcaagattggtggagttgtgttgctccactggattgcagttgggcatggaagaaaattgttgctgtcaagaacaagtttcagcaaaaaggggacatgaacagttttgtgatgcagaggtataaagttaaacaggggtaccaggcgctcttctctgaatatgctaaactgccttggtgtaatcttgtttgggatagactcatcattcccaaacatagattatactttgctagtgttttagaaaaggttaaacacaaaggagagaataagcaaatataaccacaacatggattcaacatgtttgatgtgtggaaaagaagatgaatccattgagcacttattttttcagtgcgagtacagtaggaagtgcctgcaagagatcaagttgttcctgcaatggaacacaccagcaatagagattaataaactgctgcaatcctgccatcaaacgaagagattttctacagcaaggaaaagtatggtgaacacagtaattgcaagtcttgtgtatcacatatggaaggctataaatgaagtattatggaatcaacaagtgtggctcatcaacactacactgcagaaaacttagctactgagcaaactgagaatcaaagggctgctgccaaagaatatcaaggaagaagacaaggaatggattttgaggatttaaggttgtacattgttgatagttgattgtaaccaatagtaaattgtaaagattagtgatgtaaatgtttggtttaaagcaataaaatttcttaaatcataaaaaaaaaaaactatttaatagcttaatagaaaattagatcaagcaataaattatgtaaattagattggtgtaacgtttccatacagttgacaaacaattttactataaaaaaatataagtaaaaatatcatataattacttgtctcaaatcagtataggaatttgattatatgtttttatacaagaaaaagtaataaaaccataaaataaacacaaagtaacttcttagttcataaaaactaataaaaaattacaataa

SEQ ID NO: 52678 - DNA, 738 bp, Cannabis sativa
aaaatacactaatacacaatacaaatatcttaatatactcttcaacatacttgtaccatttctcctctatgtcatcaatctacttgagatccaccaattctattttgcgtaaaaaatataccacaaattcagattctctacaaatcaatacaaaatttatatttggtaattaattaattaatttaaaattaacaattaattattaattaatgttatatgtctttaattttaactcatgcaatttgcccgagtgtcaacttcaacaagctctacaacgattcactgattctttagattccttaaattttgttgcctttcaaattgatcatagactattgtcacaaaatttaagaagacaaccttaaaatgatccatactattgcaaaaagacaccctccccaagtgttgaatgtataatcaccatattcaatcgtcatcgaagttaccaaactagcataaacactatcctcaaataaattacccttcaagcgaaacgatactatttctaaaattcataaaattagcaaagatataaaagtgataacgagtttctagacaaggatgaaagatgcccattttgaaccaaacataatcatgaataagcatagtagaaaatgacaaccatatattttaaaaaatataactaaaatttgttcttaaaattaaaaaaaaaaaaaacattgttatatttttcccaattattcatattaattttatataaacttcattaatttattt

SEQ ID NO: 52679 - DNA, 2531 bp, Cannabis sativa
tttaaaaaaatatgaagagtaatttttaaaaattatataagtttatattttttttaataatgaggtgtatttataattttatggggtgtaaatataactcctctaattaaaaagagagagttccaatccttttattattggagggattccaaattagagatttgaatagatttgttattctttcacctctcttttctctccttcaatccctcttgtcaaacaaaggtatttgctatctcctcccatatctctctcttctctcctctccatccgtccacttctccctcccgtcaaacataacataagtaagattaaacttaaaaaggaaaaaaaaatccatatgaatatgcgatatcaaaataagaaataaaattgtctgatattgaagatgaaaataactacatccattacattagaacatcttcatatattagattatccaatctcatactttttgatttaataaataatataaaaaatcaccaagtatatggagtacctttaaatgctaaatagcaactcactatatctttgttttttccttttttgaaagttagttttatcatatcttttttcttcaaaacttaaaatgctcactaactctaaataaggctatttaagaaaaatatacatatgcataaataatgaagggaaaaaatctatagagttaagacttagcaagtagacactaggtgagagactaaaaaataaaaagagagactaaaatagaaacatcataatttcaacataaataatcatttcccaattccaaaaagattgttctgataagatttttattcctctgagaaagttaccaagttttcccactcacagccagaaaagccccatggattctcataaatatatatttgtatgattattattattattattattattatttaaatacataaaaaaaaaacctaggattctcttcatgcagatttttacatgcctaaagaatacactatttttggttgatatttcatttattggaagttgacaacacactcataaatagtaggcaatattttcttattattatttgtagtttagaatattagtatatactctagtccaaaatcaattaaaattattaatttttttaaaaaaaattatttatttatgttggtttgtcttatttatggggccctctactctacacccatgaatggtaataataattaatcaacaaataataatacattaaactaagcacatctctctccctcatgattatctctgtctataggtgcttattatcattatttcatttaaatttatttaattagtattatttcatcttcaaaaccctacttatgaagagaacatcattaaagtatatacatatatataaatattgttatatagtttttgtttgatgactaaattattctcttattctttaatatatatcacttatctctatctttgttcacctaatttaattaggtgtttttttatatatataaataaaccttaaaaatctcaacttatttgtaaaagttatgacaagtacaaaataaaaatatgcatgtgaatgtgggtgtgggttggtcatgggaatcacatgtacaggtctaaagaagcaaaagaattctatatataatatatatgaaaatatatgacagtagctattaatagtaatttaattaataaaaatattttaaatgcaaattaataaaatggaatcattaactcaatatttataacttcttcttttttttattaaaaaataaatgatgttattgaatatgaaaaatgttggacaaacttacttgtctgaaactgatgagcaataaatttttctaagctgttctcacaaatttgcctatttcataaatgtcaaatataagaaaagcaatcaatctatataataaaaaaaatattatcttatatattcaaatttaaataaaaaaataaaacattagttagtcataaaacaaaataaataaataaaataaaataaaaagtaagtttggagttaggtttagaatttttgttacttgaacataataaataggtttaaaattaattataaataaaaatatattaattaagttgtaattttcaaaatttaatttaaaatagttataaatagtttaattaagttgtaatttttgttattaagtttgatttgatcaatagttataaattattatacctatctatttgtaaaatacccaatattcctaccatactagtcctctctctatatatatgtatatatatggtgtattttacaatcacctatatttttatttgatcgaatttagaatccttaatttatgaccaaatcaaaccacataaaatgacataaataataactcaagataaaaattcaattgatatatatgtagcatttttatacatgaaatatttgtttatatttgtttgataaaagtttaatatcttaaaaaggtgtatattttctattttattaaatgagaatttgaaaatttgtgtttttcaaaatagtacaaaaatacaatattattttgagcctaattttaatcaatatattttaataa

SEQ ID NO: 52680 - DNA, 1948 bp, Cannabis sativa
ttgctttctttgtgttgttcatttgtccctaaattttagtgagcatcatgtcttcattttcttcttcaagcaaatcagtatcaaatagaaaatatgaagatcaactttggaataataatcctatctgtgattgtgggtgtgtgacagttatacgtacatctcgaactaaagataatccaggtagaaaattttatggatgtcctagatacaaggtaatttttttattattattttgattgtgtttcaattttttttctggaatgtgttccgtttttaatttgcaagtattttttttttggaatattttctttgtaattggttaagagatttgaggtaattctttcttctttttgtaaaaaaataataataaatcatgcccattaaaagaggatccatgcgattcatgcaattttaaggtaatttatatactgattctaatcaagaattagttttgcttagtatatattataaatcttacaccaatatcatgaccactggagcagttagcaattaatataaacattttcattctatgctattttgatttcatttcatctcagcatttctttttttatcttctattttatttcagagaaatgttgataaaggttgtgattttctcatttggatagacactactcaacaaggattcaatcaaaatttaaatggtttgattacaaggttagaagaaattgaagatgttgttagacagctggagaaggttattcagaaaaaaaaaatgaagatattgcaagcattttgaattttatgaaacttgtaaaaattggaatttgtatattggttctttttttatttttttgtattgtttaagttatcataaaatcaagacaagtatgattatgtctataagttatttttaatatattttagtttcattttaatgataaacatgagttgtgagtttattgatgtcctctaatattttgagtcatattcaattattattttgatatagaagtgctcataaacaaaagattatggcagctgaaatatcataatgagaaactggtttgatatattgtaatatgagtaattctcaaaaattacatagcagcaagctaacttaacaacaaccaagtttcataaaaccattctaataaaaatcagaaggctacaaaataccaaatcatgtactagatgaatgtctaccataaagtaagttcatatggtcatataagtttatcataaaccagcaaactttgtattacaaaaaaagttttaaaatagcttcaaaatgagaatcatcgttcaatcctatttctttgtcaatttggcaaaagatcttgctgcaatccttctcattggcgatgctgagaaattgatgagcttttgtgtgttgacttcttgacctagctgcccaaattgtgatgtcacaatttttttctttccagttttctgtttatatcttggtgcaacctataaaaaaccaggcagtgaaatagaaaatttagataaaaaaaccaaccatatgatttaacataccaaagtaatctaataattagaaaatgcacaaagacatacattattgatttcttgagtaaaatctgatggattaacgtcctgtaaaagccaaaaactagcaaatcacaaaccagtaaagtaaaaaaccagctattaatacatggaacacttcattaaaatgataaaacttactgaattcttttccttgtttcttacacacgtcctaaagttatgaccctttgcaccacatcctgaacattttattatgatgtaccttcgcttcattttagttcctgttggtggcaccatttcatcaaactcaagttttctacttctttttggtctacccggttgaactttggaaataggcttcactaatccaaccttaccacttttaggccactgatcttgattcctaattgggaatatttgatgtccatatgccttcaaataatactcttttgtg

SEQ ID NO: 52681 - DNA, 1939 bp, Cannabis sativa
tattgacatggtttcttattttggtaatgttatttctgattgtaaaactcttttaaaagagttgaatggtgtttctgttctttttgttaagcggtctgcgaatagtgttgctcatttcttggctcgagcttcctattctgttgctgatcgtatcctcagaagttgtgatgtttcttctgatttccaaaatgtaatcttacatgattgcaattaataaattgataatttattttcaaaaaaaaaatatattaatacgttcaatattatattctggtaactgaatttaataattaataaaatgctgatttttggattaaaaattatacatattgatactttgtgttgaaaaaattattacacattaatttctacaaatctctaataatgttgaagttttccagtagtagtttgatgtaaaactatacatcaactaattgagtttatttaataaacgcccagggccaactatttctttgatatttaactaaaaagaaagaatttaatcggttaatcagctaattctaggaagcaagtacacacgttgacccagacagttttgtttagccactccaaaggtccataatcctatattttattccatcaccactttggtgtttgcatttatatgtcaagcaaaataagcgtggtacttcagtagcatattaggttaatggagattattttctatcattaccttccatctctctttgcttatttgcttctcgtttttgctcttgttcacgcgcaggatgatcaatcaggtatatattaagttataactgctttgtatatatacgacaacatatacatccaattatccaatttagtatgtaatctcttgtcgttattttgttccctaaggcgtgcttgataactatatatatacacttgtttctcaggattcattagcattgattgtggattacccaaaaggttaagcggctattctgagccagatacaggcataaaatacatatccgatgaggccttcgtttcagccggtgtcagtgctagtcttccgcctgatttcgtaactcgatatcaaaaagagttagaacatgtgagagccttccctgaaggaatccggaactgttacaccataaacgtcaccagtggcactagatacttgattcgagcaacattttattatggaaattatgatggcaaaaattatctgcctgaattttttatacacattggtgctaatgtttgggacagtatcactttttttatagatatacctcttactaaagagatcatacatgttgcttcaaatgaacatttacgtgtttgtcttgccagtaatggcactgggacaccatttatttcagcattggaattaaggcctttggctaataacacatatgttacccaatctgggtcgttggaactcttaacgcgcatggatcttggttcaattaccaatgtaacatataggtttgtctttactctcctccattattttattttcgagaattgcgcctaattagaattacttagcgatattccataaaagtaattatattaaattatgtgaagactctgttcagacagagttttgatgaaaaaagctttgagagagagagagaaatgaaagaattgatcaatcataacagattggcattagtaactaactattgtctaatgatttaactgactaggatggtaactgtcttgagcttcttgtattccaacaaattatagagaattcttaaaaggtattacgggtgcttagcactctaggtgtcatactgttgttgttggtgtaattaagtatcaaattctctgtaaggaataaattaatcgtagggcgccacctatagaaggtgttagacaccgcatatgtctaatagcaatgttctaaattatatgagatagaataattaattgcactaatagcgatatgatttatttatttttagtccaaataactctaatt

SEQ ID NO: 52682 - DNA, 1446 bp, Cannabis sativa
  modified_base (291)..(292): a, c, t, g, unknown or other
  modified_base (1041)..(1054): a, c, t, g, unknown or other
tataatactaatgataatcacttcttaattctataagtcctaaacacataatggactaaatctttaagcccataatcaattagctaagtctaaattaaaaaaatgatataattattcttataactttaaagaatactatttttttttaatgagttaataacatattttatgcaatcactattttccacaaagagtcatctagactaacgtaatagaaaataataattaaatattttggttattacagattactccaccacatatatgtaattgaactcttagtaattatannattatatttattgagttttactacagtgtccattaatataatcaatttcagtgattagccctccctgtattggttcgtaattagttttggtcaaattatccttttacccttctaattatttctttatccttcagtactattaattcactattgaaagtataatttagatccatctaaaatttgtgcacaacattatagttatagaattaacacttaaagaaaattagcattcgatccgttagaaaagtcaggattctataattgtaaatcatgttctcagccatctacattattagattcccaaaacagaaattgtaagaatcatcttctctgagaaacttttacgagtgaatcaaagaaactaataacatgaacatgagttcatgattaatcagaatttaggtcgatctactattaaacatcgttatgatatgaattaggtctttatagtaaacgatatgttagataaagatagctttattcatatcggtccttgttatatataatctttattatatacaacacattcactttgatatcatactacatctgtaatctgaactgagattactttcagtgaagaacgagcatcaatggaccgtactagcaaccactgattaaagattctcaaactttaatatgttgatgactgttttattcatggctaagtgatcttagttttttgtacagctacaagtcacatcctcatgtatgaataaagaattttctaatatttatatataaattannnnnnnnnnnnnnttaataatttaacattcatgcatatactaaattgttcaactctttattgataataaatatttttatagacttttcaaggcataaatcctgacaaataacagaagatctaagataacttaaggtgtacaagttaaaaaaaaatgacaaatcttttattccctgcaaatgtattgtaaattgatttaaaagaaactgaggggtatagactacatgaacaaatagaggatatgttccacagaatagattgtccacaagtacatatagtatttttggcacgcctcctgcattgtgtaaccaaatttaaccaattatataacattgttttcaaatgtttaacaaaaatatatatcataattattatgaagatttaagataatttaaggtgtacaagt

SEQ ID NO: 52683 - DNA, 1812 bp, Cannabis sativa
tttgacatggacttgattggttatgcctatacttgggaaaaagggaggggaacttctcgttggatagaagttagattggatcgcgcccttgtttcatcagcttggcttcaaaattttacacaagctcggttactaaaccttgaattttcctcttcagaccactcgccaattttcctagaagtcgtagctccggacgtcttcatccccaatcggcaattcaggtttgaaaatgcttggttaaaagaaccgatgtgctttgaaattgtgaaagactgttggaatgttcctaaccatgtgagtttggccgaaaagatttctctttgtgctgagaaattatcaacttggggaaaaaatgtgactggcaactttaagcttcgaatcaagaaatgccgaaatgagttgaatcagttgaagaacaaaagagatactctctcagtccaacggtatagtgagaagaaaaaggaactttttttggtgttggaccaaaaagaagctttttggaagcagagggcgaagcagttttggcttaaggaaggtgatcagaactctaaatactttcatagggctgctagtaatagaaaaagcttcaacaagatttcaaagcttaaagattctagtggtacttggaaggattgggaaaatggccttgcggatgtcgttgtggaatatttcacttctctcttcagtgcatcgaacttgagtagtgacatggtggttcagagtatacaaagtcgggtgtctacacgtattaatgaagacctcaatcaaccgattcttgccgaggaagttcgtaaagctgtgttcagtatgcacccagataaaagccccggcccagatggtatgactccagctttttatcagaagtgttgggatattattcagattgatgttgtcaatgtggttcaggttttcttcactacaggggaactgggttcatcttgcggcgacgctaatgtggtgttgattccgaaaaagaaagtccctgaaagtatggttgatttaagaccaattgctttatgtaatgttttgtataaaatcattactaaagtaatggccaataggatgaagccttacatggaccaaattgtatctgaatctcaaagcgctttcatcccagggagactcattactaataatattcttgtttcctttgaagttctccactacttgaagagaaaaagaaaaggcaaggacggttatatggctttgaaactagatcttagcaaagcctatgatcgtatagagtggaacttcttggattcggttcttagaaagattggcttctcggatagatggatttcattggtgatgaagtgtgttagttctgcaagctacaaagtgattcatggtggaagaaccttggggccgattataccctcaagaggtatccgtcaaggggatcctttatcaccctacatctttatcttgtgtgcggaaggtttatcagctttgatcaaaagatatgaggctaggggtctcattcatggttgcaaagtggcgaatggcgcaccaaaagtgtctcacatgcttttcgctgacgacagttacttgtactgtaaagcaactcttctagaggccaatcggattcgagaacttcttcaccagtttgaatgtgcttcaggacaaaaagtgaacttggggaagtcatcaatcttctatagtactaacactgagaaccaagtaagggaggacataaactctttgttacaaatgcctcaagctgatgaacggagtatgtatctggggctcccaagtactatgggaaggaataagtcagctgtgctgggtttcttgaaggacagagtcaggaaa

SEQ ID NO: 52684 - DNA, 1035 bp, Cannabis sativa
caagtgagttggccgacctgaatggaaagtctcgtgctgtatggatgccctaatcacatattaaaactgggtaaatcacatgtctgaaaccctaatttggaaaacccgagtctataactcaaggctttgttatactttatagggattacattaacctaggaaacaggaaaacacccaactaaggcactgaattggacgagaattgagaaaattgattttttgggtaaccagttttacaagtactcgtaaactggttaaccggtttataccagtcctccccaaaaaacctccaatttgctcaaaacttgtctaattgcctccaaactttccagagtacctaaatagggtatacacaatatattccaatcagaaaatccccaaaaaatacatagaaaccaaacatgccattagagatcaaaatttgagtttctaagctcaaacttatgcaattccaacatcatacactaaaaccagctgcaagaacttggaatcaacctaaaatgaacatacaaactgaaccctaagcatttctaaccataacagccacccaaacttaaaatcactacttgaaaccaattaaaaccttgagaaaatatagctaaaagagtatctagggtttaccttgattgaatcctccctaaattccttgctgaaaataccaagaatcaacaacaatctccttggtcttggctggttcgaatagatagagagaatggaaaaagggtttcttcaattttggtcttttccttatttttctctaaaatgaattaaggattttctaactaatcctgcgctgaaaaaagaaagggcagatgtcaaactctagggcagccaccaagacactcccttggcaaaagactcatatgcccttgatgcttaattttagcctatttccaacctaggggtaaaatagtcaaaaaccataactcgctcaaccgcggtattttattttctccaatacacatcccactaagaaataaggttctagacttacccatgtaatcaaactaaccatccatcgcattttctgttgtc

SEQ ID NO: 52685 - DNA, 1217 bp, Cannabis sativa
aagaaagtttattgttcatctttatagataatatggctggaagaagatggaaaaattgatttttattttacttaatatgtatataatgttttttcttttttgaataatatgaaatcattttaattaattattgttttttaaaattatcttttctaaaagaattattagtttgaccaatactttatttacatgtgtcactttattaatcaactaacagaacgttaaattgagtgttaagtttagaaatttgaggatataattatgaatgcatatatataaatacttaaataattatttaatttaatattattaatttagtttatatttattattgtgtgttttttaaaaaataattaatttaagatagatatttttataaaaaaatttattaaaataatagtaaaatattaatttataaatttatgctctaagaaaatatttaaaaattcagagaattaaaaagaaaaaataaaaatagctttgcagaggttttagaccgtcacgtcgccgcctcatacttctcctttatatctatagataaataattgaataattatttaatttaatattattaatttagtttatatttattattgtgtttttttaaaaataataaatttaagataaatatttttataaaaaatttaataaaataatagtaaaatagtaatttgtaaatttattctctaataaaatattaaaaaattaagagaaataaggagaaaaaaaaaatagctttgaagaggttttagactgccacgtcaccgtcttatacttctcatatatatatattttatatatatagattaatactagccccttttcccatcatcattttctctcctaatcgtcttcttcgcttcaaccatttatttgagatctctctctctctttggtttgggatctcaacgttcatggcgaacgatagggatgttgatcgtggaggcattaatggcagacgggttagacagacagactccggtgatctgagatctctcagatttgttttcttttattttccaaatttgtttttatgttttgttttggtagtcgtttgaactccagtggcttgaaggtgttattaaattttttttaaaagaattaatgttggtgttagtcaaagatgaacacataagtaaaaaaaaagtaattttatacttgtttacgtcgatggagaaccaacgaaaagtttcaagttcttttggtaataaatagac

SEQ ID NO: 52686 - DNA, 3220 bp, Cannabis sativa
tcagctaaatgcacaacaatatcaacaactcttgaaccttcttgcaagtcaacaaatcggtatgcccaatacagaacctagctcctcctcaggagctgcaggtatcattctatcccaccattatattgctccaaatgatgattcttggataatagattcgggagctacccgacacatatgtaacaatataaaattgtttcaatgtttgtctcctatatccaaaaccaggttatttcttccaaacaacgaatccattcttgttaatcaaagtggttctattgctgtgaatgaacatctaatccttactaatgtgctttatgttcctaattttaaatacaatatcttgtctgtcagcaacttaactaaccgtggctcaatttcagtaaaattccatactaatgatttcactattcaggacaaactcagccggagggtgattggcaaaggtaaagtgatgaatggcctctatgtgatggatgcttcaactcagaatgttcaaaatgcttattccttttctgtgaccgccgagctttggcattcaagattgggacatccatctcaaaagagacttgcccttctaagtgacagtttaaactgtaatatcaattccttacataagaacaaaccttgctatatttgtcctttggcaaagcaaagaaagctttcttttcctaatagtagttccactgttgtaagtaagtttgatatagttcattgtgacacttggggcccttatcacattagttcccattcaaactatacatactttttgactttggttgatgattacactagatttacttggatctattttctaagacacaaatctgatgttgttgaaataatgcctcagtttctttcttatgttcagaatcaattcaaatgcactattaagaaattccgttctgacaatgctccagaacttgtgttcaaaaatctctttgcaaaacttggaattatgcatgatttcacttgcgtagaaacacctgaacaaaacgctattgccgaaagaaagcaccaacatctattgaatgtggctcgtgctctttttttttcaagcaaaaatgccaataaaattttggtcagaatgtgtaatgacagccgcattttttattaacaggacacctactcctcttctgcaaaataaaactccttttgaattgttatttggtactgcacccaactattctaatctaagaaactttggttgtcttgcttttgcatgtactctcactgctaatcgtaccaaattcgatccaagagcaaagccttgtgtttttatagggtatccacaaggtgttaaaggttacaagctttatgatttaaatgaaaaacaaatttttgtttctcgaactgtaatttttcatgaaaatatttttccatttcagactttaaacacttctaatattagcattgatcctttctctcatcttgtccttccatccactactgtgactaacacaaatgtgagtgattttgctgcagaaaacaactccaacacctttccagaaactaatccacctggagacgatactacatctatgccttctgaatctcacgcacataatctgcctagaaacattgccactgctactgttatgccttcgaattcttcaacatctgatctgcccagagatgttactgctgtcataaatcccagcacatcgcaggaaccttcttcccttgttcctgaacatgtccccagttctgcccatgatgttccaagaagaacctctagaacaactcgacctcctgcctacctcagagattatgaatgcaattccaccatccaagatcaatcttccacacctcatccccttcataaattcctctcttatgataaattgtccaaatctcacaaagcctttatccttgcagtgacagctcttttcgaaccaaggaattacaatcaagcccgacaatataaagtgtggaatgatgctatggacaatgagatttatgctcttcttcgcaacaagacttggacagtggttaagcttcctcctcataaaagagctattggttgtcgttgggtatacaagatcaaatacaacagtgatggctccgttgaaagatgcaaggcacgactggtagctcaaggctacacacaacaagaggggttggatttctttgacaccttctctcccgttgccaagatggttactttcaaattattattggccatttcatctatcaaacaatggcccactcttcaaatccgacatcaacaaccaacgccttccttacttaacggagatctccaagaagaagtctacatggccttaccccctggattcactcctcctaattcagaagataactcaaatttggtttgccaacttcacaaatccatatacggtctcaaacaatcttcaagacaatggtataaaaagctatctgatgctctactttcagcaggattctctcaatctcaagccgactataccttgtttactcgaggatctcatgacaattttattgcccttctcgtctatgtagacgacattattatcactggtcctaacattacattacttcaccagctgcaagattcccttaatgaccaatttcaactcaaggcacttggtcctctcaaatatttcctaggatttgaaattgctcgatccaaagagggagtttttctgtctcaacgcaaatacacactcaaactccttgaggatactggctacacaggcagtaagcctgcaaaaaccccaatggacccgagaactaaacttgatgatcaagaaggacacctcctcgatgacccctctacttacagacaacttataggaaggctcctatacttgactttgtcacgtcctgacattacattcgctgtaaacactttaagtcaatttatgtcatctcctcgcactccccatatgcaagtcgtgcaccatttacttagatacctaaaaggcagccccggacagggccttctctaaaactccaactcatcactccacctcagagggttctcggactcggactgggctacttgccccacaacaaggcgctctgtcactggcttttgcatatttataggcaactgcctcatatcgtggaaaacaaagaaacaaactactgtttctaaaagttctgcagaggccgaatatcgggcacttgcaagcaccagcagtgagataacatggattcaatatctactagctgatttccaaatcagccaaccagctcctgccttcatctattgtgataa

SEQ ID NO: 52687 - DNA, 770 bp, Cannabis sativa
atatttagctggaaaagtactaaccgttgatgctttatatgaagcttgtaaattggttagagctaccgttgttcctgaagatggcacttcaagtcctgcttataggtcaagcttggctgtaggttttctttttgagttctttagctcctttattgatactacagctgaaactactgatgggttgttggggaaatgtagtgattctgtgttggccaaggatctgaagttgggagagaatgaaaattctttcaaatctgacgaaactctgctatcatctgggaagcagtttattcaaacaagttcagaatattaccctgttggcaagccaatttcaaaatctggagcagccctccaagcttctggtttgtattctgggataaaacatcactaaatttttgcttaagacttgcataattgctttgaaagcttcaaaatagaaaaggaattcaacaattcatgtttatccatcattcaaggtcattcagtattaagtgttatgctatttctatgtgaatgacagtcatctctttgtccgcctgagtgtcatttgttttcttctatttagtgtaagaaaactacagtccagtgtctttgttcctctaatgtttcttgtgattacttcttattgaaattcttggagatatttcttttgattaattcctcttatgtttctcaatgattactgctcattgaattgcttcaagatatttcttcctttttcttaacagctaattcgtattatgttgataatctgcataggcgaggctgta

SEQ ID NO: 52688 - DNA, 1377 bp, Cannabis sativa
catttctcatttgtatattcttctttttatctcttttatatgtatgctatcctcttctgtccaaatgacttttgtaactttattagagtttctctaatattgctaatgtgtgaaagtaaaatactatatatatatatataagatgaatgtgctattcttcccatatccaattagttttgagatgaaactccaaccttagccactttcattccaaattctatcagagtcaaactaaactctaatcagtattcgatagccaaaagagccaaaaagatgagccataaaagagccgcttgtgatccgttgtgagcctaaagtgccgtcggtccaaaaagatgagccaaactaaaaaaattacgatgtctctcttttagatttcttttgagacctttcgaccaatgtgtgccaatttccagtgttggggttgttgccctatttcaaaatctataaatttcttgatgtgtacactcacaaatttcctgattttgccttgtcagattcttttaaatgtcacattcggctttgtgatctcttaaaggtcgttctttatacccacactttttaagtctaagtgtgagaaggatgtatttaagttagtctcacaactacaattttacattttagtgacactatttagtgacatgcaattttgtgcatgtcactagagttgggagtgatttttagtgacatgcacaattagactctaatcaatctttgttaatctcctacaatgtggaccactaaacatttgaagtgtcactaaatagtgaaatctattttttataatttttattaaatgaaaaatactgacttatggagacgcaccccacgggattgtaaaaacatatcccaacatatatggggtgtcactaaagcaaatttataaatttaaataatatttatcttatttatattaaatgtagcccacagctcaaggtgggctgaccataataacaattaaattaatttttttctctagcaatagagaggcagctgttcatatagctagaaaatagagaggcagctgttcatctttctccctatcgtccctcttcaattgtccctcttcttcttctcgttttgggccgcaactattcatctctcctccagcgaacgatgacgtagctccacagatttctgatgtctgcgctagtatcctcaagctcatggacttcaacctaattccctctgcctcttccactgagtcgaaggtcttctatttgaagatgaagggcgattatcaccgttacttggctgagttcaaggtcggtgattagaggaaaaccgccactgagcacaacatgatctcttacaaggctgctcaggtataataatttctctttgattttaggatttttaactaattaattatttcga

SEQ ID NO: 52689 - DNA, 744 bp, Cannabis sativa
  modified_base (403)..(404): a, c, t, g, unknown or other
aataacccttggactgacaattttcctgatgctacccttgctcatttgggtttctacggttctgaccatcgagctcttgaacttgtcacctccaacccctcaggtacccgtcccaataataaaaataagcggtttcatttcgagaacgtttggagggacccaaattggaatcatgttttagaccagtcttggactagccacccaaaccagaacgaacccattcacaatttggttgctacccaaaatgcttgtgctcaacacctcaataattggaaccacaaaaaggattttaattttaaaaagcacatcagcaagcttgagaagcacctcgaaatagcccgttctgctcccatttgggatgacaacaccattcggaaaattaaagagctccaatctaggttannctcacttctttacaaagaagaaacttattggaagcagcgtgcgcggacccaatggttagctcagggagacaagaacaccaaatttttccaccgctatgcctctcacagaaagaaaacaaacaaaatccaacagctccacttggccaatggcggaatcgcctccgatgaagagagcataacccgtgagatggaatcccattttcaccatctgttcacatcaacgaatccctcggcggaagctgtggataaggcattggaaggagttgagatttccctttccgagttagacaaatcttttctggctgaggatttctcgttggaggaaattgaaaaagctttt

SEQ ID NO: 52690 - DNA, 2222 bp, Cannabis sativa
ttattccacctcacgtgtaattataattacgtgacttggtttgcactcttcctagcttgacacgtgttttcctctgacgcgttaactgaatttcgggtataacaatttcctattaaaaagttctttttgataaaataaataacttctttttaatgattacaaagggtatttttttcataatcccttttgaaaaaacgcctgtcctctgattttggcagttttgaagttttgaggtacatcagcattaaatgaccatcttttccacttttattttgaattctgtccgtaggatcaaacatctctctgatccgacaaaactgatccaaagagtataaagtaataaaaaggaaccaccttggggttaccccattctagctgaatcctatctcctacaaaattcttgctagtttgaaggtcttatataaaattctgaagtgggagtgccctacaccaatagaaattgagtatctctactttgttaaggctgttccagcagggggcttttattatctcagggctcactctagcgagcctaaaattattgtggacctgccaaacaaagtgtcttttaaagatgacttcttttggataactggcctctccctaatcggcacaacctccttctgaaaataggtgagtgattgttttctttaggctcggttatattgttccatgtctttccattctaagttttttgaccaaggttttgcttttttcaagccctctcaaaaagacccgtccctactcgcgagatggtcaaccaacacaggctcctgctgactcttccccgcggccttaggtcgtgcgacttccttcaaaacgaagccaatctgagatcggtggacctctttactgagccggattatacttgtgattataaatttcccaagtattcttcttggcctgggatcgcgcggctcgggcacaataccttcaaaacactgtccctcgggatgccagtgaaggagcatcccgaggtaatcaatgtggttggtcacccacagtacttagggctgaacgtaacacattagttacattccgagatatctgccttaatttctatatttggaattcccttcttgtagatcgaattgcccataggtttcacagccggtaccttagataacatgtccagattaactgtaatgagtcatattatggtatagtcgagcaatatgacaccatgacagatagggcaagtcatatagacacgagctgagatttagaaccaatcgagccctttgatatattcaagattacaggctgtaggaattttagtggatattatggtccttctacaccctcttctagtgagagctcgccttctagtggcttcggtacattccttaggtggaaaattttacttccccttcttttttcatttgcctttttaataattgtaacactttattttgtcttgcagacgtgggttttgaagatattatggactggaaagggaagaaaaggggaaccaacccaggggttcctacaaatgccgaggtggtaccctttaaaacgcaaaagaaaaccacctcccataagaagaagacgttgtccgagcccattgacctcgaggtctctaaaaccgagatccatgaacagactattccttcggttgatcccaacaccagcgcacctcctcctgagacaactcatgcctctgccgccacgagccaggccatgaaactttgtcagccacagcagggaatgctggctctaaatttgcccaggtatttgggtttgcctgctagcggcaactcaaggctctccacgattgggatctaatcaatctcgggaatccagaagagactctttcaaggaacttgcaccataccctcatggtaagtttgttgtattttttttttttgttcttcatattcatttgctcgtaactctccaggcttatttcctctcttttccctcccattggcgaatcctggagcggcacaaatacctggagggcgaggtccaataatcactagctcaacgtgaggtcgtgattaaacaatagaacaacgctcaacaagaagtcacttgtctcaaacaggaagctgagaagtcaaagaaagactttgaagaagccaccaagaccaaagtcgatgaatgcaatgaactcaggaaggcgctcgtggagaaagaggccgagcttaaagggaaagaaaccgaactcgaatgaaaggaggccaaaactacagaatgatgcaataagatcagcctctgta

SEQ ID NO: 52691 - DNA, 3821 bp, Cannabis sativa
aaaggagataaggatcgaattgggtagaacaagaattgggattatccactatatctatttggggatgcatatgtcagggtttagttactaaaagttttatttgggacaatgaattattgcttgttcgcaaggaatcaaattatcttgtggaacgaagaaaatatgcaaagtatatatatatatatatatattagaaagttgtgcatactaggttaattcactatgattatagctgattaagtataatttgttaagaaaagtcagggtaagtataggtaataagagctttctgaagttcatgcctgtcaatataaggcattttgtctaatggatttgattagagataagaatgaatcaaattgggtttgtgtcatgagtttcactgaagaacggattcttcaaaatttgtaatcaaaacagatgaatgccattacgacgtacgttgtgcgttctctttaactatatgatataatttgcagttccaacttgaagaggcaattgagaaagaagactttcaagaagctgtaaagttgaaaatagccattgaagaagctacgtctaaggacagtgttgctgaaatcatgaatcagttgcaggttggattggattggcatttaaaatcagtatatattttggtctctgcccacttaacaaaactttcacttatgaggtctgttatgtgtgtatagattgcaatagatgaagaacgatatcacgatgcttcaaaattgtgtaaacacacaggaagtggactggtaatcaccttacctggtcttgctgctggctttaatctcatatttcttcaaagacttgatttggttaatgaccatctaataccattttgatcttgttggccttaaaagcaatttgtttttctttagtttcttgttattttccttgatttataggttatcggcttagaaaaacttcacttagtgttcgctaactttctcaatctctgaacaggtaggttggtgggttggttacccaaaagattctgacgatccctttggcaggttaatacacattgtccctggagtgggaagatttgttggtagaagttacagtccaaggttagaatatttcttgtttattttacatctaaatttattggaaaatgcatctgattattgtgttgttgcagacagttggtcactgcatcttcgggaactccactttttgaaatttatgttgttaaaaatcatgatgacacttatgttatgcaggtatgtacaaatttcctctcaataactaatcttgtggttctagtgaagatttaatttaataaatgttgcacttaaaaaaaatgcagtgtgcatactatgaaagagttctcgatagtcatgtctttatggtggttacatgtcaaaaaagttgaattaaaatttgaaattgtgatcaatttcaaatgttaagttgtcattaaaattgaaattgtgatcaatttcaaatgttaagttgtcataattgattcaaatttttcataaactacaagctgttctgacttctgggtttctaacggctaaagagttaggtaaccatcaaaatatcgacatacactaagtaataagtactaactatgtagtacagaacataaaggatttgtgcacactgttacggggatgggaatccattattaaaggtcattattgctattcaaattcctgtttatccatggcagtctcaagtgttaccatttcgtttttctactttgaatggttttacaacattatcatcacttttttctatttagaaaggtctaagaatttgtgagaaatatgtaatagaataacacatcttttcttttaacttggttctctttttgttgttttttctttctatttctgtctcatcatcttgacctccctgatgttgttgtgtctatcaataggttgtgtacttgcaacgagccaaaggcaattcgaaaagccctgcaatctcattaaataaacctgtagaaagccaatctacatccgaagttgagaatgagcctgtggtagatgttcaggaaattgaagacaaggcaggaaaaagtgaagagaaaggccttaatattgaggaagcaactgaggagggtataaaaagtgtgatcaattttcttaaagataaaattcctggactgaaggttaaagtcatgaatgtcaatgttaatgaggaagtgatcgaggatggtgattcgatgaagcagttgatgcaagaaaataatgagaaagcagattgcagtgatacttctgaagatgaagaaagtagtagcttggatgagattcaacctgatgaggtcactctgggagatagtgatacaacagaagaggaaaaggaaatggacatgaagcttttcatcggtggaattgtacataacattgaagatacttccgctaaggacgactacgtgcgtcacccagctgaaataaaagatatggagagggattcttttctgttgcatattcctggcagaaatctagattctgataccaaagaagataaattgtcaaaagtcaaagtggcagctctagcagctcaaggtgtctctgagcttatgcctcctgaggttgccaaggcatttttgaagtctgacaagatttcttcaaaggtgagtttgagccttactggccacaaatctatatatgaacatcatgcgcgggtcctggaatgattcttcaaattatataaaccagtgaggtgttccaatttgtactgttcatattaagtttaataaattaaccatagttgaatcatatgattttctttcttcgtttagactctataaagtgaagcaaaatgttatgccttttctaaagcaattaactaaaacttaaataacaggtttcaagaaatgttcgtgaaatagttaaacttgctgtcagtcaagcacagaaaaggagtacgctatctgaatacaccaagttcagtcgaattaccacttgtgaaggagatctagatccattcgatggtgagacatgctttcatactcccctctttcccacttccatctttctctttgctattttacgtatttctaaatccaatcttcttggctggttcataggcctatatgttggttcatttggcccgtatggcactgaggtagtacagctgaggcgtaaatttggccactggaaaggttcagatgctaaagacaataattcttcagatgtggagttctttgaatatgttgaggcagtgaaactaactggagatttgaatgttcctgctggccaggttttgtagctttgaaactcttgacatcttgtactgcttagtagctaattgtatgttatagcatactaaattttgtgattatctgggtgtataggtgacattccgtgctaaaattgggagagggaaccgtgtttcgaaccgagggatgtatccagaggaattaggagtggtaattatactagtgaccaacgtcttatgcacacaaaagaaaacttaattcaagttctacatgtaacttggttggcttggtctttggaaatggaaaacgccagattcaactgtattgaactttcaaatgcttaacgcttcaaaacttcggtgtatttgctactgattgttggttcatatattgttactttatataggttgcaagctataaaggtcaaggaagaatagctgaatttgggttccggaatccacaatgggttgatggagaacttctacagctcaacggcaaggtaattaaactttacaagccattttcgaacaaaagacatgggaggaaacaaaattgtcttgttcgtctattaaagctttccgtatgtttggcatgatttaataataatctctggattttctttttgaacttgattgattcaggg

SEQ ID NO: 52692 - DNA, 1160 bp, Cannabis sativa
ctaagcaataagattgaccataaacaaaggtatctttcgatttgaaccttcgcgttgtgaatacaacgtagaatatactagagtgactcgtagtctagaactctatctctaagggatggttagcctatcatgctgttgaaggccaatggaacatcgattatgacgaactgcgcaatcacagttctggtcgttggattttctccaactatgaggggtaatctgatatacacgatgggcacaatgccttggccaaagaatccatacattggttgtagggtgccaagtcggtgagttggagccctatcttttcatatgttgacttgaaaagaatgttggaggaggctctatcatccaccatgcatcttgttacagtcatgttccaaatttgtgtagtgatgaccagggaatcgttgtgcgggaaactgacttgagcggcatcttcttttatgaaggaaatcatgagctctccaagctttggttgcttagagcccctttctttgactgctaggatgtcactttaggctcgtgacgaagtgcccgagcatagcgctccctggctttgctggattcacctataatgtggggtacgcaaatgattacccctaagtgtcctaccctgatggtggcattgagtctccgttctaggcacttggagcctgagtttggtcgttctgcacataacgatgcaggtcgagattgttgtgcctgatcaggtatttaatctccctcattaaattctgacactcattgttgtcatggccgaagtcattgtgaaattggtagaacttcgacatgtccctctttctcaactcccttttgattaaagggcttcgtataagggactgttccctgagtggccatgaagatggcctaaggtttctctgtcagatggtaaagcaggtatacttctcctccttgttcttttgtggcgtgggagaagtgttaaacttcccctttttacaactatttctcccagagttattggtgctgcgtttttttctagtgttcttaccactagaagtttgggcagagttatttgtgtcggcctgcgtgcctagcaggtcatgagactacaggatgtcttgtgattacctgttgttgacatgccccgtctgggcctgtcagatagcttcttcgagtttgataaagccatcagctct

SEQ ID NO: 52693 - DNA, 1298 bp, Cannabis sativa
  modified_base (35)..(74): a, c, t, g, unknown or other
tatgtgtttatgtcattgttttagaattcatattnnnnnnnnnnnnnnnnnnnnnnnnnnnnnnnnnnnnnnnntggtaaaatatatccaacaacatgcccatggcccacctagggttccttcttaaagctttctaatggggtaaattacatgcaaaaagagctaaatgttgggcccccttggaaggaataatgctcgggcattgcaatagctggacaataggggatcattatacgaagtagacgcgcgtcgccaaaaggtttaacctttaaaagtagaagcttggaataattgtctggcaaaaaggtgtataaggtacgcatactaccatgtctagacacaggggacaagatccgattctttgtcagaataagtataactgtcaataattttgggcagtcagcgtctgtcataggccgttcgagtacccatctaggtatcacttgggtagctttcaactgggaccactttgggtactggaatggtaatgaggcttctgtgtcgaagaagttaggacaaggcaaggcggatctctacatgcttcttggtcctaacttatcttggatcagtaaaacttctcagtgttgagttttgttaaggagttttaatgagattatctcttccttattatgccacatgtcacttgtttagaaacacatgtaacattagatatatttaacagttaaattttgattaaatgaccaataataaaaaaaattgagcttctatgtttaacttagttacttaattaaaaaatatatatatttacactagatgtaaaatatattcaaacaaaaatatcttactcaaacataacttttatttttctctgagctaaaataggcaggaaagtggctatgcaaaatttactcctctatttattatatttccaactcaaagaatacaaaggtataatgatacattttaaactaaaaaacaaaaattaaggaaatcaatcctattggctaggctgtaatggaataatattcccacaattgggaccactaacaggtgtcaaaaatagtacaaaattacacaagaaattggaactacaatatttggtattaatcctcatgttgcaaaatattctttatccttcaattttgatacttctagacctttcatttcaacatgccccctcaatttatgttgtggagaaggtgagacagttagcttatttttcaaataatgaaaggtagtgattggcaatgaattggtcaagatgtctgctattttctcttcagtggatcatatctcacttctatattcttgttcataactttgtctctaatgaaatg

SEQ ID NO: 52694 - DNA, 1514 bp, Cannabis sativa
  modified_base (56)..(62): a, c, t, g, unknown or other
  modified_base (1477)..(1480): a, c, t, g, unknown or other
caatgtaaggttttcataaactcttatgtgcttattttcattgttttagagaattnnnnnnnaggatgttaatcaacatacttgtctgtaaatctatatcttagtaaaatagtcccaacagacaggctatgcgtgtgtgagagatagatgagttattagacttagagcttaagacttagggtttgagacttacagagttagggtttgactaatcccctttatatagtagatcttacatccccaatatcccttaaaaatacgtaaataaagctattatttacataataaattaataaagttcaaattactaaattatccctcaaaaataaggaagttgctaatattttccctctatttttttgggttgttaaggccgaactcatttcttgactttctatccacagatgaaagctgcgcaccaaaacctgtcaggcaaaaagttgatcgaccatgcacctgcagagtgcatgctcttcggccatatagtatttggaagttggccggcctatgctggccatagggccagcattgaggttgttggttcatcactttgtcgtccctccttaatattcaaactccttgttagtttaagtgttgagtagatggcttggcctgcttgttggcgagctgtactgccacgtgacattaatgttagccacgtggacatgccatatcaggtgggaaaaattgagataatatttgctccctaagtccttgtgcagatagggactttccagcttagtcgggactgatgtagccttaaccggacaaatcttgcagtatattttagcctttgaaatatttgttcttgactgtctgaccacattccttagcagtaaattaacaacattactcttctgcatgttttttagttacatgctgcaatgcaagtgagaagggatcccatagaagctatataagctcatgggggaactcgcttctcatttccccacatttcaatctctctctacaaaaagcaacttttgaaagctcctccttctctctagaggctgacaccccatagtgctctatctctcgagatttttgcgctattttgacgattcaagcttcccatcttcttcaacaacattttctagtaatggataagctttcgaatctcgttcttcacttgtttatttgatttttccatggttattttgaagctttttttttcgctttgaatatttttcgattcccacattagagtgtaattattttggtatttgatctgcatgatagttttaggatgtgtaatgcttgatttcttgacgaaaaccttttgattttgactttcgctgtgattcttgactctttaagtcacggagaacacgaagaatatgtttgagttcttgaaaaacacacactttgatcagtaacacaccttggtcagccataggggtcttgttcaagacttggccagtcatggagtcttctcatgggagttggtcggccataaggtgttggaaattattttacnnnnatcttagatctactcacaaggatgtttattaaca

SEQ ID NO: 52695 - DNA, 3067 bp, Cannabis sativa
ttttttttttaattttaattatatttgagtgaacataagattgattgtggcattaactctaaccaaaacaatttgtagattaacacatgcaatggaagacattgtggagatactttcactggtcctaataagcccaacaagccatctatttggactgagaattggactgctcagtaagtttatgtacttctgatctatgaccaattttttttgaagtttattaagctttgtgtgtcctaaatttagaatgcgatgcccaacttttcttgtactttttcagataccgagtttttggagatcctccttctcaaagagcagtagaagacattgcatattcggtagcccggttcttctctaagaatggaactctgaacaactactatatggtataaaaatgaatcttattctgatctaacagccagacttttttgtattttggaaatcttaatggttttcatgattaaaaaacaatgcagtaccatggtgggactaattttgctagaacaagtgctgttttcactacaactagatactatgatgaagctcctcttgatgaatatggtaaaaaaagttccatctccatggattgaacaagtgctgttcttctcttaatgtagctgatcaatctaatttttgttactctttatgtaggtttacaacgggagcctaagtggagtcatctaagagacttacacaaggctttgaatctatgtaagaaagctttgctttggggaacttctggagtccaaaggttgggcaagcacactgaggtaataagtttttttgattgagtaaatggaattcagaacaaattctgtgtcaaaatgaaacaagactaattaagtggtctcgtttatgcaggttcggctttatgagaagccaggaacatccatatgtgctgcttttttaaccaacaacagcaccaaagccggacacactgtgaaatttaagggtgacacgttttacctgccaccaaggtccataagtattcttcctgattgtaagaatgtggtctacaacactgaaattgtaagtacttatcatttttatcatttacatagtatctctaatattcatattccataagagaaagcctcacatgtatcgagtttttgtgtctcaaaaacagattgtatcacaacataatgcaaggaattatgtcagaccgaaagaaaccaaaaatcttaaatggaagatgtctccggagcccattccaaatgttcatcaactgcatgttagtagcaaaataccaaatgagctctatggcatgcttaaagataccacagactatggatggtacaccaccaggtaaatttcatggttaaaattgaaaaaggtctccctctcgcttctacggattaactctaatgtgataagtattataattgcagcattgaactaagtcgacatgacttgccaatgaggcctgatattctacctgttttaagagttgcaagtcttggccatgcactgcatgcatttgttaacggtgaatatattggtaaggcaaagccactcaataactcaattaagtacttagaatcaactgagagagagagagagagagtcagattttacaactaagacaagaggcctctggtttcaggatctgcacatgggagtcatgaagagaaggggtttctattccaaaaagccataaccttaaagcctgggactaatcatatatcagtgttgggcatgacagttggactccctgtaagcaactcataacttgattaagtaactcactcactcaatgaagtttaattcgccactaaaaaaaccagtttcttttcttttgaattttaaggatagtggagcctatatggagcacagatatgctgggccccgagctatcacaattcttggtttgaacactggaacaatcgatcttacacaaaatggttgggggcatcaggtaaaaaataaaataaaaactaaagccaatatcataacagctaagtttgaattaaatggacaaatttattgaccaaattggagcattttacaggttggtctgactggagaaaataatcatgtgttttctgaaagtggagcaaagaagattgagtggactgaagtcaaagaagaaggacgagctctcacttggtacaaggtaaggtgttcagaacttttctaccttggacaagcattaactttaactcaatcagacatatttacatttatataatgtatgttttgttgatttatccagacacggtttcatgcccctgaaggtaaagacccggttgctatcagaatgaatggaatgggcaaaggaatgatctgggttaatggccaaagcatcggacggtattggatgtcttatctctctcctcttggaaaaccttctcaagaagagtaagacaccctaaacaaaacaaaacaaacatactttacgcttgactatataatacaaagaaaaaagcaagtgaggattttgtctcaaacatttgtttatgatcagataccacattccaagatcatacctgaagccaaagaaaaaccttcttgttattttggaggaggagaaagcgaacccagacgacatcgagatattaactgttaacagagacaccatctgtagtatcataacagagacagctccaccccacgtcaaatcatgggcaagggaagaaaatgacattagacccgtcgttgatcatttacatcctgcggctcacctcaagtgtcctaaccacaagaagatcgtagccgttgaatttgcaagctttggcgacccagaaggcgcttgcggaagcttctttgtcggaaaatgcgactctgctctaaccaagggaattgttgaacaggtatatatcttacattatactaagaggctatatgcccttctaagaaaaaaaaatctaatgatatctttttatttagttcaactgcaactcttttgttatcttttgattaagtaaattataattgcagcaacacatatcttatatctgcgtttaccatatggtttatataaatatatgattaattgtggcaaaaattctaatagttttactttgctagcaattaaccctttaaatttaaatttcaactattaatt

SEQ ID NO: 52696 - DNA, 576 bp, Cannabis sativa
aaacgtgattaactgctaatttccaaattaaactaaacggtctttacaatgcgccagtgcatttcaacaatgtcttttaatttgctccttaatgggggaaaagtgtgcagtttaaatccgaaatgtgggttgagacaaggggatcctctttctccgtatctatttatttgggttgcaaaaattctctctcgcctcctggagacagctttggagtcgggtagcataagaggtatcaagctgagtaggaatggcccgtgactctctcacctcttctttgctgacgatctcatccttgtaggaagggctaccgtagctgaggctaagggtttctggaatttcttagagaaattttgtgagtggtcgggacaatgtgtcaataagcttaagacgtctattttcttcagcaagaacaccagtgacggcatgagaagagggatcatgcatgaacttggtttgaatatggccgattccaacataaattatctaggcctcccgttgtttaggtccaagcagaaaaatgctaatttcaacttcattattgagagccttgtatcgaagcttcatggatggaaactg

SEQ ID NO: 52697 - DNA, 2082 bp, Cannabis sativa
tctatttggatagctataatataatagctttttttatgagtaacttaagaattataaaattatcttaatttacaaaagaactttttttaaggaaaattagggtaattttactaatctgaaaagatatttgttgaaaaatggacactttattttgtaccccaaccgaaaaaccttttcaattgacaagctaaaaaaacagcttaaagaaacttagccaaaaaatgccttgtatgggttgaatcgttgatacatcagatacggaagatacttgatagtgatggattcttttggcaagatcttcccaaaaggttttgttatatataataagagtaatggcacgtgtacacaaaatatatcctcagttaaaaaaatactgccacattacagagtttagtgttttggtttggtgcatattttgtgtgcatacaccattacttgtgtaaaatggtgttaaaagggtaatttattggtgaaacagggggcagtaaagtacgcagtcatgtagcaactcctcacccagcaaaacaagctaaaacaactgcagctatatttgggaaagctttctcttgcacaacgtgcaacaggtataataagtcattatattattattgttgtcgttgctgcaatcattaattcttgtgtgctttgagttttaatttatttttgaactcttgtagatcgtttggctctgacattgctttacaatctcattcgaaggcgaaacatgctccggccaaatgaagctttattctagtgtttgtttgagtgaattctataggttaccaattgctatctagttttagtaaaatttcaagattaggggattagatttgttttttccttctagtaattaggattcagcatcttgtgctgataatcacttgaagtaatataaatttagttgaagggtatttcggtttttgttttttgacaaaaagcaaaaccgtaaacaggaccaaacagtgataccagggtcacttttggtggctgaaagtactgcatcttgtcaagtgaaggagctccaaaagtctttttagccaccattgtgctcattatgggctgcccagttgaagtcttgttaatgttcactaattcccagtattggatgctcataattagctccctgaatttcgtatgcacttcttcgaaatccaaatttttggcttaggactgttaaacaattgtaccactgtggttgctgtgtctgattgaatttctacattattggctcgtaccaataatttattaggttgaattgtattgtattgaattgagttatatattatatttttatatgatattatgttaattttaatttatacttgtgtttaaatgttcataaaagttaataatacatatagttttacagataaatattacagaaaatactattcaatgtaataccatacaatataatatagtgtaatacgccgtattaaatgaatttatgtttgttctttgaggtctgaaagattcatgcactacgatcatggcttttctaaatgatgatttagtttggagacagaaaagtgctcccatttccataaacagaatttcagtgttctagtttttcactcgacttagaaatgttgatatctgggttttgaaaaattcttactaatgcttcccccaaaagttttgtaggcatccttttcctctcatgcattgctgcatttcccccccacccctccatatgatatccataatggtagcaagtcgtcaaatgaggctcctaaaggtctgtttggaggaagttcgggaaactaaagccaccgatattgatcaagtttttaattctttattgagagttttcctcaattactctgcaacttaatttaataaagttgctgcttagttccagagctcacaaccaagtgtcatttcttggcgttaagggaataggtatgttaagagtttttgagtattccttcgatcaaaccatttgttcacatacgggctattggtaatgaagaagcttgcccaattgaccccatcttccacctctttagtatgggttgggttgataaggcctttgggcacacaagggtcaaacctgaacagttgaactactgttttccagtt

SEQ ID NO: 52698 - DNA, 1594 bp, Cannabis sativa
  modified_base (35)..(35): a, c, t, g, unknown or other
tttagggtgttaattaacatacttgtgagtagatntaagattctggtaaaataatttccaacacaatgtagttgggcggcaaagacaccaactaactcttagctcgctccctcagcaagaatgggaacagtctcagacgaatggcattatcactaacttcgttcaccttgaatgtttgaaataactccacgaagttagatagatgcacgtttggatcttctgagggcagtttgccaaactggactgaagattgtaccatttggagtatggctggctttatctcaaaattgttggcttctacgacgagcgatcttatacaagactcaacccctgtcaatgttgggagaacatagtccctcagactacgatcaggtggattacgactgtttgcctagtcctccacaacacccccattatttctgctgttggccatcgcctcttcttggtcaacccttgatgtagctctttctaacctcttgttccttctattctgtctacagatctttacaatcttaagatcaacaggaaatcttgaactagctccttgacgtcgcataaaccaaaggcacctgagatatgatagaaaaattaaggcaaaatagttagcaagaagtaaggaagaaaaaccaaagcaaaatttagtataatttctgtaatatcaacttttaaacaattcctcagtaacagtgccaaaaacttgttacaaaaattataacagctacgcaagtgcacgtaatcaagtagtactcacacaggtgaggtcgatcccacatggaattgagctgaataccactaaattagacttttatttttatttggtaaacaataattttgatgaaaataaaaataaggaataataatgaaataaaactaagcaataaaagtgtttaatcaatgatgagaaattagggaaaagaatcttatcacttcaattactcaattgttaatgctaattactattcctctttcttaaagtgaatgacagattagaaaaattaacctaactcttttcagatcttttaggccctaaattacatgttatctaatcatctctgagataaactaacatataatgtgcattaaacaataatctaaatgtcacaaaggctatgcaaatactttcgtttcacatcaaaacaaagttaatctaattttagcattcccaaaactcaatttttagattttgaattgggatcataaaatatgcctaaggtgatcaatctcaaacatcgaattaagcacaaatattgataattttacaatcaagaaagaagaaataacaattatcatttattcaagaaataatgtcaatcaacattcatcatctccccaaataggagtttagctcataatctccatagtcaaatctataataaaacttaaaatagaaaataacatagaaaaatcaagagagaagaaagaactggttggaaaaatcaattcggattgtcccaagctgctcttgaagttatctcctctgtttctaggtctccaattctactccctcttcaaaaatcacgagcccccttttaaatgagccaagttttctatttaaaatttgtgaaagtacgaaactgtaacgccctaatgctaa

SEQ ID NO: 52699 - DNA, 2402 bp, Cannabis sativa
agatgtcaaaaattgctaattagcctaaattttttgatattctttttcactctaatagtaaacatccattaaaactttaaaagattttaaaaatatattcatattatcaaatattttttttgaaatatctccatcagagatgcacttataacccccaatcaaaaatgccttatgatttttctttatagaatgctctcaatttcaaacattatcattttaaaataaaccatattttgcaatgcaagcaagaactctatcatatgctccaaaataaaactaatagctttttcaattacccaaattttcaagcaagcaagcatgtcaagtagaaaaactcttatcatgatgatgaatgtatcctctagtttagattgataaattttgtaaataaatttagaatttgcaatcaatccattaatcaactcttattagtgaaaaaaaaaaaaaacaattgtcataccttatgatatatgagatgacacttaattatttattagtgatacttaatattatttattaaattaaaatgtgtaaaattttatattgaatggatcagatagcggtatgcgagtttatgtagttgaaggctaaaatatttttttctctatataaataaaaaatagaatttttattggagaaaaatatataaaaaaaactatctgagaataaaaattaagaaaatatataaattttgtgagtataaaactgaaaatataaaaatgaaaaaaaaaatcaattttataaggactaaattaaaaatattaaaaaaattctacaaatttaatttatgtatttataaaaaaaatgatgcaggacacatgacctcaatttccttctttaatttctacctcttataacatattgtgagtttcctttgaattggctcaaccactacaactcaattgtgcaacattctcatcttctcactttagttcttgacagagtataatcttgggccttattgggctgcaataaatcaaggcttccaattgggtctcttacagaaagggataattacaccacatactaaaatttctaatttttttatttttatattatagggcaatttttttttcaaaaatactgtataagttttatactgtatactaaatactgtgttaagttttcactattgctctccagttacttacttgtagtttttctactgttgtttttgataattctgttttgtgttctactgctattttataaaaatacagtatttttgaaaagatttctatgtgatagtatttttataaaaattaacttaaattctagtatttttttttgtaagtttctcttccaaactccactaaacatcaactttttctttttttaattggaaatctttcaccaaaagaaaaacattataaaagttaattgggccgatacaaagaagaaagctaatgcccaaggcaaaagtaggtaacatatttgttggaggaaattacaaatttgatggggttttatattatcaatgtaaaatatggttttttttttcctttataaaaaaatattttatgggaaaatttaataaaagttggaaaatatgagaaaattagatatgggtaactaagtacttttaggtaaggataaattaagaaatacctctttttataatctattaatcaaaaatactttttattttattattaaaatgtacccatttttgtgagagggttacccaatatatcctcactcttcacttaagttagtgacttcttcataaaaaaactggtttcttcatcaagaaacccgtttcttggtgcttttccagcgacaatgctaatttcgacgacttttacggtatcggtagcaacttcgacgacttttctggcaccgacaacaaactccagtgactttttcggcatcagtaacaaataaaactgcccaaacagataaaaacattatatataaattttgaaaacctaatttacatatatatgacatatcaaatactataaaaatacataaaaacaaaaaaataccatataaattggtcaaacttaaaagtgtcatatttaagtaaacaacttttaaaatcccctaaaaaatgtactttccctttttttcttatacaaaaaatagttattttaaatgacacttttttcatcaccaacataagttttctgtgacttaatttgatttttagtcacaacaaaaaattacttgtgactaaattatagtatttagatacaagatgtcactaatttagttttattcataacaagtattgtgactaaaatatatacagtcataataaattgtaattttcctgattaatacttttaaccacagaccttttaatcacaatataggaataataatttataattagttacaattttttttacttttagttagaagttttttttttctttttgaataatcatgaaaaagct

SEQ ID NO: 52700 - DNA, 2085 bp, Cannabis sativa
ggcataaaacccaacaatattagcattatattaaggtctccattctgttaattttttttaacaaatacctatttatttgatgatgtgacatagtggcaaaataatttgatgatagttaaaaatttattgcaatattaaatactcttaccaaacaaaaaaaaattattagaaattaaataaaaaaaaaccctaatttcttatgtcatcttcttctccgcctgtctcctgtaatatagatgtgtctcctgtaatatagatgtgtttagtagttaattattatttggcgagatgattaaaatatatgtgctatatttatacatagatttacttacagatacaaataatttgatatgtaagttattattaagtggttttaagagttattctccaaaatattaataaatttttttaaaacttcaaaatattaatatttaattgaatgtaaatatttcatttacattgattgatcaatgaaatctcaaccattgttttcgtgggctcgtgaattcgccataactactgtttggctacaaaatggctttaacgaaccagaccaacaagcttttctttatttattatagaaaacaaagaaagactaaaaagtaaagagaatttgcactcttaagagttatgaggatacttttgacatttcaactcaatgttatatgtacttggtctccctccttaaaaagcaatttttggcaaactattgtttcaaaatggaagaaaaaaacccagaaaacttatcgtaaaaggaggtatcgataacgatcattcttcgggtacccatcttctttctcaatgtggaaacccttttctcctctattcacagtttttgcacccaaatttctcaaacagatgtcctaaatctagcgtgtttttgtcttttttctttatcttaataaatctatgtttttttttttggaagaacaaagttgaatataaatctataagtgtttgttctattcttactgactttaaaaacttacgataaaattcttcttatatttggtttttattcaataaagggcattttattttattttgtttcttttttgttatttcaaaaataaataaataaatggaaaaaaaaaagggtttatttttccatccaagctattgtcaattacaattttaaccttcactcttatattacatcagcaaataagcgggtgtcaaaacctaacaaaagggggacattaatatagtgttaatatataaagaagattttttaacaacccgtatattttaagggccacaagtcggtagtgacataagttcagggaataaatttgctaattattcttaaggtattaatatcctcacttggcagaggaaaaaccggtaaacaaactaaaagacgacatagagaaatgcccatatcaataaaagacatacaaaaaaggaaaaactctcttctagatctactacatcagtgtattccactctcgacacaaatctaggaaagagaggtcctcgaaatgttttgttctataaacccaagtcgcagttcacaatctgattttatcccaaagtatctcagctgggctgatcaacaaatgaaaatgtttagcctacaagttgttatgaaattgattaataaaactaaataccttacgtacaggtccaaaacctccctcccccaacatattagttacatttagattagcatcagcctttagatccaaaactgaatggcttcaatatccattccccaaaaatctaaaaagcaactggagcagattccttatgcaaaagatcacagttagagtttcaagatcagagttgaaatatagaaaagaggaaccaaaggctcaaaatctaagtaagcaaatccatcacttattgtctgagagaacatttgaaagaaaagacagccaaaaatctaaactaaaatctcttattcaagacaaatggattgaaagaaaacgataatgataagaaaataccaacaatcactagagattgtgtaatggaacaacacacacagaaataaaaaaaaaaaaaaaccacttaactcttacttgagggttttccattgcgtaacgaaccatatccttgtgattcacttccagaggatcatat

SEQ ID NO: 52701 - DNA, 947 bp, Cannabis sativa
aatgcagcaactgaaaatgagcctgcatttgaataatattctgcaccagcgcccccaatcggttggagaagaaaaaccattctcaattgctgagatgataacttgattgtctgaagccacccaagccttcgaaatagaccagctcatggctaactgaagccccaattgaatggcagcaacctctgccagtttaacagacaaacaaccaggtataaaaactgtttctgcaactattaaactacctgcattgtttcagattactgcacttaatccacagccctcctgaccgtgaacaagagaagcatatgtgttaatgagaaacatgtccttgggaggaggctgccaggaggttaaggccttggttgcaggagcggctgtaggttgttgttgcagccccaaataatttataaccactagcaaccgagtaattcccgttattcccattgttagttaaatcccatgtaatccaatccggttgatgaatagaagggatgatgtcgagaacccatggaatgtcatctttttgaaaccaactactcacttcattgattttccactctccatcagcagtcagcaacgaactaagagtgacatcttgtggtattggaatcttggttcttaactgaaaaggaggttgtcgaggaagccatggatcttcattaattcgaatattacgcccatctccaacacaccatctatacccctttgctaatagctcacggtcccaaagaatccctttccaaaccgaagacccaaaattacccaatttggcctacaagaaggtttcgttgggaaaataaagggctttcaacacacgagtaagaagacaatctggattagttagaatcttccacccttgtttagccaaaagagattgattgaaatcttctaagtcacggaaccccatacctccttgctccttcagtttgcacaacttccgccaatta

SEQ ID NO: 52702 - DNA, 1655 bp, Cannabis sativa
agaagtggagcgagcttcatctaaaatctcttttctgagctcactattgttcagaacacaaacccagttcttataaagtagcatttcactatcagaaactgacaagtctttagcctgaccagttaaaacttcctcacgagaattaactaactcaaggtttcctacttgagaatttttaatcctttctaacatattagactgaagtgttaaaatgctaagttttccaaccaaaaactcaatgccagccctaaccattttggtttctaaccgacgagagatcatgtttgtactaaaaaatatgtccacgacctttcctactcaaggcatctactaccacatcagctttcccagggcaatagaagatctcataatcataatcctcgactaactctaaccaccgtctttacctcatattcagatttttttgattaaagaaatatttgagactcttgtggtcagtgtaaatctcacatttctctccatagagataatgtcatcaaattttcaatgcaaacatttatgcggcaagttataggtcatgtgttgggaaatttttctcatacttcttaaaatggtgagaatcataagcaatgatcctgtcagcttgcatcagaacaccccttagaccatatctgaaggtttcacaataaaccacaaacttttcctgatctgatggtaaagaaaatactagagatgtgattaaccgctacttcactcttgaaagttggttttgcacttatcgatccacataaaccactgatttttcttagtttactatgctaagggtgtggagatcatagaaaatcattctacaaaatgacaatagtacctgactaaactaaggaagcatctgacttcggtagctttcttcggtctcggtcagtccctaaccaaattaatatttcttgaatttaccataatttcatctttacgaaaagtgtgacctaaaagatacttgcgataaccagaactcacactttttgaacttagcataaagcttatgctcccttatcattgtaaaatcattcttaagtgttgttcatgctccacttctgactaagaatatacaagaatatcatcgataaatactatgacacaaatatcaaagaaatccttgaatactcgattcatgagatctattaaagttttcagagcactagttagctcaaaggacgtaaccacaaattcataatgaccatacatagtaaaaaaggcaatcttcagagtgtcctcctctcggattctcaactgatgataaccagagccaagatcaatcttggaaaagactgtcttcccctaaagttgatcaaacaagtcgtcaattctaggtagtggatacttgttattgattgtcaacttgtttaacttccaatagtcaatacacattctaagtgttccatctttcttcttcacaaaaaattggagtttcccagggcaatacactaggtcgggtaaacccaatgtctaacatcctctaaagttgtagcttcaattctttaagttctgttggagccatctaataaggtgtcttagaaactggccccactcctagttccaaatacattacaaagtctatctcctgctgtggtggtaaattaggtaatttttcgggaaacacatctaggaatgctcctactactctaatgtctttaggc

SEQ ID NO: 52703 - DNA, 1754 bp, Cannabis sativa
  modified_base (1058)..(1058): a, c, t, g, unknown or other
tagtgaaaaattcacaaacaagacaggcttatttagaattcttattgattaattaaaattaattaattgatattataaaacaatattattgcaattagtgtggggactatggttctatgtaaacaagctcccaataagtagatctaaaatttactcagtaaatttcctaacttattgattcctcctgactccactatagattcagaattgtactcttaattacatagaatgctttaataccaaagatagatgcaatttaaattacccattgtatcaatccaaatagtcaaagattctctattgatgatctatatcaactagggacaaatttaccgttctaccctaaaatatatttaatccttaaaacactttagctacttataaatgatatttcagtaaactaatataattactaaaatgagtgttcaatcatttatcgcgttaagccaagctcaaaagaaatcatcatttcacttctaaatagttatagaagctatagattccatatctatgattagcacttgcactcaattatactaccaagttcccaagatgtaagtattaggaagatccacttgatcaactttaacaaacaagtgaaagaacataaaatatacatttaagatctattgacctaacatcaactaagttatattgacttaaaaagatataacgataagtttacgatatcttatctaatgtcaatatcggtccaacccgatgtatactccatacatatgatactagcatactttgccaatgtcttggaaaggacataccacttatccaaggtgtaagtacactttattgttgattatcatattagtgtaaatctagtgtactgacaaattatgggactttactttgaaacatataatcatgattattttccattgtgtagacaacactataatcataaataactatatgttctggatttaatagagcttatacattaaacatataatcatgaaagtaatcatgtgaaccatacaactttaaatgattttgaatctcttattaattagtagatttgattatattgaaatgaattttanttagggcataaaatctcaacatgggcaccaacacagggttagatacctaaagtggatagaatgcttcagtgataaagtcatgggccctcatccttttgacttcatctcttagagcttgggcgcgttctttgtctagcaacctccttttctgttgtacatgtcagaagtttggatcaatgttgagagcatgggtcatcagagagaggtctattccgaccatgtctccatgtgaccatgagaagaggtccaagttttctcttacaaattttatcagtacttattttatttccagtgctaaacccttcccaatcttcaatcttctcgctagaaaggatcaactccacttcttccagttcttctataggtctaaagttttctacaggttcctcaaagtgaggatctatgcctgcctccccgctttgggctggacttcattgccttttgctgggctctttatcagctgctcttggtgggcatcttctctttcttggctttggacaaggccaagttgtaattgtgacaggaaaactattggtctccccgtaaacatcctaccccatgcgttgttgggaacttcaggcaaagattgtagatggatctaccccatgggtgcaatgccttgtccaaaaaagtcgtacattacttgtgtgcagggtgccaagtcagccagcaggagccccatattttcatatgttg

SEQ ID NO: 52704 - DNA, 1531 bp, Cannabis sativa
tttagtcactgtgtttgtgttctgcagcaaatgctggccatccaacaaggatatatatgactattaaaagcttgaaaatattgtaaaaacataataataataactaaattaggtgtataaaatatattacttgtctcttaatgctttctttttattttatatatgaaaagataaaaattattaattcaaataataataataaaaaaatcaattcaattctatcataatttttttaaaatataaatttaatttaaatttctacttatataaatatatataaatatatatatatactatataacataagctttattaacaataaaagaaaatttagaaaaaatatttaataaatttgtttaaaaagataattaataattgatgtaacggtattattaatttttaattgttaaacataaataaaaaatatttctaaaacaataattctcgttaaatagttacattttatgtatataaatgttatataacagaaaatattattctttttttaaaatattataatttaaatttaaattaattattatgcatatatcttttcttttatcttatatcttgactatataatataatgtatttttttttatattgtatttaaaatttaaactcattttacatatctaattttttttttttgtattatcattttttatccaatccacctatctaattaaaaaaaatatatctttctattattgttttctttttaaacaataaaataaaaaaaatgttatgtttcttaaagaatcactgttgtaaggccactatcttttgcggttaccaaaagcatagttttttttttattattattatttaaaaaaaagtatatgatattttaaaaaaataaaattattatgaaattaataatattgtagttaaactaaaattataattaataataaattttgaatattattttttttatataaatattacttaaattaaatattttgtaataaaaaaataatattatttattaaataatattaaaaaattaattatatataactaaaaatatacataactaaaataaaaattaaaaatataattacatccaagtcatattagtataaaaataaagatatatacacacatagacaaataataatatttatttcactatatattattacatttatatttatggcccaaatatatgtatattcatatatttatatatatatttatagatatatatggttaagaggagggcatcgtggagctttcaaagcttcttttatctcattcttttatagatttataattataatgttggcacaacacaatattactttacggcaaacctatttaactggttgtattatagaaatttttggttctttaatttgtaacctgttattattttgttttcatttcattgtctaattgtagagttatcattgggctatttttatcgctatatatatatcatgtatattatatatatctattctaaaatgtggctatataacagaatttttggtttatgaggaattattgggtgaatttttttttt

SEQ ID NO: 52705 - DNA, 759 bp, Cannabis sativa
tgaatttgatcataattaggctatctgtattagatatttgtatattttttattgtagcttatcgtagttcatcagttattatgttaaaatctatctagattaagaggcatgcatgatgcttgggtcctactgctttgaagtttgaattgttttctggcgggcagcatgctttaggtgtttgagtacagactttaatttgctgcttactttcctttcatctgtccctccaatatgagattctcgcacttcattctggctcccagtttggttattatgtttcttatttcactaagctattgtctttgcctctttattcttgtcttcttgtttgcatgctcttatttgctgagtttagttgatcgtgacaaggatttctgacttaccgtatttttgtcaatgtgaagggttgctagaactgttatattaggtggtcttcctaatgccaagattgcagcgaatgtccacagcaaagctagaaagtttggtacggtatgttctgtagcattcccgcttccacaagaagagcttgagaagcatggtaagtgatttttcaactctattttatatgtatgtttgcctgtttttcttcagctgtttaattttatttatttgttttaatttgggaccgattattcaagtaatgcttaatcttgtaatcatcaaattgagatccttgtaccagaaatcatgcacttccggaatataaattcttttacgtcaatttagttcttttttatttcttttctgatacatttgagg

SEQ ID NO: 52706 - DNA, 1274 bp, Cannabis sativa
aaatttgattttctagtaaagaaaataaaaggttatttctgattgtaattatttttttcgacaatcgtaaaaaaaacatatgcttctcatatgttagaatgatccccttaaaaagtagattgcagtaatataatttttgagttcaaataattattggtgtaactaaaaaaactttttaaactttttttttaaaaaaagaaaaaagagaaacaaatatataaaatagatggagagagacataaaaaaacaaaaaaaaaaaaaaatctgacattatatatattaaaaatatagatttgaattgttgtgtacatttcatgctcagataattgtttatttaaaggaaaaaaaaattctgacacgcgaagaaaaagaaaataaaacatattacaatttgaatgtataccgcatactaaattaagggaaatgatattggacatatacttaaattaaataaatagtcatatatctataaataaaatacagttaatgtattttggtgtaattattccttaatagaaatggggccaaaaccgcaaataaaatcaaattaaagccatttggtgtaaatttctattaaaatatttattttattatttatattttttcaagataattttatcttaaatatatttagttatttatttcatagttaatatttatctttaaaattataattttattttttagatttttaagttgaattatgttagctaaatataataattttgttatttaagatactttagtgttattttaattttgttattttttttttggcaaaaaatatatcctttcgtcatattttaaaatataatcactttgaaaaatagattgcggtataatttttaattttaaactattatttgtgtgacttgacaatatttttaaacttgtgagaaaaaagtaagagagaggagtgatatccattcattttaatattaaaaatctattatatattataataagttaatcataataataagaagaagagtgagaaaggcaccaaaggagagagagaaatttttttttttaaaaaaaagacattgtagaactaacataaaattggataggaaaaaatacaataaacaaataagtaaacgtgtcaaaaaatagaattgaaaaaaaaaaagacttcactgatgcatagatgtacgagcgtgagagagaatccacttctccttcgttacggtataccaatgtgatattttcatgattaaaatacctgaagttatttgtataaataaaatgagaattacgtatgtgagcgtaatttt

SEQ ID NO: 52707 - DNA, 1829 bp, Cannabis sativa
  modified_base (1769)..(1784): a, c, t, g, unknown or other
cctattatattagctccctttcttaataatcgtataataataattaataattttgattcacctatccgagctctgcaaagaaaaatccccataacgagggctgaggcttgcgatctcgtttaacattggagtcgacactccattaatgggattcgagggttgcgatctccattgacggcttgatgcttgagatcgtgtcatggaattatgttttaaaatttaactaatcgtcgccacctttctcttttattttttttcctattcagtcgtcatctttctcttatgcttttttttttcctattctgtttgattgtatcttttatagatttttcgtattttttttattgggaataagtttatgtcaaaatggttttgtttgacatgtatggttgtattcttgattcagcaactccgcttccaacaatattgtagtattgattcagtatctttcttctttggttaatttattgatcagattcttgtctcttccatacatatatgattaatgttgagcagagtgtgtgagtgaggtagatcagagtgtctactttcaatcgatttattaattttagcgttttataatcagtatttgattaattttagggaataaacttcctagctaaaatcaagtttaagtgtagtaactttatttcctcttggatcttcattgtgtttgaaataataatagatctcacaaaaaatagacccctaaaataatgataatggattcatattaatgtgtgaatgagatagtggctatgtatgtgaataatccctttgcttcactcactttgctttactctcatgacaatactactgatcttggtcagatgtatatcacattttcaccgagtttagtcttcatctgggtgttaatcttatcggattagtctttctctctatagtttttattatattcttactttgatgtacataacaagaaaacaaaaattacacaccacacagaaaaaaagtaacatcacttcagcataccaagattatatggaaaatataatattatcaatttttatgtgcccaagtatgattacattggctatgggcaatctactagaaatttatgtttgatgtttgatgtgtgggcagtataataatgtttattttcttaaacaaaaatggtataaaagtcaaagaagaaaggctaggtagtttgacttcagataaagagatcattgagcttagcattgtttctcttgtaaaattattccatgttgttcattaaagttaaatctctctgtgctctctctctctatcatcattgatcaaactatttttttttttggtattcttgaaaggtcaaaattatttatcttatacatgtaatgatttttactatgtgtaatatagttatatgtcgagttatatgcttgctactcttattctttataattttattatcaccggtttaagttctgtatccaaagtaagtgtggtaaaaatgtatttgcaccaactcatgactttaattgaggataaaattaagagaagagtgaataaatgtgtagtattattatattttaaatatatttcaagctaatatttattctcctcttctctttcttttattgcaaattttgaatttcatctttcactactgatttccaaataactccacacagtaattaaaattagtttttgaactattttaaattatatgattatttattgaatctttctcaattaaattataaagcacctaagataaaagtaattatacgtgcacgtaatttttttctagtatatatatatannnnnnnnnnnnnnnnaggtttcaatggttatatttttattgtaactatcatggttacatt

SEQ ID NO: 52708 - DNA, 1258 bp, Cannabis sativa
  modified_base (950)..(976): a, c, t, g, unknown or other
  modified_base (1051)..(1055): a, c, t, g, unknown or other
ttaatattccctttcaaaaaaaaaaaaatgcaaccaaacaaaaaaatagaataaaatagttgttttatttttattccatttcattaattcaaccaaacgccacctaaaatacaatcaaataaaaataacaaataatttttttccattacattacctctaaccaaatggtaccttaaagtttcaaataaatcaagtattgatattaaattagaaacatatgcttgtattaatgtactctgcatttggtttgcaccatatattgtaatttggattggagtaattcttcttcataactagagaaaattacatcacggaaaatcatgcgggcaatttggtcttttagatgctaaaaagaccttcgaagatattatattactgagaaatgctaaaaggcaccaatggtgcctatcacctttttatgtgtcaatatcgctattggtccaactaagtattgggtctcatataatttaatataaaaactttagggagtatcgctagccaatcgcgatgcaacatgtcgaaaaaagtgctagacatcactggtgcctaatagtaatgctctatattactaatagtagaattaagtatattggattccacacaatttaatttaataatatgataagatatcgctaatcattcaaagtgcgttactttacagtattactaggtaccactaatacttaataaaaatacttttggtaacaatatctcaaaagtagccgagttataatatttgactttaaatgttttgacttgtttcattataaaaaaatttacttttaatcataataaaatttgtgattaaaattaaaaaaattgtgactaattaattataaatcaacattcttatattatcattaaaaagtctgtgactaattaagggtcacaaaaattataatttgttataactaaatgtgtttttactagtcacaatacttgttgtgacnnnnnnnnnnnnnnnnnnnnnnnnnnnctaaatattatgttttagtcatagcttttaaaaaaatactacactttagttataaataattttttgttgtgactnnnnntcacatttagtcacaaaaattttatattatgactaaaaaactatcattaaaagtagttattttttgtagtgttagtcaatttgtaattcacacgtcaagcctactgtcgagttgaagatctgaccgcgcgctcaccctcagatctatgcactacccccgatcggagatggactataccaacactaaaaagaaggtccctatag

SEQ ID NO: 52709 - DNA, 1348 bp, Cannabis sativa
gaagagacatgattcatctgaagtataccgttgttaatcttttcacgaacagtgtgacaatcgatttccacgtgctttgtccgttcgtggaagacgggattttcagcaatgtggatagctgcagtgttatcacaatacaagatggaaggagttttgacgggaacagcaaagtcttgaagaattgatgtgagccatgtgagttcacaggtggcatgtgccattgacctatattcgccttcaggaggatcttgagatgtttgctgcttcttagacttccaagacaatagagaatgtcccaaaaaaacgcaatatcctgtgatagatttctgtgaatctgggtaggccccccaatcgacatttgcaaaggcttgaagttggagagggtgaggtgtttgagcatggtagaagaggccttgccctggagattgtttgagatagttgacaactcgtatttcagcttgaaaatgaggttggcaaggttgttgaatgtattgacttagtttgttgacagtaaaactgatgtcaggcctagttatggtgaggtagatgagcttgcctatgaggcttcggtattgttttggatctggcaaaagggcacccgattcattgcttagtttgagattaggttccattggtgtggataccggttttgagccaaggtgacccgtatcttgaagaagttgcaatgtgaatggtctttgggaaactgaaattcctttgttcgatcttgcaacttcgagtcctaagaagaatcgtaggttgccaagatctttcagtttgaaagttgaatctagtgtaggaataaaatgattgagggctgaaatattgtttgtagctacaattatgtcatctacgtatataagtaaagctaggaaagcattagatgtatttttaatgaacaatgaatggtcacttttgaattgtgtaaagccttgtgtaatgagagtggagctaagtttagcataccactgtcgagatgcttgttttaaaccgtataagcttttctttaatttgcaaacgacattaggtggtatcacccctttgggagtgtaaccttgaggtagtttcatgtaaacatcctcattcaaatctccatggaggaaagcattatctatatccatgtgatgtaggtgccattgttttatggcagcaagagcaaaaagaagtttgagtgtattgaacttagctacaggagcataagtgtcaaaaaaaatcaatatcttgttgttaggtataacctttggcaaccagtcaagctttgagtctgttgactgagccatcgggattgtacttaatcttgtaaacccacttgtttccaataacatgttggttgggtggtaaacttgta

SEQ ID NO: 52710 - DNA, 1524 bp, Cannabis sativa
ttcaaagcggaaaggccttttggcattagagaccaaaaacggtattaataaagaggggtcgatggtcagaattacaggtagtgagagaccgaacgaccgtcataggaaagcaaactataaaatttaattctatttgcaatgattttcgagatcaccttataaatcacattgcacaaagagatgggtctgaactgggatacttttttagggttagggaccttaggaatgagacaaaatcgttttctttttcttatcttaagaaaaatacatcacgagataaaatcgtgtccctatatatataagagagatttattcactggtataagaaaataaaaagcaaaccgcaaaagtaaaaaaagaaaaaactattcacttttatagtcttttcttctctgttaaagttggaaggaagctacccttatattacgtatcactatagttgaggtatttatattaaatcgtatgtatattatatatatttgttggatatgtgtataatatataggtgtatattagtgatctagttaggattagttgtttaactagtttgattgggtgagcaatccctggccccgccatgccccgtttacgtccctatgggtatccgatgggaatcttttccccgtcgggtaatccccgccccgtccctactttaatttaaatgggtgttggagcgggtatgggagtgaatttaaaaggcgggttggatttaatggagagttgaaacacacttgttccaaacatactcttcatttaagcaagattttgtgcaaatttgttgttgcttatgggtttataatgaattgtagcattaggaaaagagaacaaagagtcaatgactttccaaaccaggtcagacaaggctgaatgatcttaagtctttttaaaaattattgagactaaaacttcgcaatcagaaaccacaaggttgatgggaaagtggactgccttacaccaaattaaagctcaaagaagagcctcaacttcagcaaagattggaggaacacctgaagttgtagaagaatagatttctgctatgactctgtcattcgaatcttgaactacaaccccatatccatgtttgttaacctgcctttttattgcagcatctacactaagcttgtattgctctagaatagacaatgaggaagttggtctcgattgagctgcctcttggttttgggtggaactatctgattggagaatgatcattgcttgggctactttgtagtcttgcaaataagaaacaataaaaggttctatatccatataaacatgcttcttatctgcaaacagaaacttgttacggtggttccatatagcccataaaataccaaaaaacacagccaaattgtctttccgaaaagcatcaaaacctcttaatagaatttctttaatatcacaattcttcttattatggaaaaaaaattgagaaactagtgtacttccaatatttacatgcccaagaacactctaaaagggaatgggagttagaatcaatacagtttaaacaacaggggaaat

SEQ ID NO: 52711 - DNA, 1120 bp, Cannabis sativa
tcttcataatattaatgttaagataaaagactctacgatcatatccaatgataacattttttaagaatgttatttacatagttaaaaatataatattttattttatttctctttcatattattttttacactcttatttctaaagacactctaatctataacaccttttaaaaatgttataattatgatctcacatattatcatttaatatatatcttaatttgaatagtatttttaaattaataaataaaattaaataccaataatattatcatttattataaataaaatattactatatatatttagtctgtgaaatcgatttttttttaactgagttatttatatgttattagtaataatatatatatatatatatattcatcatacatacattttatgcggatagtgtacataaatgacatagcgaacaaaaataaataacatagtgataaaatatataaaaatattcattttaattaataaaaaatataataaaatttaatatttactaattaataaatatattttttaataaataattattttatttttatatataattaacattaaatagatataataaaaaatatatttattttaatttttaaaataatatataagatccatgtacttaaccaaacagtgtaatttaattaataagaatatcattacatattaccctacacagtcaaacacagtttatacattttcctataatcatattctctttcataatattccctataatcaaattattttgaacacctcgtaccaaacgccccctaaaaatatcaaataataacatatttctaaaagtattttgatataaaaaatcttaaatcatatttcataaaactcttgttaaatcaaaggagaagaagatgataataaaatgaccagaaatactaatctgaagccattgttagagattgcacagaaggttatgatcttctaagaatacactatttctctaaggtattttctctgattgggaaggagagaatacatgaacctagtatttcttgaagacaactacctatttatagactcatcttagaatgagttttaggtatttataatttgacccttcaacaaattataaattaacttatagtat

SEQ ID NO: 52712 - DNA, 1239 bp, Cannabis sativa
ttgaggattgatagtctgagtaatgcgatcatgctcagaaagaaatttcggaggtggttgagtagtagatgagatgtaatcaatgagttggcgacctcaaatagccgagaggatttgaggacgccatagcaaaaaattgttgttatcaagcataacagagatattgctagaaaaataataggatgaaacgttgttgctgaagtcgaattggtcgatgcagacgagtttttcatgatgaagaagaaggagaaagaagaatatcacttcaagaaacagagaatgcggaagcaaaaaattttgagcaagaacagctctgataccatgtaaggacagaagaatagagagaataacaaagattggattgaaatgattttgtacattcattgaataagcaaaagctctatttataaatacaatgtacataatagaaaatcaactttacaactgttataactaacatcctaactgtacaactaacccaataacaaactgtgtaacaaccttacatatcagtactaactgaatccacactattttataatgtgtaccaataaagctatgaatatttattattttacaatacacttaattttacttaaataaaagtctattgaagcctttcattttttattttggcccccgaaaagtgtgagccctaggcatgggtctagcccgcctatgcctagggcaaaccctttagttgataaatagatgcaaattaaatacttttcaccctttatactctaatgattaaaaaaaataaaaatacaaatataaatgttataacaaagaaaaattcttttgttttattatttattaacgtaaaaaatgtgaaagatatttaatttgtatctatttgttaattagcatccaccatttcatcgttttatgataaaattgaataaaatgtgatggaaggactatattaccataagggcccgtttggtacgcatgactggactggattagacatgctaatttctccaatctagtgtttgggcatgttgaaagtttgaataagtaatccagctaatctcatctatctgagattatttatctcatctagtagggtgggataaataatctcatgcaggtgagatttttttttttatcattttttttaatttttattttattaatatatattaaatttaataagaattttgttgtcctaagtttttcccaatatacgtggcagtcgcaatataggacacgtggcagaagtaggcccatcatccg

SEQ ID NO: 52713 - DNA, 773 bp, Cannabis sativa
tttcaaggtttttgaaggatttgtgaaaagaattttgggcaatttaggtgttgagaagattgtaagaatgcactcttatcaattttagagatgaagcaacttgtgatctaatccttgaagctggagttattcacttcgacaaaaaaccagtggtgcttcgtccatggtccactgaaatttactctactcgaatggtgaactctgtgcctgtatgggttcggctgaataggttggggcttcaatattggggaaaaaataatctcaatgctttggtgagcacaattggcaaaccggcaatgattgataacgttactcaagagcgatctatggtgaagttttctcgtgtccttgttgaaattgagatttcagacgatccaccaaagactatatccttcattaatgaaaggaaacagttggttgagcagtcagttgagtatgagtggctcccaactaaatgctcggcttgtgctaatttggggcatactattgctaattgcaataaagagaagaaaattatatggaagaagaaacaaagtgttgaaaaagaaaaagtgctagacaagcaaaaagatgatatcaatcaagataaagattcaggggagatggctgatcttaggacagttgttaatgactcgagactagattagggagataaagtagtgcaaaagcaatcaggggtgatgaaatagatagagctgagaatgacaataattggattacccccaaaagaagaggactgagacagagtgaagcttcaaaaaacctggaagatc

SEQ ID NO: 52714 - DNA, 1004 bp, Cannabis sativa
ctatgaaagattgaggccaaatgggaaattagctaacatgggcaagattagtattttgttaaagacttcaaatctcaagatgtattaagcaagactatctaactaaatacttaggaagtgagtttcaattagcatgctgcagacaaatgaatgagtcatcataacagacctctcacccttgcctggaaccttcaaaactacacaaatcaaaagcaatctaagaaaatttgacctttcatatccactaatacatagctttcttcatcatcaaccaatctcttgctttcctttacatatcaaaaagcactaaccaaaactatcatgtttaactgatatatttatcattgcgctgaattcaagaaaagttccaaataaacaataaattttatggtgctccatgcttaaacaattagatttttttttttatctatttttaacattctgaagttaggtaatttgcaagataattccattcacgaaaaaaagcgaaacataaaataaaaagcataacaatgtggtgagaatctaaccttaaagatttcccaggaagaaggtgaatctctatccacggttacattcatgcctccaccattctcagcagacacgtacttctgtcgggttaatgacttgatttggacctctgttccgtcctgaaaaccaatatccacagaatacagatgggtcaattccaaaaggtaaagcaaacccacaaacctccaaactatctagtccaatatccagagagatggcgacgatccatgtgggagtatactccaaggactcaccttctccaccgccactcattccgatttcgaattaattcagatggattattcttctagttgggcctgctctcatcaatgtcactccaccatcaaacgtcgatttgaggtttgatatcgattaaaaggcagagaaggcgaagtcgacagtgcaaattttgatggtataaaagaatatttaatatcagttcaaatattaatatgatttgttttattattatt

SEQ ID NO: 52715 - DNA, 1271 bp, Cannabis sativa
gcatatagtgacacaccagggatgaatggataaatatgtcctcacccatttagcgtgacactatatcataacttaatatacttttatttttttatttttataaatatatataaatgctagctataagaattcaaaataaattaaaacaataaaagaagaagaaaagttgtccatttaccgagctcacatttaatactctttacaactttttttttatttttctaattaataccctttacaactcaaaaaagaaggaaccctagcccatccttattcccagctgcctccccctctctctttttcctctctcggtctgggtagaaggaaggtggacgaacaagcagatcgatgactaggcggacgaccaaattcagctaggtgatcgaatatgagatcaacacccttcgaaacatccatatcagtccaaaaaaaaaaatattttctctccataaatctgatatctcactctgtaaaaaaaaaccccaaatctcgacggtggtggagaggaacgacaaggatggtggcgctgataaagacgaacgatggatggtgctctagtggagaagaaatatctctttatctcttttctctatagctcgatgggggagaagccttcctcaggaactttgtctggtttgattttcatgttgaaatattcttctccattgtaaagcttctcacagattgaaaccattcttaatctatcttctctctgtagatggatggttgttactagtaattcgtagacacgtggttggcggttcatggtggtttgtagttgcccgcagttggtggttcgtggacggagtggcttagtaatatatggaatgggatttgaaaatattatttcttgtttttatttatatatagttatggaatttttcctataatctggggttgtactcacattttttatactgttatgggttttgtaatctaggttaattttatgattgttagttcaaaatgtgtattatttgttgaatattaagtgttagatatgagcattttatacctatttttactatattgatccataaaattaatttaagtttcattgttttaaaagcataaaaaatataatcgtggtaatattttagtttcaggcgaattattcaaaaaaaaaaataataattataccatttaaattatataaatagattttttttaaaaaaaaaattatataaatagaatattaaattatatctaatatagtggccctttttgtgggtcactatatctccaaaaataataataaagaattaaaaaaa

SEQ ID NO: 52716 - DNA, 2010 bp, Cannabis sativa
atcacaatagatcaggaaattcaaatattaccatttgaccattattactcaaagatatcatgtttttttatagttttaatttaataatttcatttatagcagcagccacatttcatttgttctctccatgggtatgttgtcatcaaatcaaaatgatggtacaatgcataataagtgggtgtgaaacatggaattacacagcagctagacctcactctctccgtgaaaataaaaaaaaaaaaaacattaaagatactcttcttcaccacagctaaaatatttccgggaacatcaaatatttttcttctgtcaagagactattaaaatatggacacaaaatcaaagtacaaaaaaggcacttctctctcatggtactctcttttcaaatctgttcttccagcctgttgggagttatttgaaggtttcttgtgttctactatactaggttgaactagaactttagaagttgtagacacattactactgatcaatacatgtactattaacaaaattcactctcatcaggaggagaaaatcatcgtctccgttggtcacgccaccttttgttcccatgtctattactatccctgtatccaggagaactcctcaccctcgactgatcagtaggccaatatccgcgtcctggatccattctgggttcaggaaaacttcttcctaacccactatactcggaatttctagatgggctattatctggactccatgactcaaactcatcttcctccccatatgatccacgatgatagttactattgttttggttcactgtagggttgtaatttgatggtaaattctgtctaggcctccacgaatcaggcacattactcaattttccaatttgtttggagtatataggcgcagaaggcgaaggggaaggggaaggctcagcataatgttgtttggggttgataatgttgttgctgattgttgtggttgataatgttgctgctgctgctgcatatgcatatgctgtagcataggtcgcgatgatggtgctgctggcaacaatggggttgggaaagaatggtgtcgtctttcctctacattatacatgttatttgacattgatgcttgtgatttggtgttagttgtggattcatgtcgtagtgaagacaaatcttgagaatgtaaattatacatgggtccagtgacctggggtaaatgcgtatgtacaattggggagctagttaaagggagttgatgatgtagagatgaacctatggaggtggagtatttttcatgcaccgtgctagttacttgagacagtgaatatgaagaaattactggcggattgtgaggcgctaacatatgtgatggcagcactgaattagcagtggccattgccaggggtgggggactctcaccccctcccttaggcaacgtagcccatgaaaatggattcctgactccttctggcctccatccactctgcaattttaagaaattagaggaaaaccattagagattgcatattacatggataattacgtttgatttctattgttattattattattatccttgttcagtcttctgtttcaaaaattattttttctctagcacatgcacaagaaaaaattgcatctactattcatggatccactaaccaaaacccaactatacataacatgggtgttcaaatttaaaatgcatttaggtcttgatacccttcactcccaaccccaccagaaaattaaaaaacaaaaaccataataaaacagagcaaaataagcttagcggtaagccaacactactgctggtgaaaaaattggctatatggttatggtatccaacaaataggccaaagtgacgcaccgttccagggttggttgaaggtgttggagatggaagagaaacttcgaccttctcttccacttttctatttattccattgttactactagtgttaccagctttgatcatatcaagcagtttcactgtttcctcactcgataagttggcagattgccctgatgtcaaagcaaatac

SEQ ID NO: 52717 - DNA, 1254 bp, Cannabis sativa
aattaaacttataagggtaaaatacaattgtaatagttggcttttattatcattttttagaagaaaaaaaaaaaaaaaaaaagacaaaggaataatcctattgatatacttggtaataaaattattgtaagtgcacaatattttttcaatatcaacatgaaaggatatttaatgtaattagagaagtaagggctgaagaaaaagattagtattgtagttttgaaagaagtttgacttgtaattataaagttaaagacaaaaaggaaaatacaattgtaataaaattaaacttataaaggtaaaatagtttataaatatcacacaaataagccactttttataatagcaagatatattgatatattgattattggatataatattaattaaagtttcttattttaggtggtgagtttggcttatgctggctgacctatcttctacaattaattaataatacttatcatgaatttgggagaaagttgaccttgtatcatgttccgcatgcactatttatatataagagcatatccaaaaaaggacatgcatgggtggatacagcctttgaaattggcaaaagggcgacatttgtcttggaatctcttgggttcgatcaaaagatgttctctgctctttctttcaccaccattaattatttattgattaatatataataattaagtggcactaacttctaccgcacaataatgtattttaatgcaatttgaatttccttgtgcatccttctctgtacggatgtccttctattgcgctctctcctttctattggctttacccctcaatcaaattattctaacccttttcctctctgctctctacttgtgctgtttctttccattataatattccaatttgtatactatataaatgtacaattagccaacataattgtaataataattaattggattaatggatgtactacttgtgtacgtacatatatatattttttgtatcatttctaatgatggcatcttttaacaatgttaaaaatttgagaaatgttgattacaactttctattataatctcttaatcaactttcatatctgaaatcacaagtcgaaatatttttttcaaatttttttcatagcagtatttcttataattatagtatctgttagaaataatagagagattagaatggaagaaaaaataagatgaataaaagactaagacaattacaactctaaacaaaatattacaaggacaatatattaaataaagagttaca

SEQ ID NO: 52718 - DNA, 3463 bp, Cannabis sativa
aactaagaatgatgacctcgccatactaatttacaatatggggaatcgacttgaatggggcattacccaaaggctcaggaggagcaaagtacgctatagtagcagttgacttctttacaaaaaggacagaggctgaacctctagttttcataacttgcaaaaaagttattgattttgttgtcaagaacattatttgtagatttgaaataccaatcaaaatagtatctgataacgggactccgtttgacggcgagctatttactgaattttgtgaaagaaatcaaattattaaaagcttctcatcactatcaagaccacaaaaaaacggacaagtagaagttgttaacaaaaccttaaaagatactattaagaagaagttggatgctgcaaaaggaagatgggtagatgaactaccacaggtactttgggctcacagaataatagagaaaacaacaacgggacacactcaattctcgttagcatttggctaggaggcaatgctacgagtagaagttaatattgcgacccatagacgtgagttctataatcaagcagaaaaccaagagcttctgaacctatcttttgacttacttgaagaaagatgtaatgagtcgcaagtaactaatgcatcctatgaacatcgaatcatgagatactttaacaaaagagttaagaaaagactctttaatgttggagatttggtgttaagatgagtatttgcaaaaacacgagatccatctgctggagtgtttaatccaaactgggaaggtccctatgttattgaagcagtagtaggaactgcggtttataaattagctcggcttaacgacttgctaataaagaaccattggaatagtgaacatttgcaaccttattactagtaaagttaaaatgtaaatgttgtatttatctctatgtaatatgtaaattcctattattaataaagttaaagtttgttcaagtaattataaagtttatcttctttaaaattacttgagggacatatacatgtgtataataattggaattcatctaggaaacacatactatattgcaaactcattttaaatttttaccacaaaggaaatgataattgattaaaattttctatggacaatgtaaaatcatggaattgaaaaatctttcctatagaaaggaaaaagtcaaaaaaaaaaaaatagtagttgtaagtgagatcaactcataaaacaacataaagctacatgtgaggctgaatacttaacgactcgcattattctggcatgtattataaatgaggcacaagaatgccttgaaaaataatacttaagaaaaaatatggatagaagacctaactattcatatgagcaatcaaaaaaaatatacaaaatagttcctgaagataattattcaaagaagttttaagtttgccataaaataatatataatacataacgatgttatacatggcagattaaaactgctcatacaatatttggtagattataaactactcgcgtataacaagacagactaaaactactcgtataaaataaagcagatgaaaatttctaacgaattgaaactacatgcagattaactgctcacgcatatacatagtagactaataactacttaaatgcatcaaaggaaaaaactagaaaaaatggaaatacttcttagagtatcaataagattggatcagatatatatatttaaattgtgaaaagaatgatataaacagatatattcaattcaaatataagatacaaggcattaaaagtaaagataaatgcataaaaagcaaagtttggccatccaaacatgtaaattatctttacaaaaataatgccactaggggcaaccattgtctcgtgcaaagggccattttactaaataaaaaaatcaaagaaaataaaacataaaaagacaaagtctacatagtaggggatttggttggcccttcttggtcttcttcaacctcatgtgcatctcaaacctcctccttgttggtcttctcccagaatgggagcatatcttcagctcctttgcccagaaagctaaaatccctctcgagattagctaaccaagcctgattgatagaccgcctaacaattctgatgaccctgtttttggtgtcaactttggcctcctcaagctttctatcggcctccgcctggatagtcttattagcaacctcgagctcctttattttcttttggtcagccctctatttcttctcagcttactcctttacccgagagagttcagactccgaatcattccacttttttgccatgacatcacaatgttctctggtctgacgaagttttgtctcgagcatctccactcgctaaagctccctgttttgattagcaaaggacaaaagagatgcctgcgaggaatgaaaacaagcaataataaaagaaagacgatatggaaaaaggaaaaagagcaatgaaaagactaacctgatgcatgagatcataacttctttgcaccaaactttcaaaattacccttgttgagtaattcccagtcgttggactcaaaggtttagtattgccgccaattattggtagcgtgtagtgagcagagttttgagccatgtatatgtgccaaattcaatgggcaaggtccatgagggctctagaaggaccatctctaggcgagaactagaaaacttcacctggtgaacagacccaaggggctgttcattggcactcgccatagtaggagcagcctttttaagagattttgaaagctcgatagtgagttggtttgaagatttcttctgatttgatgttgtttttgttcttttgggttctttggtagagctcgaggcttcatttgccttggcagcacgttttctagatcatttatcgacgtgaggagggctgttcagcatattttctaagtcgagattcatatctgcgaggtaaaagagatacatcaaacacttactcaaaaacagataatacaaaaatggggagtaaactcccacttaaagaaagttaccataattatcagaagttgacgaggaaaaactataataattaccaaactccctagaccctatgatcatgtacatatcataagggtttatcggagataaatcccaatttgaatctggatggctcgccttatccaggtttgtaccatattgctcggcaatcccgtaatatgagctagtgcaactaagatggacatggaatcaagggttccaactatcaaacctatgggttatgcgatctatacaaaagttttcccatgtaaaaaagttatattttctatccctaaaggatactagcgaggtacgtgcagtcctaagtacggtgggtaaccatcaacattaattgattaccttgggatgcttcttcttcagctttctaaagggttactttctggagataatggacgcgagcaacataatcttggctttcttcatcagctgggactgggaccttctcccacgaggagtattt

SEQ ID NO: 52719 - DNA, 867 bp, Cannabis sativa
agattggcctctttccttaatttcgcgcaaggactttttaatatctcgaatctcggaagctatgtcatatcgagactttatgagttgagcaaagtgacatgttctgtatacaaattggagaaatttgtttccatgatgaccgtggtgtttcatgtgcaaataatgaatgtactcgtctacaacatcatctatgcgatcgactagctgccttaattgtttgagccatacttcttagggttgcacgtgggttgggttgggcagtatttgggcggtttggcaatttttttatttggcggttttttaaaatcacaacccatacctgcccaataaaagtttgggttgggcgatttttagggggcagttttatgcagtttttcaagcggtttgggttgcttgaaatcaaaacttccaaagtatattgtcactaggaaaaaaaatattcaaccaaaaatttgtacctgttaataacaatgcataaaagtccttaaaaatttcatattaatctttattaactccataacaaggcataataatagtccatgaaaatttcataacaattcttataaagtccatactccataacaatctaaaagggtccttaaatagtccatacaagttcataattaaattaattttagattacgataaaataaacttcatacacaaaaattgtaacaaacaagatcaaaaataaaaaataaaaaataaaacaaaaacaaaaactttcagatttaaactttatataaatatgattagttttaggttttaggattttgttttttcttgttagttttagttataattttttttaaaaaaaaaatagcgtgtacgggttggacccgtcccttttaggctaacccgtacccg

SEQ ID NO: 52720 - DNA, 1029 bp, Cannabis sativa
ttatcgcagtctacagtatcccacgaataatgttgtgtcaaaactttattatttttgacattttataatctcattggagaagccctcgtatactttaattaaagaaataattatataaattattattaattatttttgtaaaaagtttacattcttacattcacgttttctctatatttttataatgttctataaataataaaaaaactatataaaaataacactctaataacaactaaaaataacatataaataacaaaacatcaatagcaaattaacaagagtacaacatatgaaaaaattatattttttataaataaaatcataaaaatcgtaaaaatatataaatttctgtacaattatatttttattattattttattacttttaatttaataactattataaaatattattaactttaaatagtgctagatcctatcagtgtcttatatcattctcaatctctgaattatttaaaaaaaaaatcttggtgcatttattttcttttcaagttccaccataaaaaatttcaaaaataaataataatataataatattggagtagagcactactatataatataagatgactcatctcaattaatacacaaactcattttcttcttctgtagtgtttggtttgataattaataataatgggaacgaagcttccagctccggcaccgagctttactccggtggctcatccggtgagagtggtggggtcagaattcatggcgccgtatccggtggagttggtgatgacggagaagagcttgactctgagagaaggtacttttacggtaacagacactcaacagaatctcatctttaaagtcaaaggctccattttcagcctccatgatcgtcggactctccttgatgccactgaaaagcccatactctctctagcccaaaaggtatattcatatcaacccaacccatttaattatagggtaaataccattttaaaccttgtgttttgtaaaagttacaaattggaccctgtgttttgttaaatgacaa

SEQ ID NO: 52721 - DNA, 977 bp, Cannabis sativa
taaagaagctttattccatttagtgccatccttgaacccaagaccaccataagctttaggaaggcacaccctttcccaacttatcaagtgaactctagagcgattatctttcaaaccccaaaagaatccgtggcaaagcttctcaatctcctttatcacactttgaggcaaaaggaagactctcatttaatagttccttaatcctatcaaagtagaatggattaattggacacgaccagcataggaaagatgtttattagcctaagaatgaagcttattcttcatctttttcaaaatcggcccacaatgctcaagtctccatttggttggtctaagaaggatcccgagatatttgagagggaactctcctatggaaagatttattttttgagcgagcgaaatcggatgagaaactccaccaaaataaacttgggatttagcaaaatttatggagaggcccgaggtcttgctaaaatcatcaagcaaagatttaatggcattgagagaaccctcattccctttacaaaagattactaaatcatctgcaaaacaaagatttgtaagtttcatttttttgcataagggatgatacctgaaatccttatctctggtcgctttctggatgcttcgagacagatattccatgactaggacaaaaaggaggggagagattgggtccccttgtctaagcccttgttcgcctttgaaagatccctgaactcttccattcatgagtaaagaataagacgtatttctcacacagttcatgatccactttacaaacttttcaagaaagcaataggccaccagaagattctcaagaaaatcctaattgaccgtatcataagctttacttatgtaaatttttatagtgcatcttggggagcaattcttccttctatagttcttcaagatatcctgaaggataagaatattgtaagctatggatcggcccttaacaaacgctccctggttct

SEQ ID NO: 52722 - DNA, 1019 bp, Cannabis sativa
gtatatttaactatcacattaaatcatgaaacatttatattatttttttattgtcttatatattaaaataataataaaatttattataaagttattagattttattttttttaataaaacagtaattatatataaaattattttacatcaaaattttgcaattgtgtattggagcacaaagttaaaatttggtgtacatttaccacaaaattactttttgtgccaaatataacataatttttacatctcccattaaagatggtctaatggtgatatgacacctagctagtatgatatgccttttagcatttctttaattataaatattaatataacaaattcaaaaaaatcaggagcgttatatagtatattgtaaagaaatgatgaaaaatataatactcatcacttattatctacttcgaatctatacacaattaattcatacacaatcagattggtcgaacaacatacatgaatgagagacgtcttaaaaaacctagactcatgttgcatatttaaccaaattatcttattaacctaataaatataataggcatcagcttatcagcttatgtttgtaatttgaaatcatatattttacaactcttgacttaaaaaaaattaaaataaaaattattaatatgatttaaatttgtcttaattaataggagttttgaatatttaaaatttatttatttttgaataaatcatgagatttattaattaataaactcgttcaaaacaatagaagcacttcagaagaacaatcctccaactgaagcacacaatcctgtagagaaacaagagtcttttgtcaagtaatgagctaacttgtatgcagatcgtttaacaaaacataactcaacaaaagataaagccaaaagtatattcctaacatcttgaacaataagaccaaactgtgaggacataaaaacattactttgaactgcttggccacacaccaaactatccgtttctaacactacattgtctcatggatgagtcgcaatccaactcaa

SEQ ID NO: 52723 - DNA, 1836 bp, Cannabis sativa
catagataaaacctaaacagtttttaaacaatgtgggacttttagtttgtttgtgtggtttagttttcaaacaaaataagaaaatgtgttagaaattaggaaaaataggatgaacattttataaattgacacataaatcttgtgctttcctttatattatatatagatatattaattaaaaatgaaaaagacaaaaatatcttttaaaaatctatatacagaaaataactacatgttctaataatgacaattttatcaaattaaaacattctgattacctatctttatataaagaaaataatatgattctaattttttttctagacaatttaataaacaacataataaattattatttccaattttttattttaaacgaatacatttctctcataaattattctaattccaattagagtttagtaaacgtattagcttgctaggagccaatctagcttgataattaaaaccccaagtggtggtggagcggtatggagtgtttggaaagtgttgttaggcatttgtttcaagtttcgaatcccaaatactcaaaaacctatggacctctcgaacagcgagggccaaaaattcaaaataaatctagcttgataatcaaatcaagtgtttgattgaagggtcatatataagagcttttttcacaaatatatcaaggttgcctgggtatcttttgcattttctggctcacttttttgttatttttattatgaagcaatagttgtgatttgtccgaacattcaatgttaaatttgaatagataggaggagcttcattcagcctccacttatgggtggtattatggccaactcatctttgtccttaacaatggctgagtcagttgtgtattcctcgttcaaagcaacaacgatgcaactcttaatctcttgtaagcccgggaaactagtcataatcttgcttaaacagtcacgagctgtactacctgatggaacctctaatggcgtctcagttaagccggtaagatctcgagctctggcaaagaataacacctttatctttacacttggattttcattttccatgtcagtacgacccaaattattgctatgcatttctcccttcatctatttgataattaatatagcatgtcagatacagaatcattgtaaataaactacagagctagagttattatatcatttgtagatcaaattacactgtatttcacataacaaaaacttataagtacagatataaagaacagatacatgagcttcatatatcttataaacttcaattaaaattccgattaatctattaatttccaaatatataagaagtaatttgccttccctgatgctaaaacgacaataaaaacaaagctctcaatggaagaagagaagaatggttataatagatactagatagtactacaatcaggtcgtaaattaaagactgtttgttgtgtacctcaaaagaatagatcagcagagtttctgattatgaaattgttcaactaaattaagtaaattgtacctgtccagaaaggaagaaacaagcaaagaaaagtgaacagagtgtcaaagtatgaaaattatgaagaccaaatccatcaatatgaatgcaatagccatacaataccacaaagggttcttggactagatttccagaatgacatacccatacaagtcaaagaaagtaattgattaagaagatgacttcataattagtaaattaatagcataaacaaagctagtggactcttttattttctgtatcattgaagagatcaactccaaaaaaatacatataactatatatacatgtatatgtaaataagcaagttgattccaaccatga

SEQ ID NO: 52724 - DNA, 1328 bp, Cannabis sativa
aatgttacattttggttacattttaatatatattcttgcaaagggtttatttgatatgatatggatgtatagtatttttgtttacttaattggacagtaattggttgttttctaggagacagctaatgttgttgagagcatcgatgttgtaactattgatgggaagttgcaaagatttaaaagagctgatctgatgtttggctaccgttcatctccctttcaaaggatgccaaacttggcagccattgttgctgtcacatttcggctgcagagctcaacaatatcgaggacaaagcttcaacaatacttagagaggtacgcactcacaaagactgaaaaaaaaaaaaaaaaagctcaaaaatatgcattcatacaatagactatactatccgaatggtttcccacgttgacggtcttaaaagccagcacactcctttaatgagggtagcacttgaacctcaagaactatcttgaaacatgtacctaatattattccattttgagagaattgaaaagcactatcagatttgggataaaaaataataaaaattatatgataaaaaatataaggattttacttagtgtgtgaagggggaaaagtgagaaatggttcaaagtttcggaaattatatttgtgttttacatattgactagtttcaactagcttaagattgtcactggtttttatgaacagaagaagagcatctcaaccaatcggagaaagaagtgccggatcagtgtttaggaatccatcagatttgggtattggagctggagagttgattgaaaaagctggacttaaaggctttagagtgggaggggcaatgatatcaaaacttcatgcaaattttttcattaatgctaatggctcaacatctcaagatatgcttgacctcattgctgttgctaaggacaaggtttatcagaaatttggtgtagagctcaaggaagaagttttatatgttaatcccagtaaagctgcttcataataataaactggttgtgtagaaaaaaaaaaggaaaatagtacaataattaagttgtaatttgttcaaccgaaaacatcattcaatcaaatagtttcaatgtcttttcttcaacatcctttgatgtttttgaatcttctgttaatttgttccttctaccttggaaaattcattaatgcatgccgtgatggccggattttccaacactatttctggtaagagctttggttatgaaatgggtgagaattccaatgggacaaaagagcaggcaaagagaaaccgagtgcctggtctctatatcgttttcctgtccgtcgtgaaacacttgcctgagaacaaatc

SEQ ID NO: 52725 - DNA, 1215 bp, Cannabis sativa
gtagctgctttgagaacatcattcctgacagaggtccagtttgttttgtagaaattagagttgaaaccatcaggaccaggagctttttccgaggggagttggaaaaaagctttttcaatttcgtccaaggaaaactcctcagcaaggagggatttgtccaactctgagagagagtttgtaatgccttgcagggccttattgacatcctcctccgaggggttcatggacgagaagagttggttaaagtgggattccatttcacgagtaatgccctcatcgtcagagacaataccgccggttgccaagtgaagcttttggattttgtttatgttcttcctgtgggaggcgtagcggtggaagaatttggtgttcttatctccttgggccaaccattgggtccacgctcgctgtttccaataagtttcttctttgtacagaagagagtcaagcctggattgaagctcttttatattccgaatggtattgtcgtgccaaacaggagcagaacgggcaatttccaggtccttctcaagcttgctaatgtgctttgtaaaattaaaatcctttttgtggctccaattgttgagtttcttagcacaagaggcttgggtagcaactaaattgaggatgggctcatgctggctcgattgactagtccaggactgatgaaaaacatggttccaatttgggtgcttaagctaaacattctcgaagtgaaaacgtttgctattattgttaggacgagtgcccggggggatggaagtgttaagttcaagggcgcgatgatctgaaccatagaagcccagatgagcaagggtggcgtcgggaaagatatcagaccaatggttattaacaataccccactctaatcattcttgaatgttttttggggatgcgacattattgttccacgtgagcaagggaccagttgggtcgagtggggagagattaaaggaatcaaggaaatgtctaaaatcggaggaagggcccctgtcgggatttcccccttgtttgtcgtgggaaaagagaaaagtgttaaagtccccaatgataagccacgaatcccgaggattacccctaccaatccaattcaggatattccacgtatgaggcttaagagaatcaaccggagagccataaaaacacgtaagatggaagaatacatttgtaattgaacacgaaacataacaatcaaagtgactaatagattgagaa

SEQ ID NO: 52726 - DNA, 740 bp, Cannabis sativa
gaccttcctgtttaatatttgccaacgttgtgtacgaaagtttgtacggcatcgtggcttggaagtgcgtcaagaacatgtctataaaagtctcccatgttgatgtggaggtctcgagtaattggctaaaccagtcgtgagcattatcctccaaggttgcagcaagtatctgatattttgccagctgtggtacctggtctacttctataatcatattaaatttatctaaataatcgattgggttagtagtacctttgtatttgagtgattcagacaggctgaagcctttcgggagtcgagcttgttgtacttcttctgtaaaaggcggtcccatggatcttgtaagggctttctctactgcttgattctcaatgctcgtaggaggctttcttggtcaatacctcctggtaaaataggattggcttgtgttaccaattgtatggcagcaactgcgactatgttagccaggattactacctctgtaatcgcaactggtgcatttagcgggttgactagattagtggggttatttacgttctgtgtgctttgatcgcccacctagtgatcatggggctcgtcatcatcgcgattccttggtgtttgggatcacaccctaaaaatttcattgagatgatcacgaagatcaccgctataaacatggtaccttcctcctcgtcgcatttcaaaagaaaccgacctggtataaacactagggggcgactattagtagaggaagaatg

SEQ ID NO: 52727 - DNA, 1170 bp, Cannabis sativa
  modified_base (1048)..(1055): a, c, t, g, unknown or other
ttacaaaaaatagtgccttatgtaattattccttttattattcaagccttctctttctagaagcatagaaaaatggggtaacttgaaaaataccacttttattaatcaattgatcaaatttacctttaattttatatttaattgaaacatatctctttttatatgtattgtacccaaaataccttgatataagatagtcacatggagagtatcttgaagtgacaagagtaaaattggtacaatatttaaaaaaagaggtaaaaattatgaactttaaaaaagagggtaaaaataaaaaaggataatataaaaagggtatagagtgtaattttctttagaaaaatttccttaaaaacgaaaaaaaaaaaaaaaaacaaaaaaaaaaaactcttgaaattacacttacattatggatcttggcccacaggcctaggcctaataacctgtggatgtaatcatagatctatgcaaataattaaaaaaatttacacaaatacacaaatttattaactttttttctttttttttttttactgcagggtggaattttttttttcaaaaatactgcgtaagttttatattgtgttaagtttttactgttattctacggttattttttagttgtttcactattgtttttagttgttctgttttgttattttagggttattttataaaaagacagtatttttgtaaaaaaaaaattgtatggcagtaaaattgtaaacttttacctaaaatttaatatttttataaaaactctaataaataagcgagatttgtgattcagatcactcaattagaaataaataaataaataaataggaagatttgtaattctatacttaaaaataatgggaaatttacatggtatactaacttttgctatttttttacgaaaaatactaccagacgatattttttacttttttactatgttttttataagtttcatattgtagtatactgtgttaagttttcactagtgttttttagttgttctactgttgttttgagttattctgttttgtgttctactagtgttttnnnnnnnnacagtatttttgaaaacttttctgtgtgacaatatttttataaaaattaactcaaattcgaggagttttataagttttccaaaataattacaaaaaatacatccaactaacttat

SEQ ID NO: 52728 - DNA, 1545 bp, Cannabis sativa
aaagcgtatgatcgcattgaatggggatttttgaaagctatgatgcttcgtatgggcttccaccctcggtgggttgatcttatgatggcaacagtgatgaatgtgaagtatacggttgtccatggtggtcggagtatgggtcctattactccgactcgcggtattagacaaggtgaccccctgtcaccttacctattccttctttgtgctgaaggtttttcttctttgatcaagcaattcgaaagaaatggtgaattgaagggttgtaaagtagctaacggagctccaactatctcacatatgctattcgctgatgatagctacatttattgtcgtgctactgaggaagaggctcaaaatgtccttcgtttgcttaatttgtttgaagctgcttcgggtcaaagggtaaactatgcgaaatcttctatcttttttagtgctaatactccgatggatttgcgagacagattgtgtaatcgtttgggaatggtagctgctgatgaaaatagcttctatcttggtcttccttgtattatgggtcgtaagaagacagctattcttggctttcttaaggaaaagatggaaaaaagaattcttagttgggaaggcaagtttctctctaaagcgggtcgcgaagtcttgctgaagacggtagcccaagcactcccaagttacgctatgtcagtatttcttattccacttgaaacatgtggagcacttgagaagctcatggctaagtattggtggggtaattccaaaaaagctagaggtataagctggatgagttgggatcgcttaagcaaacacaaaagttcaggagggattggttttaggaatttacatgactataacttatctcttttgggcaaacaagcttggcgattattaactaatgagcagtcccttgttggccgaatttacaagagtagatatttccctcatggttctttccttactgctgagattggcaacaatcctagcttcatttggcggagtatctatgcaacacaatcgattgttgcagctggagctcggattcgcattggcgctggtttcactgtgcctatcttgcatactccttggctacctgacccgactgatccatgtgttttaagcacacatccaggccttgtgggggctacggtcaatcagcttatgaatactgagagggatcaatgggatttggaagtacttgatgatctttttcagcaacgtgatcgagagcttattaaaaacattcccattaatagtcatgaagtggctgatgtatggtattggcaacatgaaaattctgggttctactctgtcaagagttgttaccaatggctgcaagcttcgaaaggaagatggtccgctgatatggaatcgaatctttggcgatctctatggaaacttaaagtaccgcccaagggttattcattttgcttggaaagccataaccggttgtcttcccactcgttctcagctctacaccaaacatgtacctgtgcaattgaattgcgtctgctgcaatgttgaagaggaatcgatttaccatgtgttagt

SEQ ID NO: 52729 - DNA, 979 bp, Cannabis sativa
taacgaccttaaaagttcgggggccataatttggtacatgtcaaagttcaaggggcaaaaatcttaattagcctaaaaaaaacaaccgtcagtatttttatacataaaaaacactaaaatcggtaacgatgttatggcgtaaatatctaaatttaatttctgattgcagatagatacataagtttaatttttgacggtaacaatacctaagttatattttattatttttgaaactttcgtaagtacttgaccgttaagtatcaagctattatctacatatcagtttattggtatatttaaattaatttttaaataaataataaaaatttaatgacctggaccaattaaggactgtcgcgtgaccattaacttgacacttaacaactagatatctacaatagttttagaaatataatttcgtattattaccataaaaaattaatctcaggtatttatctgcaaccggaagttaaacttaattatttataccgtaaattactcaagaataaataataaatccgtccttttataaactttgtcattttttggtatttataaaaatatgttttatttgtgatatgtataagcccggcccaagcccaaacccaagcccatggcgaaatcactcttttggagtcttttcttctcactcagccaaaccaacaaacaagtcagacacacttcgtcttcttacctaatgctctcctctcttcaatcttctctgttgttagggcttcactgcgatttcagccacgacctttaaccatcatcgtccctgccatttcacgctctatttatcaatgtaagttttctgatttttctgtctgattttatcttatttatgatgaaatcttctgcatctcttacaatcttcaaaaacattattcatttgtattgatctaaatattttcagatccacaatctgagacaaacgaggaattaaagttgaaggaaaatcaggtatgttgttaattgttaa

SEQ ID NO: 52730 - DNA, 1065 bp, Cannabis sativa
tttgtctttcatttctgtttttatatctgcaggactgcattttttttcaagctcaagaactttaattttacgaaatctgctatcaactttgttgttgcttgtcgttgatcttcaaatcttatttgaactgtacatgtgtgttcttcttgatcactccttattatgaatgtttttgccttctcattttttgaagattttaaactccatttgccatttgagtccaaacaaacaacattgtattctttacagcaagatttctctaccttgtattgaaatattttcttaattactaagtagcatagtgcacttatcaatgtatttttgtccttgttaatttgtcccttttttattgttttgtgtcatttattagtgatgataatcatttctatatttttgacttcttcttccttcttgttgttttcaagttgctgtactgtttatggagcaacaatctttgcgtagtcagtgaagtcataatattcatcttctgtagaagttttttttgttgtttttttggttgttgcattgttgactctgatgttaaagtcatagtgtcgaccaaaataacatcatcttgaactgatccaattgttgttgtacatagttgtttgtttgttgttgttgttcgattgttacaaggatgttgtacatttgcttgtgctgagtgattgtcatatgttgtcatcatcttattgttgcaaatcattgattggttaactgtcataaagtttgtgcctttgtgttgctgattatgttcacacataatgggtactgtgtgaaaccaatttatatgcttaatagctttaagagaacagtagacttttgtcatccttaatttttagtggttggcatccttcttttagttggcatttttattgtacttgtgttgtatcaggattgcattgtagttcatccatcattattttcactagttgatcaaaaatacaatatcttgatagtaattctccactagattcgtaatcaacatagtgtttgctgtcatcccaatgaccattgctctatactaaaatttgcaaaggttccatgtcttgaaatttgtgtatt

SEQ ID NO: 52731 - DNA, 1578 bp, Cannabis sativa
agacagaatcatgctacttgaaattctacattcctgcatttcgaacctgcataacccttttgcctactctgagaggaaagcattctactcttgatcttttctatagcttcattggttcattgttaccgatttttacctaaattccttatcccagtgaattggagatctacattttctaccatacaacatctcatagggagccatccctatagtactcggatagctgttgctgtatgaaaattctattgatggtaagtacttgctctaggagccttcaaaatccatcacacaggctcgcaacatatcctcaagtatctgaatcgtcctcttagactgctcattagtctgaggatgaaaagttgtactgaacctcatcttggtacccatggctcgctggagactctaccaaaattttatgttaaaccttcgaaatatctatatggactttggagccccatgtaacctctctatttctttaatatatattttgcgtactgatccactgtaaaggttgtttttactcgtagaaaatatgtggatttagtaaatcaatccaccacaacccaaatagaacgaacatccacgtggttctaggtaacctaaccacaaaatccatggtgacatcttcccatttccactcaggaagagttagaggctgcaacaaccttaggtctctggtgttccaccttaatctgctaacaagttaagcaccgggatacaaattctaccacattattcttcatcccgcaccaccagtagaagggttttaaatcctaatacattttagtagtgctaggatgcaatgaataaggagtggtatgagcttcctcaagaatctcatttctaagttctacattgttttgtacacacactctggttttgaataacaacatcccattgtctgacactgtaaaatctttagcttgaccagctaaaacctcttctcggatcttcaccaattctgaatcagttaactaagccgctttaattctgtctaacagatcatattagaatgtcaaattattaagttttcctacaaaaaacttaatgcctgatatgatcatgtattttggtaggtggggtgaaatcataatcatactagttacttactcgagaccctttctgctcagtgcatctgccaccacacattagctttctcgagatggtaaaggatttcacaatcgtaatctttggccaactccaaccaccgcctctgcctcatattttaatctttctaagtaaagaaatattcgaggctcttatgatccgtgtaaatctcacacttttctctgtacagataatgctgccaaatcatcaaagcaaaacatatcgcggtaagttctaaatcatgagttgggtatcgttgttcatactcctttaactaacaggaggcataagaaattaccctatcagcttgcatcaaaacacatcctagaccctgtcttgatgcatcacaatacaccacgaacttctctttatccgatggcagggctaacaccggaactataatcaattgctatctaagctcttaaaagcttgcttcacacttgtctgtccacagaaaccgctgattctttt

SEQ ID NO: 52732 - DNA, 715 bp, Cannabis sativa
gactacaccaaatcaagtttctagacttgccttagttctagaaagtctacttattagatggtgattactctgggagtggagcaatgatttttgagaagtgtaaatgtaacgccctgtccaacaaggacgccatgtgtgtgtgttttcatcaaattcttatttatatacaatataattataacaaaagtgtgggtagttaaatttaacttttttttataattaaaaatcaaacatataaaaacttcattataaaaagataattaatagtgactacaaggtccccagttttcaaaattgttacaaactagcttaatattactttacaacataaacattgcattctcaaaatacaataaaaaatagagcatcttgttcactaggccgtgccactgcggctgatatgtacattgctgcttcgaccttgaactcatggctgctggaacctttactttccccttacttacaccataacacccatgagtcacagagactcagcaagaaaagtgaataaaataataaccagtaatattcagcaattcaatctcaaattaacttgcatacacatttaaacaatattatgaacacaatcctcgtactttataaagtacccctttaccactcgttaaccacgagctgaatatgccactatcgttgcccgatgaagcaaacaataagtaagaaacctatacacagttttaagagtaattactcataa

SEQ ID NO: 52733 - DNA, 788 bp, Cannabis sativa
taacaaataattcaatcattcacttcacggatgagaaagcaaatcattcaattaaacactagtcccttctattagtaatgtacttgaaaaaatggaatatctagtatacaaaatgcaaacttgggttttcttttttctttttcaatgttaattatactgatcctgattctcctatacctatataatattcatttttggagtactggctctcccaatttgatctttataggaaatctattccaacctacatatcaatcatcagcaaattgtagacttttccttaaacctgtcctaacctaatgctagattgatccctacactgaagaataggaagaatagtaaagtgaaggggaaattattaaaggcaatgggaattgagaattggaaacctggaagatctggtgaccagaacgcggggctggtctgaagaagataaggcggaagagagtccttcgctcaaacgagatgcttcaaatgatgaagacgaccccaaatttgagtcttttgtaacattgcgaatcatcttctgtattccctccatagctacaattacaaaggtcacagcataactctccggtgactgactaagttagggctgagctaacaggggttttaggatccgaattggaatttagttgccctacgtccacttcgtcgtttctttaatgaaacggtatgtcgtttctatttatgaaaaatatgaataactttatatgtctataatgtctcgaataatttttcagttaaatattttttcatgtattgttatttaaaatattttataaaat

SEQ ID NO: 52734 - DNA, 518 bp, Cannabis sativa
aaaaaaaaaaaaaaacttatataatagataaaaataaagagaactttagaaagaagcgagtgaaaaaggttattttttatttgttatttattcaagaggagtatatatatatatatctactctatataaaatgtagttatgtaacaaaatttttgatttgtagatattttataaaaaaaaaatattaattttattatatagaattaaaaataaaaattacatctatatatataattatatctatatataaaatatatatatatttaaattttaatttaacaacaaacctcttattttaaaaatgattaatatatctatagtaggtacattagttttgttcatatggtagagaagttttcacagccctagatatttgataagatagaaataaatgaataagtgtacattaataattgacattaggctgtattagattatttctttcttttttaataatatttctgaaataaatattcttttagatcaattaaatattatattctcacttctatcttctt

SEQ ID NO: 52735 - DNA, 1124 bp, Cannabis sativa
caaaataagggtgtacctcaatcagtttggaagagttataacatatatttttatgatgggttacaaatatttaattgtaactcacccaattagaaattaaaaaaaaaattaactcgcacaataatttcgtcagtttgttcaagttaacccatcaaaactaatctttattttttttaagtattattattaattattagtttttaatattcaaataattggatttaaaaatttaaattaattttaagaactttaatataaaataaatatactagagcaaacacttaataatttataatataaaaaacagtatttaaataatttttgttatagttacaatgttgtgagtgtcgaagacaagtttatagagggtctaaagttttatttaacaaaacaaatagttcaatcagtaacttttgcaaaatataggattcaaaatagtatttatcgtttttttaagactatttttatttttttaatgaacaaagaatgttttttttttgcagtccacaaaattataagtacactccaatatcaaataaaataaatttaaaaataacttttaatattttttatgttattttacgttgattttcagaattattttaactttcaaatatatatattttttaaatatttaaattatttttatttttattttgtatgtattttttttaagaatataagaaggaagaaaaaattaattaaaatgttagtataaattgaagatatataaaagttattaaaatgaggtgtctttataaaattttagggtgcaaataaaactacccttatattaattcgaaataatacttcaaacaaaaaaaacaaattagatagtatgaagttttctaaagtatattcataattagaataaataaatgagagagaataaaatattaagtaattgaaatcattattttattatattgtttactaaattgatggaaaagtaaatcaaaaccatattgttgtgtttatataatatggaaagataattgaaatattttaatttgactaaactactcttaataaaataatatatttatatgtatgaatattattttttggctaattagtaatttttcccctcgaactttgacatgtactaaatcgtgccccttgaa

SEQ ID NO: 52736 - DNA, 552 bp, Cannabis sativa
gactcgtatcttttttagacgaccggtcagatgactcatatcttattcagtccgttgagatgactcatatctcagtcggtcagtcgggatgactctcgtatctcagtcggtcagtcgaaagactcatatctcagtcgatcgatcaggatgactctcgtatctcaattggtcactcagatgactcatatcttagtaggtcggtcggagtgattctcataattcagtcagtcggtcgagatgacttgtatctgtcaatcggtcgggatgactcgcgtatctaagtaagtttgttaggatgactctcatatctcagtcggccgatcgaaatgactctcatagcttttaagttgagaatacaagacacatttttcaccattgttgcactataagttttttcttaagtttcactttgatctcatctatgttctaaccctccaacattcatactttgagttttcgacgactaacattgttgacgagtttacaccatcaacagtttgacgcagcatgtagaaacaacaagctcaggctacaatttattccttaatatcg

SEQ ID NO: 52737 - DNA, 1093 bp, Cannabis sativa
tgaagagcagggaatgtacagggataaggttgactttgttatccttactgatgtgtcctggtttgatggcactgctggactagcggtggtgatgattaatttgtcaaacaattcttgggcttacagtactcaacaagtcagagcagagtcggcaatggaggtggagactcgtgcaatccactgtgatcttgagtgggctattcaaaactcttggactaaaatccatattctctcagattgtcaagaagtgcttcaggcgttggaccaaaagaaatgtccccttgattagggttttttgaacttatctttgttggttttagatttagttaacaaagattcggattgtagtttttctttattaagcattgtttgaatatttttgcaaatggactagcaaagagagctagatcagtttctagccatgtgtctggtgtgttttttttttttttttataaatcatcaagattattattgatccacaaactattcaatacaaatacaatgaaagagcacctttacatgtaaagacctcaacaaaaacaatttcacatttttttttccaatttaaaaacattctctatctttttgaccactctttttaggccaaactagctctactctatgcttaatactattcttaattctttgtacaatgatatctttgttttctatgtggttgttccacacaatgtcatttcttacaaaccaaatggagtagactaaatgtgcaatagctgctgccaaaactcttttttttttatcttgttgattttgcttttgtgtatccatttgagaagcttgtggatgtcatttgcttgtgttctccaagacagccaatccttgattttctccacacaatattgggctaatgggcacctgaaaaataaatgttcagatgtttcttcctgctgcatacagatcggacattttgtatcagctatgttctgaaattttgtgagccaatcccttgttttgagtcttttctgcacagctagccataagataaagctatgcttggggatgttgaaccttccccaaacttcatcacaccaatgtaccttgctttgaattggacatagcaagctataccctg

SEQ ID NO: 52738 - DNA, 1226 bp, Cannabis sativa
  modified_base (422)..(429): a, c, t, g, unknown or other
ttgttcttacaactcagacaagcaatcccatatttgacaaccttgattggatgatcttctcacttatgtttcattactctttatggctagagattagagaatataatattgttcttgtccttataacttaaaatgaacaattatacttattttatctgtttatctcttgctgaataattagtaattgttttttatatgctcagttaattcgcattttgtttttagttagatcttattacctatacatacagttatatttgttctgactagtacaaatgcatctttgcttgaatagaccattaaccatttttatttgaaaactttatgaaatatatgtagtaatttaaaaaaataatgctacaaaatcataggtagttgaccaaaaatgaaattttaaattttgggataagttgaggaatacnnnnnnnntgtatccattaatcaaaaatactcccatattatatttcattaaaatctacctacttttatgagtgggttgtccaatataccattgccctctatttaagtgtagcacatgattacattaatttaaggggtataatagggatatcatctataaaagtgagtatatcttaaagaatatggaaataaaggtaaaaattaaaataaataaagtaaagtgggtatacaatgcaatttctactttttaaatatagaatgtccacaaagtataaagataataatactataaataaattaacatgtatatttaaaacctacccaattctcaccttctaatttttatcaaacaacaaaatggagaataacaaaacaagatgatcactgaaaaaaggttacaccagagctcactaaaaatgttttcttcttcttccgtggttgtttcaaaatattgtttttgttttcaaatctagttttttattctcatttatttatatgacctttatcttatatatagccaagtaacttgttaccataacgagaggaaatttgtatgttgcaatttttttttttttttattcattttaagattaagaggtaattttgttcaaatttcaattttgatttttattagcataacatgcaatttttatagtggtaaccagttaccattgcatcactaagaaaaagtaaaaagaatattttaataggagtaactagttaccgaccaccacatcactataaaaagaaaaaaagaaaagaaaaatattttgattgtgttcactagttacttatcagcacattac

SEQ ID NO: 52739 - DNA, 2039 bp, Cannabis sativa
aaaattggctcacaagaccgaataacacactttatttgggaattgattggttttattaagtgtgagctacaacaggatgttgggagagctatgccacagcccaggtggcatcatgaccaagattcgctctcgctattagatcttggagcattgccttattttccgggtaacctcacttataatggctctaagtttatttataatgttctgctatgtactaatctcagccgtgatttagttaagcatagttgtactaattcttgttcttgttttggttgagtgatggtgcacataggccatttgtcacgacctgagtcttaggctatgacagacatgtaatacccataacttagatagttaaacgtcacactttaacctttgttataaaataatacttacaagtgatttttaatttatattacaaacttaaataaaatacacatttaaaataatagaataactcttataataaataaaaaataattgcaataaaataggaccactcgtcaatatatatagaacaataatattctcacaaatatgtagtcaccaaataattagatttaatagtttgtaaaactccaaaataatacttgttatgcttatattttgagccataaatacgaacactacacgtgaaaagttggatacaaaaattgtagaaattaagctcaataataaatagctttagtcttgcatatgacattggtagtaagatcgatacataagcaacatatggcgagatgataacaatagaagtcttcttggatacagtagatcaagactgtattgctggaaatggtagataatgagttctctaaagagcttgcaacttattgacacatgtactcgtaagtttgttgaaaaactaaaagaattaagcataatataatttatttcaaatgactaagcctaagaaccctggaaaggctataatgaggacaaacatttcaaatatcatcttccaaaatacaaccagctattccccgaacactatcgaataatacgagccatttctaggatgcgtcatctcagtaagagcagactgcttccaattaagatcaaaagaatgcttccacaaattttggaactaaaattgtaaactttaactaaattgaggcaacaagaaatccatctaggcattattggagtttcctttttcccttataatttttcatttttgtctcaaaaagacttaaagagcactaaaatcaccaaaaacagagatttctcaatatttctcctaaaaaacaaaaatcaagcataaatctacacaataaaataataaaaatactaaaatacacactaaaatagactataaagataaccctaacaataattatcatataaacaaaatagaaagaccacaaataatcacaagagacaagctactcgtgcatatcacaccgtccactagacccctaactctcaataaaatcataaaaaacaacatccaaaactggatagttgcccttgataaccactataatactggggctcaaattcaatttactttctgtacaaatcctacatctttcacttacaggtgagtatacacttgatctacatatgatgataaagagactaggtcatgaaacaataatatacacaaatcatgatcacatggctctcatcaatattaagtataaacaaaaccagacaaataaataacataacaaaagaacaaattccttttttattttagaaaattcaactacataacgaatgtaatttgaataaacctaaaaagttataacctagataaataattatataaaaatatatttggcactcagtttcccaaaaattatactaaaaaaaatattccttattattataatattattttttttaaaaaaaatagaatattatttctaatattatatattaatttactaaaatcactacaattattatatctaattaatgatatttagtgcgtttaattttaattttaatgtgtgtttaaatttataatatttgtaatattgtgtaatttaaaaaaaaaatacaagaatttaataattttttacttaaat

SEQ ID NO: 52740 - DNA, 854 bp, Cannabis sativa
tttcacatatttttaggaaaaaaaatattggcagcagggtactttgttccagaaattaattctgtcacttcatgaaacaactctaacttatcacataattattgagcattttgccaatcaatttccaaaggggcacacctcaaacgcagctcacgtagccttggacgttcaaatactactgtcttgtacgataagcagtgctaagctaaaaaaaattgaattccaccttgttacacaatcaagtgatatttttttggtgtataatactctaacttgacaagcactgtcctcaaatttttcatattttttggtgtgcccgaccaataagcaatatcgtctcaaattttgtcaacactatcaccaataacagataagctatccttgacaattagatttaaaatatgtgcacaacaacgcacatgtagcaactttcccttcaaaataaaactattaggctcaaattgtcctttcaaaagctcaatcatggcatcatttgcagtacagttatcgagagtcactgtactgatcttgtcttctattttccattcattaagacaagatcttagtgcctcaagtagtgctggagcatcgtgagaatatgaaagatacttaaaactcaagatctgactatgcaatttctaagaatcatcaataaaatgagctgttacagccatatatctcctcttttgatgattcacagtccacatgtcactggttatggctattctgctcctactttttttccaaactttgcctgcatttttctttcttaattatatacatttttatgatatcagacctaaccgtattccttgacactatttgaaacatgggacacaaagtacttgaatatt

SEQ ID NO: 52741 - DNA, 1613 bp, Cannabis sativa
ggagatattttgataactataatttgatattactattttaataaaatacttaaatttaaaagatctacaaccactttaaattcaaaatcaaaatttaatattattaatataattttttttttttgaaaatttatgatattttgtttagtaaaatactaaatatccagatatgtacaattattttgaattcaaattctaaatttaatagtattatattttattggttttaaaaaatattattatatatttatttatcctaaatttaatagtattatatatttatttattttacaaaataaaaaggcttttaatttttatactaaaatactaacataattttttataataatttatttttttaatttttcataaaatgtgagatattttaatatacaataaaattattaatctcacaattacatttacgtaaatttttctttattattttgtttttttgaaatcttttaggaacatttaagataatataataaaataaatgataatatacaaattaattatttaaataacaaccctaaacaagcatatatagatgtgcatatatgtgtatcatctataaaggattgtatgtgtaatatttataggtcatatttttttttttttgaaaaaagtgatcaatatacatttatattatttaggtttatgacttaaaataatgctagctctttattaaaattctaaatcaaagaaaaaataatctttgataataactttgaatttaaggacaagtgagataaagtaataataacgggtttgaatatagtaacaatgtaatgaccgcagataattaatactttggattattaaataattagggttatgcatgagatttatttattatatatataatattgcatattggtaacaaaaattattatttaattgcaatatatgttaaatatgctatatgtaaatttctcaatttctgtaattgtgttcggaagctgtggaaagcgacgttggacctttagagagtcgtattttatatgttttagagaatttagcggggttttggaaatgaccaagctacccttggttttattcctagcatttgacttttgtctaggtttgaatgggtattttatttactagtattgtcttttttattttatgagattatatataataataatctgatttcttttaattgaatttaaataaaaacaaagggaaaaaaaaaagaaggaaatctagaaaactccattactttcaccatcaagctctctctttctctctcttttctttcgaaccaccaagaggctagctgggaattgggtttttctcagctcaatccagtaagttttaagatgattggaagcttcaatctaaggtatatcactttactttgctttcttggtcttttcctttagttcaagttagggttgatgcatgtttggctaggaaataggggctgtgtgtttgggtttaattttgtgttattttctgaagttgtgtggtgattatttaggttgttttaagctaaatcagatggctatatttctatttgaatcaagttggagcttttgagctcaagttgaagctttagtggtgttttcataatttgagttgtttattgtagtttgatgcttgaattg

SEQ ID NO: 52742 - DNA, 979 bp, Cannabis sativa
tatttatcaattttaaaaattaaacaattgatatatatttaaaagtctatttttcacgttttctttaaatgatttttttttttactttttttaagttttttttttattaagatttttacatctattatatctattatatatatatattcaaaaaaaaatatatattattttaacaaatatatataaataacggaacttatataattttagttaacaataatatatatagcacatatcttacaaaaaaatatttcaacctaatcaataattattcaaactatatatggggtatctattattcttattaatattaatattaatatgtacatgtatattttcattctttctttcatgtttcttgattatagagggcatcaacacattggtagagtcataatttttgatatagagaaagttgaagtgatcaatatagtggtggaaaaggtttattgatagaagcttaatgtcagccaattaatggtaatttctttaaggttgatgaatatagtgaattaaagttttactcatacatgtatattcttatcataatagtcatcaattcatacattttttttttcaataatacatgcattatcaatattatatatattttgttgtattataataagatttttcatctaatattctataaaaaaaaaaaaaattatttataaattttataattcgggtttttcactctaatattaagtttataatattagggcgccttattattgtaattaattcctttcaaaaaaaattattgttaattgattatatatatcatattaaatattttaaatttacaattttcttaattaatgtctaacactaaatactatgaacttacatggtacttttaaattataatttactaattggtgactataaaaatttaaatataaaaatatttatttataatttaataaaattgttgctaattctctcccactcattaaacctttttatttattttttt

SEQ ID NO: 52743 - DNA, 1462 bp, Cannabis sativa
ttagattaaattaatttttgataaaatacacttttgcttttctaactaagatatggaccataaaaaccaatagcttgaactttgagttgtgcctccctcatatgtggcaagccattccgtacccactcatacaagtgtcccggtcgtattaggctctcaatttcatccttcaaatgtttgcattcattagttatatgttggatgtcattatgatactcacatctcttattggggtctctctggatactgtcttagaataagagtggtggtttttggtagtgagtgttttgccgtgtggccatgtacacacgttcttgagtttccactaactactaagggttatatccggatgccttcttcaccctcttgttttcacctcaagtgcttcctttagacgatctcttacttcgagaggcctgtggggttgttactgcactcgccgcaagcaaagcagattgagcaggatattgtgagcatattctcagagctaatttatgactttgcaacccataatctgaatgggttggggtagcaacaagattttgtgagtaagtcagtggtgcctggaattgtactaggtgccctaccagcttggggagcaacgggatgcgagcctctgggaaatcgtatcccagacgtaaacccaggtcctttggtaggataataagcttccgaaatttgtaatttgcgcttcttccaagttaatgtatttctgagcccttttttaaaagtcttgttggatagccgcaccttcttgctggagctcattctagaaaggagttcccatcaagattcttgcctgtagcatggccaattgtgcctatcgtcaactttctttatcttggaggctttttctttgaatctcttaatgaaattctttatggtctccaaggatacaaggatagtttcttaatgttagttagggcactaacttcaaggtttatcttccttgtcacgacgaactgtctcctaaaattggtttgtaatttgccctaatagtctacggaccctagttctagcttcttgaaccattcttttgcagatcctcccatagtgggaagcataaacactttgcatcattactgaccttcaacactgtcatgactttcttgaaacgagatagatgatcgcttagattagtgtctcctgtatacaatgccatctctagcactttggtgttttttggaagctctactttgagtacatttctagcacatgactccgggtcctcgtaatcagattctgagttgtcccctttttacctacatgagactttcactattccttctggaggatagcgagttcaactaaaattccttcattgaggatgctctctaaggctgcagtgattttcctttggtcgagacgtgccctgaggtcccccgtgcttggcattaagcttttttcataaatcgattggaggatcccctttcacagaccctcttctttcccctaatttctt

SEQ ID NO: 52744 - DNA, 1276 bp, Cannabis sativa
  modified_base (739)..(739): a, c, t, g, unknown or other
tttgagtttctttctgatgaacctgaagagacggttgtgttccaagattttcctcagtttctttaggttaaatctcctaagagttctgagtatatctctgggttgtctcctggcccttggtttgcgagccgcgagctttgcctcgtggatatcttcgcccaaggtgaggtttcttttgggtttcattcttatgcccagcctttactacggctatttcacgatctaactcggcattacgcatgtttgcttcctccaatcgacgccaaagatggcaattttctaattccacgattggtatgtacctggttcgctcgtaggtgtcatcctcctaaccttgttaggaagtgaccggttgttgttgtcccaaggtccatcaagacagggaccccgataccgggttttctaggggcttgcagtctattcatgcgataattcaatggatcattgaggactccatggttctttcccagggcgatgactgatttcttcttaaggatcattatctttggcatcatccattacttttatgtcatgaggctttttctgagctttttcacagaggctctcaatgagagcaccaaactgttaatgcagatattcgttaacaaaacttgagcctctcagtaatgatttcatatagtaaaataaaagttgtaggaataaaaatatgaacatagggttttttacgtggttttgcaattaaaattctgcatagtccacgggtcaatcttattcaganttctgattgttttttagggcctctcttgtatgagttttttcgtcccctttttcatcttgtctaccactatttataattacatagtgtgcagtaaattacaaaagttgacattaatttttaaagcaattattccctcaaagcatgggttttgattacaaattaggctacgtaaatgcggtttttatttataatccacacagctgtgagtatcccgcttttattgggccgagatgaacgtatatttaaggatatacggtaagccttatctcatggggatgcctcgctaggaatggagccgagttaactttgatggcgaggtgtggatcctcatatgacttcccgaaatcaatatttctttaattctaataactacattttctggtgtcgagatgttctttctcgcatgcatgccatcttcaagcgagatagacacctcactgtctgtcatcttgatccaccaaactgtttatacttagtttttataccgtgtaatatacgctaagtatttttattgttatcatttctcttccacgcgac

SEQ ID NO: 52745 - DNA, 986 bp, Cannabis sativa
attcaacaagaaaaaaaaaacactcacacaataatcacgataaaaaaagtatttcaatcaataaatgaataataaataagtaaacaatagataaaagcaataatgtaaacaatgataccagaaatatagtagttcagcatagctccgtctgcctagtcacaactagaaaaactccctttatctttgctttttgtactggtctatctttggttaaaaaaaaaactcaaaatcaaagactttttaggcgatgacataggtttcaaaaatactggaacctatgtcttcgattattataaataatcaaagatacaggtatttattttctttaaaataattgatatttttactttcaatcgaagccaccgtttaacgtcgcaaccgccaagcctcaaaccccataaaatcctaaattcaaataattattttttttttactttaaatccacttaaccctacgcttatgtactatagtaataggtctttaacaataaaatctttagacaatattatttttggattaaaaaaaatcaaaatacaaaaaatgtaaagcaaggtaaaagacatcaaattatagtaacttatacctcaatacaagctaaaagacaacatcaaaatctttaaaatcgatgccattaattgaccgtcattgtccaaaaaacctaaaaaatctatcagcctaaacgtccttgttttccctcaaatcctaaaataaattaaattttattgtgcataagtatttttgggtgaggaaactagaggatgtaaaagaaaaataaggaaaaacaatagtgtatggagaaaatagatatttagaagcactagcagcgattttttcattaagagatagctggtaaagaaagaagaaatgaggattttagatatgagattatagtttcatagacctatgttatcaattattatgtaataactgaagaaataggcctttatgtgtatttataggcgatttccacaaagcaagattgtctt

SEQ ID NO: 52746 - DNA, 871 bp, Cannabis sativa
aaagagctatgtttcaattaaatataaaattagaagtaaatttgattaatttattaataaaagtagtatttttcaacttacccctttaaaaaatttacaaaagtgtggtatgatttctaaattttattttatatagttttttttttaacaaaagaaagaagattttattcaaacaaccaccaaacaagatatataagatatataagacagggcaatcccaatgaacgattcaaaagttatttatcatgtaaattatatctttctctctaacctagaacttagaaagattacaaaaaacaattatagctttaaaactaagcttaaccaaatttctaatggctttagccgagtaacaaacgtcatcaaaactacaattgtttctattacaccaaatataataaactacaactactaaaattgttgaaactatatcaccaatcaagttccgagcatcacaagacatgataatccactcatctagattcgagggccaatcaacttgtcccaattaactagtaatttcaagaatcactttcttagagtaagtgcactcaaaaaacaagtgagagtaagattcattaacttcacaacaaattgggcaaagagaagactcaaccgaaaagatctttgccagtaagtctcgagtcagcaggttatcattcaaggtgtgtcacaatatgaatcggtgttttgggaccttaaccttgtgccaaacattcttgtgatacgaaactttcgaatccgatataagagcgatgtaaaacttcttcactttaaagactcctaaaattcccgcatcgaacaaagcttgtttgtttattttatctcaaaaattaactagtttttggaagtacaaactaatgtcttgcct

SEQ ID NO: 52747 - DNA, 1752 bp, Cannabis sativa
  modified_base (445)..(486): a, c, t, g, unknown or other
aaaattttgtaaaaccgtagtattttcgtaatttttttttcttgttatttttcttgttatttttgtgtatttgtgaaataattcctaatatttaattaatataagtaatatcttttttttttttttttgatattttgtagtttatatagagttaatttatgaatgatttgcatttgcaataagattgatgttattatgttgttttgtagttgttttaatgtgacttttaaaagctttttttttcaatattgtataactatttttagttgttttttagggataatttcataaatacacaaaaataacaaaaatacagtttcacggaattttaaacattttttacgaattttttaattttatttacaaaaaatacggtcttcttatgttgtattcatgttaatttgttgttgattttttgtcatatgtatgttattttttgttgttnnnnnnnnnnnnnnnnnnnnnnnnnnnnnnnnnnnnnnnnnnttgttttcgtgttgtttttacgggaaactgtaaaaatgtaaaaaaaaaattcattaaacgtaaaaatataatttttttacaaaaaatagtgccttatgtaattatcttttttttttcatttatgcatttgttattagtactgtaagtccgtgcatgtcgtaatgacccgacacatatttatccgtgcttttcaaaaaccgtgttgtgtcatgccgtgccacaaaaaattatgggtcgtgttgtgtcatgctactatttttaaaaggtatgcctgatattttcgtgtcgtgttttattcgtgttggcatttatttcttaaacagatcaatccaatttcacatccaaacttaaattcgtgctttacttttttatattttttcttttacaattactattactaaattatatatgttttttttaatatcttttggttaaatttatataatttttgagcaatatttcatataaaaaaattattaatatcattaagatttggctatatacttataattacacaaatttttatatcaacaccctacaaataaattaatatataatcttaatttttcatgttttttaattatagaattataatatgcaatattataattaagttttatgattattttaacttatttataatcgttaaattcatatcttattattattaataataataaattataagtaaaaaatgttgtgttttactttttgagtttgtcgcattgtgctttttaaactagtctattcgtgcttatgtgttgtgtcatgttgtgcttaaagacatatattctgtaccgtgtcgtgccaatatgtagcattgtgtcatgtcgtgcccaagctcgtactttttcatgcctactcatgctcgtgttttctgagctcataccaatttcgtgccgtgtcaaaaagcttaacttgtatttacaacactgttatggtatatatttttagtttatttttcacaatttttgttatgagtgtatttgattaacatggaaatttcaataatttatttttttaaaaaaatcaatcaaaccttaaactcttttaattggtaattttgaaagaagaaaaatattcaaattcagatgttcataattgccatgtaacattgtaacacccatcctaccaagcgacatacgcgctatctttatgctgattatcaatgttatgtgaagacagcatatataacacttgtgaatattggataaaaataatcgagactatccataggtaacaatccctttttttttaaaaaaaaaa

SEQ ID NO: 52748 - DNA, 1131 bp, Cannabis sativa
aaataaatacttaaaactatttgagtcttatagcaaaactactttactaaaataatgcgacattattatttattaccgaagttataactctcatttacgaggttgagtctgcagttctagtaagggtaggtagttttggtatttatatattatacttgtagaaacttaattaggtacgtaaagctggaatgtaggtgaaaggtgtaagtggaggcatctacgagatttgggtggtggacttcaaaatttgcagaagaatgttgggggtgagagtggtgcaaggcagagaaaatatagaagtttgaccagccaacgaaatgtggttaagtgaaaatcttaaccacttgcttaatttttttcttttttggccttaaccacaaccgcacaaatatgcagttaactatggtataacattaactaatatattctgttcgatattaactcaagtcttacatataaaaaatggataaaagatgctttaaatacaagtgttccactactcctcaatacttaataagtatgataaggtgctcaaaaataaaaacgaaaacaaaaaaaaaaaaaagtaaggtttcttccacacatcccaaatgcagatttttttttttttttaaaagaaaaattcgtgattatgtggccgattctaaactctaccatggacaggcttttaatatatatatattgaaggctccaatttttttaaaataccacgtgatatatataacaatttgcatttttacgttggttccctacaaagtcagggccgggtctgcgttgaacttcgccaacgtcacaatgaaaacggtatctaaacacttcaacaccctctttcgagagcccactcgttttgatcccataagttttttttttttattttttgaaagatgatcacattttacttatcgatttgtatattgattcaatgatttttggctttcggatttccattcacggtggaatatagaggagaatgacaaaatgaagatggaggatacagaggacgatcctctttagagcatctccaatatggtaaaatgttaaaaggtttttcggtgaggtgtacatttgcaaaatattgagatgcttaaagagaaaaatatctaaaaatttacatggatgtaatgttatatt

SEQ ID NO: 52749 - DNA, 857 bp, Cannabis sativa
  modified_base (265)..(276): a, c, t, g, unknown or other
gacgctcagcagttttccctaagcgaatatgggaaatcaaaaataatcaagtgccgtcgccagccctggagagagaaaattgcatttcgaaatattaattgtcaaagcatttattagctgaaaaccgaagggattcccagtcagcctcacatcaaatcttgaacggtcgcactcgacacgtgtccccatctaaaggcagaagcagctcggatgaagtgtacacgcaacttcagaagttccctacagacttgggggcaaatgttannnnnnnnnnnncactctgacgtggcatcacatgaattgtgacacgtggaatccacttggaacgtctgctcgagaagcatagtccgagtaggattcctcgttggcatgctcagagcaaagtattcagcaatccgtgcacaacaaccaacacttagcaaattcatcttttgcatcgtgagtcatcagcgcaatccctataactcttggatcagattacgtggatatggcacacacacgatccccctatcaatgtattcatcctcaatcccacgatcgttgtatttagtattaatcccaagatctttctgtttataagtattgtaacgagaggggaaactcttcctctccaagcttactagccctataaatagtgatacatgttcactaggcaagaggtcaaaaaacagctgagctaagactataccctaaatatattatctaagaattatacattcagatatactgttgtaagagctataagaaaaggattctttctccttgatcttaagtcaatacaaataacgaggattaggctattaccgaactcctcggggctgaacctctaaaacatttgtgtgtctttatattgcttt

SEQ ID NO: 52750 - DNA, 3076 bp, Cannabis sativa
gaaatgccagtgccaacatagctgagatgcaggcctactatgctaccccaaaagtggtcaatgatcccaactggtaccccgattcaggtgctactcatctccttactcctaatgaacataatttggcctctagtagtacctataatggtgatcagcatgtccacgtgggcaatggtacatgtttgtgtattcaaaacatttgtattcttcctttacttatctttatcactctcacaatcttgttttcaacaatttattgcatgttctagattacaccaaaaatcttcttagtgtgtcttagtttgcccaagataatgggattttctttgagtttcacacctttcattgtcttgtcaagggtctggttacattagagacttttcttgttaggaagcttaacaaaggtctctattaatttgattcaaatcagcttaatattctcaacactcacaagcagactcctctgcctcactccaccaacaccaagtcttctcttgttaacactcaatgtaattcgagtaccttgtattaacaaaataacattttttcattgtggcataaaagacttggccaccctcattatagtaatgttcagcaagtactctcctcttgtaatagcaaactcagcaataaaaataatgaatcttttactcatatatgcactgcctattgtcttgagaagcttcacaaacttccttttcccacatccaccactgtctatactcagccattacaacttttgcactctaatttatggggtcttgcccctattaactcttcatctgggtataggtactacattagttttgttgatgctttaggtaggcacacatgaatatacatgttgagaaccaaaaatgaggtcttgtctacattcattaattttaaatcaagttgagcttcaactaggcttacctattaagcaaatacaatcttattgaggaggcaaatactaatcttttacacagtttttacaacaatctggtattgtacacaaagtttcttgtcatcacacacatgaacaaaatagagttgtggaaagaaaacataggcacattgttgagagtggaataactcttctagcacaggctagtatgccccttgaattctgggatgaggcttacaagtctactgtctttctcatcaatagaatgccctctccacttctcaacaacttctctcctcttgaagttctattcaatgtcaaactatattattcttcccttaaggtgttttgttgcttatgttatctaaatcttagaccctatacaaaagtttaacttcaatataagtttcaaccatgcacctttcttaggtatagcttagctcacaaaggctataaatgtctctccaaagatggaagagtgtacatttttagagatgtcctatttgatgaacttgttttgccctttgcttcacaaatcacacaaaactctacttccaattcaagttcttattcagatacactagttgtctcaaacaagatacctcttctatttcctcccctagtttcaatcaacaagtgcaacctatttcttgggctcctactcagcctcttaatgttttgaataccagtctcactattattagaccacaaactcatattaacaatgcagattctcaaatgtatgtggcaccaataggtggctcttcaaatcatgaagttgatgcttctctacctgctcagcctcagtcttctgcaacaaattctattactgagtctgcagccacttccattgctagagctactgtcattgttcctgcgctagaacttgttgttgctcttgctaatcaacatattgttaaacaaccttctcagattgctagtgatcctattgtcaatgatcatcccatgaaaacaagaggcaaatcaagaatttgaaagccagaggttctaatggtttctctcactcctgcttcagtcaaaagtgttttgaaggatgcaaaatggttttctgcaatggttgatgaaaataatgcattgaagaaaaataaaacctatactcttattaatctacccctagtagagaacctataaattgcaaatgagtgtttagagtcaaagaaaatgctgatggttctgttgataggatcaaggctagacttgtagccaaagggtattatgaccaactagggtttgattttcatgaaacattcaaccctgtggtaaaaccaattaccataagggtggttctcaccattgctctatcaaaaggctagactataaggtaatttgatgttgataatgccttccttaacatggattttaatgaagacatttacatggttcaaatcccagggtttgttgatcctagacatccaaacaaagtgtgcaaattacacaaggcaatatatggtctcaaacaagcccctagatcttggtttgagaagctttctactgctctcattcagtttggatttacaccaaccaaaatagatcacacactttttacctttatcacagaagccatcaccatttatattctcatctatgttgattacatcctcatcacatgaattcaccctcaaaaagtttcatctttgattgctgctctatgctccaagtttacattaaaagatcttggtgtcatgaactttttccttggtattcaagttgtctatacatcaaatggcatggttctttctcaacaaaagtatattaaatatatactatgcaaagctgaaatgcaaggagtaaaaactcaaagttctctaatgaacaatgggttaattgtctaactatgagagtgatctagtggaggatgctacagcttatatatccatagttagtgcattgaaatatgcaaccataacctgacctgacatagctttcaatgttaataaagtatgtcagtttatgtatcgaccattataatctcatctagtagatgtcaaaaggatcctaaggtaagtaatcttgattatggtctacatctcaaatgtcattcctctttggaacttgaagccttttgtgatgatgactgggctgcagacccagatgaccattgattcacaattggtctttgtatcttcttaagtgggaatattgttggatggaaatcaaagaagtaaccta

SEQ ID NO: 52751 - DNA, 662 bp, Cannabis sativa
catagaaaagtagcaaacctataaataccatatttttgtaacttttttacaaaatctcatatttcatgtaattttcactaataaaattgataaacccccttatatttgaaaaacgagtaaattattttgatcataaaaaaaaatatagttttaaaggatttattcgttaaatatttttaaatgtgctattttgaaagtgaataaataattgtacttaaaaaactcgtcataaatataatctagtagttcgacacttctcattataaagaagaaatccaaacttctatctctcattattaaaaaaaatgtactaaaaaaaagtatataaataatttataagaattttagagattttatttttgataaaattaaaattaaaaaacatatattttgaagaattaaaaacggctaattcaatacaattataagagatttagttcaagatatttctaagataaatttttattcactacaattgtaatctaaaatgtttttatttaaattcctatttttattaagtagagtgtgatggtaattgaattttatattttttataagttgttatttacttcactcatttatttatttttttttaaataaaaataaattcgttcaaaataatagaatacacttcagatgaacagtcctccaactgaagcaca

SEQ ID NO: 52752 - DNA, 1134 bp, Cannabis sativa
gaacgaaatcccattcccccttccatttttgatgtacaaagaaatttccattttttccaatgagttcgtttcttatcatgagttgaaccccaccaaaactgagccatcatagcatctaactctttcaaaacttagctgataatttgaaacagctcatagcataagtaggtatcgattgaactacagctttgagcaatacttcttttcctccaatagagaaaagcttatcattccaagcatgtaacaatttccaaatacgatctttaatctcagagaataattgactcttattttgctcagaataagcaggaaggcccaagtatttttcatgacactcactaataggcatacctaatatttgagaaaaagagtttttcacattttgaggagtatttggagagaaagacataaccgatttatcttcattcaaaagttgtcctgaagcgcgatgataaatatccaaagcccttttgatggcaccacaagatctatcatttgcttgacagaatagcaaactatcgtcagcaaagagtagatgagaaaccgttggagcagatctagaaatggccaaccccttgagccgaccaacagcttcctcatattgcaaaagtcgagaaagcccctccgaacagattaaaaataaataaggcgagagaggatccccttgtctaagcccgcgttgagggataacagaaccagtgacagagccattaattataaaggagaacgtgttagaatgcaaacaattcataacgagtgtgatccatctgatattaaatcccatcttacccattacagcagctaaataggaccattccacacgatcaaacgccttactcatgtctaatttaagtgccgcaaaacccttagaaccccttttcctatgcttaatactgtgaataagctcaaaaaccactagaatattatccgtaatttgcctacttgggagaaaggcactctgtgtttctgaaataacacatggtagaacctccttcaaacgaagagctaacattttagaaaccaacttgtatacaacattacacaagcttataggtctaaaatccttcattgaagtgggctttttgatcttaggaatcaaggtgatcaaagtttgattaaaagcctctggggtag

SEQ ID NO: 52753 - DNA, 697 bp, Cannabis sativa
caggcaaccatacccgatgcatgcatgaagaaatgggagaaaagggaaacttggcaattcaagaggccccaatttaccatcgagatcagcccaaaaggactagagacgaggtagaagagataactgaagcagaggctttccgcacaacaccccgaaagcgaaccatggatccaacggttgctcgaaatccatcaacggcgagtaaagagacggagaggctaaaggaaatgatgtggaacaaattaatagcattggaagaaaaaagccagatgggagtacatagcgaatggcctcgaatggaggggtcaaccctttcaccctttgggaatcacatcctgcgcgtggaggcccctcagcgttatgtggcccctaaattacaagagtataacgagacaggagacccctcagaatacgtatgtcagtttgagaaaaaatgttaaccgtcttcgtcccgctagaggacttggaggcaatcaagtgtaagaccttcacgcaaggattgagaggacccgctctacgttggttccacaacttaccatccggcatagtaaattcatacaaggatctcatcgtgagattccaggccaatttcgcgataagtgtgcggaccgctaaggtggataatgttaatacaccagtgcctcgacgaacctttggaaaattttatcaataaatttagcgaagaatacgtcagtat

SEQ ID NO: 52754 - DNA, 532 bp, Cannabis sativa
agtcgattttacacgagtataaaataaaatagtcatgcgtgcaataaactgattgaacgtagttttcggcgtgttaaatttttccaaatttcttaaaattttacaggctgtcttaaataactataacgtacatgaccatgataaaaaatttgactaaaaaatcatttcgaatactaaaacagataaaggtatatcaatatattatccattgtagaattttcctaaatttagtattacactggttggagagaatcttaacacttgaaatacttttatcattggctacactttcaccttttcatgctatgaagtctttgtggtacacgtttacaaattatatgtgtttgtgggtgatataatactagacaaattatataatgcactctttgaagatgtaccgatgtatttggttattctacaatgtactcccttagaagagatatactgatacacccttgacttgtttcggcatctagaaaaaaatttagttaattttttttcatattcatgtacattataactatttaagata

SEQ ID NO: 52755 - DNA, 1103 bp, Cannabis sativa
agttcgggggaaaaaattactaattagccttttttttaatagatatatttttttaccgtatttataaaaataatatcaaaatattagtaaaaaaaatacataaaaataataagaaaataaaattaaaataacagctaaataacataacaaaaaataatataaaaaaatcaataataaattaacaagagtacaacatacaaaaacatataaaaaaaaaacgaattttatatataaaaaaaagaaaaatttagaaatcgtaaaaatatttaaaattctatacaaccgtatttttgtaatattgtttttattatttttgtattttttttagaaataattccttatttaaaataatatactatatttatttatcccacaaaaatatgaatattactttactcattaaatattattaacatatttttggaagactaaaatattattggagactacatgctaaaaatagtcacactgatgcatcccttttttttactagtttactaggaaacatacccgcactttatgaagttttctaataatgtaaatataatttaaaattttatgttttgtaaatgttgactgtgaatttagccaactgacatggagtctgactaggatccaattttgtttatgattgttacatgtggaaagataataaatataaaagacacaataatttatagagatttgacccctttgatcaagtaatgacctactccctttttgctgtattcactctttagataataccatgtaaagtacaggctgaaatcttgtaatttctagctatggctctctacagtattataatgatgagattgtgtgttagagacttgcaaagtgatgagaaggaaagagagagtttaatgtcttagtgcttttgagctcttaagtgcatgtgtagaataaataaattcaggcccctttcacgtagggttaagaccttttatatagtgttaggtttttcacaagttgttattcaaaatacataacagatggaaaatatccctagaaaataggacagttacattctggcgaagctttcctacttttgtgggtagttcaattcgttttgaagttgcagatgtgttctggacgatttggaa

SEQ ID NO: 52756 - DNA, 766 bp, Cannabis sativa
ataggagaataactggattgagtagaaaagtcatttttattgatagtaacattgttacaaggagattgacttggtacagtattgtaagcaaattgactagaacagactaaagcagaaggattacacacagaactgattggttgtttgagagacaggttcgagcattcttcaagcacgtacagaccatctttaagtgttcccttgagcagtaccctcccagtttgtttgtccttgacaaaacaacatgttttatgaaattcaagaaacacataattgtcattagtgagttgagatacacttaccaaatttttggtaattgagggaacatgaaggactgaatgcaatttaagaggtaagtagttgaaagactgtaaagaagttgagccaatattagagatgggtagtttcttaccgtctccaactgctaagccttcatgacccgtgtatgtagcagctgtttcaagattttcagtggtagaggtgacatgatttgtggcacctgtgtcgacaaaccaccctgaatcatctccaaagtcaggcaagaatgaggaagcataggcttggggatcgtattcgacatcctgctcagtgagatagacacggggattggtctgagagtttgcaccaggtttgggaggcacccagtttttgtcaaatcgatagtggcaaactggtgcagtatggccaaatcgaagacacagttgacataggggtcgatttgagggattcgaaccacgatagcctcctctattgaagttcttggttg

SEQ ID NO: 52757 - DNA, 1824 bp, Cannabis sativa
  modified_base (437)..(437): a, c, t, g, unknown or other
aaaattaaaataataatttggaccgataatattttgacacgtggcaatttaaaaaaagaaaacgtctcagttaaaattaggactaacagacaaataaaaagtgtgaccttaaggattattgccgttatttttagaggttggggactaatctgcatcaaagtgacctttttagggacttttgccgcaaatttcccaaaattaaattacaaaagtaactcttaaaattatatttttacttcaaaaaagaaaaaattaattaaaatataattattttgacatcaaaatgtgtactattgggttatacaattggttgtaggaggtcaataaacttatgctactactgtatttcctttggtcttacttgagggatctcaaacctcacattgaagtgaggaactcttcataaaacccctatatatacatatatttttttttanaaaaaaaaaaaaaaaaccggaagattattcctatatactaattattggacatataatcatttcgaaaaatattattggagtatgagtctagccagtcaaggaattaaattctctgaagcgcataattttatctgcttgcttacttgacgcatatcatacattacacatatttatattgtatatatttattaatatatgcaacacttatccatttaataaatttaattttaaaaatattaaatttctaaatttaatttaattacttaattaaaaaaatattaaaaaatatctcttttttatactctaactatatttatatttaaaatatttaaatcaaactcaatttttttttcttatttttcttcaaaaaaatcatttttcttattttatctatctaattagaaaaatctctcattttaaaatgatatgtattgaggttattccatcgagtaaaacaattaaaaaaaaatcaacaaaaaaaataataaaaaattaaatttaacttaaatattctttatatatattcttttgatatagtataataaaaataattttaatatatttttttaattaagtagttaaattaaacatagaaattcaaaattctcttttattattcataattagatcaaaattaatatttttaaaatttgttagtaaccatcaatgaataatacccattataaaatattctatatatatatttctcaattagtattatatattaatagttactaaacaaatttaactataaatattaattttaaaattattaaactattagattttgatccaacgaataataaagagaaattttaatttctatacttaatttaactacttaattaaaaaaaaaatatatcaaaaatatcattttttacactatatcaaaaatatatttatatacaaaatatttaaattaaattaaattttttttatcttttttattttgtaggaaattattttttaattcttttcagtcgatagaataattttaattagtatattttgtaaaaataatagatttttttaattaaataaaaaattaaacataaaaatttaaatttttttcacactacgtagtacatattaagagtgtttattgtgtggtgaacaaccgacttatatgcaccatactttcttcttgatttggataattaatttcaacaaatcctcttccacgtattcatctttaattatttagaattagaatttttctattggaaattaaaagggatgtccattatgttctatatatactttaattattatccacatgttgaacagatgcgaatgatatatttatagggatataattttgttctgttattgtattttcacggattgtaatccgtgatgtacggcagccgtcaaatgagggagttat

SEQ ID NO: 52758 - DNA, 838 bp, Cannabis sativa
gttataaacagtcatttaaagtgactttttccaacagttataaacagtcatagactttttccaacatttatgaacagtcatttaaagtgatttttcccaacaattgtaaactgtcatttaaagtacctttttccaacagttataaactgtcttttaaagttctgtatttttatgacacccacatagccaacggttttaggaaccgttgggaaatagtataaaagacagttataaaccgtagggaatagtcctttttgtagtagtggaactactcatatttctctcttcaatctcattaaatggattgggagagctaagctgagtaaattcaagaagatgacactggctactgctatggccagccttagatacaacatttgggtgatgagaaacaagtgtttatgggacaaagacaaattagaaactgtcagcatgttaaaagagctcaaattaggagtaactcatcgaattaagctattctggctaaagaaaatttcagaggaagatagacaacggttttttagtttgtgaataatgtaaatgtatagaaaagaaatataatttgtgatttacatgtataaatgattatttaggcccttgttgggtgctattagactgtaaacacattatttttgagccaatacatattctgattcatcaaaaaaaattatatcataatataatttcatattaatacacaattaactagttaggatttgctaatttattttcttaatcttagtgtattacactataacaatacctcataaaaaaattactaaattaatgtttttttttgtgcacaatcatatatgattatgttttgttgaccgagaac

SEQ ID NO: 52759 - DNA, 1083 bp, Cannabis sativa
ccgagtctaagctaacggctggagtgtccttttttcgaggcttcttagaagactcagcctccaccatattacccttgcgcttccggtccagcggggccacgatcttgccttcctcctcctcctcgccctccccatcctcatcgatcaagacgatcatgcctaagggggcgctggaagatgacctccccggggtcaccatctgggcaggcgctggaggaagggaagggtccgggctgtaggtttcggcaagagtcgtcaagaggtcttccattggcctggctgcttcaaaaagaaataaacgaagtgtcagaatggctataggaaagtatgcgcatgaaaacaaaacagtaaagctagtcctaccctaactatctaactcagccctagcaaagtcttgaactacaatgttggcttcatcatccccaagaaatctatccgaggggagaaaccagctagaagacagataagctgagtgatttagagggatggtgcaggaggtccgaaacccattcgggaccggcctaaaaaatgacctaagtgggaaaaataagaggccttggaatgatccccccaccgagtggggggcatcctaaacttaagaagacgctcgttgaattctataggcctacaccgggaatattcttagacagaaggaacatgatgaactgttaaaggagacttaccggagccggatgtgttggcgtcgggagccccagtattgggaaccaggaccagcgatttaggcctaaaaggcatccgatttgtgcccgcctccagacgaaggatcctccaggcggtagcctgagccttgacataggccaactcttgttccctcctaaagagggacttcttgtaccggtcctctaccgaggctatgatgtccacccggagcgccttctaagcggccggagtaattggctcccggagataagcttggccctccgacagttctccgttgtgaccaagtctcccacgttaagacatttcttgtcataagtggagaaagtcttggcatgctagaggaacagttgggtaggagcagtgcggagaaagggggaatcctaacccactccgtgagaagct

SEQ ID NO: 52760 - DNA, 1914 bp, Cannabis sativa
  modified_base (37)..(55): a, c, t, g, unknown or other
tttctgatctatattaataaataaatctgattatatnnnnnnnnnnnnnnnnnnnggcataaaacccaacactatataggcactaggtttgccttgtcgacaatgatgctgcttgttagacggaaaagtgcatctactagagcattctgttctctggggatctgcctgattgtgtagcctatgagatgacttagcaactcttggatcttgctcaagtaggccaccattcttttcatctcaagctgtgtattcacctaggacttgattcacaactagttgagagtcactgaatatgtccaggtggtcagctcgtacctcctatgccaacatgaggccggctattagggcttcatattcagcctcgttgtttgaggctttgaagccgaatttgattgcttcgtgcagtttttgccccaggtgttataacggtaatgcgtacactggacaattggtcagtgtagcttccatcgacatggaatttccatgtcagttatttagatttttgctgctgctattgctcttgcttcttctctggctctttcttttcttctgaattttgagggattttaagagataagtttgtgcactcatcgacgaatttttcaagggcttgatcctttatagccattctttattgatatctgatgtcaaattggccaagttcaatggcccacttgagtagtcggcctgatgcttcaggggtttttgtaaaacttgtcgcaacggttgatcgatgtacacctttatctagtgtgcttagaattatggtcttagctttctgcaggccaagagcaagctataggtcagcttctccatgagtgggtatcgacgttcaacgtcaattagtcttttgttgatgtagtacatagggtgttgtacatcatcttcttctcttgttaggacatcactcacaacatgctctgtgactgctaggtacacgcctagctcttcattgtctaggagtttttacaccccatgtagttgagccaattgttttttcagctcctggaatgcttttccacattcctttgtccactcaaattttttgttgcctctgagaatgttgaataagggtacacacttgtctgtaaacttggacataaatctacttagtgcaacaatgcgtcctctcaagctttgtacttccttgatgggtgtaggcgaacaaaagggcttggatcttgtgtttgcttctattccccttgcattgactatgaagccaacaaattttcttgagcctatactgaaagaatatttgagggggtcgagcttcatattgtacttgtggaggaccctaaagcattcgtctaggtcttccacttgccccccaatctttttggacttgacatggatctcgtctacatacacctccatgttgcagcccatgagatctttaaacattttgttcacatgcatctgatatgtggcccttgcattttttaacccaaagggcatgactttgtggcagtacatgcctaagtctgtcatgaagcttgtatgctcctgatttggcgaatgcatctttatctagttgtaacttgaatatgcgtccatgaaactcaagatttcatgtccaactgtggcgtctacaagctggttaattcttggaagcaaaaagtggtcctttggacatgctttgcataggtttgttaagtcgatgcacactctctactttttgttgggtttgggtaccaacacagggttggataaccaaagtggatagaatgcttctattataaagtcatgggctcgtagcctctcggcttcatatttgagcacttgggcacattgtttttccaacaacctcctcttctgttacatgtaatcaacattaagtaataatctaagtgtcacataggtcatgcaaatactctcgtttcacatagaaccatgattatccaattttagcattct

SEQ ID NO: 52761 - DNA, 1812 bp, Cannabis sativa
tttccatgctcttacattcatataaataagttgggtaaatcaatttaagagaattaagacaagtaatacaaatattaataaatcctaataaaaatactgactctaattatgtagttttagtacagttattatattgctgtctcttccattagaccatttgtgtttgtcacattggtcatgttttaaaatatgataagtcatacaagatggaacagtaacatagtgtttggggacattgatcaatttcatcaactctttctattagcaggctaaggcagctgaaactgtgtcagaaaataggaaaaactagatcttaaatgtttgtgaattgagattgaaatgaaagaaatagtttggagttacgatgaacttgtgaagattcttcaggtgatagcatcaaggcaattgtaagtttgtttttcaattattttcatatttgctggcactaaaaaatgagtggcatgggagaacttttaaggcaaataagctataagagcagtatgactagctagccacatgaggcatactcctattgcaaataacactaattttacatctaaattaaaacaccatcattagctaacaaatgagaggctggctatgttaagttaggagtaatgtattgaatttttcaatctaggacaaaagaaataatttagtaatggagctcaacagtggtggtgatatcacaggagctattaatgaatgtagttttagccatcaaaacagttcctttacctcatattactccttcaagtaattatagcatatcagatgttgcaggaatgcaattactgtgagttgcactatttttcaaaaacaaccaaatctgccaacataaaacatagttgaacttaagctcagctttaattgagaactcaattattggataaccacaaagaatgatttttttttttctttcaaaaggtgagatttatagtactgttatattatgtttaacttctctcattgcaagataatgcagagtggaacttttactgttgtagatctctttctgttgcaagataatcaaagaaagttttttggtatatctaatttcatttatttttataaaatttctttttacccagcttgccttatatcaataactcgctttattaataattcaatcaaaataaatacaattaccctcaagaataaaatgtttgttatgcttaacatatttaatttgatctgaatctgtcttaattctgccctccttcatcaggtttctatactttcatattgggcttccacttacatatgggacttcatcagcttcttatttcctttctcttttgcaattggtctttttagtatatttggtatgtcttatctttaaataatattttatagagaaaagttgttgattttgaactactaaatcattgttaaaaaattagatcactttgcaattcaaaatgcataaaaacaaatatcaatttaattttttttttattttaatgtattttgataagcatacaaactatttattgagaaatctgttacttaaaagtgttatgtattgtttttttttttaattctcatgaatgctcctttttcttgtgtctacatctgcagtgttttagataaatatatagatgcatgtattttttaagcaatgcattattgtccagaatagaataagcctgttcaatttcacttttacttacattaaaattgattgtctgtaggtctggatcagtttatcggaagggattgtttcttgccaacagtcatcatgtttttgggatatggtttagctgttgcatcgtcaacatattgcctttctttcttcttttcagaccatac

SEQ ID NO: 52762 - DNA, 981 bp, Cannabis sativa
aaaaaaagtataaaagaagcaatgccatgtttgatcgagtggaataagaataagattgttatagtcattccattacaccttttggttcaatagttgaccaattaattctttaggaatacaattgctagttcaattcctctggtaattattgtaacctttcttcttttttcttttgcctttcataatattacataaaaatatataaagaatttaaaagtaatgacatattcccattctaaaatgtgtactttagctaattttccatgaactgtgatatgaaaattgtccacttattttccccattcttttctttataatgtgcatgttttttcaggatgatgtgtgtattgagactggagatggaatcaaacactgtaaattgatagcagtacatgctggtttggtgagcaatcaagatgttaaagaacagttgaagtttttaaaagccaaagatacccgagtacctaaggttgatagtctgagtgggagaaaaaatgtgtgggatatgccaaaggtactgactttttttatcatgatccaatgatgtgtgaacaattagtttagttatgaatttatgataatgatgcctaatggtaataatatataaataccagaatattctgaaatgtacactataatacaaaaagaagaattgggttacaattttctcatgtgccagaaacagaaaaagtttcgtaccggtaactcgaaaacaggattcttactaccatagaagccttctggctgttcttttggcttataattcccattcatatgatttacattagcgttcttctaagtcattcaactgaagtttagacttttgtgtctatttgtctctctttcataggaactaagtgagactccaaccattgtggtaagtggtcaccatggaaagcttcacattgaaggtctgaggctggttatcgatgaaggtggcggctacgagcataagccagtggctgcaattgttctcccctc

SEQ ID NO: 52763 - DNA, 902 bp, Cannabis sativa
tcagttattaataaacagatattggtcctcattttttgcatcgcttcagatatcgtatctttattcttgaattcccatcatcaagaaaactcaagtttcaaatagaaaactttgatgcaaaaaattggaagatcataccatttaaaatcgattatgtggactccggtacgcttccgctaatctataattctattatttaattctcatgaattatttaaggttaaattaagttttacagtattctattataagacactactaataattaataaatgtgctcattttattttcgatatttaaaataatacaaaaaaaaatagacatcattatacaaaatttaggattacaattattgggatatcaaaaaaaaaaaaggaaaaatatagtgctctcatttttggaagaaatattggacctatatactatgtttaaaataatattaaggagaagatgaccactttgtaaatagaacttgttgtaactttgtaaggaggttatatttgaagtttgttagccttttacctttcttctataatgtcaacttttgtatcaattaagatttaacccataatctataatatatttaaattaatttgcaataaatagccataacacatcaacagaagatagaattagattcctatatttaagatttcatggaatctattttcaaacgtactaacaaaaatgaaataagtcaaattgtaacaattttaaatctatgtattcattgatatagatagagactatataaaggatagttcctcttacttttttgcatatctcactttttagcttattaagatatagttaaaaatttgggatattagggaaaatgaggaggaaaacgatattgaggctttcgcctcaactattctttgctttcatgtattgccttattt

SEQ ID NO: 52764 - DNA, 1042 bp, Cannabis sativa
gagggggttttgatcctgagtctccgtttcaaggacctcaaattagtggtctaagaggctcgcttcttgttagtagtagtcttcttgggccttttgcggggctccacgtcgacatctcatgcagcttccaagatggtcaacctcttctttccctttttgtgaatgagaccctcaaaattcatttctaggagacaagattaagtgggcatttatttaaaaacaagtaatatgggaaactggggcataatttcttgcctaaggaatttaccataagaagtcgaagaggatggactataatatcaactaaagtccctacatcccgtgatcctgaatacatcataggaattaagaggttctaaatcccaactcacatctaagtgacttgccctatccatcacggtcctgtactactcggctatcccatagtatcagtcagtacaactaatttggacatggaactctgggtacaaactatcaaacatatgtgtaatgcaatctacaaggagggaattccaggtgtaaaagttatagtggctatctcaaaatgaaactagagtgttatgctcggccctaagcactatgggtgaccaaccacattgattacctcaggatgcttcttcttcggcttcccgaggggcagtgttctggaggtattgtgcctgagccatgcgatcttgagcttcctcctcggttgggaaaggaacctgctaccaagaagaatacttggaatatttataatcgcaagtaaactccttccatgtaaggagaccctcagacgtcaagttggccttgctcaagaggaactcagacgacctaagactgtataagagcttgcgtcgctttgccatctcaggagtagggcaggtcttttccagaaaactttctaaaacaaagaaaaattacaatcagctaaaccagaataaaagacatggactaatttaaccaagtcttgtgcaaataatcacttacgtattatgcgaaaagtggttgtgccaattggggagagatgggtcgtccaaatgaattcatcttcaaagggagt

SEQ ID NO: 52765 - DNA, 2328 bp, Cannabis sativa
  modified_base (2233)..(2239): a, c, t, g, unknown or other
cagttagtgatttctttacgaaacaggtgactccaatacccaacacctaacttgattacatactttgtgtcacgagacccctaaacatcaacagtgatagtgtcactactgtgagtttagatcgacaccactaagtagaaccctatttaggtatcagttagttatttctttacgaaactagtgactccaatacacttcacctaacttgattaaatactttatctcacgggacccctaaaaatcaacattgatagtgtcactactgcgagtgtacatcgccaccacaagtagaaccctatttcgttatcgattagttatttcattacgaaactagtgactgtgatacactacacctaagttgattacatagtttgtgtaacgggacccctaaacatctacaatgatagtgtcactgttgcgagtgtacatcgacaccgctaagttgaacactattttggtatcgattaatgactttgttacgaaacttgtgactctgatacactacacctcactttattacaaactgtacatctaacgagtgtacattggtacaactaagtagaaccgtagttcggtatcggttactgatgaccctgatacactacacctaactcgattaaagactttgtgtcacgggacccctaaacacctatagtgattgtgtcactactgtgagtgtacatcggcaccactttgtagaactctattttgatataggttagtgatttcgttacgaaactggtgactttaataccctacacctaacttgcttacatactttgtgtcacaggacccctaaacatcaacagtgatagtgtcactactgcgattgtacatcgacaccactaagtagaaccctatttcggtatcggttagttatttcgttacgaaactagtgattccgatagactacacctaacttgattaaaaaatttgtgtcacgggaccccttaacatctacagtgatagtttcactactgcgagtttacatcggcaccactaagtacaaccctatttcgatattggttagtgatttctttgcgaaacaggtgactccagtaccatacacataacttgattacatactttgtgtcacaggacccctaaacatctacactgatagcgtcacaacttcgagtgtgcatcggcaccgctaagtagaaccctatttcggtatcagttagtgattttgttacgaaactggtgactacgatacaatacacctaacttgattacatactttgtgtaagaggacccctaaacatctacagtgatagtgtcactactgcgggtgtactcgctaagtagaaccctatttcagtattagtttgttatttcgttacgaaacttgtgactctgatacactacccctaacttgataacatacttagtgtcacgggacccctaaacatacagtgatagcgtcactactgcgaatgtacattggcacaaataagtagaaccctatttttgtatcggttagtgatttcgttacgaaacttgtgactatggtacactacacctaacttgattacatactttgtatcacgggacaactaaacatctaaagtgatagtgtcactactacgagtgtacattggcaccactatgtagaaccatatctgggtctaggttagtgattttgttacgaaactgatgactctgatacaatacggctaacttgattacatactttgtgcctcgggatccctaaacatctaaagtgatagtgtacatcggcactcctaagtagaaccctatttttgtattggttaatgattttgttatgaaactagtgaccctgataccctacacctaaatgattacatacattgtgtcacgggaccaataagtgatagtgatagtgtcactactgcgagtgtacatcggcaccaataagtggaaccatactttggcatcggttattgatttcgttacaaaactggtgactctgataccctacacgtattttgattacatactatgtgtcacgggacccctaaacatctacattgatagtgtcactactgcgagtgtacatcggcacgactaagtagaactatatttcgatatcggctagtgattttgttacgaaattggtgacttcaataccctatacctaacttgattacatactttgtgtcatgggacccgtaaacatcaaaagttatagtgtcactactgcgagtttacattgacaccacaaagtagaaccctatttcggtatcggttnnnnnnntcgttacgaaactagtgactccgatacagtacacctaactttattacagactgttcaccaaacgtgtgtacatcggtaccactaagtag

SEQ ID NO: 52766 - DNA, 574 bp, Cannabis sativa
ttttttttcagtgggtagtagctttaattgcttgtggtggggcttgtggtcctgtacagtggttagatatgatattaaagtggaagttttgaaattattgcagaaaacagagtagtcaaaggctgttgggaatctttggttgttgttttcttcaatgggaacatttgcacatgtcttttgtctatttccctttatattattccttgtctgtttgttggcattgggggatgaattgcttttgggggttattagcttttgggggttaattgcctttggggggttattggttgttgggggttaattgatattggggattttgtgaaactgattggaaagtttgattagttttaccaataagctgaactgtgtacttataattacatattaactttgcaagtttgaatttggaaaatttcactgtgaaatttttccatggtgggtattggttcacccaaggtggcaatcggcagtatgagaatggcagaattgcctattttgatttctgtaatttcaatggattcagcaggctccaccttgaagaaatgactcgggtattgggatacatattcccttt

SEQ ID NO: 52767 - DNA, 1730 bp, Cannabis sativa
cttagagctttgactccaagattgattaagagttaattatcttgacaggtcaacatatggtgaatttaccaacaatatattttttattaattaatatttaaatcggatcagctatcacctgaaaacatattatatatattttcttaataaaaaaatggttatatatttttgagcaatgaattctgtgtttatgcaacccaattgctttttatctatctatttaaggtatatatatatatatatagtcctagatttaagggatataattatacagtactttcctttttccattgatgttgaataaggactacagctagactcagtagagtattcctcctgaaatcgaatcgttatgaatgtgaagtagttgaactagaccatgacaaaaacaataaacaaaaaaactggatcatagccaattcatgatctcatctaccttattagctttatattgagtagtaatagtgcctgtactttagtgaagaatttattttatttaaagtaatttgtggtataaatatttaaattttatgttcattattaaataagtattcgtatttttagcaataaaaatattttccgttagtagaattttcgtaagtagtagtcgttaagtacgaggtcagtattcacatgtcaattcattagtccatatcattaatttttaatttattatttaaataattagttaaatatttaaaaactgagtttaaaattataaaaaataataaatataatcaatttttttatctttaattttgtatatatttaaaaattaaataaaaattatttttaaaataaaaaattacaaaattatcaaacacacaaacttaaaatttaatcctatattaataaaaaaatccaacaaaagaggattgttttgttaaacacaaaaacttaaaattaagttaaatatacaaagttaaatttaacacctaaaaaatctgaaaacataaaattcctaacccctaaaatcacgtttttctccctcttcacttctgcaaaccagaattggtttcatgtatttctctcttctgtgattcaaggggtcaacttcatcccttatcgtcttttgggaactagggggccatcgttcttctccctcatcggcgtcgacctgcgaatactcctcattgatgtcttcttcctccttctatttcaccatagtgcatcctcattttcctctcttctcgacaacatgcgaaccagaggcttgctttcatcttctttatgtctctcattgttcccaaatcgtagaaagaccacaaatccctcattagagtagtttgtagtttgtgcttttatttctgagtttgagtttttatttatatttctaaatttgtggttttggcttgggcatagagttaatcgatatttataatctacctcatttaagggtttcaaaattggagttttggtttgatctcattgtttaatttgtattttgtttgtaatatttagtgtatgtgttaaacaaattttatataatttatgaatattttgttcaagaatttagatttatttatatttaataattttaaaaaataattaatttttaacacttatctactacttgacataaaacttaagtatttataccataaattatactattttatttatttagaaaggggctacttttcatatgaaagattgaactgtatatagggacacgattttgtctcgtgatgtacttttacggaatgtattccgtggtacattagatgggt

SEQ ID NO: 52768 - DNA, 1021 bp, Cannabis sativa
atgtgttctattatttatttattttaaaatttatattattattatttacatatatgaaattttaaattattttattaaaaaattattattacaaaaaataaataaatagtgtggtgttgaaaaatatggagtgttctctataaatacattattttttttctatgattgttccatctcactcattgtctcacctattatctcacattgcttcacgtcgtagtcatcactgtctctcacccactgtcatcaccgtatgtcactcgttgtcatcattgtatcttacccgttgtctcataatatctcattcgttctcatcactgtatctcacacattattatcattttatgtgtctttcaacactatatctcacctgttgtcatcatcatatcactctaatcaaactctagtaatttttgaatagtcatcttgttgaggaacaatattcttcaagaattatcttcttaacagtataactcccaataacttccacaattttagagttggtaaaaatattttagattggttgcacttgtagtatagagaagtcaatatatatttagagtaaatataaattaatatgtacacacaaatatctataattgtatattgaaattttaaatggtggaatctaaataaataattctttttaaattttttaatggtacgtaatagaagttactatcacaaaaaataaacaccgtcttccttatacaaatttgaattattaactttattacaatatatatatttttaattcatatatactacatatatataaatttaaatttaagcactctaggtgattttattcttaagaaattagatattatatgtatattgatatttttaatcaattagtaattatataatgtcaattaatatatcatcaatttattattatattttgataattagttgtcaataaatatcttatttaagttaagatattttgattttaaatttaaaataagggaacaacaaacataaaaagatagataatatctccagcaaaaaaaaaaaa

SEQ ID NO: 52769 - DNA, 533 bp, Cannabis sativa
  modified_base (305)..(305): a, c, t, g, unknown or other
tcaaagttttaaaaattttgaaaataaaaaaatcacttccaaaatttttgtaaatagttttttttcttaatcaatattttagactctgagtccaacttgaacattggcagccaaactctggctccaactccaatcccgtactcgaacctagatacgacttaaataaaatcagaaaataaaaataaaaataaaagttatagaaaatacttttattttctacttttaaattaaaaaacaaaaatatttatttattttttcaaaacaacattttaaaaatataaatttacttttatttttgtgattanaaaattaaaaaataaaagtgttactaaaagtcatctaataaaaaaaaaatccatgatacaaaaatataataaagaattgatattattttatttattacaattaagttaatattttattatttttctgttgttttatagttatttttttattcttatagattttttcttaaattattttaagattattttttaatttactaaaatttgcttagtaatattaccattttt

SEQ ID NO: 52770 - DNA, 1438 bp, Cannabis sativa
tgtttctcaactcaagcccaacaaaggataaagaaaatatgaaaagaagcaaccacaaccagaggctaatggatctcaagaagataagtgagatggagtcaaagcttaaatggacacttatattggagttgacgttatcttattggcacatttattcttgaattacgtacagtgtagtgctcaaattgtttttaacaatcctttcttgattcctacttttaaagtaatttagtttcgcttccgctttgccaattatagtgttgacattatgtttgacttcaaataattggtaactatttttactctaatggtcttttcaaattatcattgacttccttaatttcctctttcaatgttgtgaatattgtggtaagacatcttatattaagataacatccttattattatggcacaatagattgagtcatatttctaaagaaagagttgatcgattacttttagctaaaattcttcctcgtgttgatgtttccggttggggtacttgtgctgattatacttgtggaaaattgactaaaatacgaaagcagactactaactatagtcactctttattagagattatccacactgacatcagtgaaccttattccaccacgttgtgcagaaacaagtattttatcacttttatttatgatttttctcgttatggcttcacttgattcaagaaaaatctatactcttgataaagtaaaaatcttttgaaatgttcttgagaaacaattaggaagattcatcaaagttgttctttcatatcatggaggagaatattatggttgttattcaaaatttagactacacatgaggccttttgctgaatattttccaaaaaatagtgtagtttctcaatacactatgtcaagttcacctgagcaaaatggcgttgctgaaaggagaaatcacactctcatggatatgttagatgcttgatgagtagatcaaatcttccagaactttttatggggtgaagcacttataactgcaacttatattttaaatcgtgttccaagtaaatttgttcccaaacccccttttgagttgtggactgagagaaagcctagtctgaatcatcttcgtgtatgggattgtccaactaaaataagaatgtatgattctaatttgaaaaagttagatctaagaacagttcgttgttaaatcattggttatccaatgcactcaaaaggctattgcttttgctgtcctactcctggtacgcgaattgttgaatctcagactgctaaatttctagaatttgatgttgctgaaaatattccttcaacatctcttgaaatgggggactcatctaaaggaattttaattcctatttctttttcaaaagatgataataatagcagtcttattcttactctagttgataacactcccattgctgatgaatatattgctcctaatatctaag

SEQ ID NO: 52771 - DNA, 584 bp, Cannabis sativa
  modified_base (62)..(64): a, c, t, g, unknown or other
ttacctcatatattgttttttttaacttttttttcaattttacggtttgggtttctaaagtnnntgcagcgctagttgcaatatgggtttctatacgatttttttttttcaatttaggttacagcagtagttgcaataagagtttctttgtaaaattccgtaaaaatacaaaaaaaaattattttaaagtgcaaaattgaaaaagctccataaatttattacctaagtatttccatgtaactttattataaacttagaagtacacttttaaattttaaaaatgctctttatttaatatagatgtattatccattattacaactatagccgtcattcaacctttataggtgatctactaacgagaagataataatttaccatttaaccctaaacgtattttatcctttaaatcttagttccttataaatgacactttcataaatggaagctatatatttttatatttataataaatacttcaataaatttctatttttttattaataataaatggttataatgaattggtattttaattagggcacaaaattctaaccctgtgtctatttccagttatactatgt

SEQ ID NO: 52772 - DNA, 1300 bp, Cannabis sativa
aaaaaagtataaacacaaaggtttttacgtggttttacagttaaaattttgcatagtccacgagtcaatcttattagatttctgatagtgtttcagggctttttctcttatgatttcttcctccctttttcagtctaacttacctcgattaataactacatagtcaggcagttaattacaaagttgactgtaatatttacaacaattatcccctgaaatcgtggggtttgattacatatcacgtaaaataattgcggttaatatatgaatatcacacgggtctgattagtccctatatgactggccctatatgacttcaaagctgctatcagttttccatttgtgtgtcaagttcccaacaaaaaatagagtgggatgtctcaaaggaaaccaaagaattgcacgagaatgctacaacattgctctaactaaggttaagaaggaaaatacctccggccagagttctgacaagggaaaaagcattgcctaataggaagtcgcccaaggcagggacaaagacatggatcccggacttggggaaacaaacacaaatgtagggccaatagaagaagtggaagaagtggaaattgacccaaatttcttggccaggaaactcaaaatcagtaaagattttttgctcgaaaaacaattggctttaataaaatttttgagagcaaacttggacgtttttgcctggtcacattaggatatggtcggtattgatcccactatgatgtctcatgccctacacattgacctaaactttcgtcccgtccagtttaagagaagactgttggacaaagaacgcgtgcaagcactgaaagaagaggtagaaagactacacacaaacaagttcatcattgaagatttctacctggcttgggtggctaaccccgtattagtgccaaagtcaaacaaaaaatggcgagtgtgtatttattttaccgaccttaacaaggcatgtcccgaagactgtttttcacttctaagaattgatcaacttgtggatgcaacagccggacatgatatcttgagcatcatggatgcctattcgggttataatcaaatcataatgcatccaccagaacaagaacatacaagttttcgaataaatatgggtctgtactattataaaggaatgtcgttcggtctaaaaactgctagagctacatactaaaggctagtaaacaaaaagacaacttgcaaagcctcctgtactctcaaaacccaaagacggagaagaattagtaatatacttagttgtcaccgaatacgctgtaagcgtcgtgctgataagaga

SEQ ID NO: 52773 - DNA, 2103 bp, Cannabis sativa
taattgataatgtgaaccaaaaattacacaaatgaatgaaaaatacttatgtttctttattgatatcgaataatacggattacattgaatttaagttttatttttggtcataaaacccaacactgccttggatggatcgacattagggtgacatctgactattggatcagtaagtggcgtatttcctatatggcatttaagggcatcatgtcgtatgagctggggcacaaacgcgtgtcacctcagcgcttctcctattgaatttcccttatctctagccattggataatttggttaagtacacaaggacacgcatgctctgtatgatagtgtatcgtgggggaaagcctctaacgtcgtacatgaaaaagcctggttactggggcagtagtttgacacgtataggtgaggctttagcgggctaaaggcgtagcccagtttagcgtgtctcgaaattccttggcccttcttggaaaattcatattcttctcgagagcagacaaatttagttcctggaatggagggagagcttggcttacggatcccctctgtttagctagcagtcggggaactccccttctcggacactcttccactaagttggtgcctttatcttcctggagcatcaattgaggaagttgggcagctgatgacttcttagtctttcttgattaaaaatccacgtgttatgattatgaaaatgcggataacagttaatatggtatatataattttttttaataatattatattatttttttattttttattgtaggtatatatatatttttgtatggtatatattttttattgtctatagtatatgatttatttaagatgatgtttagtttctatttgtaatatattaatgttttaatatgtatacatattttagtagtggtatatataattttgttagcatgatatatatattttgagtattaatttagtattgttacaatttctttgtggtatataattttactactacggtatattaaattttagtgatacaatatatcaaataccgttatatatatttagtcatcaaatatatttattcatttttattacaatataataatatgcaatattaaaaaattatataacttaatataattattatatatatattttattaaaaaaataatatgttgtaaatgtatttttataatttttatcagctaatttattatgtttgcctattttttcttttaatttttttcaaaaaaaagatattgactaatttaattttcaaatttaggatcattttacatctcaacccttaattttattccaaatcataaaatattccatttctctacatttaagatgtatattttatcacataaaccacaaatagagaagtgaaaattctgaaaattgatttgagagaagatgccctaattttatcattggtttgcactatgatcttccaataccaactcgcgtctagtagaacttcatagttccaccaatctttcatcaacctagttaacctataaattttccttttctgagatagccccccatgcttgcctataacacaaaaatttattaattttatatctttaaaacctaagtcactttctttttatcacgacaaatctaagaccaaatcggacaatttggcaactcatttccctttcaaagataagctcaacaaatatgattaattttgtgaaattgatttttctgtataagtagagtaacgattcctgtcccataaattttttaaaaactgtaagtgcgcatagaggaggaagaatgatgttgaaggtgaaattgaggtaagacagaaacatggatccgatcattggttatacagtcagaagagatatggtgtggtgatgaagacgtcataaaaatgtaaatgtacagtcaaaatcataaaaaaattaaaaactttccatgttagtcggtgaaatattttgtgataaatagtgtattgtgtgaaaattaaaatattataaaaaaaatggtaacaattgcaaagatttttcttttttgtagatctagaattcaccaagtaaattcccaacttattaattctgccttgcgccactatagatttagaattgaatatcactctcagttatatag

SEQ ID NO: 52774 - DNA, 1439 bp, Cannabis sativa
ccttgagcaacgagtctggctttgaatctttctattgaaccatcgctattaagtttgattttgtaaacccatcgacatttaatggctcttttatttgggggcaatggtacaactatcaaagtgttattgttgcgtaaagcatggagctctatattcatagcttcaagccaatgtttgaattggatggcttgttgataagtttgaggctctttgagtgaagtaactgcaagaataaatactttataagattcaaattgtctataataggacatgtatttatcaagtgagtgaggagtagaatgcttgtcttgtaaaacagaataacactcgaaatctcgtagataagcaggaggtctggttgttctacttgttctttgagggatcacttctgaggttgtaggggtggctgctggtgtgactgttgtggcagcaggcatgtttgtggtgatgggggtgtctgtgtgtgtgtcctgcacaggtaaatctttgctgggaacagttgtggtgtcaatggggtaatcatcaaccagtgtgttatcaacgctagtagagggtaaaacaatagtggtgaaaggatcgatgttaaaaatttcatctttaagtttatgaaaaggaaatatatgttcatgaaacactacatttctagatatgaaaacctggttactgttgatatcatacagccggtatcccttcacacattggggataaccaagaaaaacacaagctcttgctctggaagaaaatttacttctatgagctgtaagagtagaagcaaaagcaaggcaaccaaaagtttttaaatgggtgtaatcaggttgaatgtgaaacaacaattcataaagtgtcatgttgttctaattaggagttgggatgcgatttatgaggaaggtagcagtcataatgcgttcagaccaaaatttcaatggtgtgtgtgcttgaaaacaaagagcacgggcaacatttagcaaatgttggtgtttcctttcagcaatagcattttgtttaggtgtctcaacacatgtaaaatcatgcaagatgccatatttgagaaaaagatctttgaaaataagttcaggggcattgtccgacctgaactttttgattttacagttgaattgagtttcaccataactcaaaaattgaggaatcacagtgtgtacatcagatttttgcttcaatagataaatccaagtgaaacgtgagtgatcatcaacaatggtgagaaaaaatttaaaaccagagtgcgatggaacatgatagggaccccacacatcacaatgaatcaaatcaaaaatattattagcaaaagtggctttatttttgaaaggaagctttctttgttttgccttagggcaaatataacaaggaatgtctttatgcaaattagaagaattacaattaagtttgctatctaaaagattcaaatgcttgttcgaggg

SEQ ID NO: 52775 - DNA, 904 bp, Cannabis sativa
ccaggacttcttcacctacgaatttttttgggtctttaggcttcaaaataatcgtataaaagatcgtaacaaactcattttgtggaacgattcatagttccacaattatcgggattttgttacggatgttactaatacttattataataataaaatatgtaacaattacaccattctataacaatattattaatattactatattatatctctaataaaatgacaacaataatataacaaatatattacaccataatataaaataaattcacataattattattgttatacccacaataataatatgcacaaaataaataattaaattatcacaagtatttaattatttactcaacattctcatatgtttaataaattttcttaatatgcaaattaacaaagtaccgacaaacgaaaaaaattacaaaattaccctttcaagaaagaggatattacaattatcccctacttgaagaaatttcgtcctcgaaatttacttttacattttcagtccacacaactgttcctctcaaattatgaattccatcatcgaaattatctaattcaatgcaatcaatagactacctgattctatgttttgtagcataataattaagaatgtagccctacacataatgatccaatatatcgtcaacaactgatgtcattcatacagaccatatgtcttctataaattacatgaactgcatgtaagctaaagattgtaaaaggtatccttacacatgcgaactagccaacatctagccttagaagctcacaagttaacatactctcatgaatgagctacatgcatatcactataaaagaaacatttactaattcatccaactaatgaaataggaataaaatttactatcaaaatcactctctctaagaataacat

SEQ ID NO: 52776 - DNA, 1315 bp, Cannabis sativa
cagcagggagaggcacaccagtagggaaatctgatgaaggaggttgttgttcattatgagtgacaacctgtggacaatcagacaaaacaacacctgtagtggactgacctgcatcaaaaccagaagatcgactaggaaggcaactgttagtgggagataaatcatgatttgtggtaacaggttggtcattctcaacatttgagtgcaataaatcagccattgtgtaagaacaagaagaatgagaacatgtagggataatagaagatacaccagtggagacaggaactgtgttgggtgaaatggtactggttttagcatagggaaaagcaaactcttcaaaaatgacatccctagaaatgtaaagtctcccatttgaatctaggcacttgtaccctttgtgattgaggctatatcccaaaaaggtacagggagtagacctatattccaacttgtgtttattatatggcctaatgttggggaaacacctacaaccaaaggttctaaaggtgatgtaatcaggttggatattaaacagtgtttcaatgggagatttatgaccaagaagtggggtggggagtctattgtggaggtagacagctgttcgaaaagcctcatcccaaaacttaagtggtaaagatgcttgagcaagcaaagcaagaccattttcaacgatgtgcctatgctttctttcagctaggccattttgttgatgtgtggtgggacaagggtgtctatgttggattccatggtcagtaagatacttagtgaaggatctatactcacccccccaatcggtttgtaggcatttcagtttttttcctagttgcaactcagcttcagccttaaagtttaggaagactttaagagcatcagacttgtttttcagcagataaagccatgtaaacctggaatacacatcaacaaagtgtatatagtacttgtaattgttgaaggatggagtgtatgaaggtccccataaatcagagactacaagctgcaaaggttcattaataacagtagtggatgctttgggaaatgggaacttatgaatcttgccaagacaacaagctgaacaaatggaaaaatgagaaattttattgcttatgggaatgttacatgactgtaaaacagtttgtacaactctttgagaaggatgccctagtctattatgccaaagagtgaaatcattttgcacttcagaattacattggacacatttagatactgctactttggcattattaagggtgaccatgtaggttgttttaacttctaaggaggctggaaaagtgctgctactggtgctactggtgtt

SEQ ID NO: 52777 - DNA, 1247 bp, Cannabis sativa
aaaaagttgtcactaaaaatagctatttttttagtgactaataggttgtataaaattatgttagattatattgcactagtaaacgtaggtgcgcttcgtgcagttatataatagagtaaatataaatttttgttctgtattttaaaaattattgatcattctttttaattattaagttaaattataatttaaatatagtgctttgtaaaataaaatatcatgttatgttgagtctaattgtaatcaaatattttaatcctgacattaaaattttctcttcttaactctcaatatttattgtgattcgattcatgatctaattacactgaaccgattcaattacaacgaactaatctaatccaattcaattacaaaaaattagacatccaattacaatgaagggcgttcatggtgcaggcggtgtggtttttagctaatttttcaagccaaaccgcacatccaatttgtatatttttccaaaccgcaactacaatgcaagatctcaaaaccataaaaaccacttaatattagtttggataattaaataattttatacaataattatactgtgattaaaaaatttaattttgggacaattaaaaatgaaaatcaataaacttatttatattatataggacaacataaaaaatgattcctagacaatgtgacattatttctaaaacacttatcatcaaattttcttcacaaaatgacaaagcttcataaattaaaaaaaaaaaaatcatataaaataccacttaatttatttattgtcctcctttatataaatatatacatagatagatagataggatagttaaattttaatttatatattgaggttcgcaaaataaaatataattaatgatacattgagtctaattgtaatcaaatatatttttaccttaactttagatatagattttaggcatattaacgtgatttataacttaattgtgcagctcattgctaatcaacgagtttattaaaaatcatgtttaattaaaactttatataactaattgaaaattcaaaaataacatacttatattataacgggatcccgttacaaaatatttacataagttttacagtgcataatacaaaagtttgtcgcctagcgactatacaaaataagcccatgttgtcccaaagaccgtacgctccaggcctagccatcccgacatgtaaaatcttcatctgctcgctctcattgttgctcaaccttagctttgcccttacctaca

SEQ ID NO: 52778 - DNA, 2545 bp, Cannabis sativa
atagcctgagaaagaccatctacacgtagcttgacaaaggttgtctacacgtaaaaggactcaacctctgcatagacctcattctctgcagtagaagacctccatttctcacaccaaaagatcccatttcctgtagcagagatctcattccctgcggccgagacctcattcccagcctcgagaaatttataaacaccagtgattggctggtttggagacttccttgtgcaaacctttgtcttgatccatttgggttctttagtagaacccatgatctcgccaactgggattaccttcttcctggatcccttgttagtctgaggaggacctctgaattcgctctcaaaatctacgtccattcttgtagagacaaagataagagatcagtaaggcaacagtttaacagaggatgatgcttacccttagaaatctcttgtggggatcgcctgtaacgattaacaatacctactgggtttggattaaccgaacgatctttagtcttggaatcctttgtttctaatttaaactaaggattgaagcctttgggaacgtgtggagaggaaaagtagttggtatattccggtggtacagatttggagggataattttctgagtttggatgggacatcttagcaagagaatgacaatccaatttctggatgtaactcaccaaaaaccagaattttacgaaatatggctagactgagccacctttttatacttagaacccagtaacggtaaggccaaagggttaggaaatccaatagttgggaatgaggtacaaggttaaaagacggttcattaatactaataatgaccctcgaaactatagaaccgataaagttgggggcatgcgtggtcttgaagaaagggattatgacgaatataccctctataagcatttaaaatgtactttttattaaaaagaactttttgagaggcaattgttatacctgaagcatgtaacagtaataacatttaatggaataattcattaaatacagaagtaacagagtatatttgtaacttgctgactataaggtcttatgcgagatcaaagatatacaaactgttgcctcgtgtattaacgagaaaccatacggcattagatgcacaaggcgagacatcaacttcgttacgactagaaagacgtaagcaatgcataatgactatgaaaacacttagcgtataatatacaaactaagtataacagtcgggtggactcaagacctaataagtgaggcgcctatatcgctataggaaggcgcgctcctgttactttcaccaatcaattttagacatctttgagtaagacttatagtcttgacgagtcagaagctgacattcaaattatgataactgctgaagtaatctttgttatcaagaactacaattgtcaaaatgaggtgttatgccatcaagcgaagaagcaacgaggcgtacatcgtcaacctcagaaagataggagaaaagctccagctcgctatcaaggtcattggtactgagttcctgtcgagacatctcagaacgttatgatttaaaacgtgtttaaatacatgatcattttgacccagtaaaagtggataaattacagctgcgtgatatttaaataataattacattaatactacgttaatatgtaatccgaccccatgatttcaggggagaatggttgtaaaagatcacagtcaactctgtaattaactgcctactatgtgattataaatagaggcaagttagacagaaaaagggacgaaaaaccatcagaaatctaatgagattgactcgtggactatgcagaattttaactgcaaaactacgtaaaaagcctttatgttcatttttttttctttagtatttttaattttgtgtgcaagtttatcatttaggctcaaatttggttaatgaaaatctacgttaacataaaatattaaaaatgagagaattaaggaaagaagagaaaaataattttggagaaataactaagtgatatgtcactgtttcattcatctcctttatatatatatatatattagtatatatacatagattttttaattaaataatttattattgtttttattagtataatagactatattatcttgtatataattttattaaataaaaataacactttaagaaaaatataataatataaattatgaaaagaaaattagggatgggatcaataaaaaaagaaaaataaagaaaataaaaaagagaagactgtctaaatttttaataaaatatgaaattaaagcataatagaaatttgggaaaaaaatatagaaacactgtcaaaagttttaaaaataagatatttaattatattttatattttaaaataacggtgatacttttaaagttgtgttgccaaggtgaagtattttttatttgtatttcacattcttattttttttttctaagtgtgcatgtaattggattgttatttatttatacataattttttgcgataaattatgaataatttttttcaaaaaaatatatattgaataagtaaatatagaacggtatgtagtgt

SEQ ID NO: 52779 - DNA, 1150 bp, Cannabis sativa
tatataaagatatttatatatatatatatatttatatcttttttgataaaggttatatcgcactaattcatatcaatatcaattaggtattgtaagtaatttggtgcatgaaaacatgactctcacacgaagcaaacttggccttgaaaatcaactgtataattcatttctaatatctagctagctagagctagcttccccaccgccatatgtatatgtatattaaaagaattgatatgtgtcaaccaactaactctaactgtcaattagttactttcagtttttactgtttattttcagtgtaactaattctgttacaattcttgtactcacttttgttggttccctctgtaaatctcactctataaataaataaaatggttcttctctttggcttaacctttacaagccttagagacattgtattcaattgttttttgtttagagcttagtattgataggttcatacatggtatcaggaagccattgacggaagtctcatatggatcctcaaattctcgaaactctttccaatcatctctcttcgcacaccctctggagagccttggaacaacgatttgcttctcaatcaaaggcacggctactacacgtaaaatctcagctctctatgattcaaaaagggaacctatccattgctgattacttcgataaaatcaaagttcttagagacactttgtccactgctggtcatccgattgatgaaagtgacctcatcatgcacctgctaaatggcttaggtccagaatacgacccagtcgttgttcatgtaacaagcctcgtcgacgatctttcttttgaatcgatccagtctcttcttcttacccatgaaagtagattggaaaggcactacactattggagattcttcatcaaaaccatctgccaatctttctgtccagtcttcaagattttccactggttcaagattcagcaattacaatggcagaggtggtgcctcaaatcaattcaatcgaaacaatcccagatccaatggccgtggctatccctccaatcgcttagtgtgtcaagttgctcaaaaagggtggctagggataaaataataccatggttggctcaaaaggctcaaacggtcaaaaaatggcctaaatcatgtctttggttaagcattg

SEQ ID NO: 52780 - DNA, 3320 bp, Cannabis sativa
tgttttggatgcttgattcttgattattattggtttgagtttaaatgggtatttgcttcaggtgtatgagaagcttcttgggagccaatgctttaaatgcttgtggtgatttcgtgaaatgcagagaatgaaattcttggatatattatatggatcactgaaaatttgttgctggttcacttcatctgtctctgtgttgccttctagtttatttatggatcttgatgttatttgcttgttgaacttattttaaaagcatactagagcttttctggtaaattgtttcaccgaatagttatatagttcttgttcaaatagttgaggaatgcttttattactatgttttctagtacggtgcttgtttaacttctttttttactatttctttcttgaatccttagtccttttctacttgagatgtgtacatggaccctgattagacctgagaaaaagttatgtatgcatgttctcattataatagtgtactactttatattttgtgttaagaaggagcaatgcttcctttcaatggtttgtggtaataattctttcgccagatgcgttctggcatgttatatttgagtatggttggaaatcttccactgttcgctatcagttagcattgcatttgtattaggcctacatggagaaagtgttttaattcctacttaccttccagaatttttttttgtaaatgtgtcaatgtgctggacgatggatttggtgacttaaatatatgttttgccttgatttttggataaccctctattgagtacattattttctttcctggtttttactcggatgatttgaaatttgagtatacctacatgccttctacgaatattatagtttatttattactcgaacctttaattgttttttctcttttacttttgcttaatctacttggaactttcaactgtattggtttctttcaatgttcctttcttctttctacattactaacctatgtgactgataaatcttttgctcgactattaattaacttttctcggtgtcaaactctcttttctaattaaatgcttgatcttttgtgggattaacttgaaacaattgattagtgttgatacattatgttatggttcatgtattacattcttcggttccggggctaatggttattggagctggcatttcacaccaaaatatgaatgagcctctgaagctgggatgctccatctggtgtagtatggtgtcaattttggttcggagggggaggcatagtaaacttaataacctttgacatgtaatttcaaaattaaaacaattgtactttctttctcatgtttggatcctatattatctgacttttctttaactcctgaatatagtgttggagattgattatattacagttcctttcagaaaatataccaagagccatttcaattgtagatatgacaatcttgtttgactattaattttggctttcattatcagtacttctaacgccctaaaattctaagtggagataacaattgggtctacgtactaaaaggtactactgcatattaatataggtcagtgagtgatatttgtgactgctgttcatcagtcctgtcctcgcttcataatcttttacgacaaaattttgtagtagagctataaaagatggcttaatttaaggctgcagctatgctggaaaacctgttcttttctaatgagataaaaccgattcttgttattcaaaattgcattactgtcaaaccgtagaatgctaagatcaactatagacttggaaaactcggaaaaagaaaagattgaaaactctgatagtagtaggaaaaatatcaaatacttgtcaagctaatatcaatatactcgtttttaaattagtgggttaatatgtgactaaaaattagtatatttgccaaacttaattgtcaatatagtaacagggtcgccaagtcaatcatcaaatcatcttattttcaataggcaataaaactaataatagcaccaaaagataaacactgatttttgccgaagtatgcactactcgattcctccaaagaccaacttggcgtaacaatggtagatgcagataaccctttttatgacacttctttaatacttcaagataagctaacaatattgaaaagaatattaacaactctatccctgtcacggtcagtcgaacgtgggcaaagggcataatccacttttaattttgaagagaactgcatttccaaattttggggtgcttctctcctgttgctcaaccagcccactgagagacataaagccttaccctgcaggttactgtgttttaggaccatcttcattcatgtttgactcaggattgttcgtattagtaaaaatagaccatctcttctctacgattattaaaatattaaatatattatacaagaattcaagcaaactttggaccctaactctgatgcctcctaggcctcatatagtagttgtcttgtcatatcatacttccaacttgtcattaggggcttgatcaatcgatcacaaatcaccatctctatggggtatttgaccatatcattacatttaccacctcccaccatggggtaaaatcccagcaagctttagagaaaaaggaaccagagaagagagagcatggctcaccgattcaactgcatgaccatatttgaaacatcccttcttgaactttacaccaggagcaccatgtcactaagatgtaagaaggattctggaaaacaccctccccataaattcttttgccttattttgacagcataacaccttccaccatctcaaatccgaatttgctaagacatatgaggcatcatcccatgattgccttgtatcccaattcccaatgtaccgtgtaaatgcccttattattgaaatgcaatgacaacacattcttgactgcacgaacattcagaggaatgttacaaatcaactcactatctatatattcccaaaataactcatgagagaaattaatttccatctttgaaattgttataggatgaattttttacttagaaatacgagtgcagttttgtatacgatggacacgtggacccaatccctaattgggaaaggatgaagtgtcaataagcctagtgggacttgcatgataaaaacttgcgagaaggtgcaatttagacaagatctagtcgcacactatgtatggcataccaattatatgcaacgacaaagtgtttcccctgcacccaatgtgacgaccgcatctttatgattgtctagtctgaaggaataatgtgtgtgacaactcacttaaaactcgagagttctacattatcagtatatgaatgcttaaatatgcgacc

SEQ ID NO: 52781 - DNA, 1070 bp, Cannabis sativa
tccaaaaagagcaacaacaaaaaaaagccaatccaatatcccctccccccactttttttttttttttcatttctatttaaatttattagatcatacgaatataatcacattgattttgctttaaattagttgataaatattatacaattgatttgtgtagcacatataatcgtacgtttatatataatgaatataaaagaaaaaaatagaatcatttgattcagttacaccttgtatatatctcatcattttatgcttaattgttatttaatgatgattttgtgtttttattcttttgggtctagtttgatttatgttatgtacagtcattaagttattttccaatagtaaatttgattgtgtaaaatttctttcaggggatttaattaattttgttaaatttttttatatgcttttacaaagaattactttaaaataatcactgatgcatcagtggaaaattgaaattaaaagtacgtataacatatgcacggttaactttaaaagtgagaaataattatataccaaagttgctcttaataatattaaagttaataattaattaagagaatcttagactttactcattcttttgcttataaccttttttcttttctgtaatatccaaggtaagcttcaactctccataacctttatcaaaatttcttttcaagaatgattatatatgtggtgggtacctatatataatagacaaaataataacaatttacatcaaaaaattcgtttgtgcaccctaattaatctcatgtacagaatcaaaaccaacattttatttatactcaaaaaaaaaaaaaaaactagcccatacatttctcttttcctattattgagaactaaagcttcgtacctttagtttagggatgaattgaaaagaaaacaaaataagaatagaattatattaaaaaaaattaatgtacataaaaaataatattattttgctttgaaatgttattttatatcttatttttaaatgatactctaataatttaaaatgcaaccaaaataaagaaataaaaattaaaagtgattattttttatttttattttat

SEQ ID NO: 52782 - DNA, 930 bp, Cannabis sativa
tcggtcatcactattatcgttacccgatcgagcttcgatgattctaactccatcaaattggccttcgatgatgtctgtgacttcgagtatcaagtcctcaacatcgtcgctaacacccgtcgtgctctctctttcgcttgctttgccaagcagtaagtatatagatacatattttaatcatatacacaataatagattaagttaagagtgagtattctttaactgaaatggtattttgattattatcttttatttcttcataaaagggttttatcgtatttggatcaggattcagatacaagacaatgcatattataattgttacaggggatctattgaagaggatgtccttgtaacaatacacgtggagacattttcaaagtactccttattgcttatatgtctcagtaattttgaaatatatatttatatttcggtaacaacaaaatatccatgtgtattaagagatgatgaaatcaaaataagcatacagaggtatgtgaagatacccaagtgggtttattttcatatccttatttgtagactttgtcaattcaattaaacacattggctataacttttgccaggaatgtttttgccactttgacaaagtcatatttaaaaatgttttcattaaatacttgtatttgatatattatattttggttgtacagcttcttctgtctctcgtgagttcattaagatatgagaaaaatgaggtgaacacaataataccgaaggcagaggctaagattctttgtgaaaaggtcacgaataaggcctgtattgatgatgatttcatcaggattctaatatggtctaagttaagctaatttcttctctctagggtacactgccactgttttgctcaataaccataaattatcggacttgctcagagagctttaggtactcttttaattttcttgt

SEQ ID NO: 52783 - DNA, 1238 bp, Cannabis sativa
ccaaagaaaattcttcaccttaggaggcaatttcaagttcaaaaacatcctccaaaaacccaaattttcttgagtattccacctaccacttcatacttgtaaggcgcgataagcacttttgactaaataatccctatgcgtctccaacatccaaaaccaagcatcctcaactgaagacggagacaacggaatacaacgaatcaaatcaatatccctctgaacaaataaatcgtaaagaaattcctcatcccacttaatagagcccacttttaataaattattgaccttttaagaactctactacgtaatttccaaacttatatatcaacaaaaatagacatattaacaacccaaataatatacatttttttatcattaatttaataatttcttaatcaattatcttgtgttttctttatcaaattattttgtaaaataataattaaaaacaaaaaaacaaaaataggtgacacgtgtcttatccacaactagtatatatatagagtatgtatatatttagacttatcattttcaatttgagtttctggaattctccactatcatcaatggcttccactgtaacaaaatcctcaagctacaacaaatacgacatcagaacacgaaaccctaaccctagatccgccgccttactcgtaatcgacgttcaaaactacttctcctccatggccaaaccaatcctccccaacctcctctcaaccatccgtctatgccgacgcgcttccatccccgtcatcttcacgcgtcactgccacaaatccctcgacgacaatcccatcctcgccgagtggtggaacggcgaactaatcttcgacggaactcccgaagccgaactcatgcccgatctggactccgatctccgcctcggcgaagatgtcgttttggagaagaacacgtacagtgcttttcagggtactaagctggaggagattctgagggagcggcgcgtggaggaggtgatcgttgctggtgttatgactaatctgtgctgtgagacgacggcgcgtgacgcatttgtgagagggtttagggtttttttcagtagggatgcgacggcgacggcgaatgaagagttgcatgaggctgctttgaagaatcttgcttatgggtttgcttatttggttgattgtgagagactgaaggaggggctttttgggaattaaataattttattattattattattatgtgagcttgtattatattgtgaaaaataaata

SEQ ID NO: 52784 - DNA, 2937 bp, Cannabis sativa
aatccttctctaattttcttacagttctcgaattttataatattttattggttgccgaaaacctctgtcaacaataacattaacagagaaacaactataaaatcagcccgaaacttaagctaaaaatagcctaacatatacataataatttttataaatattttattaaagagaatatgtttatttagtattttgtgtttttatggaaaatatatttggtaccctgtgttttttatacgtacttaatattttttcaaattatacatatttagtaccctaaagtaacatttaatcaatacagttctatcaagttaaataaaaaaaaattaattatatgtaatcaaataattaaatttgcattcaaaacttataaaatttaaataatttgattgtattgataaaattttactaaaaaaattaaatttaaggtatcataatattaaaatacaggtaccaaatagatattattgaaaatataaaatatcatttgtaaataaataaaatacaagataccaaatatttacacactctttattaaatattttaattaaaattaatttactttaaatatataattaattgaaatataaaaataaaaattttaccgttaacaatctgttatagtagcacataaaagtaagtaacaacctaaattacatttaacccattaaaaaaaaaaagaaaaaaccataatgacatttttaatctaacatgttctgttttattattttttttaaagaaattacataattcatctttaatttacaaacaaacgcaagaatgaaaaatataaaaatgatgttacatgtgaataaaatgcagtacatgatgtcttgtagtagactagtactatctgctattaatacaaaaaggtttccactctaacctacatctgctatccttgtacggaggaaaacacaccaatgaaaaataaagaagggaaagattacttctttttggatttagctttcgaatttgcttcagcagcagctttagcaagagttgaaggtttaactgcactcttaggattaagagcctttcttatcttaaacacagcccaagcagtccctatggcatgcccagctgcatcaagcccttcatttgtcaccttccccgcttcttctccatacctgcaaaatcagaattactcaacacaattagtaaaactaaactaaaccaaacataaggctttgtaaatccttgaataagattttttgaatcacctatgggaaacaagtccagttgtcactactgaggtggtcgacatgacattccttccagcaacttcaactgcatcacagaccttgcctgtgtacacacaaccatatcatgattaatattatatgcattggtttagtgtagtgtattaagccaagcttttaagcccaaattaaaaaaaataaagtagtgttttgagttttaagatgagctactcactaaatccatccaatgaagcaaggacaatttcaccaggcagtaagctgaaaaatctcttgcccactttagagttgactacagaacttgtgaaaaagccggatactttgaccaccccagaaagaattccacttgccactctctctgacatctttgtcagcttcttaactctgaaatgcaatcacaatatttagttgcaacaaaaaatgatctactctgtaataagtcaaagcccaatgtaaaatgttgatcaagtatgaaataagataagcagccaaaaaaagatgaaaccttttgatcctcctcatggcttctggactaatctccttgttggagcaaggccccagactcttcttcaaaaactcattcccccacttcaatcgatccactgttacatctccacaccacaaaatccctctgatcagttgacccgacccggacgcaatcagcttggcgacccggctactgtaatcctcaacattcggagccaaagtggtccaataagccgccgacctctccctaatcaaatccttcttttcctcctctgattccaactcaaacggcgtcgtttccctcgccacagacccatccaaaaccccacaactccctttcccctcttccactttctgctccgaaaagcaactgtaagtctccaaaatcttatccaattccttcaacaaatcaccttgacccttagaagcaatcgtcaacccgtaattcaattcatcgaactgacctccttcacgatcgtgatgatcagaaccctcgccgtcttcgtttgccggaaccctaagagcgaagaaatagtgagagtcatcgagcttcacagccgcctcatctctcgccagcggccactgaacctcttccccaatacgagcaaggactgcgacaatgttctccccttgacggaggccgactatggtgaaatcgccgcaagcgagctcaacgctgttctccttctcgatgaggtgaacaatggcgcctggaatcttgatcagtacttcttctgaagattggggaattgggttctgcgaagcggtggcttcgtcttcggggaagagattctcagcaaggtctatcatgtcaatggaagggtacaaagacgaagaagaagtggggttggacaaattagcagaagcagcttctgggtttgtgagaatgacttctgggtagagagatttggcgttgtcggaagatttagaagcagacatcactggctttgaacgatgaggaataagtggaaaatcgagtgaaggagagcaatgagaactgaaaaggtttggggtttagccaagtatttatgatgaacaagtttcagaagacgtaggagcgaaggatgaaggagccgtgtcggttggaatgaagccacgtggcacgcggggatgtcgcgtcaaaactgctttactcttcccgcgcattcattggtatacgacaatgagttgtatcactatcagtattacctgtcaactataataatatatgtttctttcaaaaaaaaaaaaa

SEQ ID NO: 52785 - DNA, 1065 bp, Cannabis sativa
attaacaacacaatgaatcaaaaccagaaattaaacaaagaacaacacaagaatttatcctggttccggtcctagagattaacatgattcctgaccatattccagctgagaaacatcaccaattcttcattaatatgtggaataagagagtattaatacaattacaagattcagagcaatctcagccctgtggtactcgaaacacaccagagaaaacagtcacagttttctctctcacaacctgaatacacccccttgttcttgaccctcttcaagaacagaactctcagtttagaatcctaagcaaactctctccaatcctctctcttcttctactctaaagtgaaaagaataaacatatttataggctggactcatactaggaaatagcatcaactaactaactaacataacagaaagttagttaagttaattggtttaggtgagttggataaatagttagtttagaagatcaacttccacaaaaactaaaatatttcacatgttagtttttaaattacttctaaaatttgtggatcttgtttcaataataataaactaatattttcaacgtaagtaaattaaaagagattaagcaaaaaataaaataaataaataaagaggttttggaaagagggaagatatataatatatgtactacttagtttggttattaaacaatcattaaacattaacattgagatttgagattccgaaattgaaattagtagacaaagtagtatcacatttctagctcatatatagtttcaatgattccttgatcttagtgtttattattaaatattataggtttttgtccttattattattgctactattcttttttacttgctttttaaggttattatagacttaacatgttaaagaacattattagtaattagcactttctcacgtgttaatattgctattagtgcaattaagtatcgtgtttcatatagtttaatataataatttttatagagtatatcccttaccgatcgcaaagcgacacgtctaaaagatgctaaacaccactgaatagtctctgtagaagagggagac

SEQ ID NO: 52786 - DNA, 1036 bp, Cannabis sativa
attttagcatttagaataatttttaagtctattttttacggttatatacgttgtaattatttaagatattttgtaaaatttaacacgccaattatatagtttaaaagtttgttgtacgcgtgactcttttattttatacgcctgtgaaatatactatttgcagactgatttttttttgtaaattattctaaatttcttaaaattatgcacgatgtcttaaataaatatagcgtacacgaccataaaaacaaattggactattatttttggaaaagaagaaatttttttattcaaccaaccaccaaaacatgatacaaaacaaggcaagacctcacaacttaaaagttgtttatcatgaggattacatctttgtctctagcaaattagaaaagttacaacaactacctctagtcttaagactaagcttaactattaaactaatggctttagccgaatcacaaataccctcaaaaatatatttgtttctattacgccagaaaaaataaataaccgcttcaacaaaaaccgatataatggctttggttatcccgaaacagggatctttcaatctacttaaccagttttcaagttgctgccaatgctttcttcttcttaaaagtgttggcacatttaacttgaatttttcactctcgacactgtattctcctattttcttgtcactagactgttgggattgcttatggtttccaccaaattttattttgggagcattatcttttcctcaagattttttttttcttatagttgcttttcaagaactttgcatagttcttaatctgtaaatttagagtctcatcagtgaacttctcagactcatctagagacactttcttttcttctttatgtaaaaaggcaaaaaaaaaaaaaatccattattttctttctccaagtccttctatttcttctctttcttccacctaatgagagtcatttcatagttttacaatgatcctatcagttcatccaaatcgagttcatctacattctttatttctatagaggtaacctttcactt

SEQ ID NO: 52787 - DNA, 2026 bp, Cannabis sativa
tctttttatgtcaatagttatttttatttcatgttcatatatttttttaaattatgatttttttctaataaattatcatataattttttatttatttatttttgttttaatatttaaaatatattttatttttattttatagatatattttttaataatatgacaataaagaaaaaattaaaaaaaaaagattttttcatttttacactttaaaatattttttttttcatttttacaaattctctttctattgcaactaacggagcaacctaaattgcaatcaaaatccgtacagaaacccacatataaactaccggagaaaccaccttagaaacccaaaccgtaaatttaaaaaaaataatgttaaaaaaatagtatattaagtaatttctcaaaaaaatggtacaaactaaagatatatatttttatataaaataaaaaaaaaaatattaaaataggttgtacttataactttataaggtgcaaataaaactcttttatattttattttttatttttttttttgaataaaagcgtttatatattaaaaagaattagacctcatagtcattacaaaatatagcattcgggatagtataaactctttcatattttatatttaatatatatatatatatatactactatagcttttagagtcatctttttcttatagctcataaattaacaacaaataaattgatttaagcatgtctttaagataaataactaatttttttaaatggaaaaagtttcttcacttttgctttcaaggttaatttttctaatcaattacctttgaaaaaaaaaccttaaataatattttgatttattttattatttttgtgctcataaataaaactatcatgttatacgataatatacttgtaaagttttttaaaaaaaaaaaaaaagctgttaaatattaatttttataaaaaacaacaaaaaagtggacataaaattcctatatgtttttatttatttttttcctaacaagattcttatcaattttattgattcaatctttagtagatttttttaatcaattttatcattttttaaactttagaagaattgggccttgaagtcattaaagaaaaaaattattataaccatataaagaagtaagaaaataaataaatatatttattatgtataaaagacaaaaacaagctaaaccagatttgaataataaaaaatagaaaaaaggaatgatatatctatttgaattcttctatagtagatatatatttaaatgtagaatggctaaattataataaataacttttagatgttgactgtttctgtttttgcattacatgtcataacatttatcatttatagctcactggttcataatttttatctatttattgttttgcacaaatgtttattttgatataatcaattataaaaatatttttcttgggaccattactaaaaaaaattaagcgagtgtttaaaactatcgaaaatatcactaagtattcctgacgattttaaacatctgtgaggcattctcaacagcttttaaacgtaaaattgacgacgtttaaccactgcctatagtattataggccatagtttttaaccgttagcaattagtttaaatatgaattttttttaaataacgtgttttctcttgctccaatagaatggatttttagatctgaaaatgttcaaattttatacatttttaaactttcggtctctctctctctctctctctctctctctctctcacacttcgacctgctccctgccatcctctctctttctcatagatggcgttccacgagctccaccactcatctctcgtctttcactctctcttctcgctctctctttcacaactccaccatagacgaaagcccgttcaagctccaccatggtcagtcacggccacaagctccaccatgagcaccaccgtcactcgtctctctctctctctctctcatctgaagtcagacgtgcgatcacgagctaccacaagcaccggtctttcttctctctctctctctct

SEQ ID NO: 52788 - DNA, 1426 bp, Cannabis sativa
atttttttaacggtttaattataatatttataaaacaaatagacttttaccgtttttaaaataaattttttgaataatcaattattttaaaaaaataattaaataattagtccacattaataatcatatttttataatttaaaatttattaacacaaataataattcattattaacaataatataattgtaaaacaaattaaattaaaaaaaaaaactgaacaaataacatactcgtgtattagttcaattttgtttaattttttttaatccatttgtagtttaattatatacccaaatgattgatcagatggatttttttttttttttttttttttatgtgtatgattttttttttttactattctctattagttcagtttttgcaattcgggtatgattcaaataataaaaaaatacactaatatttttattgaatgtttactatttagtaatggaaatcaatagtaagagagtcattcttttacatttgtttacttaatttattaaatttaaaaaagaaagaacttgattaaataaaaaaaagagaatttctcctaccaattttctaaggaatatgccattaaaggtaatgacttttatttattttaattttattttttaatattaaatttataataacaattttattctttaatatatctcttataaaataactaccatatactatagtttaatttcaaagagtaatttagtcaattaaaacattctgattatatttacttataaacaagataaatcattatcattctattttcaaatagttttagtaagcaaaatattacaaatattgattctcattatttttcaataatttattctgttatatttctccattaataatcttattaataacattacacaattaaatggggactaacattacaccaaggaaatgggaagaaaatcacccataacagctggttgtttcttttaagggatcaaaacaatattagccctacaagtattactatattatagttttactatcattacttgagtttaaatataacctctaaaaaaagtcattcttactatatttttttttaattaaaattatgtgtaacaatttaaaattataagagcttttactataaatattttaataatttaagcaaaagaaaaaatagcttaaaataatcttattttgtaataatttataaaaaattaattaataatttaattttggttaaattaatcttaattaagattttataaaaaaaaataatgtaccaggttagcatgttacccatggttttttattcttttttgacatgtttttcttttgtttgaatagcttatgggtcaaaaaataatgctagatttagtgagcatgaaaaagaagaagacgaagaagaggaggaagaaataaagaagctggagatgccacctgcaagtgtggtaac

SEQ ID NO: 52789 - DNA, 1139 bp, Cannabis sativa
  modified_base (789)..(799): a, c, t, g, unknown or other
ttgaatgtcattagattgctgcagttatttgaacaagcctctggtcagcaggtgaattttgctaaatccaccattttgtttagttcaaatactacagaatctatcaaagctagaatgtgttctcttctgtgtatgattgaggccccgacaaacagtctttatttggggcttccttgtactatgggtcgtaataaaaatgctatccttggattccttaaggataagatggagaagagaatttaaagttgggagggtcgtcttttatccaaagcttgtaaagaaattcttttaaagacggttgctcaggctcttccctcatatgctatgtcggtctttcttctccctgttgatacttcaacaaacttgaagggatgatgtccaagttttggtggcgttctgatagttcaaattcgcatggtgttcattggaagagttggcagaatttggcaaagcataagcattttggtggtctgggctttagagacttaagagattttaatctctccatgttgggtaagcaagcttagtgattggttgtaaatgagtcttctcttgttagtcgcttatacaaggctcggtattttcctcggggttctttcttcaatgctgaacttggtcacaatccaagttttatttagaaaagcatctttgatactcagaagctaatcttgtctggggttcgatgcaacattgggtctcgtacttcaattaatattcagcgggatccttggttacctgacgcattcaatccctttgtaacgtctcatttggtggggttagatgattgtnnnnnnnnnnntctgatggaggttaatgatagatgctgggacttggatgtgttgaatgatttgtttaatacccgtgatcgagaattgatttgtaagctccctatctcttcggctccttctgatttctagtattggtctttcaattcttctggtgtgtataaagtgaaagatgcctataactttttacataaggaagatggcttgcacctgtcaattgatgagaagagactgtggaagatagcttggaacattaatgtccctccaaaggtgctacatttcttgtggcgttctctctctgaaactcttcccacgaaggttcagctggtctcgaggcatgtcccgcttgatctg

SEQ ID NO: 52790 - DNA, 1075 bp, Cannabis sativa
tgttgcgaaatggactattaccacgtttgggccatgtttttaaataatttaaatattttaatttagttttacttatttttcaactattaattgaattttagtgtggtgatttttttcaatgatacatatgtttaatatttttattttaaattatgtatgtagtgtatatgtaataatgatataaatattcatgttattatgttatatttttatgtatgacaaaatttgatagattgaccattttataattgtataaataatttaaagactatttttaacgaaaaattctgaaaatacaataatacatacctcataataatttatctgcaaaaattttaaatagccaaaaaaaaaaaagtattggacttaattaagtcttgaactaatataatatgggctttaagtattaggctaacaaatgtaagaaatatatatggagtaagttgaaaaataccacttttattaatcaattaattaaatttatctctaattttatatttaattgaaacatacttcttttaatatgtattgttcccaaaataccctgatataagagagtcagatagaaagtattttgaaatgacaggagcaaaattggtataatatttaaaagaagaggtaaaaatgatagactttaaaaaagagtataaaaataaaagaagataatataaaaatgatacagagtgtaatttcctctatattctctttattaggaattatttcacatgcacaaaaataattaaaataaaattacaaaaatatattagtgcagaatataactaaaattacatataataaaggtaataacactaaatatatatatatatatatatatatatattgaaaggatactgtagagatttatatcagcatctaaagtatataattaaatattaaaaactattttattaatccaccagtttctacaacactctactacaaattacatataatatagcttggttaacagctcaaatatataatctagaatttcaaatggaatataaatataaaaattaagttgcggaatatcatatagtttgaactagtttatgatttttgtctcaaaaaaaaa

SEQ ID NO: 52791 - DNA, 3362 bp, Cannabis sativa
gtcatgctcgtcccacttaagctccgtattgattttgtcctatgtcaaaaaattcaacctatatttacagtactacataataaatgattggtttagtttattttgctatataattcagtgtctaatttgtgtgtacagttctatgtatcattaattttatttataataaaaaaaaatgtacaaatagtatgttattaggcactattgacattcgcgtcataaaagtggtgtctcgtaaatttatagttttttataaggttattagtgtacaaatattatattataaaaaattagaaaaattcttaattatgaaagctatacaattctaaaatatttttacaaaaatttaatattcagatcattaaattattgaatgtaataaaatagggtattaatacttgaaaattgtatttttgcatatgctaaaaaatttctttaacagcactaaagagaaatgggactgtaaagacttgcagtaacagaacagaaataacggtgtaaaaataaaaaatttgacacaagagaattatatgtgatatcagtattctttcaaacactcctagtctaaagagtcacgcccagagaatgacataaattagtaaagtctcaaacaattacatatacaattgacttaaacaaatttagactccatttaaagtattgtagcaatcctttgtaatttactttgccaatctaatttctaaacaccaccaaatatcaaaattcatttgtcttttgatgtgtgagtgcttacttcctcccgaagtaaggctttgaaatgtcttctcccgaaaacccttctcttgctcaatagagttattcaacttattataagaacaatataagtacaataaacaaagactaaaacctatctaaacactttaagttttcacaaaagaaactctctccctacgaagatgaaaatatgaaaatatgagacttgaagagataagaacgttggatgctctctagatcctatatagaaaccctagagacagccacaacacgttgttacagttgtacaaaactttcctaaaataagtcttgctttgcaacgacaaaatcgcactttgtagtgataaattgggacactttccaaataagtatgttaactgtggatttagccaaccgacacggagtctaactaggatcagatttttcttatgactgtcacgtgttgaatgataacaaatatagagacgcgaattatagaagtttgatccctttgttcaagtaatccttttttagttgtatgcactcttaaaataatctcctatgaaactcttcaaatttaatagatgaactattttcatcaacttaacattgactaccaacatcatcaatctgcacagattttcctcccaatgtcatctagattcttatccacaaagaatccatccaaatataggctcaacaattcctccgtagttggcaacaaattcttcactttaagctaacaccaatataaaataggtaaacaacatcaaacacacataatttttttaaaaaaaaaataacattaaaccataattaaaaatattaatagtacaatatcttggatggagaaacattgaagatagaattcttgaaatccttaatagaaggagcattatcattagactagtttagaattttaggaatatgatcatacaacttttttttttttgaataaaagcgtttttataaataaaagaagaagttagacctcctggtcataacaaaagatagcattcgggatagtagatacatctaccatgccgttaaaattgtttgcaaacgctcatttagccacattatgggctgccaaattacagtttctggaaataaaagaaaaattacaacaaatcataaaggtagagagaagattgcattgacttatatagttctcaatcccccacaaggagtcaacacctttaaggtagagagaagtttgtattgacatatatgatcatacaacttagtacaataaatgccatcaatatacaaataacattcattgaaccaaactcgaaaaacataggtccaacctctcaacctataaaaactaattttttcttcattatcacatttcttaattttaataagattctttgcaatcgcacctctatccaaatcaagaaataaagaataagactctttgccccaagcatattcattgaacctcccactatcaataatatcaaactctaagtcagagactttcttagtgtccgaatcacttaacacaaaacactaaacaaagtagagaacaacaacttttaaggcaagctcatcatcattgccaaacctttttctcgacaaaatctttctccacatccttcttgtttattctttaaaaccaacaaaactcttctccttcaataaattttttcttgtttatacctcaatttatcacattgaccagaacaatcaagccctaaaactaaagcaaattcctcaatgctaaaccttagcatccgactagcaacattaaaccagatctcattaccatttggttggacaacctccctcaacaacaaactgtgaaccaactggtgttgcaaaacataagaacgaagtcttgaaaagaatccaaatatagtttgttcaaatatttccttttgttcagtgggcaaaatagaattgagagtctcaataattgtatacaacatgtagaagtaacccagaaagtatgaaaatctttcttactaaatttgttatcccataactgaaaaaacaaaataatataatcaataaaacagtaaaacaacagcaactataaaatatatatataaaaaataatacataaataaacaataacaagaagaaaatataaacataagaaaaccctaaatagcaaaaaaattatataaataacaaaaaaaaaagtatatacgaatatagttgtaaaattaaaaaaaaataaaaccacaacaccaaatcaacaaagaataaacaaaaaataaactaaaaaccctaaacatcaaaaaataagcaactaaacaaaaaattaacagagaaaatacagttatatgtaaaaaaacacattgttgcacaagttaacaaaaaccctaaatagaaaaaaaaaaaattaagaaaaacataaaaaaaaacagattatataaaaattatttgctaaaaaaaagaccgaacccgtaatattatataaacaaaaaatcaacaaaaacaaaaaacaaaaaaaaatagcaaaatataaaacagaacctgagattatattgttataaaccaaaatttaaataaacaaacaatagcaagtgaaaaaccgagtttttgcaaatgtcagttgtatatacgaaaatataaaaactgtaagcgtttgcagcagcagaaagtaattctgctacagcaaaactgaacaggca

SEQ ID NO: 52792 - DNA, 5295 bp, Cannabis sativa
aatcagggtatgaagccaccgtcgcttgactatagcgtgtagatacgagaatttccaccttgttgaagatctagtggtgctaccaaaaatttttgcttactattagacttttatctaagtgtcttggaatgcaatgcctaaactcaaatctgtccaatctagctatccaaaggaggccacaacttgtggtcggggcaagccaatgccaaaaatctattttttggttcatggttaatgccaaatggccgacattgtaacataaagtagataaaccgagttacctctttcgcttgtatgatctcctccatcagcacagtgtcacccaaaaccatgaaagcttcaactccaaaactcaatcctatagtattcaaaagaaatgttaagataaaaatactaactttatggtgtgttgaattggattggattagattatattgtttaacacctaataataaattgatgcacctgtacggaattcttctggcagtgtctcaaagtagttcttaaattctgaattagtattgtacttctctttcatgctccacagcaacagcatcgtctcagaggacatttcattcctcttttctaatatatgatactgcaaagtgtatgtcaatcactaacaaaagtatttcaacaaaactataaagcatatgaatagagatgtgaaaattacaatttggtagttttgtactgaaaatctaaagagaccgaaaaaactggtaagttagttaactacaatatatttttcatagcaataaatattgattgaaggaataggaataaaacagatgaatgcttttctcccacttgtaattaggaattttctttatgcttaacaatctctacatactttaatcttctattttgtaaaacaaagaacggtttttatcacaagtttgtttctacccgaaattgaagtttagatcttgctgcacccatccaagtgattgttcacaaacccccaatgtctaatccccgatcccgaaacatttgcacatgagctttaacaatagttcttgtgagtactactcttgaataaggccttaaagtaatgttcaaaattttgttccatatgcactagataagttcaaaacaaaattgataaacataaattttgttccataccatgtcagattttttcattagatcttcggaaatgattaaagaggtagggatctccaaagcagtatcgccaaccttaagatcttctcttgctatggctcctcttcccgctccttccacatctaacgaggcataaaaaaacatgatatcgttccaaacttggcaacttatgtaaggtagcaaaatatggcaaaactttattcttgattaacaaagacctttatgtaagagagagaagaaaaaccttacaggcaatctgtaaccttgacttcatgccattgtcttcaccccattgcaccaaacagttttctttgtcacagctgtggtcttctacaatgacagacttgatactattctcattcgaacagttactaatcatatcaacaaccgcaatgtgtaactcttccaagatattcttttgcatttgtgtacaactatcgagtgagttctcaacaatccgaaggattgaattcaaagccactagctcatttctaggactgtacaagtcaactgttgagattgtctcatcttcccaaaaatatagctctacctgtaccatagttagctcataatttcatcattataatgttgacttgttataatccaaggataaaaatatcaacgtagtagattacctcatcaaagtttatgatccttgctatctgtagcatgattttcaatgaagttttaatttcatcaggatcatttgagttgttcaaatgtattacctcctttgtattaaatcccttcttttgtaacaagatctacaaatcaaggagaagtttgtaaggataatgacagcaatcatcatacctattcttcgggtaatcaaatcccctccttttagttagataagagttcctttctggcattcatagccttgagtgagaaaagccccttttgtttccaaacctccattggtgtaaatgaggaaacttccatcacatcaggcacaagtaagttcaaatttgcataagtatggcttaagaatgaaaatgcagcatatatgtaatatgtataactaagtaatatgtaattaagcatatacacttagattttagtattaattttcttgcattataggtattagacttagacaaatataggatttagtaggattaactacctacaatcagtagtattttaatgcccataaactatattcaattgctaatacatgaaatctagtcaaaattctcgatttgcaccttctttctatcgaaaagagaatcactttccggaagctcaagaacaattgagcagttttcttctgatttcacagctccagaagttgaagattcctgcaaaaaccaaacgaataaattacaatatatcaaatcttctgagcacaaataaatcacattggaatgtagctgaagcattaaactaaagctacaaatagcttttctcagtaaccaaacactacccatcaacctctcaaaacttgattacatcctaaatatgttaaaccacattagtcatgtcaattgcaaagacagttaaatatgttaggtgtttcttagcttcatttttctaggttaacagctttaaaaatcgaagctttaagaatcaaactgaacaataatataaaaaaaacaaatccccttcttcttcttcttcttctggtttataaacataattattgtagaaataaccaaatggggtggagcaaaaatgtcataagattggattaaaagaccaattttgatacaaaatgaatggtaacaaagattatgaatacttgaattgaaaccgtagaaggacagtggcaaagataagtaaagctcaaaaaacaaaaatggcataaagataaaagtatatgattcagaagagtacataaatttcagggagagaagtaaagaatcaaactttgaagactggcttaccttgtcaacctccattgaaattgaatcccacagagagatatagaaaagaaagatttaggcggcaacagtgggaactagagacaagtgcagtgcaggagtccaggttttcttacttttcttttttgtaactaaattctttgaggaatcatttcaaaaaaaaaaaaaaatctttgaggaaaaatgtttagggtagcattttcttagatatcaatattgttatattggtataattaattattgaattttatatagtttaatacaataattttgacagaatattgctacctaatggcaagacgacaaatttagaagtactagtactattaatattcaataacaatgctaaatatttggttttactctgctaacaatacccaatcataagaccacatatctaaaagtattagcactattaatattcaaaacaatgctaaatatttgattttactctgataacaatactcaatcataagacgacacatctaaaaatactagcactattaatattcaataacaatgctaaatatttaattttactacaataaatactaataaattcaatttttgataaatactaaatatttttaaaattttgataagtacatgatcacattaaatgttaattggtattattttttttattggtatatttaaagtaaattttaaataaaaaaataaaaatttaatgatctagattaattagggactgtcacgtgattattgacttgacatattacagttaagtttaaaaaatataacttaagcattattactgtcaaaaattaaacttaaatatttatctacaactcgagtttaatttatgtatttatatcacaaattactctattataatttataatttaataaaattacaaaatataaaatatatttattttttaacataaaatacaaatttatatatatatatttggagtttcttttataaatacaattattataaatgttaatcaattatacactttatttactttatatatcttcgagtttttttttaattaattttataacttctaacaaagcaagtgaagatatatttcaaaaataattttaagagagactaaagtccatagctcaacaaaataagtttgaaatagtggtgtgactgtttgtgaattgtggggtagattgtgattctaatttctcctcaaaccaaagaaattagagtgttgtgagttgcggagtgggttgtaattttattttcttcgcaattagagcaatgctagttgcgattctagtttcttcgcaattatcagcaatatgatgcaaggtgggttgcaatttttggtttctctataatcaaagcggtgtgagttagtggttgggttgcaattttaatgtaagtgtttttcaaatgtttagatatcattaaaaaaagattttttgtaagtaaattaaaaattatataaattatgttaatttttaaaatagcttatcaaaagttcttttggagaagctttccaaaagaatttttaaattaaaaaatattttttttttactcaaacagttgacttttttaatcctagaagctaaaaaaaaaaatagttcataaaaactaagccaaacaggacttatgtaaatgatttgatactagactccttatttttaagtatttgttgcaagttgttaagcttgactaaaatgacacatgtcactatcacttcggaatagttttgattcgataattattataaaaattaattaaaatatattttaaatattatataatttagttcctgtatacaatccaattcaacacaatttttattttagtttttcgagttttgtaggctcgagtcatgttttcgggtttggcaagtcttgtgttcaactcgctacaatctatttcttagctggtataataaaataaccaaaacatattctgttagtcaggatcgggtcaagcatatgacaacttagaccattacacaaggcctcctatattaaaatatctcttattttttttttttttataatgtataatatacataataaatatttttaaaaaaatgtattattttggcacctgacaaaattacattcttaatttaataaataaatcaaataatataaatatatctaaatattaattaaaaaaaaacatgtattgtttctacagtgtacaacatatatgccgcggactgtaggggtgttcatccgatccaatccgcacttttttgctcaaacaacatccaatccgcactaagtgcggatttcatattttggatccaatccgatccgcataagagtttaaatccaatccaat

SEQ ID NO: 52793 - DNA, 1079 bp, Cannabis sativa
gcaaatgtttaacgagatacaccggaagatggatgaagttttctctaggcgggcttctcctcctattggaacagatgatcaaagatcaccagcggtttatcaacgaacaaaagagcataatgcagtctttgaggttaactttccttttcttttcaaccatttttctatttgttgttttcagctgccatttgagatttctgaggttttgcaacaaaagtcagctccatttggtaatttgttggtttctattggttggtactttcatttagcattggttggtacatggcatctttaattagacatatgatttatatattggcagttttagctgtacaaaggagacaagtacaatatttaattaaggttcgatcttatgcccaaagcctatgtctgatatttacctaagtattcattgcgtaaacatattggaggatattataataaaatcctataatctttggagatttggagagtatagggcatgaaggtatactggaatttcacaacgtgtgaagcaagtatttattaggaaaactattaatggcatctcaattgcttttgttcttttctccttaacacttgaggcatacaatatagggagtgagaaatggtggtggggagctgattacaccttgcagaattgcagcttgcctcatatcttgtggcatgaaaatttcaatatgaatttcatgcttaagtcaaatatcagtgataacaactttctcttagaaaaagcagaaattttgaagcattaacaggcattaaaggagtattaaatgtagctaccgttaatagtcttgaacagattttatccagagacttgttattgttttgacttagtttctatttccagtcactgcttttgttaagtaataaggactatagggtcaacttcgccatatctttggaggctgcatcttttaattatgtaatgttattatttcacgtgtattccttgtcttttacttttttatttcttttaattgaaatttaatttgatttcttttccctgatgcaaaactcatgtgacaagggaacttaaaagaagctaacattcggaagaagagtggcatggttat

SEQ ID NO: 52794 - DNA, 824 bp, Cannabis sativa
ttttgagatctatctaataaatctaatttttgaacgtgagctcatggactagtgacaatttacaaggattgttgataccacataaatttttttgtgtatttttatttttctgcactatttgttttctgattttattttgtagttacaaagttgtgttgtgtagttacagaataattgtttcagtactatatttatcattttgcatttaattaattaattaattaaataataaattattaatattaaaatacaaaattttatattatatataaaagtttaatataaatacattgtttaattataaaaaattgataatactaacaaaaagaattggtatggtttacattccattatctatataggataacttttaaagcatggtttgaataaatttagtgtcatattttaaaaaaaaaattgaagattcattatagttatccttagtaaacatatgcaaacataaatgaaaccataattgttaacgaaaatgataatgatagaccaccaaagataaatattaatgtggtgtttgatgtaagaaatttttttaagtatttaaagagtttgagattacacttataaacttaaaaatgagattcacttaaacataaatcctccattaaaatcataccaaacataagtttggttttaaattcaatttaaaagcaagctacaatacaaatctaacatctaaaaacaaaactaaaaatctcgagaaaaaaaagactaattaggattttttctcccgaattttgatttgtactaaattatgcttcttgaactcttttggccgttaaaaattccccctgaactattgagattgt

SEQ ID NO: 52795 - DNA, 1659 bp, Cannabis sativa
  modified_base (46)..(47): a, c, t, g, unknown or other
aaataaattaattcacaaataatagtaaaataataaaaattagtgnnaattgcctttactaatccatatactagagcggtcattacaatatgaatattcatgcaaatgattagagtaatgtcattgacttgcaattgaattggatcatgttgctgcaccaggtgccaagaaacttaggaagagattccataagatgagatgttctggttgcgggaaagatggtcataatttcaggacttgcaatacaaacaacaagaacaagttaataacattgttaatactcttcttaatctgtcattgggccataactttggaaaccattaagtgagtccctaccatatgatgttgctgattttgcttttggttcataagtttaatactttgggtgttgtttgatatagtaatggattccattaaagaaatagcaattctaatgaattagtgttgataagcttatcttgatcatataaaagaattaatgaaatttaaattcaattctaccacacttgttccaccccaggtattcaaattgcctcactctacatagattattatgtttgtggtgttagtaatgtttttaagtatgtatgtagtataagagaaaggaaatccagaagctagtaaagttttgctacaacttttgtatcatcctgtgtggttggatgaacctccatagatttattctctgcgagtttcatcaaatttatttaacaacctaacattttattttcatcaatcaatttaaaccaacctgattgatgctatacccaaaatgttaatagtaatcaaatacccaaagattgagtttgtctatcttgtagcttaggctgaaatcatcttgcaaaattattttactaaactgtaccatcaggagaaaatattaaaattccaaatgcacaaattgcaagaatattctgctatatgcgaatgcgattgcttgatgtgttagaagttagaatgttgaaagcaatattctatgtgaaagcaataaacaattataatccatgctcaaagctgtaaacctgactctccatatgctcttataaatacgaactataaattagattacaccttccaaatcccacaacctccattccaaaataacataaaatagaaaacttgagttttatttgtaatcgagtttagcagtaaacactcatttgttaaggttaactaggtcttgatgtctaagaatttcttagctatttccttttgaggttttaactattataaaaagaacttattttatactgtgtatgtgtgttgagattgttggcagatttgaatagtgtgtgtgtgtttatactgatttgcttttaatgtttattgatactcataggttaatgacacaccacttgaagatcctgaacactacgctagaaatactgatcctacacctcatcaatcaataagttcagcaactgtcacaccttcttcgcaaccaagcaacccagcaacaatggtacaatataaaagtcctctcaaataatcattcattttaaacttttccaactgtttgtgcattaataatcacattttgtcgttcattacagcaaaggacaccctaacaaattgcaccaacttactgagggattatgtgttgggttttatgccctaaataaaattctatttcaatgtaatctctatcttttaaatatc

SEQ ID NO: 52796 - DNA, 1287 bp, Cannabis sativa
  modified_base (241)..(242): a, c, t, g, unknown or other
  modified_base (499)..(499): a, c, t, g, unknown or other
atcaataaggtgcatcttgttttttggtagcccatcacgaaagaactccatggttaagcatgtttgacctggggtaatttcaagatgggtgatatcttgggaagtttccccaagaagcgtgcaagtgaggaaaaagcacactagaaacactcaagttggtttgtagggtcagtcgtcaatccaagaagcagccagagtggcgtacttgtgtataaaaaccattattccgtgggtgtaaggnnccaatggaggcttgaagcaggaacgttacaaatggtatcagagccttaacccagccaaaagtgtggtcgacgaggacgtcgaaccccgtaaggggggtgattgtgacattcagtagtcccgtgatctgttagggaaaataccgggtaagctgtgcaatctcacactgcctggggaaagtcaagtgggataattctgagactgtgtaagtataggactacatagttgaagagaccttaaatggattgattggtactanctatatcaataaggtgcatcttatttttcgtagcccatcacgtaagaactccatggttaagtgtgattcacttggagtaatttcaggatgggtgacctcttgggaagttttcccaagaagcatgtgagtggcgaaaaagtacgctagaaacacttgtgttggtctgtagggttagtcgtcaatctaggaagtggccagagtggcatacttatgtataagagtgattattccgtggatgtaagggctcaatagacgcttgaagcggggaagttacaattatattgggctggccttataaatttttatacagcccaacaataaaaaattacaagaatacttcttgctctaactatttagccgcacgaaccaccatcttcaacaacgacagcttcaagcaaacaaactagcacgtcaactgaaaaaaaatatatagccagacagagaatcaccataaatttttacgaattcacttgagaagaagactgtaagcaatccaaacacatacaatttcaaatttatgcaaaatcgtgcagaaaaattggtgtgaaattaaaattcaacattgaattacaatttaaatcgcagaaaaataattctcctaatatcactttttagattcataaaatgtaaatctgtctgaaatagatctggagttcccaatcaatctaaatcaggtataaatagaaaaaaaaaaaatgtatcaatacactagctattgtttctcctgtttgcattaacgttatttttcaaatttttaaatggtggatttattcatattaaatcacgaa

SEQ ID NO: 52797 - DNA, 1505 bp, Cannabis sativa
cgtaacttctttattattattttttgttaacgcagattttgttaagcaaatttgagcctcaagattatgattcaacacagaaataataaaagttatagaataacaaaataagaacactgggttttttttacgtgcttctgcagttaaaattttgcatagtccacgagtcaatcttatttagatttctgagtatatttttttagggcctcttgtataagagttttttcctctcctttttgagattgtctgcaactatttataattgtatagtagcagttaattacaaggctggtcaaaatgtaattacagctattatcccttaaattatgggatctgattacatattacaaaatgtaaacgcggtgcatgattttggaagtcatacaactatgatttcccacttatatagggtcagaaatatcgtgtattaaacacgtctttaattattgattttggagatgtcttgacagaaacttgattgtagtgatcccaatggcgagctggaaccactcttctttttgagatcggcaagatgtgtcttgcgtcgattgcagatataaggaaatttgctgacttaccagggttgtgagtctcccttccgttagttggatgaaccaataggaagtttcctcgtagcgagatggtcgtctcgcattcttgtatttcgagccggttttacttttatacttagtctgcttattgcaagctgaggtatgtgttactcttctctggtgcctcgctattatcctttagcgacatatcgtttctcgttaatactctaagtaccagctcatacattgatttctcacctaagactttacagtcagcgggttacaaatatactctaatacttacacaattaatgagttattccataaaaagatatgacctcgattcacattccctttatcttgacacgtgtcctccatccgaatttcaggtataacatttttattttgtgatttatgtctttttgagactttcatatttcaccgatcgtcagagatctcgactattcagggatcttaaggccaaacaaaacactcatcttggtttcgaggaggatgaaggtgatgactttttttttggcaaatccactaaagcgattgtttaaaatcgtcaactatgttataggcatatagtctcaattatagctgacagttttaaactgttgggaattcttttatactaatatttttccattatcacatattctaccaagtattggcgatgctagtataggtgacagttttataaaacgttgggaattctttgctcgacagtataaaactgtcgagaatactgagtttttaattagtagtggtcgcacatggacttattcaatcatgaaactgatcatatgggtgatgcatgtccaaattttacccttgatccgatgtgactcattgaacgtctctttgatgtctagagcaattaataccctacttggaaaggtgtacctcgaatcacataatgaaggttgtttgatattgcatgtgtgacga

SEQ ID NO: 52798 - DNA, 2762 bp, Cannabis sativa
aatcttgtcttttggctagcaaattaataaaattctaacttgcattcaaaaaaaaaagtgagttgttgttatacaagggatgtacttttatagggtgtatttataaaaaataatatttaaataaataaattgaagtgtatttaaattaagaatgtacttataaattgttaggatgtaaatataaactccctaatattaattatttaaatattataaaaataaattttctctatttttgttatccttgttattccatttcaccaaaccaaacggtaaatgtagatgccaaataaagtattgaaccctccacggttctagatttgcgaaaatagccccagatctgcaaaacttgctccatattgaacccctgggcttggccaggcttcgcttagatcttcatctgcgacacaaaaatggcgaaacttgaattactggacccgcaacctgaaccagacaatatcaacatcaaccacaacaccaaaaacaagatggccaagaagaggaaccatggctcaaccaagctgtttgtttttgtggattaccttttccttctcattttttttggcttcttctacttcgtgattttcaagataatcctttcctgattttgattcaggttcgtgcttttatgtataaagatttggtattttagtagttgtatgatgatggattcgaccctttgattttgataattgcctatttaattgattaatgctggtgaaattcaaaacccctttggaacatagaacataaaatcaatggacattttcttgttctaagcgatatctcaaatatattttctttcatgaggttgacatattttttattttcttggtataagaatagctattcaaattgaagcccttatcttttatgaccatctgtatttttattatttattcttgtaccttggcaggctggccttgttgagagctgctttcttgtatctgtcttcatttactacgaggcttaatgcattatagttgaatatcaattatgattacacattttataccaggggattttttgtattgaaaattccataaaatctttctctttaagatctgaattatgggtatgaacatttaattatacatttgaagaaaacttttgcttaagcttggcattgattgaagtgatcatggtagacctttggaggtgattataacacacaacatgtggcattttctaataccatgatatgatataaaggtatttgatcattaatagtatggtcttaagactactaatggtgttggcaatattatacaggggccaattttcatctgaacagtctttataggtatatcatcaacaactccatttcaataattatggatcataagattcataactttggatgaagatgttttgattacatgataaaataaggtttagtaaatgaaaagatgtggagtgttattaatgctatggaaaatgacttttggcaataataagtttaatatacatccaaattttgcagactgagttttgaagttgttattagtttgcctctcatattcagttaggtcaaacaaattcggctcttaattcttaattcatgaatgggactgtggttggtgatctttctattatattcatttattattggcctaatagtgcggctaattatgttcttcctccccttctccttttatccaaaatagaaccaagttccaattctacttatttacctattaatatcacagtatctcttaatgttgttactaattgtgtcttaaaaccaagttaactttggacttttcagtaccataggtaggccgccatggccaaatggttttttgtacaaatgaaagaaaaaagaaaagtgaaaagtaaaacaattatagtcccttcagcagtaaagaaattttacctttttaaattcttaaatttgagtcctctagggtcccttctcctcattgtcaccccagctcaagaaagcattaattaaaggtgattttaataattgatgatatcttctaaaagcaaagtttcattttcttgttgcaagttacaattggcaaggaaattaactatttccatttatttgttagcactttttgcaaagttttttgaattcaaattatgcatctgtttttcaggctcaaataaatagtacaagcagatctgttttttaggagaataattttgactgtttgcatttgatgtttaaaaatttatttaattgaacacctttatatttgctttctttttttttctctcctggcaggaaggcttgacctggatgaattagagatgttttgccagttaaagtgaggtggttttgtcaaatgtttactaggaaaggttgtgttgtgtactatataggaaaaagaatatctgatcctttttttactttttagtgtttggatattcatgcactatactcagtgaaagtctatgtcattcatcatgacatgtactttaattttgttatatatatttctcattaatgagtgtgctcaatgttaagctccataagtcaagctatatgaggatgctcatagttggttatgtcaagtcattttttatgtgttagcaaaacttgtacatctttgtctaaaggaaaaaaaaaattgtacatctggtctcttcataggtatcataatctttgttgacaagcccaaatcagcaaatactaaatcatgcttattaaaactcctactttggtctgctgcttctacttgattacgatgtaaaactgtcttgattttgtccattatcaaatatttcaacttataatccaattgttatcattt

SEQ ID NO: 52799 - DNA, 1852 bp, Cannabis sativa
cacaatatttttggctttaatgcttggtttcgtgaggcgttcaacgggcaccacccccagtttttcaacctccctgtctgatgctaacttagccaaacagtctgcgtgggcattcttttctctagggattctttccactttataatctgtgaactcatggagtagatctcagacaattgatacatacgcaaccattttttctccacgcgtttgatattctcctgacacttagtttaccaccaactgtgaatcgctgaagacttctactcttgtggcccctacgactctagctaacctcagccctgcaattagggcttcatactcagcttcattattggaagccgagaattcgaagcgtagggctgcctggagtcgaagtccattcggggatatcatagctatcccagccccggattcgttttcgttggacgctccgtccacgaatactttccatgttggggtttgtggcactggtacgtttacgctagcttctgcttcattgcactctgttatgaagtcagctagtgcttgtccttttatagaagtgcgtgatatgtagtgtatgtcgaactgacttaactccatagcccacttgaagagccttccggacgcttccggcttctgcaggacttgccgaagcgggtggtttgtcaataccttgatggggtgagcttggaagtagggtcttaactttcttgaagccatcaggaggcaaaaaaactagcttttcaatcactagatatcgtatctccgcccttatcatacgcttgctgacatagtacacggggtgttgggtcttttcttcttcccggaccaaggcggcgctgaccgcgttcttggagaaggtaaaatacagtaacaagtcctctccgtgaaccggttttgatagaatcagaggtttagccacgtgttcctttagccttttgaatgcctcctcgcattcttctgtccattcgaatttctgacatttcttcagaatgttgaagaagggaatgcacttgtcagtggaacgggaaataaatcggtttagggcagcaaccttcccggtcaaggtttgcacatctttgtgcttcttgggagaaggcatgtttagtaaagcctgaattttttccggatttgcctctattcctctttggctgacgataaatcccagaaactttcctgatttgaccctaaaagtgcacttcttcgggttgagtttcattccatacctccggaccacttcgaagcattctacgaggtggtctgcatgacttttacatgcctttgatttgaccagtatgtcgtccacatagacttccatgttccgtcccaggaggcctttgaacatccggttaaccattctttgatatgttgcactagtattttttagcccgaagggcatgaccaggtaacagtatacccccttatcggtccttaagctagtacattcttgatctgcagtgtgcatcttaatctggttatagccggtgtaggcatccatgaaggacaatagcttgaatccagaggtggcgtccaccatctggtcgatccagggtaaagggaagcagtcttttgggtaggctttgtttagatcagtaaagtctatgcactcccgccacgtcccgttcaacttgggtactagtaccggattggctagccactctggataatacacatctcggatcaagccattagctagtaacttgtccacttctttttccagagcttctgcctttactggatcaagggggtgctgcttctgttgaactggcggcatgtttggattaacgttcaagacatgggtaattacatgtggacttatgtcggtcatatctccttggcaccacgcaaaaacatctgtggctgccct

SEQ ID NO: 52800 - DNA, 1080 bp, Cannabis sativa
taaaataaattccaacataaataaaggggtggatcaaggtgatagatagcgaggcatctatcttgctggaagatggcatgcacgcgagaaagatcgtctcaacatcagaaactgtagtttcagaatttaagcaatatcaacttcgagaagttatatgcgagccccagcttgccatcaaagttaactcggctccattcccagtgaggcatccccatgagataaggcttaccgtatatctttaatatgtgttcctctcagcccaataaaagcggaatattcacaactttgtgaattctaaataaaaaccacatttacttagcgtgatttgtaatcaaatcccatgattcgagggaatagttgctgtaaagattacagtcaactttgtaattaactgctcactatattattataaatagtggcaatcaagatgagaggggggacgaaaaaactctaacaaaagagggcaagaaaaataatcaaaaatttgattaagattgactcgtggactatgcataattttaactaaaaacccatgtaaaaaaccctgtgtttatatttttaattttatatctttattttttctttgtgagattgtcacgattaggatcatatttggttaacgaaaaatctgcgttaacatattgcctctacttcaaaacctaacaagaaaaagaagttgagcagcaacaaaaagcctctttaagttattaacacaacatataagggtaaaaaggttgctaattcataggcaaaaagaaaagggaaatacttctattgcaccaaatagggccactagaaaccctagtgtcctatgttttttgcaaagaatcaaggtatttctatttttgttgagaattcatgtgttttagagaattattatccttttcagtttattaattctagatctactaaccatgtttatgttcttcttatttcatctccaacttcttggacttggattaatatcctagcgagtagagatagatagttggatagaggggtggagattgtctaagcttgaagatgaagctcaagtttttattttatttttagaataatttagtttcaatttagtttgga

SEQ ID NO: 52801 - DNA, 1611 bp, Cannabis sativa
aaaagtaccttaactgcactccaatttattttttcaaaaaaaaaaaagtaattttataaaaaccaacaaaataatgtaaatcttttaagaaatattgtgttgtgtattgcatgacaccataatattagaaagggacaaaactacattacacaataaaaaataacatttataatataaaattactaaattgttccaatataatgacaaaaaataaaaataaaaaagtaaataaaccggctaaagtcggtataggttgtattaatgagttaaaatgggtcagaatatataaaagtgaaaaggaacagtattatgtttattatgtgtgacagtgcgtcacttcttccgcaggtagtacaagcgggtccgaatcctttgcctacttttacatatatatacatatactcacatatatatacatattacacacatatatatacatttacatatatatatatacatatacacatatataaactattatacatatatacacatatttataaaaatacacgaaaaactatataaatttacacacatatataaactcaaaaaataaaacacaattttatacacaaataaactacaattgctatatatacacaaataaaaaataaaataaataaaatatagattaccttgacttaaatgacgaaatgcgatgaacaatcgacggctcgggcagcggttgccgaaagtgcggcggcacgtcctcttcggagtcccggtacagatttttttcagaataaaaatgaaaaaaaaaagaaaaatagagaatcaatgatttggtagagaaaataaggcttcgggatggtaaaaatggtggttggtggggaagagaggtggctgttgacggcggggaatggagatttgcagagaaaggaagagaagaaagaggaaaatgggggatgggggttcgtcccaggcttttattcagcctggacttttgcgaaagtactaaggctcgccgacgaaagttgacgctgacaaaacgcagcgtttaaattatgtaagaacttttgccagcgcattacatgggctagcaaaagttcccaccaaaaaatttccccccactttttcatttgggcgggaagttgaccgccaaaaaaatcagagcttttgccggtaagcaaattgcaccggcaaaaggcaaaccctaatgcaacgtgtccattggttaaatggtgaatacttttgccgacgcgattaaattcgtcggcaaaagattcacctacttttacgcacacgttttttcactgtgagaaaaattgaccgcctttttttttaacacttttttcggtgcttaaatgcgtcggcaaaagtaaataacattaattaacttttgccggagcaattagtttcgccaaaacagttaatcccaaccgccaaaaattttcaccttttggcggttcgattgccaacatttgccggcaaagttaaggttcttcgccggcacaacttcctattaccagcgagaataggtgccgactaaattgcagtggatccagtttgttgacctcttttgctggcgcacttattgacctgtgccggcaatggttcacttttgccaaggcaactaacaaattgcgccggaaaaagtgcacattcttgtag

SEQ ID NO: 52802 - DNA, 1498 bp, Cannabis sativa
tttaattacaatgaaacaaatcaatgaagaataatatatggaaagtgttgaatacatcccaatcagattggcacatactcaaaaccaccatttacttatctctacttttcccaaaccctaaccctagttgataaaatgtttttcattgactaataattcttgcaacaattacagttatgtcatcgaactttccaccagtgtgaggtaagccggccttggcagctgctttcgagaaaggactttttcgatctttcatcaaagagtaacgacgagataactctgccaacgaaaaagcaacactgaaactcgaagacttactcttcaaattctcttctatatcggagataaacaaattatcaaaaagtccatcagttgccaaaacaataacatctcctggaatcaccgcgatcttcattgtcctagctaattcaggaatatcgctatacttagaatttcccagttgataaggcgagttgaatttccactgttgagtcttagatttgtagatgaacttgttttctctaaagatcatgaaaccactatctccaatgttgacactttctaaaataccattattatggcgaataatgcatgcagtagaggagccttgaatctcggcctcagcattagccatataagcttctttcaaaatacttttgggatcggtgttgttgttgaagaaaatggcttcgacactgttattcataagttgtcgagcatactcaccagcatcgatgcctcttttggcccaaccgccaaccccatctgccactccaataatctcttcttcttcgcaaatgaagagtgcatcttcaccaataatatcatccttaggaatatagtaatattcacaaaccattttcatggttttctccttcttctcatcatctatgatcatcttcatcttcgaataattgaatcactatgtgtttgagtttttttgtaagtgtttaaagtgtgttttcttaaattgaaaatgtctttagtgaattttctctcgaatgtgtatattatatattgaagtgaataataactattttaaagtaatgaacatatatatagagaaataattgataacccatatataataggacaattttaaatttaaatctgttctagatttttaataaactgaataattatggaaatgtgaatttaaaaattattttaattatcatttttttttggtcaaaaattatctcaataatgtttggaatttaattttaaaaaatgtaaataatatctaacatagtttacttatcactgaattgtctctcgaatatcccaataaacacattttacaatttataaaataatggaaatgtgaatttgaaatatatttgaattttaaaattattttaattatcactttttctttctttatttttttttcagaaactatctcaattaaatatatatatatatatgaaatgggatgttgaaactctggtgctaaaggtagggtttttagccatgaaaacacctctggacttgggtc

SEQ ID NO: 52803 - DNA, 522 bp, Cannabis sativa
tgttggagaaggtagttagttagtcagttagtatgttagttaataccgttacatgttagttactgtgtatatgcagagtctgttactttctctctgcttttcccaactgtattctgtacttgtaactttctataaatacaataccaaagagtgtgtgtaatgaaacaactcattcattcatcaatctcaacttggtatcagtgctactggtttttttttctttctttgttgcatctggttcttgaagcagtctctcatggcgtcttcctcaactgctggtcttaggcctgaaggttcatcgtcctccgctgctacacaaacaaatcaactctcggtcgtgcaaatcattcccaatcatattgtccctctcaatcttcgtcttgatcgtcacaatttcttttattggcgatctcaggtgttatccactgttcgtgctcatcagctcgaaggattcatcaatggaaatcgtccaagacctccggccatcattacagatcctacagatcctaccaaatccatgcc

SEQ ID NO: 52804 - DNA, 3377 bp, Cannabis sativa
  modified_base (3110)..(3111): a, c, t, g, unknown or other
cagctcaagggaacccctagaacgcttaggaaggacgacctagggaagctaaggaatcccttgaaaacgaggagcctgaggtagctgaggttcaccctgaaaacgagcagccaaatgatcagccagaaccatctcatagaaatgaaaatagaaggcgaccagaaactagggaacaagaaattcgtcatggaaacaagaaaaatcctaggacacaacctggagcacctaggtcatgaacgaggaatcgccaatattcttcccaaacccatatggaatgggctcgcacaaaccccagtgggggaagcaagacgagccaggcctaagggagaagaatggggcgtgaagaggcgggtgttacctcagggtgcacaagaacccacaactgatcaatgcgaggaggagagagtactcatcgcgacaatgatcgaggaagcataggcatgagtaagactgcaagtcactcaaggacgaggtccataagcaggacacagtctatgagtagaacgaggtccgccagccatcataaccaatcgaatctacgagaacacttgaaccagaaaagacttgatcttcaacaataacttggttcaaaacaaggggattcgatccaattacaaatagattagttggaggatcaagtcggggagcaaggaaaataatcggggtatgattcagatgaagaactcgagcaataccatctacatatcatgaatactccttctccccagggacttaaaaacccccacgtcttgtcatataatgggaccactgatcttttcttgcatttgaataacttcaatattataatgtgagctagcaatgtttcaaacaatatatgttgtattttttttcccacctcactagttggagtagcaagcagctggttcagtaagtttactcatcattccatcacttcttgggaacaaatatccaaggaatttaaaaagcagttcgaggctgcaaggaataggcgacccgatgcatcctcgctcacaaacataaagtaatagcctagtgagatgcttaaggcatacctaagtcgttttagcatggctgctgcgagagtaagaaattttgatgatagtacccagctcactacccttcaggtagggatcactactgatctttccaccattggaggaaactatgggacaatctatatggtcgtctagttagaaacatcactgagtttaatgagagggctcagatatttgttcaaaaggaagaagctcaaaaagaggtgaacttattacaaacaggctttggaagcaaacccaacattgtttcaacaagtattatcttgactaaagatgataacctaggggcctctggctcaaagaggagagatgactctaaggggtcgtccaaagacaagaagaaacaaaagaagcacgacaaatacgtccgagtttacactatctataccgagcttaatgaaactcgagagattatcaacctcgagcatgagcacaaggttccactcagtaaacctgagcccatgaggcatgcgagatgtaaaagggatccaaccaaatactgtaagtaccataaagatattgggcatacaatagaagagtgtcatcagttgaaagatgagatggagagtgacatcgcgcgaggccacttcaagcaatatgtaaaagggcagggcaatgtacataaccagcccaatccacccaacaacccaagcgaccaaggattacaacctcctcctgttgaaggagaggcctaattatctcaggaggactgcatactgcaggagtagatgaagagcctgcgattatatttttgaaagaatatcaagagaacgtgagatactctcactttgacccagtgttgatcgctatccagctcgccaacaaggaaacactaaagaagatggggctcaaagaagctaaattgagaccttgtatggtaaatctctgtagatttattggcaataatgtcgccagccaaggaatagtcgagctcaaattgaccttgggtgaggtacctttgtccaccattatgtgagactttttggttgtcgactcgccatcaacttacaatatactggtgggtcgtccagcactaatcgaactagggacagttagttcgaccaagcacatatccctgaagttttagacaccaatgggtgtgggagtagtgcaaggtaatcagatgctgactcacgaatgctatcgtatagagctacaacacagaaaagtcggtcaacagctgatggcggtcttgatagaagaaagtgagaagaagggtgaagatcttgatcctcaaattctagatgcaagaagcttattgaaaccaattgaagaatcgaaagaaattgttctggacccaggaaatcccacaaagtgtgtttacgttgggaagaacctggatgaacaactgaaatagcatctattaagtttttcaagggcaaacctggatcagtttgtctgaagccacagagatatgatagggattgatcctaaattatcagccatcatttaaatgtcgatacaaattacccagaaaagagacagaagaggagaccctatgatttcgagagacaagaggcactcaaacagtaagtggataagttgttggtcaacgactttatatgcgaagtgttttatccctcgtggatagccaatcttgttgttggagaacttgtattgacttttctgatctgaataaggcgtgcccaagggattgttttccatacctcagagctcgcggagtgcttcgaaacattaaggaagtacaatataaaacttaacctgaaaaagtgtccctttggagtttccttttaggaaaatttcagggattcatagtcaacgcgaggggcattgaagcaaatcttgagaaaattagagcttgattgaaaagatagtgggaattggggtttacaaattggctcaactctaatactgataaatggcatgcataattttacaaatgcctttctgataaaaactactagaacatggaacatttgcgaccctactaccagtaataaaatgattgtaactcacatttgtgatcaaatgttttgaacttcagttatgaataaagtgaatcattttttttcaagtaattacaaagtgttactctttaaaattacttgaggnncatatgtgtatgattaaccagaatttatctagaaatatacatgatatagtgcaaactcacctcttcaaaattttttgaattttttttcaaagtttttgatcaaacctttctgacgggaaagggatcaaaccattatatctctttgattagaaaactgtttgacaagaaaggaaaatcaaaagttataaattagatataactcataacttttgtgtgaagttgaatattaacaggtcgcactgtatggaaaagtattaaacgaggca

SEQ ID NO: 52805 - DNA, 588 bp, Cannabis sativa
aaaaaaaaaaaaaaacaacaaagtctgttattgtatgatgtttacagttactttgttttagcatcactaggtgcgttgaattacagtgctttttagtgctttattaggcttccacctctgccacactaggtagcaacttagttagaatatctctcaaactaaaaatgcaattataatataaatgagaagctcaagcaaatttatgagccactatattaattgatcgtgtaacaaaataaattgagacatgtttcaaatcattaagaagagttttacaatcatgaataataatgccaaataaagaaatcatagtctcagagttccagcttaaactaccaataaacaatcggtctccaaaattacatgtagctttgcattttgatccaacttaatgcttcccgaaccccattgccttagcaagcatcaattctacacaattagctgacaacatagtacgtccttccaacaataaacgatgatcatttcgtgctaccattcccaacccgtatctttggccctcatcgaataaggaaacattaatattgacattaatctcattaacacttggtagtctccaatgctcaacac

SEQ ID NO: 52806 - DNA, 1577 bp, Cannabis sativa
gatgatgttgtaactataataaatgtataatttttttctaaaaaattttaatatatattttgagacaaaaaataacaaaaaagttataatagaaagttgtaagcaatactcaacaaattataactacactagttgctataggtacagtaactaccttgagtactatatatattaaatttgactcttcttaatgattaattcagtcagatttttcattaattaattaactctctgcatatatatatggactatttatttattgaccaaataaataattaaataataatgtagtatacgaggtgtttgaaagaatggcatattatgggatacagtcaaatttgataatatatttgactgagaagttgcatcaaggcacagtgacagcttcaaacaacgtcactaattggattggagccatttggttgactcctattttgggtgcttacattgccgatgctcacctcggtcgataccccaccttcattatttcttcctccatctatttcacggtatatatatacatataactctacttataatatgcattcctcaatttccaataatattattagtacaaataaatattaaatctcattactatcacacttagaaagatttacactgctacattaaaatactactcttttttttcgttactcaacatgtcaactttcaataccgaaataattaattaatttaaatttttttggcgtcggttagtaactaattgaccatttatgtatgttgatttacgcccttttgcatcaatttattcttatgggttgatatatgtcggtttacaactgacataatagaactttcaggggtagtcatgaaatttggtggactataaaaaaaatatttttagattcttattaagaaaaaaatatgatactttataatattaataaaaaaattatataattttaaaaggattttttttttgtccccaaattaaatacgtcgtagacataaacttagcccgtctatatttaaagtcgagcctgaaaactttttaaaatacttcaaacattgtaatggtaatgctcaaacatgtacaaatagtaaatgttacattttcttaacttaaatgttagtatttatgtagtgttttgatacatattttaaatgtatatatcattaaaatataagttaaaagagcacaatattagctatgattcaaggtttaaaatataaatatttcttgttaaaatccatagaaacgtttagagttcattaccttatcgggtacgtagctttactaattagcaagtaatattatactaattagatctagctagaatctactagtatagagatatttataaatatatataaagaactaaagaagtcataattttgtacctttttttaaagaaaaagaagtcataattaatttggtttggatagagaaatgataggagaggaataggtgtacatggcctactttatgaaaaactttgactttgaaatttatatatacagctaaattagtagtagtaggaagaaatggtacttctttctcatcgtatacttttggcataataatatagctagaattagacataattaaacta

SEQ ID NO: 52807 - DNA, 635 bp, Cannabis sativa
ttaaaagaaaacaactagagaaagaaggttgcttttacatatacagtgcattatatatatatatatattaatagaattgttttttttttttagctttaagttaatgaactttgttatgattttattattttaatttttttgttattgaaaaaaatatctttgaaaaattacatatatattttcaaaaaaaaatattagaatgtatcatagaaattatgttcgaacactaaattgaaatttatatataaataaaaaaaagtgtatgagtccgagttatatagatagtaacattaaagagagtttcaaaaatagagttaatcttgtagaggaaaggaagttatctagcatagataaaattaatcttaaaaatataaaagagttgtaagtttctcttttgaatgaaaatttccttatgactgtaattgactcgatttgattaatagaaattatatttcttgataacaaaaattaataaagaaaattattcttaaaaatatataaaatccagtataaatatattattatttggtatagtattgtacattataatatgttattgttgcactaaatgggatatacatattattgatattggttaagtacaattatactttggtatttagagattttgatag

SEQ ID NO: 52808 - DNA, 656 bp, Cannabis sativa
ccagttcatagcttccacacctattattaacatcaacacaatgagcattcagttcaactaattttctatcagttttagattggataagacggtgaacataattgtctcccgcgtaatcccacacacgcttagattctaattcaatagaataacagtgttgcgtttctttccaatgtgttattgcatgtccctctgtatacctacatgacacaatggaaacaaacacaaacaaatttacacacacacacatatatatatatacacacgcaagcaaataaataaaaggagagagagagagagtcagcacatcaaacaaataaaaagaatgaaaatgaggggtatgtggataaaaaattttagtaacgggcaaagacttagatgacacagtggtatagatatgagagggaattgaaattgagatttggttcataggagagtcctgggtctctccagtacgcagggtatcattttctgtataattttttttccttgtgtttctatttgagttcagtaatataacaatatggttggtatattattcatctattaccttccacagccaacagatccacatatcacacacatccagagattctcagacgtttggcaaacgttgcaaattgatttttcaggctgttgctgacaatatctgcata

SEQ ID NO: 52809 - DNA, 758 bp, Cannabis sativa
atatatattattattatttcaatgtataatattataattttatatcaatatccttccattattaattatcttcattattaatccaccaaaaaaaaacagaatagaaaattatatggccggctaattatgtttattttggagtaagacagatgaagattaatagaacataagacttatagagcttgagattattaatcatatatatattaaggttgcccctattgttttaatttatatatttatttatatacattgcaaatgttaaatatatccttattaataataaatattgtttgtttgtttgttaatttgttcttttataatatatttgccttccttagttaggctgtatatatccatatatacgtacatgtttctgtttttttgttctttaagaaaagtatatatatttatgtatatcataattatgtatatctcaaagactgcacaactatcgttatctttaatattatcatatatacttttttctatcaacggatgattatgattgtctggtgtgtatatatatatatatatattatatgtacgtctctatatagtctatatatatacttgtaaaatgtgcatatatatatatactaatatataattataataatatattcaaatatatgtagacaagacaagttcacttttttgcggtataaaatttggttttgagcaaatattaaatatgtatatatataaatatattaggtattacttgtttagagttatattagaataattattattta

SEQ ID NO: 52810 - DNA, 1595 bp, Cannabis sativa
gtcgaatagtctgcccttcattctgctcggataggcagacgttgtgcgtgcaaatatattacttgaagcccattcaaaatatctttctgcccaagtgcaaggaatgatggacacatgtcacccgtacatgttgccacgtcatagtgcaaaaaatgagataacacgatctaatatgcacttttgtggattagatttgagctattgtgcggattggattggatctaaaaaatgaaatccgcacttagtgcggattggatgcactataagcaaaatagtgcggattggattagatgaacacccctacaagctacgtaactgcactactaacaatcccttcaatcgtagagaacttatttaaaataattcaactatttaaaagttttaataaaataagatagatatatatatttatatataaatctaaattaaaattttgaattatattttataaatttaaaaaatataataaaatttaatttaattttttagaaaattattctatacactattttttaacttttttttttttttttaatttgaatcgataataaataacatgcaatgtcaaaaaaataataaatgatgcagaaagttgatattttatttttatttttttgaaatgaaaatttaaaattacttcacaagcttttcttataattatttaaaggatttcttttgtcagctaataccaattaaaaaagttatgaaaagaagtgtaggtagtaaaaaacaagttttttttttttttcctgggcttgatattatgtttttatgatattttttgtgtgtaagattttttttattattttttatgatttttttattactacatttcattataagcggattaataatgttaatgctcatttacttgcataattagtttttttttaccttgaattattgtgtgtttagtgtttggatttacttatttatttagaatgatatgagtattttgtatgaataatttttttgactacgtgtcttataatatagatgaatattttttttcaaaaaaaaaaaaaatatggtaaaaagacttcaaattctgaaatattaattttgaccctatataattgataaaaaatattataaaattataatctcaatatggctttgaaagtttttaatagaattattgaaaagtttattgtgagaatagtagctgagacaattttatccaaaaagcatatccaatctggaattgataactagtactgactagtgagtagtgacattgtgacgacaatgaacttttttttatattttttttactcaaatcggtatctttattaattaatcaaatcgttaaaaataatagaacgtgcttcagaggaacaatctccaactgaagcacacgacgtggagagaaacaagaatctctggctaaacagtgagctagcttatttgcagatcgtttgacaaaacgcaattcaacattgtctaaagataaaagcaacacgggaacatcatgcactaaaaaaccaaaagaatatgacatagagactttactttgaatagcttgtgcgcataccaagctgtctgattccaaaattacttgtccccgatcaatccaacttaatgcttctttgatg

SEQ ID NO: 52811 - DNA, 1659 bp, Cannabis sativa
tacatattaagttaatttttaatattatacctgcaccagagagacataactgtagccccaatcttatccaggtcgcaaaaatcaaggatgtcctccttcattattccaagtactatcattttcaactccgaacacatcatctgcaattttaatttgtggtgcatacatgtctggccatcccatcaccattgttttaagcttttttagtgttgttgtaagaccaggcttagggtaacgagtcactgagagttttgatggcctcaaaggatgtttaagatcttgagtcggtggacctagagggttatctgtgcgtgccttttttgctggtctcacctagaacaaaaaaaaaacattccaaagttagatttagcaatattaattggtaaatcaaataactctaaaccacgaacaatgattatcgtttcttgattagatttttctaacactatatatgcccttggccaagcaacatagcacccaattgcctctcccactgtgcgaaagccttgttgttcaagcggctgtgggagtagagcattatgtttaataattttctcgatgaaaacacaagaataggtgtcatcgtactcttttccatctactctcaacttctcaagttttggttgtattactacgtgcccagttgcaactaggggtggcttattcatggagcgatcttccacgtgcaggttgcactttaatttctgcaaaaagcaaccaaaatattatttaatttcactatagttattaacaatgaataaaaaaattaaattaataagcgaaataatattaccttcttcgatgtaaccgaaggtgctggtgttggtggagtagatgccgtaagaggaggtgctaggcgtggcgtagatgccttgagaggaggcgctgggcgtggagtaaatgccttgagaggaggcgctggggtggagtagatgccctgagaggaggcactgggggtggagcagatgcccccataagaggtgcatggggtcgagcagatgccttgacaaattgagctgagggcggtggtggagaataggctctgcttactgttggtggttcattggatgctcctccaacagctgaaccagatgcatgagaagtaccacaagtgttactttgttgagacctgaatgcttggaggagttcattcatctgttcctcatactgagaaagtcgcctctcgagctcagctatgcgattattgtctctactctcattctttcttctagggcgtggggtcttgaaaaattgggtttgggtgacgccacgtcccatccctctaacacgtccagcgtgctcatctgtccccaaggctaacgagagtatgtctttctttccttcctccaccaatgtgccctcctcaacttgcttgcgatattcaacctacatacatataatttcaattaattattaagaattaacagagcacaacacttcaaaaagaattaacaaacgaaacttacaattcgatcagcgacctccttggtagggccttcgatctcaccctttttgttggtgtgcattctcatccatatgtcagatctatcaaactcagtgagttggtggcccaactctttctccatttctgtctcgacctttttcgcaccaccccgtcccgttctatggttgtacatatttttagctctaatggcttgt

SEQ ID NO: 52812 - DNA, 1062 bp, Cannabis sativa
  modified_base (989)..(1021): a, c, t, g, unknown or other
atggtctcctcaagtcggtcagaagcctcaagatccttagtcagctcagctattttcttctgggaggtaaaaatcttcttgttggcttcacccaactccatctgaacagccctgagttccgccctggcgtcttcaggatccttcctggccaagtccacctccgccctctggtgttggacaaagtcgtcttcttcgaagaagcagacttagcccaggagtaggtgtaagccaacttcagaccggcgtgtccagagaaaaaacttgagtatgcgagccaagtaaagaggattaaagaaaatcgtcaagaaagacttacccttgtgaactctttcaagactcttcccaccagcagctctagagaagagtcattgtcagcaccggccagctgctcattgacctcaggaacaaaccagttcatatagtgagcaagcatctccttacctttcttggcctccaaaagcaccgacaaaggtggagtagaggtccgcaccagctcagacccacctctcggtttgtcagacctgtccgaactccctcctcgagactcctccgactaggcaacttttggagttgaggggtttgcaaccgttagctcctcagaaagattgatgacttccctgacaggcgtcttttccttggaagaggttccctcaacgcctttagacttcttggctggaggagatgcgcttgagcctccgccgattatcttttttagagcatcaagcatcttttgagacatgtctgcacagaataaaaaaaacaacatggttagaagaaatagacatcagaaacataaagcataatagtcaagaagctaaaaagaaggacgaagtaatacgcaagatgattgctcgagcaggcctcgaaagtccatcgcacctgacatgcctctgattttagacataacaactttccctttttccgagcacgagaggaggtggccgagcgggagagatggcctccatgatgcgaattgcatgttcgatagnnnnnnnnnnnnnnnnnnnnnnnnnnnnnnnnntgagcggagtcacctgttcttcctcagcctcatcttcagga

SEQ ID NO: 52813 - DNA, 788 bp, Cannabis sativa
tgtgtgagatttactacttgattgcgtatacttgcgtagtgtttaaaattatagcaacaaccacttgtcattggtgcagaagaagatttagcaacttgcatttgagctttggtcaacaaatctcttatgtatttctcttgagaaagatgtaggccatttgtggtgtgttggacttctattccccaaaaataatttaactctccaaggtccttgagacaaaactcagtgtttagattggtgattaactggagacaaccttaggattgctccctgtgataataatgtcatctacgtagaccaagatgatagttgtggactgaagagagtgatgaatgaataaagagtggtcagacttggatgagacaaaaccaaaccttgacagagacagttgcaacttttcaaaccaggctcttggggcctgtttgagtccatatagagctttatggagtttgcaaaaaagattgggtgatgtagtgacttcatagccaggaggttatgtcatgtagacttcttcttgaagtataccattcaagaaggcattattgacatccaattgcctaatttaccacccatgaggcaaagctaaagttaacacaactcaaatggtaactagtttcactacaggactaaaagtttcagtgaaatccaacccaggttgttgatgaaagcctttagcaaccagcatttccttgtgtctagtcacagtgctatatgtgtcttccttttccttttaaacccatttacgacctatgacttgtctttcaggggtaggggaacaagagtgtaag

SEQ ID NO: 52814 - DNA, 1392 bp, Cannabis sativa
tatatatatatgtatgttaatgtaaagcaaatctaatattttttttttatttaagcgtttatatattacaattatattttatttactcgaactaggacttccaagagacacacccacctatggtcacttgagctagcctcaagtgatttaatggaaacctaatatttgtaacttgttattgtgtatgcaaataaaacccttttttggttgcttaataagtaaatagtattcttctctccctttgggccgccccgtaattatatattcttgtgataaagagaaagaattaagtaaagttattacaagaattgtcaaaggaatcattatatagataatatatatatatgtgaggatttttacaaaagggaaatccaaaatttataattcaaatttatttatacatattgtagacattaattaattatactaaaaaattccaccaataatagtttacaagaaaaataaatttaaataattaattatatgaatatttatttttcttattataatttataaggtgtaaaactaactatttatttcattttaaattttatttttaacgctataaattattaaatttttttaaatctagtatagaacatttatatggttggggcatatgctttttgcccccatcactaattaaaaattttgtgaaattttaaataatatatcaaaacaacttattttatgcaagtatataatagacttcacaacaaccttttgtgattgagaggttctaaattaataactatacataatgtaactgtcaaataacaacaaaaaaaaaaaaaaaaaaaagaaaaaaattggattgtaattaatcatatgcttaaaattcgaaaacaaattgttttgacacctattttataagggcatgaaaaggattattttgagaagccgtatttttaataccataatttttttaaaaaatttcatgaaaacttattacaaatttccaccatccgaccatcatataaaaaaaattaaattataaattttctagtctttaccatcaaaaataaaaatatttctaccagtaaggtcaacatgcctagttttgagcataagtgggttaaatttgtgtctagtaaagacccaaaaaaaattcttttttaaatttaaatactttttttttcttaattttaaaaaatactacaatttcttctaaataaaagatcaatttttttttttatgactcattatatttcaaggctggtcctgaaagtcaaagccatccctacaattaaacaatttatttttcatatatcattatatatttatatacataataataataataatatcaaatataaatattatatgtacatctaatttgctttagaatctcttattatttagagattgttttttttttaatatgcccatacc

SEQ ID NO: 52815 - DNA, 1246 bp, Cannabis sativa
caagaacaaacaagataaatctcatctaaactactatctaaaaagttagaggaagggggatcaactcgagtatctatatattccctagagcctgttatctcatagttcccaagttttggcctagtacgcattgctactatatttgtccgaaataccataatatgagctgctgcttgtaacttgaacgtgaaaattgagatatcaactatcaaacctatgtgcgatgagattaattcaattccaaatgtaaaaattacattggccatcagaaaatttaaccaagcaatttcgatcagcattaagaacagttggggaccacccataaaaatgttcaatcttacctcggggagctcatttaggtgggcaacttcccaaggaactgtggctttaacataggatcgcaagcttccttgtaaaaactaattaatggatttaaaaaattaattatttttattaaaaaatccatttatatataaaaaaaaaagtatattaaaaatttaatttttgtaaaaatttaatttaatgggaacaagtttgagtgtatttttctctctaaaattctagatttgtttaagtaaagataatagttttttttaatagtttaatttatatttttattaaatttttaattattttttaagatacaggtttgtaaatataaataagcttgattttctcttcacaaaatcttagtttgtttaaattatttaagatatgtatctataaataaaataaactttgaaaatatttttttttaagaataattaaaatttttaaaataaacttaataatttttttattaatttaatacttttattaggttttttaactttttttttaaaattaatagaaaattataatttttaaatttaactttttttttttaataaaaagagataaaatttagtattagttaaaatttaaatgtaaaaatatcaattattctttacaattatatcacaaacgacaccatatctttttcaaattaattaaaacattagaatacatggtcatttgtaaagaatacattttgattcatcaaaaacacatatcaccaaaaacaatattttacaattatatccctcaaatttaaaagttaaattgcaaaacaaataaatccattaaaatattatttctctcaccaatcaatgggtactatccggttgtaaaacttgcaattctaagtgaaaaagttatttactacagtaaaattctatttgtcttatttgaggtgtgtaaaacctca

SEQ ID NO: 52816 - DNA, 1116 bp, Cannabis sativa
cagagagttccagagagaaaaagatccgtttactcccgcttctatataattatgataccacaacatatcattccaatgtattattatctagtattattttatgagataattaaatgagatattattttttcttattacatttttacaattttttataaaaacaacataaaagtaataatagaaaaaaaatatataacatcaaaataatatacatataacaaaaaattaacaataaatttataagagtacaatattaaaaaatcttattttttgtaaataaatcatacaaatatttaaaattctgtgcaaccatatttttgtaatttttcttattatttttatgtatttgtgaaatagtcctttattttatcgtctcacttttgattattttacaccttgatgtttgataattaatttaccttttgatttttgacatattattattttacccttatgtagtaaaataagtattattttacactctaatttttgacatagtattattttgcccatagtataataagtattattttacacctgacttttgacatagtattgtattataatcaaactaattaaaattataattaaaaattttaaatattattatgttttatttgtataaataacacttaaattaaatattttttaataaaaataattttatttattgaataacatctacaaaaattaattatacaactaaacaatacatataatcaaaataataatgaagaatataactaagtatacgtgtattgcacataatactaacctagtatacactattacaaaatattatttttgcatcggcgaaacacgtcagtcaatgctgaaaattgatgtaagaaaataagattcgtcggttcgaaactaacgttactttgtgtcggtttaaaaatgacattttaatttttgtgtcggttacaaactgacgctacaattaaaaatcgacataataacaaattgaaaaaaaaaattaagcctaaaacataaggcccatttacactaaaaccctaatatatattaaaggctaattaggatttttttcccctaaactttaacatgtaccaaatcatgcccctagaatttttctagccgttaaaaatttctcct

SEQ ID NO: 52817 - DNA, 654 bp, Cannabis sativa
ctgatctagggggcggggcggggcagattcttacataatctgtatcaggtcagatcagatccgacccgacccattgacactcctactttctggcatttggttgctctgctggactcttgtgttagtatcaacctagtttgggctcctcatgagcaaaataaggaggtgcataacttgattgcttgggcctttaactttgttgtctttggttttctatccattgaggagttggcacctcttgttgccaattaagacttattttaatataatgtgttcttaattaaaaaaaaaaaagatataaaaaaaattagaaatatttaccattaaatcaatatctcaaatagaaataagtaagagataacacatttgaatagtattaaaatatcaacagtgtgctctaattttctaattaatgtcaaaaattatatgttttgtacatatgaccagatcatgactaacattttgatttaagacttttaagcatcatgactaacaccaaaactaattgttcttctagcaatgtacttctcaaaggagtaaacaatttattttacactagttaatcttctttcatatattactgaaatttaaacctcccaagtagctatattatgatattgagttaaaagattacaaatgtaaatgctatgaaaa

SEQ ID NO: 52818 - DNA, 1511 bp, Cannabis sativa
  modified_base (399)..(400): a, c, t, g, unknown or other
cttaccaagtctaataaagttaccaatcaacgtacttaaagaagatcaaacagtatcactacaaataaatacttacacaaaattcacaattaacagttaattaaataattagaacaaactaattaaaattaaacttattctataaacattaattacacctgtagctaactttctttttttagctaaattatagtaaacttttttttttctataactataataaagggaaaattacataaactgttatttttggtaaaatatttacactattacgtttaaatacgtttaaagtttgtttaaagtttttttttttttacatttttacggtattcaataaaaacacatgaaaaccacataaaagtaacaagaaaacataaaaaaaaaaaaaacaacataaannataatatacaaataacaaaataacaaaaatacaacatcaaaatgcatcaaaaagacttcattttatgtaaataatatcttaaaacaataaaaatgtttaaaattctgtacaactgtaattttgtaatttttttattatttttgtgttgttttcaagttatccctataacaaacttataccaaaacatttatttacctaaatttatacaatcattttgactaataataatttttaattttacctaaactaaattaaaacaaataaataatttttataataacaaattaaataaataaattttttacctaaactaaatcttttttattctaaaagttttttccaaatattttttacacgttaaattttttacaataaattaactttataacacattaaatttattcaataacaactaactttaaattaaacaaattaattttttattcctaaccatatacgtaaataaatatatatgtatataaataaatatatatttacatcttttttcttaggatatagatttttggaaaaaatatatatgtaagaaaataaatatataaataaaaaataaataaatgtatatatataccttgagagaaagagagagggggaccgaggtggtaggtggtggtctggcatcgaggtggtgggtgggtgcggcggtggtggttacgtaaggaggaagacgagagacaagagagggaggaagcggttgtgggtgggtttcgtgggtagttggaggcaacagagacagatcggcggtggtggtggttgcgtggggtttcggggttaggtgcggttgggatgaagaaatgagaaaatggttttaaactgtcgagtacaagagtattagatattcgatagttttacttaaaatcgtcgcctatttttataacgagtgaatacttaatttttttcaacagtttaaaacagtcattcatatttattagcgacggttctcgaaaaaaatcgtttcaaaaaccgacggagaataccctttttgtattagtgtaattacctaaatgatattttatacatacataaagctgatttgataagattttatcaatctataaagagtgtttgcagagagtaaataaaaaaaaaaaaa

SEQ ID NO: 52819 - DNA, 1262 bp, Cannabis sativa
tatattgcatactaataaatagtattatacaaatgcagtggttatatgacacctgaatatgtttctaatggtttgttctcaataaaatctgacgtatttacttttggcacattggtgttagaaatagtaagtggaaagaaaagtagaagcttttacgacgaagatagccttcttatcctcaatggattggtaagtgttcatatcaaaaagtttcttaaatgttacaatggctctttctgttatatttatatttttataatatttattaggtgtgaactttgatgaaagaaggcaatgcttttaagcttactgaaaagtgcttgttaagtaatccatatatgaacatggaagaagcattgcgttgcatccacattggtctcttgtgtgtgcaacaaaaacgtaatgacatgcctaatatgtcttccgtcgttttaatgttgagtgacaagagcatattgcctcaacccaaaccgccagcctatttctctaacacagatttgtgggaaggagctcattcctccgttcttaagcccccatcatgcaatacaagcataacaactgttgaagggcgatgagaattcatacaacaaaatgatggatttccccatttgaattttgagaacttagatcatgataatttctgtttattttgtttaaattgcaatgatgattggatctatatgccgaaaattcataatggttcttctacattgtgctaatcttgatgataaaagtgaattttcaacttttttttttctcttaaccaatcatgtgtagatggtacacatgctaaccaattaactattgatgcatttggttctgcaccttctttagagatgaaataacttctgcagatttgtcctatgaatttttctgcaaacagaattatctatctttttgaccaatatgtgtcaatgtctaccacatgctccgaaaataaaaataaatatggcaaagcaagcactgccaaggtgatattttattaagctcactggattagtaagtagtgtacatagaaaaagccttaattatatatccaagttctaatttctgcctatttagcttgtttgtctacctgatgtatttgtttctgtaattgttttagttgaattagcttttgcttattgctaggctaacccaagcaatcctctttgaattgatttaatgttgaagttgaagatgactattgagtcaaatgtggggataataagataagagcattcacatgcaatcccttccctattagaatattttatatatgg

SEQ ID NO: 52820 - DNA, 749 bp, Cannabis sativa
gatcatgtttatagattagacaaatttttgtatggtttaaaacaagcaccacgtgcttggtatgagcgtctaactgaattcttgctttctcatgattacagattgggaaatgttgataaaacacttttcatcaaaaatattaatactgatgttatagttgctcatatatatgttgatgatattgtttttggttctgcttctaactctgaaatggaggtttttgtttctcaaatgaagaggagtttgaaatgagcatggtaggtgaactcacttattttctcgatctccaagtgaagcaatctaatgagggtacgtttgtctctcaaagtaagtatgcaaagaacttggtgaaaaagtttggtcttgagaataccaaacataccaatactcccatgggcacaacattgaaactaaccaaagatgaacaaggagtaagggtagatcaaactttatattgaagtatgatatgcagtttgctttatctcacagctagtcaccctgatatttgggcacgatatcagggaaatcccatggaatataatctttctgctgtgaaaagaatcattcgttatgtaaatagcactattgattttgggatttggttttctaaagacactaattctaatctggtttgttttaatgatgctgcttgggcaggtaatgcagatgatagaaaaagcactagtggtggatgtttctatcttagaaacaatcttgttcatggcacaacaagaagcaaaactcaatct

SEQ ID NO: 52821 - DNA, 1928 bp, Cannabis sativa
tataattattagtttaaaaaattaatttaggtataaaagatggatataaattcaaatttcccaataaaaaataatcaattctaatattttggtgctcctggttttaatcgtgaacgaattcgaagaagatgcaagcactcgtccaagtaattggatattcactagaaataatttttgtttttttttctctcagaaaattcaagctcaatgtaaagggggttgtaaacagatggttttttacttcatttaaaaaaaaaaatagtgatctacagcatttgagggtttagaaagtggaaatattagcattaaatgatctgtacggaattgagataattcaaatgataatatttgcgtcgatatttactgatctgattaattgttgttttgcaaattcaaaactttacgtattttctagtgcgagtaatcttcatgagctaagagaacaatgccatgtgtaaattatattcaaaaagtaagaaattgtcatccattactactgggttggaatttaaaaagctccatacattttttcaattttcacatgtcttcatatcatctagaatgaagactaaaagtcttcacaactctcgagtttcagaaattttggagtaaatgttattcgtgtttctgaaagagggacacatatactttcaatacctaaattcatttaccaaagacttagtttatagggccaatcaggataatggattgaatttgttaagtcgggccgtccaaattccaaaaagacatcttgtccatacgataagaagagtccaatgaagaaagaatatgatacctactagcaatacttttgaaaatgtgataaatcagtttccaaacatcaaggttaattcagtgtctatttaataacgaatcctgtcatatcaagcctttgtttctaaggttaactccaaaaatcaagcattatgtataaagaaatatagtgattgtcaagcagttattaaatttcatttattacatgcaaaaatgatgcacgttttctacttgtggtcaaacaaatttcatgtaagcagataataatagcctcacaggttgggcctcattaaattacccaaatgtctctatattatttgtatttatcctattagtgggccacatttacataaaaaccctaagtctataaatataactataatccttcatgtaaatggcttaaaattcatttcttacaagctaaggaaagaaataaggttcataaacagtggacaaatacttgtgtaatactgaaaggtttttctagcgaaataatattgactcgtgaactatagaattagtcctatatctaattcgaacatgccgtccaaattcacccttacagttggtgaaaattgctaggcgaatcttcttaggcccagtgatggacccgatgtctattaggcctccattcgacaacacgaataacaagagcctatcattatattgttctaattctctataattaaattagagatttttttttttataaatactaaaaagacaaaaaaaattacaaaaatacaaatctataatttttcaccatttttacaaattttaattatttttttttttttacaaaaatgcgtacaattatttttcatttttcaaaacaatattattttcacgttgctactacataaaaataacgttgttttctaaagaaaaaaatacaagtaaaattcttgttaaaaaaaaataaaaatatataaaaaaaaaatacaattttaggtacttttatgtaaaaatctcaaaaagttaaatatgaattattgtgtaaacaaaagtgcaattttagtgtatataacattactatttataagagaatagtaaagggaattttgattttgtatacttaaaaaaattaaaaaaatttattattaaactaaaaacataaaccctaaaaaaactatgattttttttttcaaaacccc

SEQ ID NO: 52822 - DNA, 1733 bp, Cannabis sativa
aagcttcagagcagcccatcccacttttccatgcttacgattattgatcgcatgaatgacttcattggcaataatgatgttatcaaaaataatgcgatcagaaagaaacgcaccctggttgtgggaaattaagtcggagagagtagttttgaggcgatttgcaatggtttttgaaactaccttgtagagagtggagcagaggctgatgggacggaaatccttaactcgagaagcatttttaatcttgggaatgaggaccaaaatagtttcattgacctgtctcaggtcagcattggtagcaagagcgtgtaaagcagcatggcagaggtccttgccagaggagtcccagtttttttggaaaaaactaggattaaaaccgtcagggcccggggctttgtcacccgctagctggaaaagggcagttttgacttcctcgaaggtgtaaggggatgagaggaaagttgattgggtgggggtaagacgtttggagagtccttgcgtagcaaaagtcatagcctccaaattagtaccttgggacgtgaaaagctcggtgtagaagtggacaaaagtggtggtaatgtcgtttagggaggttacatgagaattgtcgtccagagttaaagatttaatgaaattggtgcgttttcgcgcagaggcccgattgtggaaatatttagtatttttgtcccccgcttttaaccaattaactctggatcgttgtttccaaaaaatttcttctttgactaaaagagtatcaagacttttctgaagatcattggcctttttagcgtcataaggggtaacagtaggacccaccattagacgctcaatgtccgattgtattgttctgatacgatttgagaattgatttttatttttaccccaagaggacaaagaaacagaacagttactctgtttggacagaaaagtgacgatggggttattggtagcagaaggacataagtccgtacgccaactttctcttaagagcttaggaaaatccggttcaagtaaccagtggttatcgaaacgaaaagtggaattgcgggcaaacagaacagggtcgccatcgagcattacttttaacgctctgtgatcagagccgaaaaaaccaagatgttggagagaggccatagggtaaagatcagcccatttctgattaataatggcccaatccaaacgttccagagtgttaccgtgcttccaagtaaaacggctacccgagaaagcaagcgggaaaagagagtatttacctacaaaattttgaaaagaatgcatggcatgcgatggtggtaaaccgcgggtgttacgatcattaaaaccaagataatcgttaaaatccccgatgatgagccacggtaaaagaggggcggtatcaaataaacggtgcaacaaagtccaggaaacatgtttatcaacaacatagggagatccataataacaagataaatgaaaagtagtattgtttatagtaattatacagtcaatatgatggagggaatgtgacaaaatattaacaaaaacattctccttccagaacaaaagcaagccccctcctaaacccgatctaggaacttggaaaacattatcaaaaaaagtattagcccgtgcaacaaaagaggaagagtcaggcagctttgtttccatgacaaaaagaagctggggctggtgctgcttcacgaggagggagaaattttggaatgctcgggaactccctaatccacgagcattcc

SEQ ID NO: 52823 - DNA, 1328 bp, Cannabis sativa
caacctggacgctgaataagtgtaaaaacgtccaaggcaagtactttaagatgtctaagtgatattttgacatcacttagtctggacatcacttagtctgtttcatcacttagtctgtttctgtgctctggcaaagtttgtgctctggcaaagttggtcactaattcttagagatgttgttctgtgaaaatgagagactcgaaactctttatttccaagtgagtttcccatgttgaaaatgagaaatgtgaagttgtgaatttgacttctctgacattatagatcttagttattgtgaaaaactagacgaacgcttgaaatagaatcaaaatcgaataaacagaacttagcgcactagaccatttatcaacctcagcactgggtacccattcatgagctttcagaatcttgttttgatacttccaagacttctgaacttgaagacaaggtctcctaccccaatttgaccattctggattcaatggttgcatcaaatttggaatttgagcaattgaaggcagcgtcccagattgatgttcaacttgggcgttgggcccaacaccaggtcaacttgggggttgggccctatttctaggggctcaggtttgtggttttctccccgagttttcttgaatcttcattatttttatacgaaaaaaatgctcataacactttttggtgaacttgatcgataacaacctagttatggcccttcaaaagctcaatttcgtccccaaaaatagttgaatctcaatctttgctgaaaatagagaagatggtcagaagagttctcgaaaaacatcattggaatcagcttaggttaacaaaatgtcaacctgcacgctgggctaggcctaggtgtcaacatgggcgttgggccttgcttctggcacacaagaagtattgtttcttctccgaaaagatctatttcctcatttttgatgaagacaaagaagatgcaaaattcgaatcgtcgatctaatacttggaaggcacctagattgatgaattgttaacttgggcattgggttctcgggggctaaaaaatgaacttactctaaatctgatttcgatgcctcaaatatgtctgtggtatatctagttgatgttccaatacaagttttgacccatttgcactaagacggttccaaaactgaaactctagttcgggatgtcaacgtgggcgttgggtgaaaccttaggtgcccaggttggcttctgggctacagattcgtgtaatttcagctctcgggggtttggattaagttgctccatgtcttcatggtacaaaatactaaaagatagtgagttggattcaagttattaaa

SEQ ID NO: 52824 - DNA, 3041 bp, Cannabis sativa
ctatcaagggctgagggtgtttatatatggtcggatatgctgaagttagtagaaaacgcagaaaagttcttcgaatatccgtggggccttctttcatatcagaccatagtaccacttccaactaacaagagggctataggatgtagatgggtttacaagattaagtataatagtgacgggagtgtagaacggttaaaggctcgtcttgttgcgcaagactatacgcaataagaaggattagacttctttgatactttttctcccgttgctaaaatggtcacccttaaattgctacttgctgttgctactatcaaaaactggcatattttacaattagacgtgaacaacgcctttctcaatggggatctcaatgaagaggtctacatgtccataccacaaggactaattcttccttcttctcttaatgcagaaagcaatctggtttgcaagctacacaagtcaatatacggcctcaaacaatcgtccagacagtggtataagaagttgtcagatgccttaatgcaagaagggttcaaacactctcaagccgattacaccttattcactagaggaaccgaagacaccttcatcgctctcttagtttacgtggatgacatcgtcataactagaccaaaaatcaatatacttcacgagctacaaatctccttacaccataaattcaagctcaaagcacttggaaaattaaaatattttctctgtttcgaagtggcacaagctcaagaaggcctatttctctcccaaagaaaatatacactccaattgcttgaagattctgggtacataaacatcaagcctagtaagacacctaaggatcccaaactcaaacttgacaatgaagatggtgaagcattggaaaatccctctcattatcgacagcttgttgggaaactcttgtacctaactctgtctagacctaacatcacatttgtcgtaaactctcttagttaatttatggcaaatcctcgcactacacacctccaagccgtgcaccacctgcttcgctacattaaaggaaatcttggacagggacttctctactcaaagtcatcaacattacaccttcgtggtttctctgattttgattgggcatctttcccaattacaaggcgatccactaccggtttttgcatcttcttaggagattgtctcatctcctggcgcacgaaaaagcagcctaccatctccaaaagctcagctgaagccgaatatcgcgctctggctgcaactactagtgagataacatggttacaatactgttacacgattttcacattcctcaaccacatccagccttcatctactgtgataacaactcagctatccacattgcaaacaacccaacctttcatgaaaggaccaaacacataacacatagagcttgactgtcacttcatcagagacaagatcaacaactcaacaatcaggctcattcccatatccagcaaactccaattggcggatgcttttaccaagccactaacctttcctattttgagctcccatatttccaagatgtccgtttatgatatacacgctccatcttgaggaggggtattaaagaatacatatacacaatcttatacccctctggagtatatatcagcaatatatatctttttccccttgtattcttaagtctgctcctctgttataggaaaactgttaggaaatcagttagtggttagttagttaggtttctttcttccttttctttgtttgtaaccgacttaggctgagctatatataaagttcattttctttctttgtatactactgtattttcactttttctcagaataaaataaaaacacttttctctgttttcttattatgagtttttgctgtttttaatttcaaagtatttagttgcttattgtttgctgacgtcatgatcaattttcacattatatctatcaatctatgggatttgtagtcactctcaacacatgcatggtagttgttgatgtggtgttgatgtcaactgataatgtcacataccatcacgtctaatagcttacaaaaaaaatacatactgtacaatattagatactagttttttttttatatatataaaaattatttaattatttaaagtgagagtaaaagtttattaatagagtaatttgcggaataaatacccaagtttatcttctagttgcagtttaatacctaagttaaaattttggcggtaaaaataccttctgtcacacttttagaagttctgtaggtacctgctgttaagtgccatgtcactgtccaggtgtcacggtttgactggtccaaattatttaatttatatttttatttgaaattgattaaaaattatttgaaataaaaaatattaaaaataaaaatatataaaaattaattaaatcaaacataattttttttttttactaccacggcccagcacttatcccacaccaacaaaccaatgacaaacccgtaataggaaaaacatatcactcttttataataaatgacaaccccaaaaacaaacaatgaatatatttaccataaaaacaaaccagtaagacaaaccaatgaccctaggaacaatatatttatgataaatatactcgagtgttatcttcctgggctgatcgcacaccaaacacaatgacaaccccgaaaccaaacggaccccaggaaacaatctccagtcgcacaccccaggaacaaacaccaaacgagaatccaaaatttcattactcagtacactaacaaaatttagatttatataccaaaattcataaaaagaatcttaatggtgagaaataaaatctggtaaaaatatacatctaatataaaataaaaccaaatcaattgcactcatatctcaaaattacaaataaaactttaaattttcctaaaattatttatatttcttcagattcaaaatatcttacgatagaacccatgacgatgcccaaatctccgccaagaccttagccaaatctatgtcagttcgcacagagagaaacaaagagaaggatcccaagggagagagaaagagaggc

SEQ ID NO: 52825 - DNA, 1503 bp, Cannabis sativa
agttccaagccaaaatcttcattgggtatctggagacttttgagggcaagtctccgtagccccaaagcaaaaaacctgctgcgttgtttccttttggtcattgtcacaggtagcacttaactgagggtgttgattatcaagttcagatatctcttcgatcacacaattactgggagcgtttatgtttttctcaataaccacaaaatgattttgaagatcaattgctagctccacagaggcagtgttccatgggttagagtagtgtttaccaacctttttctgctttcggttgctgccttcccttttgagacgaatcgttcttgctgcgagtggagacgggtccttcaccggtcttcctcgtttccttgtagtagtaggctcttgaggctttggaactgggattgtaccttttcttggtcgtcctcttttcctatgactgtttaatttcatatgatcctggtgagaagtctccgtcaatctcaggcataggcgagtccactttttcttcacagttgtggatgacatcatgtttgtttggagagaaagcctcatactcacgcttctcaggtaacataaggaaaccatcagttgaatttcttttcctcggaccatgctcagcctcatagcaccttatttcttcgatgtcgagtatggggttgaacaaagtaggttcacggtggtacttgtcaattgtttttgctcccaacaattgatcaaaggcaatttcccaacattctttggaaggccaatcaatgagatgggcctgggttcctaaaaggttttgttggtcagggcccaatttagttgaatttgcttttttaattatcactcttgggcttttcacactcggaccagaaatgttttgggcctccaccttctttggcccatgacaaatggacttgccaacagtagatatctgttctccaacggctagtttagttgactcatctattttttcttcatttgttgtgtcttccaccaagagccctttgtcttttgttgcaaaacgggaggttgagccagaccgcatgcttccgttgttgacaggcatggcctctggactactgcaggttggtacatctttatgctgcattgtctcctttaactccaaagaaggaaattcagaaagtatcttttccactaccaggtttgcagtgttctcaaaaggagtaacttcacctatccccggcagatgaatcgctgggaaccggttcagcactacttcttcggcgtcgactctggtttccaccaccgtctccacttgacgccttttgcctggatattgattccggagttctcgcatatccgcggcttcaatctgcaaacttattttttgattctgtaggagatgtctcactttctcatccttcgctgcctgctgattaactatccactcattgaaccagttaggaatagggggtggaaaggcgatttttcctttgcctcttcagccatccaattcccaaacataggaaagaagcttcctttatcatcttttatcac

SEQ ID NO: 52826 - DNA, 1453 bp, Cannabis sativa
  modified_base (373)..(381): a, c, t, g, unknown or other
taggatatttttatgtttcgttgttgagtactatatctaggggtattcgcggtgtgggtggtgctatttttgttcattttttcaaattaacccgtaatgcggtttttctaattttccaaaccgcacccgcaccgcgaaactaaaaaaccgcggaaaccgcaccgcaaaaaatggttcggtgcggtacgatttttgcggtttggactatcaccaataattaaactattacaaatacaacaaaatttgagcaacatttatcaaaaataccataagacttgaaagaaatatgaaaaaaaaaattaagtttcaataatacaataattaatagactttgggttggacattcacgtattagacctaaataaatataaannnnnnnnnttttataatgtgcggtgcggtgcaatttgaaccacatattaataattcaaaactgcaaaccgcaccacacaacgcgatttaggaaaaattcaaaccgcgactgcaccgcaaaaaatttcagactgtattttttttttttacagtacaagcggtttaaacagtttgatgaacactcgtagtcctatgtagacacaattgtaggcacatatatcacacataataatgtaataatgtttattaaatatgtcatatctattattagaaaaaaattatagtactacatgcctataaaggttttcggtatgtttttttttttatctgttttagcatttataagattataatttgctctaatattttttttcataattgtataagttataattatttagaattacatataaatttttaaaaaaattcttaataatatacaatgcaaaaaattctaaattttgatattttattgtactttttattatatgcatggtaaataattatttaaatctgatttttgatattataaactattcgaattttttttaaaaaaaaaaaatgaattaaaaaagctctttagataccaaaaatgataaaaggagtactaaaacacatgtttttgaggtgtactacaaatttagttagaccaatagcgatattgacacataagacgggtgcccttctcaatttatatatatgacttgtgtattgtaatatagttacagtatatgtaccgcctgtcctttatattaattaaaaaatttcccaaattaattacctttatatttccagcttgtttgatagcatctacaagcttgagctgaagaagaatatggttggtccggatatggacaccagaaatggcgcagatgaccacatcgacaagcttgacagcatcaacgaggctttgttggtcattgaaagaagctgagactaatttagctcctttttccttgaacgacaaaagcatttgaactctctcaatatcaactcctatctcaggcctgtgaaccacatacgtctcatgaccctcttctaaacttgccttcactaacctcttccccaagtacccagttcc

SEQ ID NO: 52827 - DNA, 559 bp, Cannabis sativa
caaactcaatgagcaggtaaccagtacaatcttccaaatcttccatttattccctgtttctcagtagaataacttccttaaaccccaagttataataatcaagttttaaaattattttgcttttcagtgatctagggactggctttaaggccatttaaagggtaaacagtagcaaatatccatattcagtttgaattaatccacatgtataggtagaccttcttatctaaggtacacaaaacaagaaaatagtactactagtagtactaatttggatccaaacaccttaacatgacacgaatttagtcaataaatacttgataattcagcccaaaaaaataaatacactagacagaaattaacatgcataatcaattaaaaaaatatgtgataaaaataaaataaatgtatacttaataaactaactcgaattattttcaagtaaagtaatcgttacatttgttacatcaattttcgtaataattatttcattaaaaaagtcttaattaaatagacaagttgtaaattataccattttagaattgctgttgaaatgttt

SEQ ID NO: 52828 - DNA, 995 bp, Cannabis sativa
tttaacatttttagttgcaattaagttgcatgttaattgaataatgattttgctactacaatatcatagtattataataacaggactcgaaattgtcaaatatgcaacttgaacagataaaacacgattatcgcaatatttatttgtattaaatatgtgaaattattagttgctttgtagttttatgttagttgggtcgcaacaaatagaactgttgcattatagtttcatcacagttgccttgaagttgacttcttctttcccttctggccattgaagttgaaatttttttcaggcaaagataccttcgactacttcttcactggacgacgaccattgttagccacgggggagcgaaatcggagtcaatattacaaaaaatcttccagctggccaaataaacaaatatacagcccaaataaaaaaaattaaacaaatacctcttacacacaccttcaacccacgaaccatgctttctgggattgaaaccttcgtctgatgcaacttttgatcaaccacccagcaacccaacacaactgaaacgacattcaactagaaagagaatcaccattgattccggcgacttcacttgagaagacgaccgaaatcaatcaaaataaggactgtttcgaattcctcaaaaaaaaaattaataggtggtatatacagtaagtaatagtaattgtgtgtgtaagtgatagtataagaagtattttagtaattaaaaatacataaaaagtataaatattgtccacccttataaatttttataaataaagtatgtgataattcttttttttagtcgatgtgaatccaacatgataaaaataaacaaagtaataatctagtaatgtgaattcattatgtatacctttaaaatattgaatatgtgtctcaatatatgcaagataaaaaaagacaatttcatagtgaaaatttgtattacaaaacaattaaacgagaatactgcactatgaagataaaaattagttttt

SEQ ID NO: 52829 - DNA, 1633 bp, Cannabis sativa
ttaattataaagaataatgattttaataattatataatatttattttttacttaaattattataaaatttctcagcacacacaagctgggaaaagaggtcgaacgaaaagcagattccggccgtttcgtcccgaaaactccacagaaagaagagggttcttaagaataaagcttgccattagcttcgacgagaaggatctcaggtacaacccgcacaatccccttttttctataaccatgaaaaagcattagctctattatagtgtatttgatgaaactggaatcctacttttatgaattgggtatctccatgtgtgggtgtttggggatttttatttttatcggtgttttgtttatacggaaagcttaaaaatgtcatctttcaaaccaatcctcgattttcattatccatttatttacttgaaagatgatgtcagagttcaattcttcaaacacattgctgatctttctggaaaaaccaatttgactccttggtttcactgttataagtggagggaaacatgctgggaacagtttagcaattcaggtatgttgttttcagccttaaaacttcgtgtgttctctacaaaacttgtgatttttattttcaacttttataaattcaaagattgtgaatgctttgctgcctctgaattatagcctttgtgtgttgctttactttatttctagctggaaaaaaaaaactcaaattttcttcatttcaacattctttgagaatcctcaataggtgactttaggccaagaaatttacatgattagtacttctttagatgagacattatttaactatgattggttgcatttcctacacaattttctgtattaatatgataattttgtttctgacgaaaaaagatataaaaatgtagataaggagataacactattattcacttaatcattgactgtattcttattacatatataaaaagaccatattacaaaattgtgtatgtgagaaagagaatacaaaacttaatactgacagttagttgcctgtgtgataaaccatttatttacttgactcaatttttcatttttcatggttgatttatgcatttattaatgtttcaaacaaagtcttgattgttctgcaagaataggtgtctgattttagttgcaagcaaggtatgcacaaggtagagctgaataattatgtttatggttcactcccatgaggtttcaggttcaatatcttgtagggagcacctattatctttttagtattttatgttttgcaaagattttgtttggttacagtgccagtatgtttggtacaagtctatgttgtttcgttacagtgccagtatatcatgttgatgatgcatttcagaaagggtttgttaaacatacaagtggtactcagcagcaatttgagtccacacattctccactagctgctgctctgagggatgtaattaattcagcatcaatgatcactcgaaccttaagtggagaattagctgaaggcctatgtaaactgatggcgtttgcagctgcaggtgctagctcaaaaggaccgaattccttgacaacacagttgagcaatggtccactttctagtgtacatgaaatggcagaatcaccggttgatcctattaaggaattatca

SEQ ID NO: 52830 - DNA, 1108 bp, Cannabis sativa
gcaatttttcagtttcgccttgctttaagaagttaataatgggaaggtgtttcttcaatgtgaggtggtgctgtttgatgacgctatagctttattgtctaaatttttgggggcagttttgtcccatgtggctcgagatgagaattttgcagtgcatggtttggcaaagcatgccattcggttagacaatgagctatcctggttcgaggaggtgctgtcaccgattgtggattgctgctttgataatcttgtgtgattttgatcaccgcgtcaaaaaaaaagataaaccttgctatgtttgtcctttagctaaacaaagaaatcttctttttcctaataacaattctattgctgtcaataaattgatattgttcattgtgatacttggggcccttatcacattagttctcattctaactttaagtattttctcaccttggttgatgaccacacaagattcacatgaatttatttacttaagcataaatctgatgttgttgatataatacctaattttatctcttatgttcaaacacaatttcagtgcactattaagaagtttcgttctgacaatgcccccgaacttgtgtttaaagatctatttgccaaacttggaattatgcatgattttacttgtgtggaaacgcctgaacaaaacgccattgctgaaagaaaacaccaacatatattaaatgtggctcgtgctcttttctttcaagcaaaaatgccaattaagttctggtctgaatgtgtgatgacagttgcctttttaataaatagaactccaactcctctacttcacaatagaacacctttcgagttattatttgacactgcaccagattattccaatctaagaaattttggatgccttgcttttgcttgtactctcactgctaatcgcaccaagtttgccccaagagcaagaccttgtgtttttatagaatatccacaaggcgtcaaaggttacaaactttatgacttaaatgacaaacaaatttttgtctcaagaaatgtcattttccatgaacatattttcccttttcacactcttaacacctctgatattggtgatgaccctttctctcatcttgttttaccttcttct

SEQ ID NO: 52831 - DNA, 1306 bp, Cannabis sativa
atctgtttgaccagttgaagggtaagacagtcttttctaagattgaccttcgttccagttaccattagttaagaattcgtgaagaggatatcctaaagactacattccatacttggtatggacattacgagttcctggtgatgccttttagactcaccaatgccccgactacattcatggatcttatgaactgagtattcaaagattttctagacaagcatgtgatagtgttcattgacgatatttggtttattctgaatgagaagaagaacatgaattacatctcagattagtacttcagtgattacgggatcacaaactttatgctaaattcaagaagtgtgagttctagttatcatgtgtctctttcttagggtacatagtggataaagataggatcatggttgatctagccaaaattgaagctgttcgagattggccaacaccaaaatcaactactaaggttagaagctttttaggtctagctagatattatcttcggttcattgaaggtttctcaaagatagcgacacctttaacataattaacccaaaagaatttgaagttcaactggacagaccggtgtgagaaaagttttcaggagttaaagcaacgcttaattacttctccaatattaactcttccttctgataaggaaaagtttgtcatttattgtgatgcctcaagacaaggtctaggctatatacttatgcaaactggaaatgtaatagcttatgctcctcggcaattaaaagagtacgaacagaggtaccctacgcacgatctagagctcccagtagtagtatttgtgctaaagattttgcggcattacttatatggcgggaaatgtgagatttacaccaatcataaaagtccaaaatacttcttcactcagaaagacctgaacatgagctggtaaaggattatgactatgaaatcccttatcatcctgggaagaccaatgttgtagctgatgccctaagtaggaagggttaaaaccagatgaatataataaaacagattttcaagcaaccgacagatgaaatgacacgaactaacattgagtttattatgggatggttagctaacattaccttgcagtctactctcctggaaagaattgaagaagcacaatatcaagacccaaatttagtgaagtctcgagacaagattttagctgggaagaccaatgactttatagtggataataatggggtgttacagtttataaaccatgtttgcattcctatggatgatgatattaagagagaattctgaatgagattgcccccaacaaatacacaat

SEQ ID NO: 52832 - DNA, 1659 bp, Cannabis sativa
gttgcagcatcatcaggagtaaagaggtcgttaactacttcagcatcccaggagcggctatgaatttgaaacaaactgctaaccataaagttctcaagtctcggaacagtgggaacaggagaagctctgtcaagtaaaggcagccaaggatcactggttattttcacagtcaaactagaccctatgcctttccttagaccaagctgaactgtgtccttagcagcaaaaatactactccaaatgaagctaggattagaccccaactcagcagacaaatagtcaccttgtgggtagtatcgagccttgaagactttgcttacaagagaatcatgtctgaataaaagtctccacccttgctttccaagcatagcgagattaaaatctctcaaactcctaaaacccaatccgccatcagctttagaccttgtcattctgtcccagctcatccaaacaatgccactcccattattatgagctctctttgatttccaccagaaacttgccatcatcctctcaagttcattacatgtaccaataggaaaaaggaagacattcatggcatacgaaggaagagattggactaccgattttataaggacctccttgccagcacgagataaaaatttgccctcccaactgcttattcgcttcttcattttctcttttagaaaacccaacacagcgtttttattacgcctaaccgtgcttgggaggcctaagtacatactatctaccccagcttcttgaacttgcatcaggccacagattctgttttggatatccgcccttgtgtttgaactgaagaatgctgacgatttattgagattaaccttttgtcccgaagctctctcaaagatatgaaggagtgtaagaacacgattggcttcctcctccgatgcttgacaatacacataactatcatccgcaaagagtaaatgggagataggggtgcacttctagcaaccttgcaacccgtgataagtttctgagcttcaaagtgtttgatcaaggaagagagaccctcggcgcacacaatgaacaaatacggggacaaagggcaaccttggcggatacctctggtaggaattattggacccatcttctgaccactattgataacatgatagcgaaccgaattaacacaaccaagaatgaggccaatccaccgttcactaaagcccatcactcgaagaatggcttccaagaaaccccactcaacacgatcgtaggctttgctcatatccaacttgagagccatgtatccctttcttccattagttttcctttttagatagtgcataacttcaaaagccaccataacattgtcagaaatcaacctccctgaaacgaaagcactctgagtgtctgagatagcatagtccaagattcctttcattcggttagcaacaaccgtagaggcaattttatacaatacattgcaaagcgaaatcggcctcatatcactcacttgggacgggtttttcttctttggaattaaaacgatgtgagtatcattaatatcagtcaggaagtcaccattattgaagaaatcccgaacaaagttgaccacatccgaaccaactatactccaatgcttttgataaaatgccggggtcgttccgtcaggtcccgggaatttgtcaggatgcatttggaata

SEQ ID NO: 52833 - DNA, 3940 bp, Cannabis sativa
taattctttataaaatttcaaaagtaagaaaaaaaaattaataaaaattatatgaattgataataaaaatagtaactgaatagatatttatgatatattagtgtatttaacttattgtttattattgaatttttattaatattgtcagtaaaaaatttatctagccgctcgcgaaaggcggcatgttgcctagttttatatataaagatagagcattgctataaggtactactggtgcctagcaccttctcgacatgtcacattgcgattagttagcgatactctctaaaaattactatattaaattatatgagagtgatacttaattggaccaatagcgatactaacacatagaagggtgctaggcaccactggtgtcctttagcatttctcataaagatatgttagtgtttgccacgtagcttaagagtagtgtagctttcagtaattaatttctctcatgttagtgtttgccacgtagcttaagagtagtgtagctttcagtaattaatttctctcatgtcgttttcttgcctaccaattaatttctcatgtcgtttaattaagttgacttcttctcagtcaacaaaaagcttaataatgtttatatatatatacacaatatttaagtacatattgaagtgttgtcatccctcactgaaatttcgaagagagaactacaatttcatttcccaacaacccaagtaatatttttggagagagtgccacgtcatcacttaattagtcaagatatgtaaataataatataattttatttatccttacaaaaaattttatttattttatatatataaagatcaagacaagagttttcttttgtgatcgtcatcatgaatttcaacacgttcactatatatatatatgatgactttcatttgatattttccaattatatctcttttacaagtatttgactctataatatagatatgtttcgtttcaattactatatatataaataattattataaatttagatgaataattaattgatgatcagtacgtactggtcttctaattaagtataatatctatagcttagtatatatattagcttaaccaaataaaagcatgaacatatatgcgcgtaaacacgtccatatattatatataaatatataatgtaaataaaattatttattgaaatgatgatatcatctataaactataatatgaagtttattattagattttattaaagcgcgtttgcatgggatatgtacgtatatttaaatttcatttttctaatatatgtacaaaattattttgattttttaaaaaaaatagttagatgtggtaaatttaatttagggttgtatatacaaaataaatttatatgataatctaatatatattttaaaacaaaatatattctaagaaatctaattatataaaaattagctagcaaaccactttaaacttcttgcttctgatcattacctatatctatagatattgtatgtatataagaattacaaaaattattatcttatgaataatatttttctttatgtatataattatgttaatcatgttaattgtttcatattacatgtttaataatgatcatgttataaacttaaatttcagatttatggcatgacagtgtttaacatatcgtgtcgttaaataattgtgtttggtgttcgtatttaaagtcttaatagttgataagattaaatataattgtattgtgtgtgttaaccataatgtaccatatcataaacgtgtcgatacgaaccctacttttcatgaaccatataattttatctaaagttctattaagtcaaattctttttgctaattgtttaatattaagttttgattctgaatttacattaaatttcttaacatataatatatacattacttatacgaatctaattaatatgaatgagacatatatatatatgaggattaattttaaaacgatttttccatttcctaataagtgcatatatattttttttttttttgataacaataagtgcatatattattatttccactagtatatattaattataataaattaatagaatatatataaaaattaaaaataaaaatagatcggtcattttctataacattttctccaaaatgcaaaatgcagttggatcttttgatttatttatttttgtttggtgatatagaaaactaaattatttgagaccagcaaataaagaaaatttataataaagaaatataaaaagaaaatagactatatattgccattaacttcaatgtaaacacgacaatatatactgaattattcctaacatctataattttctaattaattagaaattaaatttaataatgaatatatacaaaattcccacaaaatcccaagtagataattttccatatatttgtttggttctaagtattaatatttaaaaataattttgtcctctcattatatagtccacttgacttttttaataacttatcatatttttattcaagtatatattattcaacttgattttcacactatatatataataaaataattaatttaatatccatatatctcaccaaccctctaattatataataaattgtttgattttatttctttcataattaaagtggtgatggtgactattttcatatgaccttctctatgtaatattaatgctactatgctagtatcaaataccactttccttttttttttttaagaaaaaaaaaatattaatattattacttctactttttttttaaaaaaaaaaaaaaaaataggttttattgtctctagttatgattttgcgtggtcatagacgtagacataatttagtgattctatattttttctcacaaaagagaatgtctcaaacttaaatttctcttctctaaagtcaaataaattatgatccttataaattcttgtctccttattttttcttttttgcttggagagcgagaaaatgaatctgacatgataacataacttatttacacaaattatacacaaattaaacgagtatgagggttttttttttttttttaatttagataagtttgagttatttttgcattgatacatctaattgacctcttaataatttatttaaagttttttttgaagaaaaatagaatttctattaataggtataaatcagacatagtctattacacgtagatataactcatcgagcattatcaacaaaaataggttaaccaaatcgtttacattaaatacaaaaactctaacaacaacttcaacataagctaccagctgtgaagcattaaataatgtaaagaatactaaatttccatcccgaatgaacatgtgacagatcacaccaatcaataacaatcaactaaagatattccaataaaaatagataaaaacacaccaattattcaactagagtaatagaaaataacatgacaacctctgttcaaaatttttgacattaaatatcgatgaaaacataaaacaaagtgtaaaaaggtacgtaccaaaaaaaaaccagaatagcatgtgcatcctaaccaaaaaggaatggagatcaaatagggatgtaaacacaccattattaaaataaaaaaaaaaaatagtaaaatagacactctctcaaaaataaaaaataaaaataacaaaatcaaagattttggtacaccgtcacaatcattaagaacagaccattcaccaacaccaaccccacactaaatctggtcgattccaatctatcctctttgggagttattacttcataagttgctcaacatggatcacataatcttggtgatcttctctatctaatgaatggggagttcgctttgaaatcgcctgccctgcacgtaacccccgagtatatgcttcaacaggaatcacacaagggtagataaatacaatagaaacctgtgataaaatgcccaacctaacagataaagtacattacatagt

SEQ ID NO: 52834 - DNA, 2518 bp, Cannabis sativa
ctcaaacttaaactaacattttatgtttttttatttcacccaatatatgttatatcacataaaaataatatatcttacagtaatatgaatataccacaaaattaatattaatggtgaacttaagtttttcgtctccttcatgatacactaaatcacgtaaaatagatataccaatcttttaaattaatataccaattaataagtttatattttactatttccctcaatatttataaaatacatacaccaatttttatttttatttttatatatataaaaatatataccacaattcaaagtagatgtattacatttaaaaattaatatagtatcatagtgagaaataaaaataccaaaaaattagtttgatattccataagtttttttcctttcctttttcatatatcataaaaaataaaaagaatacacctcaataaaatatatctatacctcaaacttaaattcctatttcacatttttttcctctttcgttattcatatactaatatactcgaatatgaatatattgtaatatactttgtctttcgttcttcatatagcacctcacacaaaaacaatataccacattattaaagtaatatactcgaatataaatatactataatattctttattttttgttcttcatgtactaccccacataaaaacaatatatcacattattaaagtaatatacttgaatatgaatgtactatgatgtactttctcttttgttcttcatataccaccgcacataaaaataatatactacattattaaagtaatatattagaatataaatatactgtaatatactatttttcgtttttcatatgtaaacccatataaaaatataatataccacactattaaagtaatatactggaatatgaatagaattaaataataaaactcatatacttaaaagtaaaactgatatatcattgttctaaaaaataatataccgcaatgtgaagtatgtattccatgacaaacctgatgcaaaacttacaataaatatccaactttgtctttcgtttttcatataccacccacattaaaataatatagtacattattaaattaatatactcgaatatgagtatactgtaatatagtttgtctttcgttcttcatatacaacctcacattaaaataatataccatactattaaagcagtatatttgaataggaatatactgtaatataatgtctttcattctttgtataccactcaacataaaaataatatactacactattaaagtaatatactcgaccatgaatatattgtaatatacttatctttcgtttttcatataccaccccacataaaaatattataccacactattaaagtaatatacttgaatatgaatataatgtaacatactttatctttcgttcttcatatataaaaataatatatcacgctagtaaactaatatactaaaatatgaatatactgtaatatgaatattttgagatattagtgtaacttaaaaaagatgaaaaaaatacacaatataatcattgaagttttactcaacctgataattttaatttatttcattcaccaaaaaaaaaaaaaaaaaaaacaagaagaaaaaaaaaagttgatcaactagtgagtggtgaaattttctttgcaataatatttcaatagtatataaatagtaatagcagttgtttaaatttatatgtaaaaatgaagccaaaaaaaattgaacgaataattataaattgtccaatagacaatcaaacaacagatgacaaaatcatgatgtttataatatttgtgttcctattacaaagctactttatgtataataaaaggttataattgtaatttcatcattaaatttttaattaaatggccattttgctaaatatttataaaaagggacatttactaacttaatttctaaatatggggctattttatatgtcaacccatctttgactacaatgagtatattattacttttacatgacatttatactcaaaaactcaattatcataaaccaaaccaaagcctctagtctacatgaaggatttctatttttttttttaatttttaactttcctccaaattactgtgattctttccaaaaaatcattaaagcttctactctcatcaattttttttaattaatttaccaaatttcttcaaccatttcctcctaatttcttccaaataaggcaacaatagtcatttcttccaaacgaaattaattcgaaccaaacaaaagcaacatagctggtttcttccaaaaaaaaaaaaaaaacacatctgcttcgaagaatatgaaagcttttattctactctcttacactttttcaaatttgtttgtagtaacatatcattttatttggttaaactattttctaaacgatttgtattttaattaataattttttttactgttgttctatttttatatatatggtatataaatttaactgcaacgtatatatattatttaagctcaggtatatgataattatttgtgttg

SEQ ID NO: 52835 - DNA, 696 bp, Cannabis sativa
tagggcataaaatccaacacactcatcacctctccccaacccaaatctccttcctggatgagcctttctcaaaagatgagatcaaaaaagctatgtttagcctttctggagataatgctcctggccctaatggtctgaactctctcttttatcaaaaatattggcaccttctgggatctgatctgtgtcatgctgttcttcatatcctaaatcataatggcaatatttccctaattaacgaaactattctagttctgatccctaaaaagaaagggcaacaaccctgtgtgatttttgccctatcagcctatgtaataccatatataagtgcctctcaaaggtcctggcaaattgcattaagaccgttcttcattctgtcattgctaataactagagcgcgttcctcactggccgtcaaatctttgataacattctcattgccaatgaaattattcactctattcattccaggaaattgggtaaaatcagttgtgctgcgattaaacttgatatggaaaaagcttttgacagggttgagtggccttttctcaagaacatccttgctcaagtgggtttcctctccaggttcacttctcttatcatgagttgtcattccacagtcacctaccgtttatcccttaatggtaattggtctgacagttttttctctttccgtggaatccgtcaaggagaccc

SEQ ID NO: 52836 - DNA, 1008 bp, Cannabis sativa
  modified_base (972)..(975): a, c, t, g, unknown or other
tgtcaatttatattcttaatgtaataattcctacgtattatccatataaaactttaaaaggagaaattttccatattaaactagctccgaaacaatcaaagaatgtgcaagtcacagtttcaaaaggatagttgcaaagggtacaacctagggtaggaataattttcctaaaataagattagaggaagatgagaggatatgatggaaaactccaaataataaagtgtttaataattttaggaggaatttgaagactccaaagtgttgtccacatttcttaataaaagaggagtttgaggaggagggagggagtgatcaaccgatagcggggtggtatggatctgatgcttgtcatgtgttacacaaatagattgaaaaagtaaagaacacgcagattcattatagaggttcgaccttctttgataacgagtaatgacctactccctttttagttatattaatacaaagggttaatactattcagatcactataggtgggatctgatatagcacccttaagaatacaaagtatgaattgggattaaaaaatgtcaagtgatgagagtgcttgtgtgggcgtgtgagagaaagtgaagaaaaggagagttatcagacttaggcttagagcttggaggctagtatcacacttaaattgaacttaggatttctaggttagagttaagaccttttatataggaagtctaaaaatgcccttgaacatagatattattcagttattctattaggcctttggggcccaattcgcagcccaaactatgtcgtccacgtgtagaagtgcacagaaaaccttgcagagcttctcttggccggctagacacctgcagggagctggctggtcggtcatggtgcagtccagaagttggccgaccatagggtcggcaacccattacaatctgattagttatcaatttaagagatttgaagtggtttatgttaacatgtattttacannnntatggtttaatatatatatatattcaatatatg

SEQ ID NO: 52837 - DNA, 848 bp, Cannabis sativa
tatttgaagaattaaagaagtgtatagagtcacttaccactcctctctagcatttttacataccaggaagaacatttttctctttatttgaaccaatctaattaattatattgattggatttgaaaaatcttgattcaattcgatttaattagacttcaaaatttaatccaattcaattactaattagattggatcggttaattacatatttaatttttaatattcacttaaaaatataaagaaaaatacttaaaaattaaatatcactttttatttaagtttaatactccataaaaatattattgttacaagtataatgcaactaaaagtttgaaataactgaaacaataacattaccatcgtgaaataaatttatagatcaactaaatgttacaaattcaacacaaaaaaaaaataataaaaaatatatatacataaataaatattaatattttttttatactgtaattggattggatcagtttttaattaaattttagaaatgacactcaataactaatccaattttattagaatataactttttatatccaatcccatataattataattaaactgaattgaattagttcgattcaataaattagatctatgggatgagaaaattaatgaaatgttcacaaaatttgaaaagggattaaagatccatttggtgtgtatagtgatatctatgttacagttactaaggattttttattcaacaatttgcattattaaagggtataatataatttataatatccttaagacaagagatgatggcattatattagcttattgaaagttgcacatgtcagtcactatgtcacaaaatcaattaatagtg

SEQ ID NO: 52838 - DNA, 1352 bp, Cannabis sativa
ctcacatccttttcttcacttgtcacactgtcggaggagttattctttggcaggtactcactgtcatcactaaaatttactccattctctatgtcaacgtccacatatgtcctccctaaccctctcaaattactctcagctctctcatcaaccttcaaataatcttctctttgtacatactcaggatccacctcataatcatcataatcacttgactcatcaccatcatcatttgatcctcattttgtgtcacattgatattatttaaaccaccatgaatgaaaatagtttcagaatcaataacaaccttcttactttttgattcttgttgctcaactaaaccaacaccacaatctgttgtttgtgacctttgtgtgttaccaagcccaaaattagcacccaaagtatgcctatttctatctattgcagccccaattccctcatccaactcaagcccaaattcaacatctaaatctggcgttaaggtctcaccaatttcattttgacaaacgtaacattcaagtaaataagtcttcttcacattagaccaatattttttccaaaaataatgtgttcatttgttacatattccaatacatcactattttcccacttaaaataatagcctaatttggatggattagtgtatcataaattcttgcaaaatcatatagctcatatagactcatatgattaacatcacaatgatgcacatagtcaacaaccccacaaataaaagttatacttttaccttttaaatttgattttcctttatgatgcaccttcaaaataaacctagaagatgatggctctggataaagacaaaacaacataaaatactttaagttgtggtcccaaaatatttttttttatatttttattcactgttagctgacaataatttttaactcacatacacctgttttaacaaaaaaaaaaaaaaactcacatacacacatcgatgcaaccgtacatcatttacacagagacaacacaagcatactcaaaaggaccaaaaaaacctctcccattgtgtaaataaaaaaaaaaaaacaatttccccaaagttctcttcttagacgcattaaaaacactacatcactcatctctcataaccaaaaagtacctataattaattgaaaatggaataagaaacacttaccgtaaaatgacataatcttttcatttgatggtttggggtgtctcttctcttcaaagctgctttgcttcaccattattgtgcaatatttctttcaatcgcagacccaaacactaaagaaatcgcaagtctccttcaatcatactttaagtcgtaaccctactattttttccctaaacatatacgatagaag

SEQ ID NO: 52839 - DNA, 2737 bp, Cannabis sativa
agtgactaataaaaccaagcccaagtcccaaagacttgaacactccaggtctaacaatttggatatgtacaatcttcatctagctctagactcactgctgttcaacatttgctttgtttttacctacacatgaaaaatatatttgtgaatcgacaactcactaagaaaaagtataagacacaacatataactgacatgagactaggcgcccatgcatccaatcacaaagtccataactcagtctcgaatgttcttgacatagtacgattgaccataatatcagtctatacttagtactctagtcatactgatgtgatagcatccatccatactataagtacaactaaccataataccaacatatactcagtactttagtcgtgttgatgtggtagcatcgattcatactttactaaattgccaaacaaatatcctgttgatgtccatgcaactctatgtacaccaatacttctattactgataagttatctaattggcaaacataaatatgtacgctaaacatgtgtatatatttgtgtgctatactaatcttacctcagttctacaatcaagtgtgatggccaacctaagtgaaatttactagttgacgattaatggccctaagtcacaattacaaaaaactggtaagtgacacactaaatcactttcggggatttaaactcaaaattagaagtttctctatcaataaatagtgtagcaatatctcaaatatcagaaaaatgtaaaatcggggtacctaataaaacacctcaatagggtaatcgaatcccccaatggtccactattttttagggttctgccttagaaaacggttcactgtttttgtagaaacgatggaccgtttcatagcaaaaaatctcaaaactcaaatttctacttcaattctaccctaaattattttttcaaacattccagaacatgtaacaaaaacataataaacataatttaaccagaaacaacacaatcaaacctcaagaaagaaaatcgccattgttgagcaagctttgagttttaaaactcaaacttgctcaactcccactacaacatctaacactagataaaaacaccacaaaaaaacttaattcaagctcccaaaaaagctcctaacctttcaaaaccctaatagagcctaactcaagaaataacctaacaaaaccaagcttttcttaatataaacaaagagaaaagagagatagggattagcttaaatgagcaacaccttaccctcaacacctagctcaatctagcttgaaaatggaggataaaaggcttgaagtttttggtttgctctttggttttatttagggccgcaagagagagatgtgaggagagaaagatgagtcttgaattttgtgatgtttatctctaattaactttgatttattcaactaagtaatcaacataaaaagacttaaattaaattctaaaattcccactaacttagcataagtcctttgacaaaaagaccaaaatgtccttttgttcctccttaagcaacctttaaaacttaggggtaacatagtcaaaatatactaccttacaatcccaacattttaaatgtccatataatattgccctgctaattaaggctactaaaccataattaagtgactctaatggctaaatcgttattcctatgttatcgagcacaaaatataaaaacataaaaatttatatttaacatgcatggcacacttaaaatttaataaaattttcgtaattgaaagattatctctctaatgcttaattctgacaataaattttattttctactaatacacgtataatcataaataaattgttaataagctactaattatttattaatttctatatctaaaattacagtcattacatttactctcgagttgttaattaagatactaataaaaaaataagaaaagaaaaagcaagttattatataatatatgcattaaatatacatataaattaattttagagtgactttagtaaaaaaatatttttaggaagctaccatcaaatttgccttttagtactataacaaaattttcataatctagtattcttagtaaagcagatcacttaaactataagaattgacttatataataagttaatgtctaatgctgttaacttgaacaattatacatgtaattttaagctcaaccaaaaaacttgctttaaaagtgtggaggggagcaacatctacatctgaattcttcgttcgcaaaggtttttatgcaagtgatcagagttggtaaacagaaattctattgaaggaataaacaagcaacaatttgtgacaaaaaaagaactagtcgtgcagtttattactggattatacattttaagtcagcaaaaatgatatacatcactcaaattagccagtgaaggaaaaagagaatgtatctgatgactatcgaagaacactccaaataaataaataaataaataaatacgtacatgcacctataaatagtaagtagtaaatagggaaaactgctttttttgagtaaacacttagataagaattttctggtgtgtctggctttatataaatatttatatctgttgtactatgaagttggggaatgagcttgatatctgttgtcagtgtggtagtttcaaacggttgaacagcacaagaaaactttgctcaggaacaacatataggaatcctaaatcagcacctttgacaaatggtcccataccctgaatcaatcaagttcaaaaa

SEQ ID NO: 52840 - DNA, 1425 bp, Cannabis sativa
  modified_base (53)..(57): a, c, t, g, unknown or other
aatatggaaaagaaaatcaatggagcaatactcagctgtgccatacttggctnnnnntataaattgtcttgtttggacactttatgggctcccttttattaatccaggaagtattttgattgttactataagtgggtctcgtcttgtaattgagtttacatacttaattatcttcttaatcttttgagataagaagaaaaggattaaagttgttcttgctgagcttgttttcatttctattctcactcttttgactttgactttgacacattctcacaagaaaagatcaaccattgttggtaccatttgtatactctttttaatataatgatttatgctgttccattagctgttatggtaaattattagttactagttattaattacttactttttaatatcagtagttcttgtttgattttaattgtttctttttttttttggtgcagaaattggtaattactactaagagtgtagagtttatgccatttttcttatcatttgcttcattgttgaatggtattacttggaccacttatttatgaaggggcccaaaattttatatcgtcttaggcccccatttttacaggcccgaccctgattattatgtcacaataatgatgaacaaataaaaaggtggttagtaatgtagctaattaattaattaatattattaattacaggccaacatttattcgaatatggaaaagaaaatcaatgcagcaatactcaactgtgccatacttggctatagttataaattgtcttgtttagacactttatgggctcccttttattcatcgaggaagtattttggttatgactataaatgggtctagtcttataattgagtgtacatacttaatcatcttcttaatctttttagataagaagaaaatgattaaagttgttcttgttgttcttgctgagcttgttttcatttctattctcacccttttgactttgactcattctcgcaagcgttgttggtaccatttgtatactctttaatatcatgatgtatgctgctccattggctgttatggtaaattactagttactagttattaattagttactttttaatatcattatttcttgtttgattttaattgtttattatttttggtgtagaaattggtaattactactaagagtgtggaatttatgccatttttcttatcatttgcttcattgttgaatggtattacttggaccacttatttattaaggggcccaaaattttatatcgttttaggctcccatttttttagggtcggccctgattattatgtcacaataattatgaacaaatgaaaaggtggttaataatgtagctaattaattaattattattattattattaattataggccaatatttattcaaatatggaaaacaaaatcaatggagcaatactcagt

SEQ ID NO: 52841 - DNA, 2048 bp, Cannabis sativa
gttgaaaggcctcaacaaaactcagttcttgagcgaaaacatcaacacattttaaatgttgctagggccttggcttttcaatcttccttagccttggtctatttaccatatctcataaacactgcagtataccttataaatagaacaccttctacactattgcagcatctatctccctttcaactgcttcataataagcctcctacatatgatcaccttagaaattttgggtgtcttgcctatgcttcatctctcaccagttcaagacacaaattttctcctcgtgcacatgcatgcatattcattggttatccaaatggaatgaaagcatacacacacctcgatcttgccacaaagaaaattttccattctcgagatggtgtcttttatgagcaaatttttccactcaagggctctcttaatctcaatcaatcggatactttattttcatcaaatttatccaaaccagcacctgtagttcatgattccactactgctgatattcacattcctgcaattgatcctgttgttcctcaaaaatcagcagcagctcctgatgcgattccatccccagcagtgcctactgctgacaatggaattgactctgccgttattccaaaatcagcatcagctcatgatgcagttctcacaccagcagtgcctactgttgacactggaattgcacctgctgttactcaaaaatcagcacctgctactgatgacatttttacatcagcaccatctcttcctaagatcaatttgcctattcatactacaaaggcagggcgccaaacaaccaccccaactcattttaaggactacatttgccatacctctactgcccaccccttgatcaaatatctcaattatgacaaacttagcatttcatttcgaaatgccatttttcatgcttatactgagatcgaacccaccactttcaaacaggcatcaaaatttgtccaatggttaaaagccatggattctgaattctttgcactcaagaaaaacaatacttggactgttgtatcattaccacctggttacccacccattggtaacaaatgggtctataaaattaaatacaactcccaaggtgaagttgagaggtacaaggcacgccttgttgccaaaggttacttacaaactcatggcatagattatgctgaaacttttgctccagttgctaaatttaatactctcaaattcttcttagcactggctgccctcaacaattggtcattacaccaaatggacattgataatgtttttttgcatggtgaccttgatgagaaagtttacatgacactccctaaaggatatgtccatgagggggagctcccccctaatcatgtgtgcctcttacataagagcctttatggtcttaaacaggcttctcgtcaatggtttgctaaactcagcacaacattacttaatcatggcttcaaaaaatctgcctttgaccactctctcttcatcaaacaaacttcaacaagctttcttgctcttctcgtatatgttgatgatatagtcattgctagtaccaatgattccgatgttgctgccttcaaaatatttttaaactccaagttcaaattaaaagatcttggccctctaagattcttcttaggactcgagatagcacgatcaaaagctggtatatttgtgtcccaaagaccatttgccattcaactactcactgaaactggtcttcttggatccaaagcagtgtccttacccatggatgcaaatacttctcttagcaaagacattggcccattagtaaatgatgctacttcttatcgaagcctcattggaaaacttcttttcctcaccatcactcgcccagacattgcttatgccgttaaccgactcagtcagtttgttagtgctcctcgtcaacctcacctcaaagctgcacatcgcattgttcaatacatcaaaggcactcctggtcaaggtctcatttttcactccaacaactctacttcaccctctgcagcccgacccttccaacttcaagcgtatgctgatgctgactggggttcttg

SEQ ID NO: 52842 - DNA, 1580 bp, Cannabis sativa
  modified_base (128)..(133): a, c, t, g, unknown or other
ataaaccattattgttgtagtgtgtgtattctattaaatttttttaagagaatttataataatttatgtattatacggtagtaattttttaaagctataaaaaaaaatgtgacatttaaaaataaatnnnnnnttatttataaattagtgaagtgatttagttaatggcataagtgtaataaaatgataatattatgactaaatatgaaataaaaatagacaagcactactcattgaattaattttttgaataagacaagagattttaatcaatcctaatttaaatatattgcattcatgaccatggtattataataaaattgtccaattagaacaaactattaaatacattataaatatgctattttttaaatttcccaccctaaaaaaatccaatatatatgggagacaattataatagtaatgtcatttttttaactaaggataggagctaagggtgtatgtttaggtggattgtaatatatttttaccaacccaatataaatgtcgggttataaatatttaattataacctatccaattaaatttttttttaaaaaaaaagtaacctgttcaataattttatcaatcgatttggtaggattatacacatcgatgtaatttttatttatttttttattattattgttgtaattttttatgttcacataattagatttagaactttttcaaaaaagaataaataaataattagatttagaaaaaaaaaatgtattatatatttatatatattaaaatttaaagcgttatactctaaactaaatattaaaaacttaaactaacataactataaattgatattataaacaacattctttaaaaggaaatagaaaatacatatatatctattaatgtagtgaagattcaaagtgtgaatttcaatattcaaatataatcaaattatcaattataaatataaaataatttaactattaaatataatttatgttatatattataaaattttttagtcaaaatatataaattagtttaaatcaggttatttgaatagattagaataatatttaacctactcaatatatttattagacggtttagctttttcgtttaattattcgaattgtattttttatcaattttttcaattaaatttgaacaatttatttatgttgccggatcatttaattttatttttttttacctatttttaaagtttattaaaatatttaatttttttaatataataattaaataagcatatgcaactgaatatatatttaaaaccctgttataaagatatgtttgccatgaactcatgactagaatattgtacatatatatagtatattatacaaataagtacaaaaataacatcactaatatatattatgtaatttgaatttgtgtaatatgccaatatatatatggtagcagccgaagtatctgaccaaaaaaaaaaaaaaaaaactcaagtctttactcacttgattggttcaattcaagagtcaagatctctacagctaacaatttttattttagatgacaatatttacttgacctgacttaatcatataattacatatatatggttttttatt

SEQ ID NO: 52843 - DNA, 1830 bp, Cannabis sativa
attaaattttacattaaagttttgtaattgtgtattagagaacaatactaaaatttgatataaatttattataaaactattttttaattattttttgtgacaaatatagcacaaattttacattttctattgaagatggtgttagaaattacaatggatcagactattaatatcttacagcgtaactaagaaaagaaacaattaatacattaattctaggcttttagaagctgttttatttataattttttataaatatcttttttgatttttaatttcttaaacgtttacttttattttacgtttggtaacattttttaattagttttctgttttttgattagaaaagtgaaaatattttccaaaaatatattctataaaactcttttcacttttcaatttattaatttagaatcaaaatttattttttttttttaataagagaaaattttttattcaaaaacaaagcaaagatataaccaaaacactaaccaaggccgcaactaataatacctactagcctctataatgcttaatatatacttatcttttttgttacatttagccttgttaatgttcatcattctagctttgacaacaattttaatttccctgctgatagtcataacagacatacaaaacaaataaaaacgcatcagtttttattacaccaaatcatacaaaatcctgctgcatagacaacattagtaacataaaacttcagatcaggttttgtctttgaactccaatcaatcaactcctcgaagcctcttggccattgaaaacagcccaaccacttttagatttctgctacaacttttttggtatagatacagtccatgaacacatgtttgtgatgctctgtttctctctctctctcaccggacataagcttgaggaaatattcatgaacttgctcaagtgatcctgagttaagagatggttgttaaaggcgtaccaatagatgaatctaaacttcgaaagtttgttccaaactactctagcataatcagctttggtcgccacaatcaaggagttatagaatgtactttccttgaattttcccttgttgatagcaagcttcaaggtaccttcatctgtcaaacttttaagctataagatctttttgaaataccaaatcatatcctacttaatatgaatttcccataagtcttggtccttcaggtaaatggtattaatccatttaacccgaaggttatcttgctcgctggaaactgaccaaaggtactttgccatcacagctaaattccatttcttgccttctcgaaacccatttccacctaagctcttaggaaggcacgccttctcccaggatgtgaggtggagtttgcttctattctcattaactccctaaacaaagtacttgcaacacttctctattgcttttgtaattttttgaggcaaaatgaagagactcatgaaaaagttttggataccgaagaggacagaatgaattagttgagctctactagcaaaagacaagtttttacttgcccaacaattaggcttcttattaagtttatctaggataacaccacagtccgaagccttccacttggttggcctgaggtgcactcctaaatacttaaggggaaatgaaccttcatccattctaacaacatccataatctttcttttacaatcatccttgatgccgccaaagtagatatgcgactttgacttattctctttgagccctgttatttgacaaaacatcttaaaggcatcaaacatgtctttcacaaatttctcattccccttacagaacattataagatcattagcaaagcataggttagttagcctcaa

SEQ ID NO: 52844 - DNA, 1154 bp, Cannabis sativa
cataataatcagcgataaggtatatgttatcccaattttcacactctgacgtggcatcacatgctggtgacacgtggaattgattctccatactggtctggaaaagatgttccgagtagaacaccacatatatctgcatggacaaggccctcccagacgagcaatggataatccgaacaacatatcaacacttagcaatttcagcatttccatcataaagcatgagagcaatccctataaatagaaatatcagagtattttagagtactcagagttaaccaaataccttaaaaatataaatttcttagtggctaagaaatgataagataactatcaataataaaattttattaataatattattaatattattattaatatatatataaaaacgtatacttatcagtatacatatatatgtaatattcttaaaactaaaacataaacgtatgagctctctatccaccgttctaataaaatatttattttttatattcattttcttcgatttttaaccaaaaacttagcgatttaagctccggtagtagcggtatagcaaatccttaaagagggaaagcttaaggtatggtttaattatgttttaagctaaaaacgattggttttatataggagtttcgtgaattagaatagttaaattttgacttcgtaaaattattctttggtacttatgggactagtatcgatgtttacttgttgaatttgaggtgattttgagttaaaaatcaagtttggaactttttaaagcttagtccaaaggttagtggtgtttttcatttaagggttcgattttaatttctgttgtatagcaatgataatatttatggtatatatgtgccctgtgaagtttggagtgatttggataagttttggtagtgttttagtgagtgcaaaaattgagatttttcgagtttcatagtttttagaaattcctacaaaattagaaatcgtatttttgtcataacttttgactcgggtgtcttttttatgcattctatataccgtttcgaagcttgcaacgagctctacaatacggtatatgtttaagagccaaaatataagttttattttagtgtatttatactgtagggtttgatagaaaaccctaaattgtcttatgtgaatattaagcagtg

SEQ ID NO: 52845 - DNA, 942 bp, Cannabis sativa
atttttttcaccatttcaaaaaaatgtaagtcatttaaaaaaaaaatggtaaaattttcgaaacgtgaaagagaaagaaatatctagcttaattaaatagtattgacaatgatattataataaataattttttttgaattaataatgattgtggacattattccacatggaataaatggtagagaattgagtcatatataagaacatgggctactccactcattgtaaattggttttgagttctcaacaataataaatacaaaaatttagcactgttgtaggattttgccaccttaaattgtttttttttttataaagttccttcaaattaattatggaaataattgtaaatttttcattgggttgcatgttatttattttttgagacaatttattaattaatgtaactatgatacatgtataattacaataggagagtctatttaattaacttaagttaactataacatagtatacggctttataattctaaattttattgttagagtactatctagagtatattatttttttaattagcactacacgaaattgccacaaagcatgacactacataaaaaaatatgaactcaagcttggaacaacacaaaaaagtatagattctcgtaagggtatttgctgtgtgggtggtgcgagttgtaacatttttttcaaatcaatccgcatatgtaatttatgtaatttttcaaactgcaaccgcaccatcgagatcttaaaactataaaattgtggtgtggtacagtttgaacgatttatcctgtattatcattataataaaaatttaaaaatcaatctgtaaagttttaacaatacaacaaaaaaaatttattgaagttttaaaaataaaaaaataatgtaatatatacatatattatatatttgttctaatatgaaaaaagaataaaaattatattgtaaaaa

SEQ ID NO: 52846 - DNA, 1593 bp, Cannabis sativa
ttatccaacttggctgattgatggctttggtaatatgttggaagagtgtaatttgattgatatggatttgtgtggatatccatatacttgggagaagggtcggggtactaatgcttggattgaagtgcgaatcgatcgggctttagtctctctaagttggctttatttttttccatcagctaagttaattaacttagaggtttcaacatcagacaactgtccaattcaattacttcttgatgttgtgaagaggactgaggttcaaaagaagtttagattcgaaaatttatggctcagggagcctgcttgtgcgcaaatagtcaaagacacctgggagcttctttcgggttgctctgttattgaaaagattagttactgcggtgataagttactggtgtggggaaaggactatgtaggaaattttaaggatcgaataggtgattgtaaaactgacatttgaaaatggaagggaggcagagatgatgcttcgattcgaaattacaaaagtgctgaggcacgattgcaagaggtgctaattcaaaaagaatttttttggcgccagagatcgaaacaattgtcgttaaaggagggggatcagaattcttagtattttcatgccatggccacttcaagaagaaggaacaactcaatccagcggatgaaaaatgagcagggggtatggatcgattgggataataatttgtcaggtctcatggttgattatttcagcaagcttttttcatcttctcctttggagattcaagaggtaactgattctattcctattgttgtttcggatatgcaaaatgctttacttttggagccaattactgatgatgaagttcgaaaagctcttttccaaatgcatcctgacaaatctcctggtccgaatggtatgactccgggtttctttcagaaatattggagtgtggtgggtggtgatgttgtttctcaagtaaggatgttctttgatacaggttatttttctcctttgcttaatgaaacttgtattgtgcttattcctaagaagaaactacctgtgtccatgatggatcttcgtcctatatcattgtgtaatgttgtctacaaagtcatttcaaaagttcttgccaacaaattgaaaagtgtcttgccttgtgttatctctgaaactcagagtgcttttatacaaggtagattaatttatgataatattatgatttcttttgagatcatgcattatttgaagcggaagcgaatgggcaaaactggtactatggctttaaagttggatatgagtaaagcctatgatagggtggaatgggcttttctagagatgatgatgattcagatggtttctcaagtaagctggtttcgttaatcatgtattgtgtgtcttcagtcacttacaagattactcatggtggtagagtgatgggtcttatatttccaagtagaggcattcgtcagggagatccactatcttcctatttgtttcttatttgtgctgagggattctcttcgctggtcaacatgtttgtgcgaacgcagtggttaacaggctgtcgtgtagctagaaatgctcctagtgtttctcatatgttgtttgcagat

SEQ ID NO: 52847 - DNA, 2308 bp, Cannabis sativa
cgatactgaagtagcactagtagaagaaaaaattgatactgatgtaccaaatggcgaatgatggactttatatatcgatggagcctctaatagcgaaggctccagcggcggcataatactcatcagccccagcaattttaaggtacaagctactttacgatttgaattttctgcatctaacaatgaagctgagtatgaggctttgatcgcaggattaaagctcacccttaagatgaagatcgaatacttacaggcttttagcgactcccaaatcgtcgtatgccaggtaaacggagaatatctggacaggggcgggcgtttggctaagtacctcgccataacatgcgagttgttgcagaaattcaagaaagtgattgtctcccgagtaccgcgtgctcataattcacaccctgacgctttggcccgcttagcctcaacaagagaagctgaattgctcgatgtgattcatgtcgatgtgctaactcacccaacccaacggtgagtcaagatgaagtgatggagatagacattgacataggagttacttggatgactccaatagtgaattacttggaaaaggaggtctttctcgaagataaaatagaagcaagaaaactgcgacatcgagctacccgatatgtcatctacgatggaagactatatcatagaagcttcagccagccgctgctcaaatgcattgacagagaggaatgcgattatatcctcaagtacacagtggtatctgcggaaaccattctggcggtaattcccttgccttaaaaatcatgcggcaagggtattaccggcacgacactgcgacaagacgctttcaacttcgcaaagaaatgcgacaagtgtcagcggatagcgacatatatcaatcaacctctgagctacttgcactccatcatgagtccttggcccttcgcggtctggggcatcgatctaataggggagttacctaaaggaaaaggcggagtcaaatacgccgtggtcgcggttgactacttcaccaagtgggccgaggcaaaggcacttgcaactattacagcagccaaactgtgcgagtttgtctataactccatcatctgtcgatttggcatcccttacaaactcatcttggacaactaaaagcaatttgattgtaaggaaatgcgacaattgtgcgatgagttaggaattaaaaaggcattttcagcagtcgcctacccgcagagcaatgggcagacagaagccgtcaacaagataatcaaacataccatcaaaggaaaacttgaagaacgtaaggaggtatggctagaagaactttcgtaagttttatggtcatacaacacaaccccccgatccacgactggtgaaactcctttctcgctctcctatggatgtgaggccatggtaccagtagaggttggggcaggttccctgcaaagagatgttttcaacattgtccagaacgaagaaaaacagttgcttcaccttgaccttttagaagaaaagcgcgatcaagctcagctgaaaaaatgcggcttattagcagcgaactgcgcggtattgcaactctaaggtcaaggagagaattctgcgagtaggggatttggttcttcgaaaagtcatgctaaacacaaaaaactcggcgcatggggtttttggagacaattgggaaggaccatacctcatcgctgagaagattggtaacgcaacatatcgacttgcagaactcgatggtactggaatggcgaaagtttgtggttttattatcaatagtactcgcatcatatgtacatttatacttagtcaatttatataaatgttctaagtatatggggtatatagcccactttgtactattgcttaacttgttctttataaaagttaaatttttctcgagctttaaaaaattcactgagtttaccttatcgttttttacaccaagctgtaaataataccgcaatcaaaatagcaaaagacgtgagtacccgtgtactgcgaatatgataacataaataaatatccccaaagggatatatgttgttcaaaatattaaaaaccatagagagaaatttgtctaagtacaaatcgcgagtacccgcgtaccgcttaaaaagtttgataaaatattcataaggtaagtaaactaagcattgggagtagtaggggcagttggagtagtggattcatttgcgactttactggcatcctcgtccatgacttcttcagtgttcgcagcatcagcgtccttgggaaaaagatttcccccacccccttgggtctgcgtaggtgacatagctcgaaaagcctcagccatctc

SEQ ID NO: 52848 - DNA, 884 bp, Cannabis sativa
  modified_base (566)..(574): a, c, t, g, unknown or other
  modified_base (607)..(608): a, c, t, g, unknown or other
tgcatagatttgggatcatcaatgatccaggatgtgtgttgtgtaatgctcaggaagaaacttgtgatcatctattcttctcatgtcctttttctcagcaatgctttcagaagattaaagattggttgggatggaaagcttctactcaatctttaacaaggcttatgaggtggattgaaaggtgcaagtgcagcaaattcaaaaaatactctctcggttgcaatggcaagcttagtctatcacatatggtagactaggaatgacaaagtatggaatggaaaaatgaagatatagatagagtaagttgtacagtcaaagaaatggttaagtatagaatttataatgtttggccgagaaaggttgggataaatgacttggcttggttcagaaatttataattgtaaagataattttttgataatagatgtaaactgtaaaaagcaaaaaattaatatgtgaggtcccaacagatgctctttgattgtaaattggattattggagtaatgaaactaaagctgattcatcaaaaaataaaaattcccaataaatattatgaaaattactnnnnnnnnnttggtccaaaattaaataattaatttttaactnnaatttaattttctataaatatatgcatgatagaattcgaaatccaatgtatttagaagcaatacattttcgaaatctaaaagataaaataaaataaaattagaaaaattattctaatttatgttggtaaaaaaataaataaattaatttttaatataaatacaatttttctatttaactaaatctgttaagaaaaatattaaatatttaagtgtcttgaacaaaatcaacttaaatattaattttctatttaattaaatgggtgactattcaatgg

SEQ ID NO: 52849 - DNA, 569 bp, Cannabis sativa
ggagtatctgtatcatatttatatatttattaaaaaaaaaacgcttatataatatttaaatttattaacaaattttttatcttcttttttatttatttctttcaactgatgaaataatcttaacacatctaaaatcgagagatttttttattatataaaaaattaagataaagtcttaaatttttttaataatacctatttatgagtaataggaagtatgaaagaatgccataatgacccttagaaaacttaaaatactgtttaaatatttaatgatcttactagtggatgtggttgtgatgagtcaaactcgacgagaacacccaaaaagagttattagaatattggatgttattcatcaaacaccaaatatataagttgatttcaaaaaaaaaaaaaaaagaaaagaaaaagaaacacaccaaatatgccattatatatattattcaaatatattcttttaatcgttatctggcatgaggtttcccaaaaattcaaatccgaatggaatttaaacatgtgcggttttccacctttttagggacctgaatgcctatataaagagcaga

SEQ ID NO: 52850 - DNA, 1570 bp, Cannabis sativa
  modified_base (1530)..(1543): a, c, t, g, unknown or other
gaattgatagttagtgtatcctcgtctcgcctacgactatacgtcagcaagttatgaatatactttattaattccatatttaatgagttattgcattttgtatttaatgatataattgttattatatctattagttcacatttaacgagatggacacgtgtcactttctgaagtacagttaatttcaagtataacaaataatatttaatttaatccttgtgaaataagagattaatgagagttaatcaattattatttatcgatagaataaataataaatcttatttatggaaaaattgacaaatcaattttggaccttaaaagatggcctacacatgtacgcccattctacacatgtaaggtgatatataaagacccatgattaatttagtttaattattttattggttaaaataattaagttaataaccttttaattattaattaaatatattattagataattatttaattaaaagaataattatttaaataaaagatctattaatatcttgatattcggttattagatatttatatttgaatttgaattctaaattcaaatcaaattagatatttatctttaattttaaataaaggattagaggttttatttataacactatatccaggatatataacatcataataaatcgacttttagaaatccaatatacatagaaataattagagagaaaatagaatttatttttgtcaaacctattctctatctctctctcacgactactctctctctctctctctctctctctctctcactctctcctgtctcacatgcccatattaatcaaagtgtgtgagattaaaactgcaatctcattattgtgtctcatgagttgagtacacactgtaatacctaaatctgttcatcctttaagatttactagcccatttattccttagtatagaggttagtttggaagagcaacgtctggattcttcaatcaagttcttggattggatatttaattgttatacaaaaagatttaatgataccttgataggcatcaagatgtaattaaatttgtttcagtggattaaatttaatttatactcattatgttgagatccttgggcttatggttcatgaatataaaaaatcttttatccaaattttgcttccacttttataactctaatatggattataaaaaccaacatgttgtacagtttactaatacgcccgtaaaattagcaaggttgcctgcctgtagcgattatcaatcgctgcttgttgggcactcatgatatcaatcggttgattcatctactcatgcaattggcattttattgtttggacgatacattcacagcagctcaggtatcctcctgatcatggtgaagatttttggtatgttcttgcatttgtcgtaaggcatctcacaggttttgcactcagtaacatcaccaatcaccactcgaggttctccaataaatgaatctccattactgtaacatcgtacctagcataggcgtattacgtgatttttaaacatattgtgcagctcnnnnnnnnnnnnnnaggtttatggaaatcgtgattaattaa

SEQ ID NO: 52851 - DNA, 1373 bp, Cannabis sativa
  modified_base (1061)..(1062): a, c, t, g, unknown or other
gagtctcaacacgagatgacacaagtagtcattcgtgggctagtttgcatacgcgcatgggacggatgcaccatgctagaaagagacagaggtttaacgtatgctgctagtttaacggcttgtctcgagggcctgccaacatgcgtggaggcatggcgccttgagtattggtccattgacatatgggagtccttggacgatgagggagactgttcgaacagtactgaataaggcatgatagaagcgttggcacgttggcttagtgttggcatcttgccacacatgctaccttggtcatgagtgactatgtgagcgtcggtgttgggatttgtcttaacatagtgaaaacctatggacagtgtgagtatcttggctagagagtctcgatgcatggatgcactcatggatgcttgcgagcatgactcagtgggagttgttcgagagacgaaagtgtgcacgaggcacacagtcgtgcaaaaaatgagcccattgttactcggatggttggaaggctgaccttggcttagaggagtcaaggtgctgcacgggcgttccactgcctaaaaaagtgagcccgtgacaatcggtattagagccaagttcatctcagttagaggtgaacctggtttgcctatccttgaggggatgtaggcgtgaggaagaatgctagaaagacaactaccacgtgcaattgtagagaggcccaaaaaatatttgaaacttgttggcatagtacaaggttgattgggtagtccatattgtatgcttggtacactaagccaagtttgcctgagtgacatcgtaagtcgcaagaggcgcttttgttgaaaaggaagcttgttggcaggggtgtggaagtattgcaggggccgccagattcttgttagtcacgacagtagtcgagagttaataaccgagttggttcaaattgggatagacatagaatgctcagttgctacatgggtgtgtcaagagggacgcacatggagaccaaggggggcagatgccgcaatcgtaagaggatgattgcacttggaggtgttcgcatgtgacttttattnnatccatatgggaagcgtcgagacagttgagtggggtgtgttggctggtgaaagcgccagtgggtgtaagtcacacaaaggcatcggcaaagatgcggagttatggaatgaatacatcgaagaagccaacagggctaaaaagaccgagcgcaagtgttcagatggcgctagagtttgagtgaaggccagagggccgtgccagtgagacttagtagtcatgtgagcctgcgaaagtgaaaaagggtgctagagtttgcatgaaggccagatggatccatcattaaaacttagtactgttggaaattattttac

SEQ ID NO: 52852 - DNA, 894 bp, Cannabis sativa
gccgctaataacattaatagcggctggcatagcagaaatgcatatatttttgtacttcttggaatatattaactcttttagttaataattcttattcaaaactaattcattattcattgcaaaaaaacaattaaaactaatttattattcttggaatatatttttgtatataatttcttgaaattcattgttataaaagaaatatgtatagtccatattcatattcatatttatattttatttattttttaaaatgttcatctttggttaataattgataatagcacaaaaacttaaaattgttaaatcaagagattgtaagatgttacctacaataaatttgtttaataccattacataaaatacactcaaaaaagaagaaaatggcagcccatgtggaatggaattaaaaattttccaaaaaaaaacattgaaaattcaattatcatgatttaccatcataacttgatcttatacaaatgtagttttcacaataaattaagagaaagcaatagtaaagaaatatacctctaggtgaagaaacttgtacataatcatgataatttttcgtagtctatagcatatctcttttatatttatatattgaatgttaaatctattttatataatgggaaaatagaatacaattgagagagagatgggttattgagaaatataattgagattgaaagaaagaaagagaggccacatgtagagctcacacaaatgaggatgtgaaaggaatggtgtaaataatctatatatataataatagttatttatagtgtgtaaagttatttatgaaattctgtttcaagaaaagagttattaatgaaaatgactattggtttcttaaaaagttctaacgtttataggtttgcttttggagtatta

SEQ ID NO: 52853 - DNA, 990 bp, Cannabis sativa
agatttaggaaaaataaaattttgccttggtttacaaattgagcatttaaaaggtggaattttcattcatcagttaactttactaaaaagattttgagacagttttgtatggataaatcatacccattaagtagcccaatagtagttaaatcacttgatgtggaaaaagatcatttttggcctcgagaagatatcttaatgcaataggagcattaatgtatcttgctaactttagaatacctaatatagctttctctgtcaatttgttagcaagatttagttttgctccaacatatacacaatattggaaagggattaagcacatacttcgctatctccagggtactattgataaatgattgttctattctaataattgtgggtcacaacttattggctacgcagatgcaggatatttatctgatccacataaagctagatctcaaaatgactatttgttcactcacggtgacactgctatatcctggcggtcaacaaaacaaactctggtggctactttctcaaatcatgctgtgatacttgtaatttacaaggcaagtcgagaatgtgtatggctaagatcaatggcacaacatagtcgaagaacatgtggattaacatccaataaagaagtaccaacactctctatgaagataatgctacttgcatcttaaaggagggtacattaaatgagatagaaccaaacactttttactaaaaaatttctttacacacaatcttcaagaaaatggtgatatcgatgttcaacaaatttgatcaagtgataatcttgcatacttatttacaaagtcattaccaacatccactttctagaaaatggtttacaagatggaaatgtgtagattaaaagatctccatgaatgcaaaaataagggagagcaatttcatactacactctttttttcttgaccaagttttgtctcactagatttcactactaccaattaggcttttagtgacactatttag

SEQ ID NO: 52854 - DNA, 1062 bp, Cannabis sativa
gttatttgtgaagagaagaataactaaaaaaagaagatatgcagagaaattaagatttcattcaattgcaaaatcaaaagtaaaaaaatacaattaataaaaaaaaattagataaacaactaacataaaagactaaaataaatgaaaagcttaaaataactctaaataactatttaatatcatatatatatatatatatttatattgatatcattttacaaaatagaattaaagaagaattaaatatgtttcattgcttaagttaccatccatatatagcatataattttcttgaaagaaaaatcacaaaacaaatgaaatttgaatagtcttaaaatatctccaattataaattacacttaaatattataatcaataatgtgatattttcatttaaccaattaaatttatttaaataagaactcactaatttaaaacaattttacagtgtattatttaagtgtaatttatgtgttgtggggaaatatttcattactgatagaatatgaatgttataactaaagactcaatttccctaatacaaataaaagaactattacaactcaatatgatgtaagatataataagagacaaggagaagaaaagaaagaacacacaataaacctaaacaaggtttatagcttttgttctaaaagacatttagtctttcatgagcactaggaaaattttcaagaaatgttcttcaaagtttatcaagtcttataatactcaacacagtgcgatgagatgagcatgttatcacaaaattttagatgccttttttaacattgtatcaactatcaagtatacaacaagcgagtaatataatcactgttctcactcattttgaatttgaatgagtgccacaaatttcttcactgttaccaataattaatttttattaaaataactgatgtaggagttatattagttgttggaatcgattgccaacattcaaaacaaaaatgagaaaaaaaaaattccgaaaagtatctcaggttatataacctcaatagatgatgtatcgcctatgataattgccaagtatttttactttttttt

SEQ ID NO: 52855 - DNA, 2992 bp, Cannabis sativa
  modified_base (2895)..(2896): a, c, t, g, unknown or other
aaaataacactacaaaacagtaatttgttgttgatttagtaatttttttctcttttccagattttatggttttttcctggtatttctatgattccgttgttgatttgtatatccccaaccacgaaggagaggtgccgtttgtgttttgttaccgtttacagtataaaagtaaatatattgggtctgggcagtataaaagaaataaaaatgggcttggacagtaaaaatataaagtttgctgtgtcccagtatttttgaaaacatttggtaaaaaatagtatttttgtaagttttccaaaaattattgggtttatgctgcttacaaactcataagtttaggcacttatgttgttatttgttctttaattatctataattaaacacatttgtcataaatttgttactttgttatagagtagttataaatttaaatttagaatagttggaaattattggatttttgttcaattttattaatgtggcaattgtcgatctatcaaatcgtgcccccaaattttaattttactatatcgtgcttctcgaattttaacatgtactaaattataatcccgtaaactttcatcaacatcagactttcgttagtaaaattgaataaaagacattaaatccaaaaatcttagttcagaaaaaaatttaactgcctgaaaagttcaaaaaacatgatttggtacatatcaaaatttgagagacaaaaaatcttaattagtcttaaatttaattgctttttatataactaaaatacattggccaattaataaaatttgtttactaagttttatccatacataatcttgatcaaaacactattttgataatgattttttatttttaatgatatttagacttccataaatatacatatatttatatatatatatatttatataatccaacaaaatagataaaaacacctaagatataggcagcaatactatatatctaaactatacatttagttacatttagtctcataaattcaagttttggtagtaaaaccctttgaatttcactttttttttgttcattacacttccgttcaaaaatctcagttaagtaccacagtggactgcccacatacacacttgtgtacacatgataaatttttagtggtccgcatttttatccaaaattcgcacatctgacgtggcacctacacatggcataatccagctgacccttaacatgacaaggaatattccagatagaagcatgcctgacaagtcctgtatggggctaatatccatgaactgtaaattaccttccaaaagaatctggtcgggctatcattatgccaatagaaaagaagattgactcgccttgcaggaatgtttcacaagtaatcccacaaaaaagacaagtctcaaaaagggcttggccgggtaatcaataagccagccagggtgaacgatatcaagaatattgggcaaggctacacaagccttgatttcttcctcaaacaaatcccacaaatatctctaattgtatcctacatatgcggatatgattgatcttgtaatgccttaacaataagaacgtcacgtactgcgactaaacataaactaatcttgttaaaccagaatcgactatagctgagcgcataaattaaacttttaaaatacagaataaaataataacttgtaattgataaactttacaaacatccaaaagtttacattttattttgggatcccataaaacgttttttttacaaaatattacaagttatttatacacgccaacctaagcagcaaaagtggggattgcaatatttttcccatggtagacccaaccatcgtggtctagcttagcctgaacatgtacaacacaccgcaaaaaaccctcgagctcatgactgatcaataacagatttatcctttcctgcacaatagagcacccgtgagccaagacccaacaagacagtatagataaccatatgaatattaattataaatcacataaatattgatgccactgcacctattgtttatttgacatagacctgcgtgttacactcacacgtctatttacaataaggctttacaatggtttatctcagttctgattattgagtctaacctaattatgccttaatcgcataattctttatatcaatatataaattataatattgcattcatattcacttaaattatagaataataactctaacacataaccgctaaacttaggggaataaccttaatctcggtttctcacataacatacacataataacatacatgagccctactacactaaactctatgtgataggttactgtcttatctggtaatctaagtatgtggagatttcaaatccccaggtgttcttgagcaagccccgataatcctaatcacacattcttgggattttacaaatatgattaatcccaaattcattttcacacatacataatttgaattccatttacagattaacaaatagagcccgaaataagctttctaatgataccaagaacgttcaaaacggagttccaagtcaagagttaatactggaccagtaattaagcgttgcttcaactcctgaaaacttttctcacaccgttccgtccagttaaacttcaaattcttttgggtcaattccattcaatttgttgctatcttcgagataccttcaatgaaccaacaataataattagctagacccaaaacgctcctaacctttgtagctaattttggtgttggccaatcctaaacagcttcgaatttggccagatcaaccatgatcccatccttgtcaactatgtgccctaagaaagagacatgtgataactaaaactcacactttttgaatttagcataaagcttgtgattccgtaatcattgaattactaatgtaacgccctaaataatnnggcacgctacccaaaatacttataaggccctaatcccctaaccgggattactaattaaaatagcgcaaaatttaaacttttatattaaacagactg

SEQ ID NO: 52856 - DNA, 737 bp, Cannabis sativa
ttttgggtttttgataaaagtgtcatatattttttagtttgaaatgtattggtttaagaataaaatattagggtttttaaagtatagtttttcaaatttcccatatttatacatcattcaaatatataatattatattttatctgtcttctatattatttttgtcacttttattttttaaaaaaactctaatggtataacaccttttaaaaatgctataattatgatcttacaatgttattttttttaagaaaatgtttatagataaaaataaaaggaatattggcggctaaaccacctaaattttacggtttgtaacacttaaccacaaaaaccgaaattttggcggctaaactatagttcccggtggactgtccacgtgtacacacttgtacacgtagcaagtttttagtggtccacgtgatattaattttttaaaaaataattataaatattataaaaaattaaaaaaaaatcagaaaaaaaaattaatttttttacttttttttttctttttctttttcttcttctttcgtctttctttttctttttcttttttaaaattccctagaagattgtgtttttcacggactcaacagcttggggtttcattaccaaacccagaagcgatagggtgacgaatcgtgactgtgagtcaccggtgacggcgacccacgactcgtttaggagatccgaagcatcagatcgggtgagtttctgaaagtcacaggccgaaac

SEQ ID NO: 52857 - DNA, 1202 bp, Cannabis sativa
  modified_base (614)..(614): a, c, t, g, unknown or other
caatgcaactctagaagtaggtttatgatctagcaagaatcagaaacaacattagccacaccttgtattttgcctctgcagcgggagagagtaagctactgtttggaagaccaagagaccaaattattcctgaggaaaatacaatacccaaaagtgtgtcaaagataccccaatcaacatctgtataagatattagtctattaattgtgaatttgtacaaatacaaaccgtgggataaagtactttgaatgtagcgtatgatacgcttgagagcttgcatattctcattttttgaaacatgcacatgaagataaagagtaactatacatgtgatttaggttgctccgtaagttgtactgtatattctttaaaaatgaaaaaaaaaaactttgaaatgtacaaataaaagaattccttttttctttttgttgtttgtttttctttctgatttttttttttgttttatttatataaagagataaaatgtattaatttatataataaaaaaaaatagtacattcaaatcttatattttttcagataaataaaatttaacccaaatttaacttcgatgtgtatcatgcatatttaaaggagtttttttatttttacantttaaaataattttttttttgtatttttacagaaattcacatagaaacttacatagcaactaacggagcaacttaaaccgcaatcaaaattcacataacaatctaataaaaactattagagtaactaccggaataactcaaattgtaaatttgaaaagaaaaattaaaaaataatatatggagtaatttctctaaatttaaaaactattatatatttgaaaaaaaataaattctattatatattttttaatagagaaacaatcaaaacaatattaccacggttcatatataattagtataagagaaatgctaaagggtatagtggtatctagcatcctcttatgtctcaacatcgttattggttaaattaagtataaggtctcatataatttaatataataaattttagagaatattgttaactaatcgcaaaatgatatatttataggtattaagcatcattaatgcctaataacaatgcttcttatagtataataccactactacaatgttagtctttagatgcagttttttcaaccccatttataaaaagggaagctaaagggtgtgaaaatacccgctatgttc

SEQ ID NO: 52858 - DNA, 2113 bp, Cannabis sativa
atgactagtgacattgttgagatccccaataaacacaaacagccaacgagcattttcagattgttgacgaataagaccccaagtgttctctctttgacttctatttgtttcaccataaacaccaataagtctccaagtaggcatatttggaatatgagtgagaatattgatatgcttgtcgaaaaaataaaaaatctccccctcttccttattttccataacatggcaagtccaccactatgcccacgggcctccaccacaaataagccctcatagcccaaagatactgggaccctttcaagaatagcttttccacataatgtttcacaaagaaaaaaaaatttaggcttcttttggacaacaatatccttcaggaactgtatggcccgaggattcccaagcccccggcagttccaacttaaagtactcatgattcctgtcgagtctgtgcatccagacccgccccaaacaagttttttgttaccaaaacttcttcattttcagaaatactatttttttgtgagcccaaagttccaggcccaacagaattgggtcttttccttttaagttcagatatagtcaaatctgtatttccacctccatgcatatccacgtcaatgtggttgaccacattaacatcaatattcccctcaatattctcctcaaaatcaggacccaatttctgcaccattattggctccgtaatcccacgattatctccctgtccccgatcttcttcacgatgcaccatcaatgagtcgaacttccctgttgaaccaggagccgtagtcagacctccattatttccgacagagcaagaaccaggaccttcagtccaatcgcctctatccatcctaccataccgaagccactgggagccaattaatttattttgcctttgaaccgtggccctcataaaggctccatacggttttgcaatttgttcttctgggatgtcaaaaattttcggacaagttctattagcatggccgataatcccacatataaaacagaatgttggagcatgttcgtatttaaaattcacccagaaccagtccgaactatccaaccagtgaatcttcatgggacgtttcaaaggatgatcaaggttgatagttacccgaatcttaaagtattcacgccaaacaccagaaaaattgttctcatcggattcaataaacttaccaatatagttgcctatcctctacagtgtacgttcagttgggaacccgtgttgtaaatcatggatctggatccataagtcaagtcgatttaacgggatcgaacgtgggttatctccgactttcaacctttcaaaaataagcctcttcctttcgaatgtccatggacttccgttaatcactcttttgatatcgatttcatggtagaattgaaacaaaaaaagattttgatccaactctttcacatacagccccttccctggtttccatagagaagccatcatatgtttcatggcttgaacatcaataattccagcattcaaaaaccgcccaacaagacaccaccggacatcatattcttcctcatcctcttccacatctaactcaagtccaccaaaatcttcaaagtccagtgtgatttcagcatccagatcactttgccccttattagaacttgaagaagccataacagtaaaagctgaaaagagcagaccaagaacgaaacaaaaaacagacaagagccaaaacaaaagagacaaggaacgaaaccaaaacaacaaattcacaccatgtcaaaagacaagactagtactgtcgaaatacttaatacaccaaagaaaaaattataagacccgatacttagttgaactaatagcgatattaatatataacatggtgctaagtaacactgatgcctttcaccatacaggcaaacatattatggcattttttttaatgcatttgggttatggaattttaacaatgtttacttttttgtggttttctttctgtcatatttttataatatattttatgattcccatattttagtgtttttgtgtaaattttcagctcagtttaattttttcgtttttcattttcacacataaacattcgacgatagaggtcttgaacgaagccaatggctcaaa

SEQ ID NO: 52859 - DNA, 1192 bp, Cannabis sativa
ccgtgtacatcggtaccactaagtagtaccctagttcggtatcgattagtgggtgactctgatacactacaccttacttgattacagacttcgtgtcacgggacccctaaacacctctagtgatagtgtcaatactgcgagtgtacatcggcaccactaagtagaaccatatttcaatatcgtttagtgatttcgttacaaaactggtgactccaataccgtacacctaacttgattacatactttgtgtcacgagacccctaaacatctacagtgatagtgtcactactgcgagtgtacaacgacactgctaagtagatccctatttaagtatcgactagttattttgttatgaaactggtaactttgatacacaacacccaacttcatgacatacattatgtcacgggaaccctaaacatctacaatgatagtgtcactactacgagtgtacatcggtactcctaagtacatccctgtttttgtatcggttagtgatttcgttacgaaactagtgatgctgataccctacacctaacttgattacatactttgtgtcacggaacacataaacatctacagtgatagtgtcactactggaagtgtacatcgccaccaataagtggaaccattcttttgtatcggttagtgacttcgttacgaaactggtgactccgataccctacgtgtattttgattacataatatgtgttacgggaccactaaacatctacagtgattgtgtcactactgcgagtgtaaatggacaccactaagtagaaccctatttcggtatcagttagtgatttcgtttcaaaactgaagactctgatacaatacacctaacttgattacaaactttgtgtcacgagacccttaaacatctacatggatagtgtcactactacaagtgtacatcggcaccactaagtagaaccctatttcagtatcggatagtgatttcattacgaaattagggacaccgatacactacacctaactttattacagactgttcaccttacgagtgtacatctatagcactaattagaaccctagttcggtatcggttagtgggtgatttttcatacactacacctaacttgattacaaactttgtgtcacgggacacttaaacacttatagtgatagtgtcactactgcaagtgtacatcggcaccactaagtagaa

SEQ ID NO: 52860 - DNA, 987 bp, Cannabis sativa
  modified_base (41)..(48): a, c, t, g, unknown or other
aagggaggtgcaagggccaagcaatatgctcaggagccctnnnnnnnngaagatgaggctgaggaagagcaagtgactccgcttaagaggaagaaaactccagcccgacccaggcctattgaacatgcgatctgaattagggagcccacctcacttgctcggccgtcccctccagtgttcagaaaagggaaagtcgttatgtctaaaataagagcgatgtcatgtgatgatggactttcgagacgcgtccgagcagtcaccttgcatactacttcatcttgtttttcgagcttcttgactgtaatgctttatgcttctgatgtctgttttctctaatcatgttgtttttgttctgtgcagacatgtctcagaagatgattgacgctctgaagaagagaatgggcggaagctctagcgctctcctccagctaagaagtctaaaggcggcgaggggtcctcttctaaggaaaagatgcctactagagaggtcattaatctttccgtggagctgataaatgctaacccctctaccccaaaagttgataagtccaaggagcttcggggaggaagctcagacaggtcgaaccaccgaagggtgggtctgagctggtcaggagcggatctgaacaggtgcaggatcctactccacctctgccggtgcttcgagaggccaaaaagggcaaggagatgctcaccaactatatgaaccgactggttcttgaggttagtgagcaactggttggagctgacaatgactcttctctggagctgctggtgggcggagtcttgaaggaattcacaagggtaagtctcccttgacatttttctttaagcttctttacttggctcaaatattaatgttttttttctgtgcaggccggtctgaagttggcttatacatactctcgggctaaatccgttgcttccaagaacacggctctgtccaacaccatgagggtggtgttggaatttattttaccaagacct

SEQ ID NO: 52861 - DNA, 1906 bp, Cannabis sativa
atttttatttaatacttgaaaatgttcacaactagccagttttcgtacaaagacataataaataataactaaaaataattacgaaaaaatttaatatcgtaaataaataaacagagcgccctagaccgcccgcagttatctggccctcagcgagttcacacacacacgcatccaaagttccactcgccacagctgacattctagacttttagttacctgggtctgcacatagtaattatatatacatatatatatgttatacacacatacatatttctcaacccctcatacataaaagaaggaactaacgatcaagaagaataattaccaagaccatgtgatagtcttgatcaacaactttgatacttttagctccatttatctctcaactaagaccttgcatgtcctctcaacaagattatataatactatttcaaagccttgtcataagctcctaactctactattgccatttgtataataatatttcaaaataggacttatgaaaaagaaaaaaaaaaatccaatattcacttaataatacacaacatgcatgcaaataacaataattgaaagaataacaataactcactaatactaacaatactaacaacaataataacaataactcactaatttatatgtccaatatttacgtagtggactaaaagcaaaagaaaagcccatactaaattagaagaagtctaaattagaataataacataattctcacaatttacaaaaatactatatttaatgctatcactattttcacattgaggtatctagactattataatagaaaataataaataaatattttggtcattacaataattatactttagcattatattgaaggttccccaaagagtgaatacaatttttttaaaacccaattaaatagttaatcagtcacaaataattataataaatacctacaacaaccaataaattataaaaaccttttgtttcgtatcataaatagttataccattacaaaaatacattttattgttttagcatcacttaactatttttcataattattttaagtatcaactaaataaattcatgaaaaatacaaaaatgatcgaaaaataaatctaaccattctaacacagtttatagtctgtaccaagccacaaataatttactttgaattttctgagcaacctaggtatttttcataattaaattaagaaataagacaaataattcatgaaaaatacttgactaattcaaatctaccaattttgtaatagtttatatctcataaataatcatataaaataaacttagatttttctcagtaatctaagtattttcctaattaatttaacaattgaatcaaataattcatcataaatcgaataattgcaaaaaaaatctcaaacttcatagtagacctaaaaataccgaaaaaagtcaagtataaaaaaaatcttaaataaaacctttaaaaacccctgaacggagctttgccggagttttgccggtgggtcgtcttctacggcaacggcgagttccaaaactcccattttcttgctttcgatgcctcatttaaattaggaatgatccccacgatgctcggaaactaaacccaatccaatctcgtccaaagaaacaactaaaacacgtctaaaaagagttgtcttctttagctccggtgcaccaccgttgatggtgtcaaaatattggttatgtgttttagacgttaaagctccattcttttacgtccatgcctagccttagggtcccaaaaattcaaatacaacctcctttgatccccaaaacaacttaaatacgttcgaatccgaattcagtttaagaacggtattttcgaatgtaaacaatgatatatgtcgaaaggtgcgattacagaccttctaatcacatctaaaac

SEQ ID NO: 52862 - DNA, 600 bp, Cannabis sativa
attccataagttccaagcaacaactagaaaaaaaaaattaaaggtattagagtcacaaaccttagccatattgctcaaaaaagtagtgacgtccgaagtcctattgtcacgaagaagagtccgaaggccacattatttccacaccataatactatatcgacatccccataacgcatgaacaatatcatctcattttcttttagaacagtgtgtgcaaagaggagacacttgaatgccccgcttggataaaacataattcgttggaagccatgagtgacaacacttctaaacaaaatgctttatttttggaggaattctccgcttccacaataagttccaccatgcctcgagttctagatgagtcagattgaaaaaaatcttcacacattgcaatagccaatttgtacccactatgaactgagtatgctctattgttggtgaaatgccacataattttatcctcaaggccccattcattactcggcatgcttaatataagctccgcaccatccttgttgaacagtgtatgaatgaagtccgtatcccaagacccatcagcaagaaataaatccaccaccctcatttgtttaggaagaaatg

SEQ ID NO: 52863 - DNA, 913 bp, Cannabis sativa
ctttcttcttttaacaaaaatattttaattgattgtcctgtcgaactgaatgtagaaaatcattcacttctcttttttgagtattatttttcagctaaggtacttgaatcctcgcagggtcttgtgaaactttctgatttttgttatatatatgtatatatatatatccttttaagtttttgttatgtattttatttgtaaactattgagaagatgtttgttttttttttttttttaatttatgatctatgagttgtgtgaatgaattggtgctttgtgcaaatgatgaaaggttgtcttggtctgtataattttgtaaataaaattggttcttaataggtgtttgttaaagttaattttttttggtatattgttttaagtgcacaacaaaaatgttagatagacattttatatattagtaagatatacctacacactcacatacgcatatacaattagaagttacgtgctccctaaatattattttagggcccgtttacaaaattagattatgctgaaattaatcgtttggtttaagaatggactattttatttatttccttttggaaaaaaaaaattaaaattaaaataaaaatatgtaatattaaatttaaattaaaatatataataataaaccaattaaaaatgaatgattcaccgcaaaaaaagtaataataataaaattataaaattaaataatataatatattctatgtaattaaatgtatatcataaatatataataaaatagtttagcatatttttttatttaataaataattaaaacagtaaaataaaaatacttgaataatataaaattgtttatgttagaccctaatttaatataaatattaattttttaaaatacttttagaaattttctagttattttaaaataatatataattttatt

SEQ ID NO: 52864 - DNA, 969 bp, Cannabis sativa
ccatctaagcatatttacgagctcacccttctcataatctctctctgctattattattttttttttctttttttttttccaatagtaatttatagcaagttgattgttacttgaaataatcagcaatgaaacttaaaacaatcaattcaattttcaatactatgtacccttgattgagatatcatgttacgaaatatattatatatagctcatattctatatttttcttttctttatttcattaaattattaaattattatggatagttctttgttagaagctttgttattcaatgtcattttaagagaatgagtttagtaactggtaattgcacaaataaagcatcttataaagtgagtagttttagtgtgtatacatatgtatatatcttttatatatatatatatatatatatatatattgttttttgtatgagagattttttgaaaaaaaattatcctctaatttctcataaaccagttatataggcacattttatatagaatagatattttaaaatatatatatatatacaattaatattttaatgtatagtaatttaaaaatttaatatgcaaatatatttcaaaacttagtaaattaaatatatattcttttctaataaaatataatctaaaataaaattaaatatgttttatacaaataatttgttttccattttaaatttattgttggaggcatggaacaataataatttgtttaattttgtcattagttatttagttatgtaatttttgttaataaatattaaataattcaatattaaaaaataagcgattcaaaatattaatccaattcacatttttgtttagattggatttgatttattatgcaatattgatctaatataaaatttgtacttagtgtgaatcaaatataatatgagcaaaataatatagattgaatcgggtgaagacccttactttcaaccattgtttaagagaact

SEQ ID NO: 52865 - DNA, 788 bp, Cannabis sativa
gagttaaacctcagtagaggaaggccatctcagagaaagccctgatagaaaggaagaaacagagcaacaacaatcaagatattcaagtgacacacaagggtgttttcattgtggaaaaccaggacacgtgaggagggattattatttttggaagaaaaaattcaagtctcaaaaaagaaatggggactaccacataaataatgaaaaccattcaacacagaaaccagatcaccagaatgcaaatcagagtgatggctatgacactaaagaggtttatgtggctgttgccacattgaacaaggaatggatttgaaatttaggttgcacttttcacatgactaatgacagaaacctactttctggtttcaaggaagctaatggtggaaatgtgatcttggggaacaatcaaacatgtggaacagtcagcttcaagatgtttgatggcattacaagatccctcacaaatgtcaggtatgttcctaaactttctataaaccttatatcactaagtgttcttgatgatctacaagtagaaagtaagatcaaagatggacagattaaactgtgcaaagggtccatggtgataatgaaaggatagaaaagtgagaggctttattacttgtgtgaagaacttattgctcaatgcaacacaatattttctaccacacgagaggatgctaaagctacactgtggcacagaacgcgtgcagataattagtgattagcagctgctaggtaagggtaaggtaacaaaagttaaattttatgaatactgtgtattgggaaaa

SEQ ID NO: 52866 - DNA, 899 bp, Cannabis sativa
atgggttttatttagggctcaaaacccaacaagacaatgtagcctcaacaaacattctgttcaaaacaccatatgaaaagatgacgctccaactcaaagatgcgatcccttgtacccaaccggtgtatggtttctccggccaaagtgttgaaccttttgcacaaatttgtctacccctcactattggacaagctccgaggagcataactatgatggcacaatttctgataattgattttccttcagcttttaatgttatgttaggcgaccatccttatatgacctaaaagttgttacatcaattttccatttgtgcatcaagttcccaacaaagaatggggtagggtgcctaaaggaaatcaacaagttgcgcgaaaatgttataaccaaaaataccacaggtaggggagccagcgataacattcattgaagcagatgcaagccacgtccacttcccacacaatgaccccttggttgtggaagtgcaaatcgcaaataagacagtggcacagactatgatagaaatggagcttcctcaaacattcttgttcaatacaacttatgagaaaatgggactccaacataaagacttgatcccctgcacccagctttttatatggtttctccagctagagcgttgcacctctaggacaaatccgcctacatctcactcttagacaagctctgaggagcataactataatggaacaattcttgataattgatgtcccttcagcctttaatgtgatgttaggccgataggccctatatgacttaagagttgttacatcagttttccatctgtgcgtcaagtttccaacaaaaagcggaccaatcacagctgtatgattttcaaataataaccgcatttattttacgtgggacgtaatcaaatccca

SEQ ID NO: 52867 - DNA, 865 bp, Cannabis sativa
acaaaccgaatatttcactcccgagatgtcgtgtttcacgaaacaatttttcctttaaaaaccagcaacaacatacacaacccatttgttgattctcttcttccaaatataccatcatcatgtctccctgcccctgcttctaattcccaaattcctcacaccatcccccatccgaaacacctcatactatcaacaatgatgacacacacaacaacatccaacacgatgctggccattccaccagcaacaacaacacaaactcacccatattgccagcttcaactgagcaacaaatatccaaatttggtcgcaaaatcaccaaacccaattacttggctgattacacatgctccaccaccccattccataaaccagtttctgtcctgtgacagattaacagatgcttttcaagctgcaattttggttgctcacattctccctgagccaatcagttataaagaagcatgtgcattcaaaaaatggctcgatgccatggataatgagctaactgctctagaacaacaaaacacttgggttgttgtccccttaccccccggccaacatgcaattggcaataaatgggtttacaaacataaatatggggctgatggggctgttatacgatggaaagcccgcttggttgccaaagggtactcccaacaacctggtgtggattatcttgatacttttgcacccgtggccaagtttaacacattgaaaattttattagccttggcagccatcaaaaattggtctctccatcaactcgatatcaataacgcctttctccatggcgatctacatgaggatgtctacatgaccttacctcaaggatacaaaccaaaagcacctcttccacccaatg

SEQ ID NO: 52868 - DNA, 1661 bp, Cannabis sativa
taatcttacctcgtttttgaattcgaatgagttagccgacctgaatagaaaatctcatgctagatggatgtcctaagtcacatttacataaacgggtaaataatgcgccaaaaccctaatccgggaaacccaaactcactactaaaggttatgatattggtatttattataacgatatcctaaatatcacaaaaatagccaaaaacaaggattctcaaaactgccccaaccgacagaccggttccccaaccggaagaccgattctatggagtttcctagggactaaccagaattttgattcctacaggtcccactaaaccggtcaactggtttagtgcaggatacaccaaaaacaccaccaacacctcaattcgatcccaaaactatacaaaaacatccagaaaaacctataccaacttcaaatcacatcttccaagcaataaaatccagaaacacacaaaggaagaaaaagtgccattaatgaatcaagtttgagtttccaaactcaaacttggtcattcacctcacaaatcaactaaaccagccacaaacaagttattcctattcaatataaactcagagaacgtacaagagcaagattaaacctaaacagccactaattctcaaaatacactatcaaacccaattgaaacttaaacaacaaagaagtaagagctctagggtttacctctacttggaaacacttaatcccttgccgcaactcaaaaaattgaagggaaatgagttgattccctcaggttcaagctaggttcgagagagggagaggatgaacataaagtcttctagctatttcttgtatattgcttaaatgattaattctaataatcaataaaacatagatgaaagtagaaattttatttaatggccagatatcccaaaaataagctgccacctaatcccctaatgcaagttactaaaatgctcatgtcttgaatattaagtaattaataagcttaggggtaaaatggtcaaaagctataaccccgcttaaacccgacattctaagtatctcataagtctgtcccattaagaaaaagattctaaacctaaacttaacttacccatgtgacacaaacacaaacggtcatccatcgcattttgcgtcgtcttcgagcaaaaattaccaaaaaattgcataattcatatttaatataaatattgctcctagagtttaataaaatctctaaaattgagaaattacaactccaatgcccatttctaaaaatgggacccacaaaaaaataaaatcatcaaatagttataaaaatatcaataattactgctaattgtctttattaatccatattctcatatgtggttattatacccattatagtacctttaaaacctgtgaaaccaattttaaatctgtgaatcttgtgaaaaatccttaaaaataaactaaaaccaaatctctcgtgaattttgttttttcattagattccattccttggtgaagagaaaaaaataaatggccctacattatttgggaaccaaaaaatcatggcactattttgatgcctaagaggaattcaaaccttaagttttttaagtggcaaacaacatgcctaactattgaatttttcaaatcaaaccattaaagataattaacttaccttagtccattccataggcagtcc

SEQ ID NO: 52869 - DNA, 1527 bp, Cannabis sativa
ttttcgttaactaaaaatattagcatttttgtaataaataaactacagaattgactatagtaataaataacataaattttttaacatggtttttaaattaattcttcatattccatgagtccatcttattaggtataatatttgggatacataatacaataacaataatatcttgctttcttttccctttatagatatgtagagtgatagttattcccttaggatctattcatttataaccgctcatgaaacttgaacatcccccacattttattattatgcatatgggataatattagataacagatcttttgtctttatccattgaaagttatgctaactgtattggatgattcttgttagtatacattattcttctttaccgcctttatagaaaaaacgctaagtgtagagatacaatacttcttgtggttctctttgaccattttagaaggtattagcgaggcggtcattttaacgcataaagagcaagatgaacgttgatattaccctttaaacatgcaagtatgtgggtcaattagctacaacgttttacatgtatgtgggtcaattagttgcaagctcttactcacaagtatctgggtcaataagttgcaagctcttacatgtatgtgggtcaatcaactgcaagctcttttttagttatcttgagcaactctcattatgtattttgttgaccccaaaatggacttgttgtctcgccagacttacctgtcaatagtagttatcactactagaaaaataggttttagtgacccacgttgagtaacttttaaactttttagtgccacttcaccgcgcgtcactaatgagggtgactggaaaaacagtttttagtgacccttcacgcgtgtcactgaacccttttacaatcactcactgtgcaccactgtaggcgtttaaagtcaaattttatcagactgaaaaattaacagcaacacacaaaaaatatcaatatatcttttttttattctttataattatttttggagatatagtgacccacaaaaaggaccactatattagatatttttctaaaataacataatatttaattcttttaattcaaattttatataatataaataataatttaattaattatatattgatataattaaatataacaataataatttttattaactaaatgtaaacaatactacaaaaatagtttcaactaaaataataaaactaaaaaacaaaatacaaaatattttttttactgaaaatatatatttttattaagattattaagtaaaattatacagtctttacacaaaattttaaactcaaattataaattatataaaacttaatacaaactcatatcaatttctactaaaaaaatacaaatacatgaaacaatacccagatcagattatttatccagtattcatttaaaatgaaataggcctaaattagttttaaaatattacacaatgtgaactttgaacaaaataaacataaacaaccaaaaatttcaaatctaaagctcgtccatgt

SEQ ID NO: 52870 - DNA, 972 bp, Cannabis sativa
taggaacttgcacagaagacaaaaaataattaagaatgctttggaggaccgaacttaccaaagttgtcctccccgcttgggaaaggtttttagccttccacccttccaatttaccaagaattttatctttcaagaacaagaaatccttcctcttattagccgaaaagaaaaagggatttccaagatacttctccttcgggttcatattattaatgcccaaaatccctttgatttcctctctacagtgacgcctagtgttaggagaaaacaccactccactcttggcattgctaacatgttgacccgaccatctttcatacttatgaagacaattcaacagagaacttgcattttcgacagtagcactacaaaagaatatagaatcgtttgcataaaaaaggtgagttatgggagaagtgttcctagccacacgaataccatttaaatcatcattcctttcagcacgaaggatgagtttagatagaacttcactgcataggatgaacagaaatgatgaaagggggtctccttgacgaaggccccgtttaggattgaagggagctaaaggtgcaccattaataaatatagaatatttgaccgttataacgcattctagtaggagagtacagacttgctactgaatccgttcgccttgagaactcgaaaaagaaaaccccattcaaggcgatcataagctttattcatgtccgttttaaccgccattactccctttttatctctcttgcttttcatcgaatggagtacttcctgagccactatagaactctccgcaatccatcggccaggaataaagccgattgaaaaggagacactaaccgatccatacaccctttaagacggtccgttaaaatacgagagatgattttatacccaaaattacataggcttatgggtctaaatttatcaaaagtagcagcattcacaatgttaggaattagacttataaaggtc

SEQ ID NO: 52871 - DNA, 1966 bp, Cannabis sativa
  modified_base (749)..(751): a, c, t, g, unknown or other
gcgaagcgaagcacctaggcagcctaatgattcttggtcttctttctttagttagtgtccacgtgtcatccttgtgaaaatgtagataacatgaagaattttgttgctttgaatgcaacccagtatcaaattgagtggttgatggatcaacaaaatgaagaaaattataatctaatttatgcttatttttatttgttcttttatgataagtttatgctagttttgtgttacttttaattgtattactttcatgattttatgttttaaatattgttaatttttttttaaataataagacacgattttgtcccgttattgtacggtcacggattgcaatctgtgatgtacggtaaccgtcggatgggtagttaatttgatccaaaggttggggttcatctaggggtatttagggttaaataaatggctaccggttacgttttttgaaatttaaatttattaaatctggaaaagtgaaaagtgacatttatcaatcacatcatatcaaccgtcgtcctcctccactcttccatttccttcttcactttcattttgttttttatttttcattttgtccttccattttccattttcgtctctgctagggcaaaacactcttctttcttttccattttctttttcatttttattttgttttttattttccattttcgtttcaggtggtaaaacccatattgtacattttcttcacttttcttcgttcatcactgtggtgtacattactcgaagtnnnccattgttggaggttacagtggtgggggtgtcgacggtgggttgtacattactccgttgtactttacatacatttcattattcacagaaaaaaaaatatttttcaagggaatgtggtgtgagtccattttcgtttacttaatagttccattttgtctcaggtgtcgacggtgaggtgttgaagggagtttgcatttctgtgttgaggtatttctttctctctctttctctctctctcaatctctctctctggttctgtgttgaagggagtttgcatttctttctctctctccccccgtgcatctgttgtggttcttagtgtgcaatgtactgtaatttgttttgagtttttcgttttagttttttatgaatctatgattttggtattttgatttaggttgttgcaataaagaattacattgtttaaattgaattggttgcattgtactgtaatttagggattttgatttaggtatttttggaatttgttagttgatttggttggattttgaatatttggggattggataaatggagattttttgagcaatatttggtcgaaaagtctctgttgtcaatttgtatatttaaaattctgtttgtcatctatatttgttgctccatttgtggaaacgaatgattaggattttgtttataaaaatagttaataattattaaggttaagaaatttaaaaaatctgttttgaaaaagattgatacacaacagtgattcatactctatgcttccgttttcaagtgtcataattttgtgaaagattaatttatgaatttcttggtgagtgagattcacatcatctaacttggttgtgatctttgtttcttacatagattattacttgaagtatgtcattttagtaggttaattaataactttgagtaatgtatgaaatgggtataaactaaggacaaacgaaattaagtgaaaaatttgtttgacaaattatatgttatcagcaatgtcgattttaaaaatgttattttaactacactgttagtgttagtaaaagaaaaaagatttgcttgattaagtgtaatttttatgaggttgaaaaattgaattatttttttaagatagttttataaaaagccgcacacaaattgacaacaatttattgctgcatttgttgattcagtttaatttttatgaatgtgtttgctgcatttggttgcatttacagtaaaaggtggtggtgta

SEQ ID NO: 52872 - DNA, 1142 bp, Cannabis sativa
taataataataataatatgagaaatatcaaaaggtattattggtgtctagcaccttccttagtgtcataccgctattagtgtaattaagtagcgggtctcatataacttaagaaaataacttttagaaaatatcgctaaccaatcgtaaggtaccacatatgaaaggtattgggcactactaatacgcaataacaatgctctaagggatgagtttatatatttttgttaggtcaagtctcaaatataataaaggaaaattttatttacacctcaaaattttttaaagacactctattttaataatttttattttatattaaatttacatctttaattgtactaagttttttttaacttttttcttccaatttatattcttaaaaaaatatacctatcaaataaaaataaagtatatttaaatattatgacaaaaaaattacaataaaaaattatataatttttttaaagaaaaacatatatatatgagttagaaaaaattatgaaaataaaatcatattaaaattaatataaaataatataaagaaaaaatttaaaagaattattaagagtaatttataaaaattatttaagtttgtatttttgttagtaattgagtgtatttataataagggtagttatatttacacccctaatattattaagtacaccccaacattttatatacattcttaaccttgtgtaaaatgacaaaaatagacattttaaaattaaataaaattaatttttaaggaatttatattaaatcaattatttctaataaatacacctcatttacttttttttttcttttttgaacgagaccctatttccttagttaaattgagtaattttaaatcctaaaagaaaaataaatagtaacacagtatagaaaagattatttatccaaaagaaattagaaattacatatagaaaaataaataacaacacatatgaaagtttcattgtatgaatcatttacaaagtgggattgtatataaatagagtattcactttctttgtattacttcaaaaaaaaaatttatattgctgtctgcacatatatatatatggaaaattttataatgcacacctttaaaatggatatattgatgcacccctatttgttttagtatccgaaata

SEQ ID NO: 52873 - DNA, 1431 bp, Cannabis sativa
  modified_base (418)..(419): a, c, t, g, unknown or other
cgagggagagagagaaaaacactttgctagggttttagtacttctatgggtcgttggggtcaaattataataatagaaaaaatagtgttaaaatttaaaatttgaaacttttgtgattagataaatatcatttttatcttatttaataacttttttttttatataatttaatagagttttttgcggttaaattctctcaattattactcttgtacttaattaagctcaaattttgacgataaaactttttaaattactaaattgtttgtaaatttaggttatgtgtacactcttatatacatttatatacatgacacatttatattgatacacttaatattattatttataaaatataaaatatatttcaaattttataatattttttattttttttaatattttattttttattttnntaattttatttaattttaaaaataatttttcaataataatattcggtgtatcaatataaatgtaccacatgaacaagataatacacataagcagtccatggtggcagttaattgaatgacaccttaaatttgctactggtttagtagttttgagagttttactgtcaaaatttgaacttagagaattaaatgctagtaatacgttgagaggatttagctgcaaaaaactcaatttaatataataatctaacttgggactgatttagtgtgccatattagcttgtattgtatagtattatattaaattacattttatatcatatttttttatattatattgtgtcaattctaatttatcttaaaatagtatatattacatactcatacaaattaataccaattatatggtgttatataaatatgatataaaacacaatttaatataatattatacaatataatatgacacaatacggtgtaccaaacgaaccgttaaaggagttataactagattgcttattttttttttaataaataggatttttgccacgaaactatgactcttgtagagttttgccccttaaacttttctcagttgcaaaaatttgctttgaactatgtaaatctttacaaatatccccctccagatatattttgctcatattttaaaacaatttatttacatggctataagttacaagtatgattgtagtacaatgatttatttaatagttttaagttatctaaaatcaagttaattgacattaaatatatgaacattagcaagaatgtacatacatactctagtaattaatcattagattgttatttatgtattattttttgtatggactcttgaactaggctagattagcattatgtctatgtcatatcaataaattgttttcaaaaatgagtagaatacaactgcatgggaatatttgcaacaatttttataattcaatgagaattttgcaaaagaaaaaagttcaaaggcaaaattctacaagtg

SEQ ID NO: 52874 - DNA, 2038 bp, Cannabis sativa
aataaaaaattgaagctaaaaagttattgtagctaaaaattaagatatatattaaataataatgtgtgaggacataattatatcatttttaaagagtgttatacattggagtgtttttagaagtaagagtgttaaaaataatgtggaggagagataaaataaaatattatatttttagatgatgtgtaaatttttaatatccttaaagaatgttattattgggggtgctcaagtactaatagtgtcaaacaccatttaaaggtgttgttctatgattaattagctattatccataaagttattacaaaaaactatgagaattgctaaaaagcaccactagtacctagcaccttttcttggtgtcatactattatttgtgtaattaagtatcgggtcttatataacttaagaaaataacttttaaagaatatccactactacaaatttagactttagaggtgatttttttaaggcttcctgcgttagttttggcaaaattcgttaccaatgttgatccaaatgacactatagagttcaaaacaactgacgctaaagtgtaccctaccgtgtcgattatgtacaaataattgacgccatatgcactaataaccaacatcaaaggaatacaaatcgacgcgaaatccttcataatcaatttatttttcaatttaaaacctattataaatttagaaatttaatttatttaaagtatatatcaatttataataaatattatttattttaaaataaatatttatttttttgaaaactaaattaaatattatttaaattaatttatgattagccaatatacttaaattaatttcatagaagcaattaaaaaaattataattatattacccaaatattgtaaaattagtccaactgttaacaagttaataaatctaattacaagttaacctaagaaaataagctagagaagaaaattcttatacatttcagcatcaatcgtccaagccttcgagaatcaccaccaacaattgttctatccacgtgtcgctttaatggtaacaattcagtttttggatcgtatgtcttcttttctccaaactgtaaaaagaagtaaaaatttatattagtttatatattatttgttaatataataaataagataattaataattaaaacataaatcttttttatcggctatataacgattatggtttgcacgtgcgacgatgtcagtcatgtatttcaaaacataaaaatcacattcttggtttttaggttgtcttggacaatttactagtaaaattcatggccacgcgccaagaaacgcatttgattctcctataatgttggatgctttgttttcaaaattatattaacatttcaattcattaacataagtatatataacttagttaattaaaagatttgttaattaaattattacctttccaacattgcattaatttgtgggggaactttgtgaccatgtataggatctaaatagagaattttctctggcgcaacgatctctagcatccaatgcgcactaaaaaattatattaggatgtatgtaagatagcgtaaaaataatttcaagttataatatagaaaataattttaaattatctcttaaatagtgtttacccgatattttaggaaataaataacattttgtgttggttattcatcgataataaacaatgagccaatccttgtaatgcattctcaaaagactcttccttctctaaatcgttggtacctttcactatgaggaagacgtcctttgtcgtactaacactcgagaggatgtagaagacctcctgcgctgtcaagatagccaaggagacagagaaggcttcttccattttgaatacaacagaagggacgatatagacctctaaggttaacaccaaggataaaatggagaccacacctataatcactctaaggtgttcccgagtcgaggaaaacatcatctcaatcttgggtatatttgttggaattattttaccaggatcgtagatctactcacaagtatgctgatttaacaacctaaatatgaac

SEQ ID NO: 52875 - DNA, 889 bp, Cannabis sativa
  modified_base (218)..(224): a, c, t, g, unknown or other
atttgatgaaattaatttcaaaacaagaataattaaaattgaggaaattacaaatttcatgggttttttactatctttgcaaaaatatgtttttttttttcaatatatatattttatgagaaaagtttcaaaaaaaaaaaagttgaaaaatattggaaaatttaagtgactaagagtaaccagttaccatatgtttctttcatatatatatatatatnnnnnnntatatatatattttttaaattttcctacaaaatatatttttttttcaaaaaaagtcatatttttgtaaacttatgctataaaaaccataaaaattaaaattaccaaaatactccttagtttatgtccatatttactttgatttttttttttttttcaaaagtgtgaaactaaattaattatgtaagagagcacatgtttcttaaaattatttatttatttatttatttattttatttttttgaggaatataacattttcattgattaagagtaatagatgggaattacaggaggatttccctcccttgacaagaaacttcaaaatggctagaaactctaacactcttagctaacccatttgcaaaagagttcaaaccgcgattaatatagaagaagctacaaacagaaaaaagtttaattaagtctagaatagataaaaaaaaatattaacagacttccaatttgggggacactttttcttctccagagcttgtgtaatcaactaggagtcagaaagaatgtgaatcctttcccatccattctccaaagcccaaaagaggccatctggataacacaaagttcagcctccataactgacatagctgcagttcgaatggacctataaccccatgaactgcttttcttgttcaccatgaaaataacgc

SEQ ID NO: 52876 - DNA, 765 bp, Cannabis sativa
ctttggactgagttttggcaaagattaggttttttctgattcaagtgctcgcgcagatgcggttgggagtaattactcacatacctcattctactcacagattgtgtccgacttacggaccttgtcttgctcatggacctcgtccttgagtgacttgcagatttactagttcctttgcttgatcattagcacgacgagtactctctcttcctcgagttgttcgactgtgggtccttgagcgtcctgaggtcacacttacttcttcatgtcgtgttcttcccccctgagcgtggtttgtcgtattttctccactggggtttgtacgagccttctctctatgggttcgagaagaatgctgtgattcctcgcctgacctacgttccccgggttgtgtcccatgatcttcctcgtttccatgaggaatttcttgttcgttagtttctggttgcctcccattctcatttctatgagagggttctggctaatcattcatattttcagggggattctcattttcccaagttgttcttcctgagtattttcctgtctcctggttcgtgagccacgaggtgggcatcgtggtcttctcactccaggtgttcaaattgattttgagtattattcccctgtgtcgccctagttgcagctgcatcacgctctaattcaatgtttcgttgggttgtcatctccatgcggcacctaagatggcagttttccatttcataagtaccctcacccgtgggctgtacacctccacgatggggc

SEQ ID NO: 52877 - DNA, 643 bp, Cannabis sativa
ttttcttttctaggcttttcatttttagtaattggatgttaatggatgattttctaagtgagtttcggattcctcttgctccattttgtatatatatatattttttttggggggttaattagggtttttgaataggttggctcttttgtcttttttgttcactcttcaagctccttatatgcttcttaggttggtttcgaattaggattggtttattagtctcaatgccagtgattacccactagttactccggataatacagctcttgttcaattttagattgattttagttttttttttttgtttggatttttctcacattttgtcttacttgccaaaaagtctcggatttatgagtcattcaagctacattggcttgagagagtatgatcaatatttaattttgattttaattttgctgtgattgaagttgatgagtgaagaagtttctggactgtttttgtttgatgatgttacaagtctaagaagttaaaatccataattgtagatacagagctttatttatcagaaaagtcatcaatattatatgcttcacaaaagagaaaacttcgtaatgcttatagactatttacagctactgcttgttcccctttttttcatcagtgtgtgcatttggggtaa

SEQ ID NO: 52878 - DNA, 1642 bp, Cannabis sativa
  modified_base (1089)..(1090): a, c, t, g, unknown or other
ggtactgcacccagagactaaaaggggctgagaaatgctcacttattatgtgactcggtctgtccctgcggtgaacaagcagctcactagggaagacaatgacctttctctagagctagtgatgggaggagtcgtgaaggaggtttcaaggataagtcttttctaacaggttccttttgtccttcttcaattagtttaaattttgatgttttttttttttctgtactgaccagtttgaagatggcttatgcttattcccgagctaagtgggttgttgctaagaacgctgccatttccaacaaaatgcggacagaagtggacttggccaagaaggacactcagtaacccagggttcaacttggggtggtccggatggagctgggagaggtcaataagaagcttcttgtagctgagaagaaggtggctgaactgaccaaggatctacaagccatgccatccaccgaacagtttgaagcttatattgcctccttatctaaggaagtgaccaaccttcaagaagaaagggaggttctccggactctatccgcaggttggaagaagagaagaaagccaaggaggaggagcttacagctaaggtttagaagtataagttagaggccgggtagaagaaatctgaagtggagaggctcggagggaaagtgaatgccctagaggcagctggtctcaagattttttatgacttttggaaggccaatcccaaggtaaattttgaataattgggcgattccaaagacatgtctctcggatactgcactgctcaggcggcctatgggggaatcccgaggtgaccacttccacctctccaactgatcaaagtgtggaagtgccccctgctcagacaaacgatcctcctgctccagctgacccagttgacccgtacaaagagcctgggactccagttgtttgaatgctttctttttctatatgttcgggcatatggccttttttaagacaaagtgatcaaccaagcggtctttaaacttggaaattatttttcatttttcggacaactagctgatcgggcagcctttaatcctgagtttgcatgcttttgttatctttaatgannttcattctctgtttataatcatcatgcaattgtgattcttggtcacttttaccaaatgctctgtttattatatttttaccaaattctttgtacacgtataggtgcctcccaagtgacaaagcagaattatgactcttcgtcacttttcatttatttttacaagtacactctcttatatgttcggggttttgggttcgaccaaaccatttgtacgtactagatggtaaattaatagcatgctaatggattcgaatcaatttgaattttgaaataagcatgtttattcatttattgatcggacatatgtctgttaccgtagtaacttacatcaaagttattatgctgatttgatctaatctttagcttaacatgaaataaaaaaattgtagaatttaaaaaatcgtactttcaatggtggtcatccgacctgagtacttgaccattttatccaaacctttgggtgtggtccgcccagaaggccattcacttaagagaaaatgttcttttgtttcgtacttgatatggtcgtctgacctggtacttctattggta

SEQ ID NO: 52879 - DNA, 2967 bp, Cannabis sativa
tgctttcctggttaacttccttaaggtagacaaacagcagagctatcatggcatacttaagaacactcaatcacacacacccttgccacccaaataatatgtataaatatatcttttatatatatgaagaaaaaatcaattccacacggtcatctcataaatgattgaacttaaacataagccaggatacacacttgcttaataaggtaattatcactttcaggttctccatcactcactttctggaattgcagtggcatattccatgttttctggagaagggcaactttatacattcatgatcctcatctctgagattaccactccagaaattaatataagatggtaggtctaccatctatgagtttgagtgagattgttatgctagttttggacttcgtgattatgatacaacttttggatttcatgaaggtatctcgatactggtggtatgaagaggtcaattgtatatctcataaatggtgtggtgatatttttcttgtggctggtgagtttgaaatttcttggactgtatctaccatagcatcttttgaatttcaatatgaagagaaaaacaacttgctgactgaacttacgaaatgcaggttgcaagaatagtactgtttggctatgtttttgaccacatttacttgcattacagtcaggtataatgctatcatttaaattttctttcagtgacctcaaagactgcagcatcttatttattttttccactgaggtctttctaatttgatctttataaaaaaaaaatgaaccatcagatttggcatatactatacttttgcttccctactctattcctcttggccagcataagaatgagttgtcaacttcattattggacatctgttttcaagttgtcaactttttcgtagtataatttccaaacaaagtttaatattttgtcaattttaaactcaaaagtaggatatatcttattggaactttaaataagatacacccatttgatacttcagttagatagttgtgcaattacaatttttgtggaaaaagtagtttattttaatggttttatagaatgacagattttttattttttttgttttgtttggttttgcaggttgtccaaatgcacatatttggatatctgttggtgatggtggtgccttcagttctagctataatgaacttaatgtggtttggaaagatccttaaggggctgaaaaagcaattagctaaaaggcaatgatggtgaacaacataaagcccgcacagttcttacatgcctaactttatggtttattcttttatattctttactgtaaaaaaaaaaggataaggggttaagggaaatacatgcttaaacgaactactcatgaccatgttggtggagaaatcaacttctgtaaatgattcaacttgcacacaatatctacttttaatgtttagttcatatgtattctcggtaaggttactttctttttttggcagaagttatgctcttcaattttacccgtggaagaaattttcaaccatcacttttttttattgcctgttcagttccaatgcaatgagagggtgtttttattttaataactagcaaatagcatttcgagagtactttcaaactgttattattattattattattataattgttaattaagcaatatttggtttaatttataaggaagttatatttacaccccacctcatcttttgtaaatgaccaaaataaaagtggaacaaatttaagattccatcaatggaggaatcatcctacttatgtatttaaattcaatttttaaattgttattgtatatgcaatgcatgtgtgttaataaattgacttttttttttttttttctctcataataacaaagcgctttttttattttttgtaaaatttttattcatttttatggtatatttaaaatactttcattacagtagttttacaaggaaaagcaaaaatcaaaataggacatcttgttcggacaacgaaatagaaagaagaggatgaccattgttaaagtcgaaagacataactccggtgataaccatgccggagctaacagagatttgaagaatcaaaatttatggagccccccttaataatctaaaaaaatatctttctgaaaagtaggtaagaattctatattttttttttcaaaaaattcttctctaagttgagaactctgaaattaacttcttacatttatgaatttattgtttatctatatttgagatgtttggatatttcgaaacatcatggacatgcagaagagatatactatccccactcgaaccaggacataacttttacttgttcaaataacaattaaggttgcgcagggtcaggaatgacgaaccgaatctctttatcatagagagattcattttgtaagttcattattatgggtagttcttacaaaccaaaggtagaatagttaaattctcgatgtagatactacatacttggttctcatccttcagagactaagagtgtaataatgggattctccccttctttaccagagcggctaaagttatagaaacaaaaaagtctacttactaaagcagctgtagttgtgctgtgagaaaaaacaactacagcataactgtggaaaaaatctgagttgagtgtttggtaaattataaattttaaagtactgcgagtttcttaagatctattataatgataatgataatgttataatctagtttattataatcataaatgtgtaaaaatttattttatataatattttattttctatatatttttttttttttcaaatataaatttatatgcatttaacaaaaataatttatgctatttttatagtgtgttttatcaaatctgaaaaaaaaaaaaaatagaaactcaactatataagaaaaattttaggttaatgttgtttattaatattaaataaaatataaattatttttttttttaaaataatagacttaataagaaat

SEQ ID NO: 52880 - DNA, 807 bp, Cannabis sativa
tttctttgtgcaaatcaagttcagttttattattaccggcccatcccaaatatagactaagaaacttcttactctttaataatggtgttgcatctgaaacttcctcaaggctactcacatttcttaatccgtgaatagaaagactccctcgtagttcttgaagctcttccaacatcttaatgctaccacaatctttattattccccacaaaaaatttatttagtgtttgcagttttcgtagcttccccaactgcaatggcatctcttctaatttccaaggaacagtaagatgtcgcaacttgattaaatttcctatatcattcggtagtctagtaactccttcacattctttcaacaacaaagtctccaaattatacaactcacatattgtattaggtatctcttcaatatcttcacaatctaacttcaaataccttaaatacttcaaatttcctattgaattaggaagctttgtggtataacagtcgtttatggatagtactctcaagcttggaaatgatgtatccaagtgctcaatctttaacaactttagttggcttgaaccttgttgccacaatatggtacgcaagcacttagctttaaataactcctcaaattccttagggtcattagcttttgcacattcttgcatgtacgaaaaatggcgaaccttatgtgagaatttactgctattattcatcatataacaaaactcaccagaaacaaatattgccaaatcgtgtataagatcatgcatgagaaaagttggctccttcctattgtaatttgatggttgaaaaaatgaca

SEQ ID NO: 52881 - DNA, 1522 bp, Cannabis sativa
tgttaataaacatacttgtgaatagatctaagatcctggtaaaataaattccaacaaaaaaattgtctttttttctccatattgcacctttgtaaatctcaataacatgtagtaaaaggaatattttagggcacttcattccttagcctaaaaaataaccccttctacatattggcttgaaatataaaattaccttaaaattaaaaattaaattagtaaatatcttttttttaaaaaaaaattaacaaaatggtaaaatataataaattagctaataaaaattataaaaatacatttaatatatatatttttaaaaattatataataattaaattaagttatataaattttttaggatttcatattaatatattataagaaaaatgaataaatatattaaattattaaatatatacaacaatatttgatattaaattaatatactgtagtaataaaattatataccataaagaaattataacaatactaaacttattatattaatactcaacatatatatcatgctaacaaaattatatatagtattattaaaatatagggaaaaaacaggaaactacaaaaaatgaaaaaaaaattacaaaaatactatgggccggcccacacccaaatatttataaaaataccacatgctttaaaccttaagccgcacggaacgaacgatgaagatgaacatacctccatcgttcaaatcagcaacataaccagaatgaaaccaaaacgaggttaatgcaacctttaatttcggcaaaaatcaactggaaaagaagatctgcaatgatctaaacaaaaaattaggaaaaaaactgaaaaactgggaagaaactgaaattacacatttgttttcgattttactcgttcaaaacaactctctctaatatcaaaatccagattcatgcaatgtagatctgtaacaaatagatctggaggtccccccgaatccaaaacaaggtatgatgtgattttttttttaaaaaatctcattaataatatatctactttatatacagttggattttggttaattgctggtttacaatgtggaattaattttttttaaaaacacaataagtagattaaattcgaattaagggacaacatgttacgtataagtgtgtttattatttgttttggttgccttatagttgcattatcgttttatgatggtttatatattatgcaggattttcagttgacgagtaccaacaaataacagttatacatggtaattttatgcaaatagttgcatattagttttttaatagttggaaaatgatctgattcaaataaaactgatgaaaagcacagggttcacaattagtaacaactgacttgaaataatgaaaagatcaggagctcccaatcagtccaaatcaggtatagccaatacatataagttatatttagttgcataattgtttttttatgatttcaaaataaaatcaagcaacaactatgttaattggagtcaagttccatgttttttcaagttgatttacagttg

SEQ ID NO: 52882 - DNA, 865 bp, Cannabis sativa
aaactaaagattcacattgtccccaatgtgatataatattcaaggtgagaaggacttacctgaacccccatcagaaggggtttggtggtggtggctggtcgtagggatgaaagcgaggagtttgggtcctcgaccccaagacgccacgaatcaattaaatgattgaactgtcctacttgttgttcatcaaattcactcctttgcaccatgtaactctggaaatgattgttttgttggataatgtagttgagttgagcatggatatgttgcatccccgcatcaagaggagtgggagtgggcaccacttgaggcatttcttcgttttgattttcctcttcttcggggtcatgcacttcttgttgttggatacgacgaggaggtgacggttgaccatatggatgtggtggcttaaggttgcgcaccattgtccaatcaatattttgttgtggctgtacttgattattgtaaggatattggggcacaccattggcacacaattcagttataactcccggtaggccaattccagcatgtgcagttcctttgaccatgttatcaaagctctgcagaattatacctccaactggcacattaattcctttcattattgcttaaacaatcttgagcctatccaatggaaaatccgataaatgtttactaggcataagcctagcacttgcagaatacatccaagcacgagccacttggttcaattcacagcgatagagcatttgaggttcttcatccactttatgcaatctcaaccccgaaaacccaactgtttctgcctagtccacaaggtcaaactggttgcgcataaatatgttgtactgttcttcagtcattgatcgcatgccaaacaggt

SEQ ID NO: 52883 - DNA, 1783 bp, Cannabis sativa
cagaacatgtgactgcaactgaaccaactgatgcaactcttgctacagcacctgaaccaactgctgcaactcttgctacagcacctgtgcaacattctgtaccagttcttcctatatctaatgcagcagtttcaacaataccaagaactcattctatggtaactagatctatgcgaggtatatacaaacccaaagcttatatggccactaagcatagactacctgagtctctcatacctcgagagcctaaatctgtgaagtcagctcttaaagatcctatctggaatcgatctatgtcaagtgaattctatgctctaaaagcaagaggaacttggactcttgtgccttatgaatctcatatggtcctaatagacaacaaatgggtttttcgggttaagcaaatgcagatgggagccttgataagtgtaaatcaagattggtagcacgtggatatcttcaacaaccgggcattgactttgaggacacatttagtccggtcgttaaacctgtcacggtcaggttagttcttactcttgctgtccattttaattgggaagtaaggcaattagatgtgtcaaatgcttttctatatggggatcttaatgagacggtttatatgacccaaccaaaaggctttattgattctcaatatccccatcatgtgtgcaaactaaacaaggctatctatgggttgaaacaagcgcctagagcttggaatgacaagcttaaaaccaccttgttcagctggggttttacagcttctcgtgctgatacttccttgttcctctatggctcgggtcctaatcaaataatactcctagtctatgttgatgacatattaatcacagggcctaatccaagtcttatacaaagatttataagtgatcttaatgcagccttttctcttaaagacatgggtgaagtccactactttcttggagttgagattcatagaaatgaaagtggaatgtcattatcccaaagcaaatacataacagaccttcttgtgaaagttcatcttgaaggtgctaaggtgtgttctagtcccacaagctcttcacataaactgtctcttaaggaagggactccttttgaagatagaactctttatagaagcacggttggcgcattgcaatatctaactctcactagacccgacgttgcatttatcataaacaagctatcacagttcatacatgccccaactaccactcattgggaagcatgtaaacggcttctacgatacttaaaagggaccattactcacggcttgtttctatctccagcagctagattatccattgaagcttactccgatgctgattgggcaagttgccctgatgatcgtcgctctaccggtggttatgctatctttttgggaccaaatcttatctcttggtctgctaagaaacagcaggtggttgctcggtcttccactgaatcagaatttcgtgctctagctaatacggctgctgagttaaagtggctgcaatctctttttacagagttacaggtggtcttagctgatattcccattatttgggtggacaatcaaggtgctgcagccttagctgctaatccggtctttcatgcccgctgcaaacacatcgaaatagaccaacattttgtttgtgatcagattctcaacaatgaagtttctgttagatatgtcccctctgtcgatcaaattgctgatatactcaccaagtctctgcctaaagaccggtttcactacctcaaaaaacaaactcaaagtgtcttcctccccttttcgtttgagggg

SEQ ID NO: 52884 - DNA, 1489 bp, Cannabis sativa
gggcctttcaaaattttcgagaagtttggactggtagcatatcgtctagccttacctctagcactttcaatagttcacaacatacttcatgtctctatgttacgaaaatacgtctcagatcccactcatgtgctgagttatgaaaacttagaacttaagccggacttttcatacgaagagcaactagttcagattttagacaggaaggataaagtcctttggaataaggccatagtttggtcaaggtactctgaagaactagtaaggtggaggaagccacctaggagttggagtctaacatgaggtctcaatgtccaaagttgttcaggttagatttcgaggacaaaatccttttaacgacgaaataattgtaaagaccgcttaattttagcatgagaattagcagataattagggtttaatttggaattagacttttagttatgatttatgaatttttagagatgtatttgaattctaggtgtgtatttatattaaatatgaatttatgttttttcatatttttatgtccgataaccgtagaacgtgactttggccaatagaattatattttcttatgatttagtattttagtaatatcgagttaagctagatagacatcgagaatgtcgagattattcacgatattaggtttgatcgaaatacgcctaggtgactttatgctttttggtttatgtagaggaaaaatggtgttttgccattttgctattattgtcctttagtgaaatatgatggaattagttaattctaatttttttttgagttagggattatgctagataatactaggtattattcctctttattgaaaatagaaaaaaatcaagaaaatcactttctctctccctttgaccctctctctcgaaccctcaagaaaaaccactagattttcgaagtttttcaactcaattcaggatcctctagtaggtctttagtgatttaatctaaggtaaaactctttagcctccctagttttgatttcttaagcttcaagttagttttgtgcatgatatttgggaattagggttctgagtttttgagggtgtttgattttgtattctgaagttaaattgaatttatttatgttgatttcagcttggtttgtgggctattagggtgtttgagcaatatttgagtttaagaactcaagctttgctctgaccaaggtttgagttaaaatgaatttatttatgtttttggtttttgggttgtttgttatgatttattgcttggtttcagtttattatgatataaataggtgttctggagcttattggaagatttttggtagttttgattcgaaaagggggagttttgagatcaatagggaaacctttagttttgagtttaaagttctcggaaagtggtttagtgtatcacttatcaattttacaaaatttgtgagttaggggcctgtaaaccgttgagcagcagttccactcaggttgaccatgttgggttttatgccc

SEQ ID NO: 52885 - DNA, 1566 bp, Cannabis sativa
  modified_base (272)..(274): a, c, t, g, unknown or other
ttttttaaacagtttttttttttcgtaatcaatcttttggattacgaccagacccggaccaaatctcctccccacggccctggcgctgaacccggcttctaatctcaacccgaatccgactccggacctagacccgacttaaataaaataaaaaataaaaataaattttacaaaacacacttttgttttctgtttttaaaattgaaaaacaaaagttgttacagaacacatttttgtttttcaaaattaaattttttaaaaacaaaaatttnnnttttattttgtgattaaaaaattgaaaaacaaaagtattaccaaacggcaccataatatattgtacaaatccatcttcaatgtatgatgtaaattttatagcaaatttaattcaaaaatgtcttaatattatatttcacctaaattttgtaattatattccattatacaagatgtatatttatatagtaattaatttttttactgaaataatataaaaaaattatttaaatgaataaataaagtattaaaaaacttctaattagtaaaaatcacaaatgagtaaataaaaaatataacattaattatagtgtaaatttaactaaatttctatatacatcaccattaataataatgtaaccggcactaactataggttgtggtagcataggtatatatatgcttaataataaggtttgtctacacatttggtactctgtcttttatctaaatacaagtttggtaccttgtatttttaataatgcttatttggtactctttattttaaaatcatatttatttggtaacctaaatttaaattttttttgataaaatttaatcaatactatcaatagtctaaaattttatgaattctaaattcaaatttatttatttgattacatataactgagaattatttagttaaattgataaaactgtattgattaaattttatttaaaggtactaaatatgtacaatttaaaaatatgaggtaccaattaagtattattgaaaacataagataccaaatatatttttcataaaaacacaaggtactaaatgaatatattccctcataataactaccactactaagtattctaattaagtaatgagaaagataaggtgtgtgccattattaacttacgactttgcaataacctcaacgcgggtatgaaaaagaaaccatttcttgaattgaagtccacctatagttaataattatatttatacaatacaatacaaaccatatatatatttatttactttcgttttgtttaataatataatatattactggactttcttatatcaaagtctaaagtaaaccctttcattctctctctctctctctctcaaaaaagaacccttaccctttccttactgcctttgtttgcccgtaaagacttagtcttcgtctggtcttttatataaacttatttgttgttttttaaaggctagatcttgaaatgtatccaatgtttgtgaataaagacccgttcaaaaacaaattttgacgtgacgtaatgagtaatgacataagggctcgttggaacgccgtattaggtcgta

SEQ ID NO: 52886 - DNA, 1264 bp, Cannabis sativa
tgtgtaggtaaagacaaagctaagactaaacagtagggaaaaagggtagatgaagattgtacatatcggggcggttagacttggagtgttggatctttaggatagtaggctttattttgatagtcaataggcgacaacttttgtaattaaatatgttgtaaaacagttgtaactttaaagatgggatctcggattatgtaaagtatttatgtattcaagttttaaagtttaattaagaaaattttaataactcataatttttctataatccctttgattagcaaaggagtgcacggtattaagaaataacgataaaacacctaaattagtggggtttcacaatgcacgtcgctgatgaagagcacacaagtttccagacggacaaaggtctgtattgttacaaaataatgccatttggtctgaagaagttcggggccacgtatcaacgaatgctcaacaggatgtttaagaaccagttgaggataaatatggaagtctatgatgatgacatgctggtgaattctaagacctctggagagcagagtatgaacctcaaagaagccttctcagttctccggaggtatgggatgaagctcaatcctaaaaaatatacatttggtgtctcctttagaaagttcttgggctttatcgtcagcaccaagggaatcaaagcaaacccagggaagatcaaagccttcattgacatgtcattacccaaaaagcacaaggatgtgtaattgttattgaaaggattgcagctctcagtagattcattttgaaagctatagacaagtgcttctcgttcttcaacatgttgtgaggaaacaagaaatttgaatggaccgaggaatgtgaagaggccttatagaaactaaaggaatatttgacaaaagctcctatcttattgaagccaatggaaggtaaggagttgtacctatatctagcagtgtctgatcatgccataagtgctacattagtgcgagaagaaggaagggtctagctactgatatactacgccagcataagaatactaggtccggagtccagatatccctttatcaaaaagttgaccttttgcttactagtaacctccaaaaagctcaaaccttactttcaagcccatgccatcaaggtactgacaaatcatcctctctgccatttacttcaaaagtcgtaggcatccgataggctatttaagttggaaatggaacttagccagttcgacatccaatatcagccaagcatttcaatcaaagctcaagcc

SEQ ID NO: 52887 - DNA, 966 bp, Cannabis sativa
  modified_base (939)..(940): a, c, t, g, unknown or other
tgggatgagggtgttcctgcatatgatgcctttaggaaagaagaattcaatattaaggccatatcactatggaccattaatgattttccagctttcagaaatctttcaggatacagtgtgaaagggtacaaagcatgtcctatttgtgaggagaaaacatgttctatgtatttataacacttgaagaaaatgtgttaagacatcttattactctctctttcctcacaaataaaacaaaaataaaaattgaaactaataaaaaattaaaaaaaatgctctctcccgagaagagcctgccagaaggattgctggagaagcctccaaacgccatggatgaactgctctctcaaatgaacaaacttaccctctttgatgaagatggttgggaaatcaacgaagatggagatgcagaagtggggaaactgtgtgctataggacgtctctgttctaatcgcaccatgaatcgatctttgatcaaaactattctgggtagggtgtgggggttactggagaaagatcggggagttgaaattaaacatcattcaaggaattccatcttcttggttttctctttcaactcttcccaagacttgaacagaattctcctcaagaacccatggttcctcactactggtaccctaatcttggaccgtatgaatggaatcccatctaattgggagaattgtctctctaaaattcaattgagtggcagaatcttgtctttgccgcctaaatcaatcactcaaaagaaccaagaaagacttgctggtatggctagagatattattgaagtacagaaggctgatgttgcaaagatttcttccaaaggcttgttcacgtttaaagtctggtgtgaactggataaacccatttgcccaggcttcctatttcctcatgaaggccgtaaattatggctcccttgttgggttttatgccctnnataaaactctttacaatctgattagt

SEQ ID NO: 52888 - DNA, 957 bp, Cannabis sativa
cttattatcaatttttccgactccaccatttccacattctttctaccatctccacatacatttgagcaaatctttttaacaacatcactacccccaaaaatataaacaataaaagttaaaacatattgaaaaaatgagaacaaaataaattacaagataagttaaacacgtaaataaatataaacataataaaaataaaaatctattaaataaacttatcttgtcatctctattattatcttcatcttccttatctttcttaacactatatccttaaaaagaatatgatcatcatcaactcgatctttattatctactcctactagttttattttgttccttgaaccattcaagtttacttaaaataataaaactcataatatcaaatgatgaatcatcatctttaacaacctacaaaaataaaattaaaaaatcataaataataataataataaaaaaaaagaggttaacaatcaaaattataaaaaaaatatacttatatgaaaaactaaataataaactataaattatagtttacaaatcaaaaataaccttagtagattgagtattctcctcatcaaatccaacagtttcaattgcatattcattttttataccaaccacttcaatatcatttaaaacatcaacctactaaaaaaagttaaaatcaaaatcattttaaaaaataaatatagaaataaataatgaaaataaacttaatatgaaagtaaacactcaaaaatttagcgttctcatcactttcatcaggactatcatctctatttttgataacttttgcattttcaatagcatccttcaaattattgaactttaaatttatataagacatcaaaccttcgttgatcttcgagtcaatataccactacaacagatttctatattacggcggaagcatccgtcggtattaaatgcccagaccgccggtaataattaata

SEQ ID NO: 52889 - DNA, 1212 bp, Cannabis sativa
atcaacacatgaactaatgtgaacaattccttgatctaacaagtatggaccaagtatggagttgaaatattcctttccattatcagttttcaagatttgattcttttgtttaaattgattttgaatcatggaatgaaatttttgaaaaatggaagcagtttcagatttttctttcataaggaaggtccatgttgtcctagtatggtcatcaataaatgatacaaaccatctagatccattaatatttgttactcgcgatggtccccaaatatcactatgtatcattgaaaaaggtcgggaaggtttgtaaggaagactagggtaagagtttcgagtatgtttagcaagttggcagacttcacaataaaagaattttggtcttttgtggacaaataactgagggaacaatttttcaagataaccaaaatttggatgtccaagccgaaaatgccacaacatgacgagattttcattcgaaacagacacagaattgaaaactgaatctaaattagagtagttaccacaacttggtgtatgaacttgtttacttttagaagaagccttgagaatatagagcccatcatgcatttcagcactgccaatcactttttccgagccatcaacctgaaatttacaaagatttggatagaatttagttacacaatgtagatctcgagtaagtttacttatcgaaagaagattgcaattcagtttagggacaaatagaacagatgaaaggagaaggtcatctgataatgttacagaaccagtccctatcactggtgtgagagagccatcagcaattctaactgtttgggaatgagcacatggtttgaaggtgttgaagagttggaaatcacccgtcatgtggtcagaggcccctgaatcaactatccaagtacctttgttggaggcagcagtaaacgtgtgagatgtagaaccttgatgacacactatactagcatttgccttgattaagggagattttggctgttgtatagactgtcgaagaggattcattgaaatgaagcaaaaaaagaaaaaatgaaaatctagagaaaaacttagccaaagaaataatctgttgtagcgaagaaccgcagatgaagagtcacagccgaaatagggagtgccagggaggaagacgtcgaagaaacgaaggccggagatgtctcacgcgcctgcacgcgcgtggcgcgtgggtgatgacgt

SEQ ID NO: 52890 - DNA, 1177 bp, Cannabis sativa
ctacactcaattcttgtcttcaagtctgataccatcgcagctagaagaccttgttgaggtcaaacaacgacaaggcgaacctttgaaggattatatccaaaggtcatcatacggtcatacttggcaacatccttcaattgagtgacttcaggaaatatatctgaaggatctcaacaaaaaacatggaggagttcctcaaacgagtagacaactttataaagctggaggaagccgtcaaacaagcccagacagggcaagtcaacaacaagcaatctcagggtgctatatagccccaagacttgccaaatgcgtaggccagccctaatagtgccgaccagaactctagtggcaagaacactagaggcaagtgcaaaaataatagtttttgatggaacaatggcaaaaaggagaagtacaatacttttcataaaccataaaactagaaggagaaggaggagaagtacacctgcttcatcctcttaacagaaaaacttgagataatttacaaggccactcaggctactatcccatataagaagccctctcttatcaaaaaggatatgagcaagaggcccatgttgaagttctatcagtttcataatgattttagccatgacaccaatgagtgtcagaacttgaagagggagattaaaatttctcataaggaagaacaataccaacttgcatcattatgtctagaacgaccaagctcaggcacaagctgcctagaagagagacactataccacctctagtggcgggtcacttatgggtcataattggcgaaccccacattgcaggtgagactagcaaggctagggaacactattctcacaccctctatcatgagcctataagcgatatcctattctcagaccctctatcacgagcctaaaagcgatatcctggccattgaagaaagaggcttcaagaaactcaagcttagggaactttccatctccttcacagaagggatggtgcctaggtcaacttcccgcacaattagcccctagtcattactgcatagattaggaacatgacggttgctaggtgcatggtggacaatggagcctcctccaacattctttttagatcaacatatgaaaaaatggacttcaactaaaaaacttagcacctagcacccaagtaatgtctggattctttcgccaaggcattgc

SEQ ID NO: 52891 - DNA, 1960 bp, Cannabis sativa
  modified_base (51)..(54): a, c, t, g, unknown or other
tagagaattcatatttagggtattaattaacatacatgttagtaaatctannnnctggtaaaataatccccaacatgaataagataggccaatttacaagagaacttctcgttacgctcttttgtccaaactcaattatctttcccttgactagagggtctacccctttttagaatagcagaaatagtttcactatcaaacaggcaattcattttctgaatgttcgaatctcttgtgtcagtcagaaggtctgccacctttctcacgccataatcaggatgaccattggacttagggtaaaaggttttactatgggtcacccacgaatcctctcagatattggtatctctatcattggagaccactttacaagctctttctctcagaggacactagctttgaccatatttttttccaaaactaggaatctgagttcttgtacttacacccaaaaaactcctttcctttgagatacttggctcttaagatttcacagcaaatggattgattcccgcatagtaaattccacctccacttagctaggaaggctaaattcatctcctttattttacaaaatccaagaccacctctagatttgggaaggcaaatcttattccaggctttcaaccggatacctcggttccctttctcaaagccccaccaaaagtcatgcaccaagccatatatccttgagacaagtctattagagagtttggtggtttgcatcgcatacataggcatggacaagcccacaaatttgataagtgtagcacgacccactttcgagagtgttttagctttccaaccctgtaattttgaggtaaagttctctacaacaaaattgaaatcaacatccttttgtctagatcagaataaggggagccctagatattttacgttcccttccagccctccaaatcccaagacatctcgaatcccttattttaagatctcaggggtatttttactaaagaaaatataagattggagtttgttaacctgttttcctgaccaagaacagaacttctcaaggcaatcccagtatcattttgctttaaccagagaggccctacccaccaagattaaatcatctgcaaaaaaatgtgggaaagagtagggccgccccgagaaagattaatgacttggatattaccattacccatggctctatcaagaagtctcaacagaatctctgtcgcccaaataagcaggttgggggagggagggtctccctgacaaaggccacacgtcggagcaattttcccaacttgaccaccattgaggcacaaattcaaagacgtagttgaaatacattaggagacccaattaaggaaggccccaaaaccccatagcaacacagaacatggtcaataaattgccagctcatcttgtcataggctttcatcagatcaatttaaattgcaaaaaaactttctttgcccttcttcctattgaacaaatgaatgatttcttggataatcacattgttttcatggatgcttctgcaatgcacaaaagcagcctgggtagaacaaataagtcgtgggagtaaaggttttatcctgtttgcaattattttggaaacgaccttatatgaaatgttgcatagggatataggcctataatgttgaactctcttcgggttctgaatctttgaaatgggcactaaattagtagtattcacccccttgtgcatcgttccagaggtgaagaaatccaagaatgcatcaaaaaaatcttcacccactgaatcccaataatgcttaaagaaaatggctgacataccatccagaccaagggccttatggttgcccatagtgaacaaagtttttcgaatttcatcaagatcatggacccatatcagattctccctctccacagaggagagcttaacagtaataatatttgcacaattaagatcttgatctgagccagatgctgagaagatttcactaagaaa

SEQ ID NO: 52892 - DNA, 1714 bp, Cannabis sativa
cccatagtaaaaaagtaaaaaaaattaaattttagtatgtggtataaaaaaaaaacccaataacacatgtgtaaaatggaatgtgactttgcttaaagttgttgggctctgatgggtataatacggtgggactaggggtggtaatttgggttcttgggttgtgtatattgtgtcaaggctcaagtattataagtaaatgtcaaactcaaacttgatacctatttaataatcgtgtcaaaaactaaaactcaaactcaactcagttataaacgagttaacttgacctaattcgttgaacccatttaaatatcaactcattaacatgcttataacccttttatgatatatttatgtcgtatttaactaacttaatacaatttatatataataaattataatataaatatagagatttatgttttggataggtcgttgtcgtcttatttttaagttaagtatgtcaaccaaataataatccatttatcttatcataaaaaatacaacttaaatgtagatctagtcttcataccacatatatgaaatctcataccacaaaaaatgggtcactaatagtagacctatcaatgacgatattttgccgtcactaataattgcgttgcaaaattttaagttatatgtaagcgtatataatcacaatttgtaataattttgtaaaaaccaagtatcgtcctcaagaattgaattacacattatcagtcaatcaactttttggttctatttgatcaaataaaatttagaattttcaagtagataaaataaaatcaattaaaataaactatgaacgaaataacaatgagaatgaatttagaacaaatatgatcatcttatttccactatttttactttttaatgcaaaaaccctatcttctttttcctattcaataaacaagttgcaaagtaatttattttttttttgaaaatgaaatatcaacttcattgaaatttagcattcatcatacataagagctagaagctcatcaggaaaatcaatcctatgaatgctacgatcagagaaaaatcgggatcgcctagcaacaaagtgggcaacgcgatttgctgatcgtcttacaaaacgaatactaacattatttaaagctgacaataaactcttacaatctctaataaccaaaccaaaagtagaggacataatttgattactaaagattgcttgcaccgttaccatactatcagtttccatgtcaactttattccatcctttgtccttcaaccaacttagagcttctttgatgccaagagcttcaaccacctcagctgggtagtttcctccctgatatgtggctcggaattggatgaacgattaaaaactagatgaacgattaagacaaaatcagaattggataagcaaaacccagcacaccaggtcatacgtgcgcttttcagagcttccgagatgttgttttaatgcttccaaggtcttcaaaattgaggatgatgcctcttaccctatttttgaccattccgggggaaatgcttggagcaaaatttgcatttgagtgagaaaaaccaacgcactaggttgattgtcaacctgggtgttgggctcagttctcggccttttaagattctcgttttctccctgagcttattgtaccctcattagttctgatgataaaaaattcctaaaagactttttgtaaaaactccttggaaatgacccaggttgacaaaatgt

SEQ ID NO: 52893 - DNA, 1106 bp, Cannabis sativa
tttatttttcaaaaacaaaatttttaaaaacaaaaattttactttcatgttgtgattaaaaaattagaaaacaaaagtgttaccaaactgcaccttaatttatcatccaattaactatttacaaataatttttttcaaataactaatataagataattaaagaagaaaaaaaaaacaattctatggtaggaaataatactaaatataccaaacggtactcatcatcgacagaacttttaacttttcccatacctttttcttttttgtgcaaaagatttttacctgtgtaatacatctagaattagaaactaataacagagactattcattgaggtaaaccattgggcccccaacagtcaaacccaagaccttgggcccaataataattttttattatttatttgtattgtaaaagtagaaagctttaatcgtagccacccgatttgtactcaaacaagatatatcgtctctctaatccgtctcgatattttcaaactccaaaaaagctactcataatgatgccgtcagattcagttttgaaaacaaggccaagcagaacttgtttagttttaattactataatacctctatacctagattcattcattcaaggttaagaaaggagctaaagcgctagccctagcagacaccacacaaatttattaggagatggcaaaaatattagttaaccatatggatgatggaaggagtaaaaagctcaaagcttacacatgaacatttaaaggaataaaccccagaagaaagcttaaaactaccgccacaaaagacataaagtgtacaaaatcacaaagactaactaaactaaaatataaaaaacaaataacgtatagaacaactccaaagaactccccagggccgctgccaatttatgagaaaagtccacactcaatctcttattgcagttttgaacggtgaaggtgctaggacaagagaagcacaaccctttgggtaagactcgagtcccctcccctctacatctacaacactccgaaaactgatcaagagccattatgcaccggagccaagacacttgaatagaaactcacgagaaaacactgagatctaaaaaaaaaaaaaaagaaaaa

SEQ ID NO: 52894 - DNA, 1036 bp, Cannabis sativa
caatccaagaaagtgattggaagaggtagagaatgcaatgggctatatgttttagatgagactcacacagacatttgtaacaatgttgtgactgctgatgtttggcattcacgtttgggacatccttcctacaaacgtctagctttgctttgtaataaatttcaatgtaacattgacaatgttcacaagcaatctccttgttatgtttgtcctatggccaaacaaaaaaaattcccttttcaaagcatactagttttgctaaatctaagtttgatttaatccattgtgacacttgggggccatatcatatcccttcacacacaaatcacaagtattttctaaccttagttgatgataaatctagattcacttggatctttctcatgaagcaaaaatctgatgtcatgcaaattgttcctgattttttgacttatgttcagacacagttcaattgcaccttcaaatgtttcagatctgataatgcccccgaactgacttttaaagatctttttgtcaaatttggtatcttacacgagtttacttgtgtcgaaactcttgaacaaaatgccatagccgaaaggaagcaccaacatcttttaaatgttgctcgcgctctttattttcaagctaagttgcctattcatttttggacagaatgtatccttactgcagcttacttaataaatcgcactcccacctcctaatcttgcaaataaaagtccttatgagattctttacaatgactttcctaaatatgatcacatgagaaattttgggtgtcttgcctttgcaagtactctcactgctcataggaacaaattcactccaagagctaggacttgtgtttttatgggatatcccgaaggtattaaaggatacaaattatatgatattaacaccaaggaatttcttatatccagaaatgttatttttcatgagactatatatcctttccatcggctcaataataacagtgactataatgatcctttttccaacatggttcttcctaacacatatatctgagacttatgtt

SEQ ID NO: 52895 - DNA, 1270 bp, Cannabis sativa
gtaagagggaaaaaaatgtttgagcttagacacattccaagtagtgtcatggtttataaaaaaggagacaaaagcttgagaggggtcaattgggtgcatgagagttggactgggaagactaggaatccagtttgatgctgataaagggatattggtaccagccccaatcttccaaaccagacctttcttaagtaattgacggccccaaaggagacttctccaggtgaaagaagaattatggccaacaggagcattcagaaaatcaaagtgtttaaaataacgagctttgaggatagaatgaatgagggaatctgtatctgtccacactctctaagcttgcttggccagaagagcttgattatgaaaggagaaggtatgaaaacccaaaccaccaaagaacttagagactgaaatggtagtccaatttttccagtggactttgttagtaccctgagaaccccaccaaaacctagctatggcactctggatttttaggcaaatagatttaggcaccttaaaacaggacatagcaaaagaggggatggcttgaaccacagcctttatcagagtttccttcccagctctagagaagaacttatcattccaagagttcaagcgggaggaaacactttggaggaggtaatgaaaaatggaattggtaaccctgcccacacaatggggaacaccaagacatttgctaacaaaaccctccccagttagatgtaaagagtgtcgaaattgttgctgagattcagcagaggtgtttggggaaaaaagaatagagaacttgtccctattaaacagctggcccgtagctcgattatacatatgaagaatggcattgagggcatcactggaacgaggagtgacttgggataacaacatgctatcatctgcaaacaagagatgtgacaagggttgggctcctccacagatctggatgccaggaaagcttccattcgtttcatacaaacggataggagcagaatgcccctcagcaatcaagagaaaaagataaggggataaaggatctccttgacgaatgccacgggtagattgaaaaggattagtgagggtaccatttatagataatcgaaaggagacagtagacaggaaattcggaataagagagatgaaaggtgctggaaaacctacatgaaaaagcaatcgatgaagaaagtgccattcgaccctatcaaatgccttctccatgtcaagtttaataacagcccaacctatcttgcctgaacgtctagagtggatagcatga

SEQ ID NO: 52896 - DNA, 740 bp, Cannabis sativa
ataaaaccggtttataagctcttaaacaataaaaactgaagaataaaaccagtttcataaacataataaaatatatattctaaaagagtataccctacaaaacattacaaacatttaaaaccagatacattatttaaataaagtaaatatgtcataaaagatgcataataaaatttaaaaataaacacataatcctaataactaaccttatactacaatatctccaattgactcacaaactaaaactagtttaggtaatatttgatcaaacaattggagtttttttttgtaaaaaaaaaaagacatgcatttcccttaacaaacaatctcaccaataattttaataatgttttctgcattgctcttaacaaacacatgcaccaataagtgaaaacaaacagaaaatactttagaattagtacaagaaaatacttgctgttaaattgagaataacaaaataaatagaagcacaacaacaaaaaacaatacctcacaacgatgaaatacataaaagggatgggcatgtcaaaatcaaaattaaaaatagaaatttcattgaaacttctttagagcaattaagttcgctcaatctgatttttttttaaatgaaaaccgtatcatgtttgtatttttgaccaagagataaatgacatcattatattgtatttaactagttatggtggggagagataatccacaacaaaataaaaacaagtgagattcattttattccaacaata

SEQ ID NO: 52897 - DNA, 1462 bp, Cannabis sativa
ctctagcagccatgatcaggtggatttctcgggttaaaacatcaattctttatacatgtaactagagtattattcaggccttcatatgatgttgtttaaagtgtaaaaagtctagttttatgcaatacaaagtatctgattcagcaaaaaaaaaaaaaaaataatccattaatttttaaactttatgagttttaaaggctcataatccattgttgctggtatcaactaaaaattattatgtgataatatattctttctttgcgcttatataattgaagaatgcactaaatatttgttttttgtacttgaaaaaaataatgacctaaaatttcctctttatttattatatatgaaagccaaaacttattatcgaactctatatttttataccattcttattttttagtttattataaacactatattgttataagattatttttgttgttgttgttgtttaagatctctaatttgtattattttgatcaatttcagcatgttttatagattttgaaatttcaatttttttctccctaactatataagaaaatatcttttttttgttctctctcttttttttttttatattgatatggcattttaatagattttacattatttttattatattcattttaatttatcagcaaaaaaatattctctttttcttattttgtgaaaaaaataccattaaatttaaacatgtttaggtgtttattttgaataattatttaattaaattaaaaaatatctttttaagaaacttataatatatcttaataataaaaaatatcaatatataaataaagtgatggcaaaatacttgaataactgttcaaaatcgtatcttaatttatttttcaaacatataataataactaatttatttttcatataataacaattaattaattaattacttaaaacaaaacaaaaccaaaaaaaaaaaagagactactatataaaaccctaaaacattactaatcatatatgtactgttaattataactttttttttttttttttttgatgataatgtgtgtcattaaaaaggataaaaaatttgcaccaaaaacaacagcaaaaaaaaagcagatatatacatgatatgtttttaattctttttctttatttttttttaattataactaatttattcactctttctccatctttatttaccaatatagtcatctatatgcataatatgttgttatttttttttccattgctccattaatttttttttttattttcttttccaatgtgaaaaaatttcttgcaaagagttatcatgtagtccaagtgtttgcattccatagaaattgaaaataagagtcttttaacgtgcattgtgtacattatctcaataactataaaacatgataaactataagaaaaactttggatgaattgacttaaaattggaatgacaaagagtacataaaaaaaaaaaaaaaaa

SEQ ID NO: 52898 - DNA, 883 bp, Cannabis sativa
tgagaaatcggtgcagcatttcgagtgagtttgaacccagtcaatcgcccttcttgttcttcaaattgtagcaatctcgaaaggccctcagaacagataagaaataagtatggagacaaggggcaaccttggcgcaatccacgagttggaatcaaagatccagatacctcaccattgacattaaaggagaaagtgtttgttgaaagacaaatcatgataagttggatccattgttcagcgaagcccattttcctcataactgcttgaataaagctccactcaactcggtcgaacgccttactcatatccaatttaagagagacaatacccttccttcccgcagttctgttcttgatggcatgaacaagttcgaaggccactagaatattatctgtgatgaggcgattaggcaagaaagcactttgtgtttctgaaatgacatgtgggagcacaactttaaatcttgcaacaagaaccttagtaatgagtttagaaatcacattgcagaggctaattgggcggtaatccttcatgttctgaggcttcttattttttgggattaaggtgataatggtgcggtttaagggagttgggtcagctccttcattaagaactcccaagactgcccgagagactaaatcccccactaaatcccaatgttgttggtaaaacatggcggacataccgtcaatgccgggactcttatctggactcatactttgcaaggctgcatcgacctccgctcgtgtgaaaggctgagtgagaccgtggttcatatccgcagagaccataacaggaattgtatcaagaacagaagacagtgcatcatcatccataggagcagcttgaaaaatattctggaagtatgattcaataacagaga

SEQ ID NO: 52899 - DNA, 1209 bp, Cannabis sativa
  modified_base (333)..(337): a, c, t, g, unknown or other
aactaaaaaaaaaaaaaaaaacataaatttgaacaaaaataaatagaactacttaaatacatactaaaataaattttaaaaatacataaaaataaatcaaacactataggctataaattttttactaagttatcttaaaaacaacattccaatcataagtaactctaaaattaacttaaatacgcattcttattaatttttccatatatgtgttttacttagacttttatatattatcttttaagtattgttattagtaatcttacacaacaaaaaacacttatttttagtgacagatttttagttacaatataaatttttttgtgactaaannnnncttttagtcacaacaaaaaattatgtacttgtgactaaatcataatatttagttacaataagtattgtgattaaaaacacatttagtcacagatttttagtcacaacataggaatggtaatttgtaattagtcacaattttatttttaatcacaagttttattgtgactaaaaataagattttttgtaattaaagtacttaatactacaattatgtgtctcctaatgttactgctttatatttattgttattaatagggtctaattctttcttatgtttttttttagtgcaagttgtttgtatttccttttatattttatttatatgttagtattattataattttcatcaaattgtagtactttaatctttttcgacagtttatttatattaatatgtattaatttatatagtagttttatttgatatagtcaaatgttttgattacttatgttctatatatatttttatttttatttggttagtttgtgtcataattttttggctagtttgagccattttgtttagctattttgtatcatattattgggtttgtatgttgttgactcgtttgcgcattggaggcaacctcaaaaaattcacaggataagtttttaaattttgcttttaattatattttaataattttgaagaaatttttgttctattattttatatcattattttcttattatttatttgttagctaattgagttttgttacctctttttaaaataattaattttaaatgggacccatcggaccgctccattctctcggaccgcccaaaagtcgcaccccgaaagcccactctctcttcctctctctgaaatcgcagaaaaaaaaaattgctcccaggtccgatggtcgg

SEQ ID NO: 52900 - DNA, 1199 bp, Cannabis sativa
  modified_base (1117)..(1121): a, c, t, g, unknown or other
agttttatctttatcctttatttacaatgtagctaaagaagcatgcttgcctctttcctttagttaaaagtttgcccatttagcatgagaattaactgtatgttggtggatataaatgaaaacatgaacttaaaaagagaacaaaataaacaaggttcactaaagaatccttataacacaataagttcaaataatggcatatcacatctcgagataccaaacacacattaatatcaagtatttggacaataatattaactgtaagcggtactcttgttgtagcaatcaaatattgacaataaatcctgtcaatctttggactgtacatattgttcacatagaaaccatataattatcacacatttattactacatgtatgtgtgcactcaaaataagtataaccttcctttgggccgatcaatacttacatgaaaaatacacacacaaacctctaacattcctcatgagtaatctacgcaagagaaatttctttggcgacatcatgtttcaatcaatccatttagaatgaaagacaaactttagtattttatttttagaatgccaaatttaaacttaaaacaatccaaaaaaatattcattcttatctttaaattgtccaattaaagaaaatccttaaaaataaatctgtaaactaataacaaatattttgcatctatatagaaatctaaatttatatgtatgttgaaaactaaatttactttattatagcttttaaaagaaaagcttcaccaaaaatagcccaattacaaaattccaaacataaaatttatatgtagcaaactaagcatggaccttactttgacattacaccataattcaagatgagttacaaaatcaccacagagattatctctacaagatggattaagattatcactatctatggattaaagttagtttctgctatttggtttcttctctttgaatcaacaaaagtattctttagatctatattttttacacttataattatacgtaatatgtttatctatggagttgaatattgatattacatatttaatgagtgataaagttttctaacatacattagattgggctgatatcactaattgatcttaatcctgagatggttannnnngatctcaattgtattatttatgttcttacagcactccgtgaaagctaaccaatagtttgttggaatatttattttacc

SEQ ID NO: 52901 - DNA, 837 bp, Cannabis sativa
atttgcatagtacattagggtttataagttaaaagtttggctcactaatttgtacaaaaagttacttttcaaaaatgacatataatttttctaatttgaattttaagattattcatattttaactatgaaaatgcaactggaatttttaaatcagataaactagttatgcgttatgctcgttttaagtcaaaaaatttgcatttggccactttgcccaaatagtttcgtgcacaatggttataaacgactactttcttccaaacactgtataactcatttgtatcacattatgtatcacattattgagattgggttgagcatctattcatcatataatatcattctaagcattctaaactaaaggcttattatctttttgtatacacaccaaccacacagagccaaacttgttcttatcttctctagtgtgcttacaattctctctaggatttcacattatattcatcttattatagagaatttgctttgtatttcaaagtcacatatccattgtattgagaggtgagattgacaccgatagaaaaacaactcggttgtaggtgaggttaacatcgattttgtaaataacatgagaagagtgagattgtcattacaacaattcgagagtgagattgacactccaacaatccaaagttgatagtcctttagaaagctattggttgaggtgaagttgacaccagtggaaaaacaacttgattagtgagattggcttttcaataatccgatgaggttgacaatcctttgaagaaagctattgtgagaggtttgggaaagaccttggtgaaaagttctccgattgtaagggttagtcaagc

SEQ ID NO: 52902 - DNA, 728 bp, Cannabis sativa
atagtcgtcaccaaagctaacaaatctgaataaactgtacgaattgggagaccacacaagtgagcccagttgagtccaaccaactgtgctaaagtttcaacctgcaaaactgaaatgccacctgaaaacagcaaaaaacagaataaagctttaattagaaatttatcaaaatgaccagaatctaccaaacagcaagaactaagcaaccaaaaccccactataaaattactagaactagcaaaggtagcaactaaattatagtactctacttcttaaccttcttaaggtcactaacctttactaagaccctatcacctcaaatagatttcaatatgtaatctagtaaaaacatgaacctaaaccctaccttatatgtatattaaaactaccacgtggaccaattcaaagggttgggaggttctagaatcagagatggaatatggtagtttgtgacttttaccccttttacatgcctcacagtaggggtgagcaaaaaattcaaaaaatcgaccaaaccaaatacactaaccgtctgaacactgaaaaaactgataccgagaaaaccgaaaaccaaaaaaaccgccttcggttcaatggcaaaccgaccgattaaaccaataactgaccgaacatatataatatatataatatatattacatatattatttttgtacatatttaatatacaattttactaaactagttttttatttaaagtctcaattat

SEQ ID NO: 52903 - DNA, 1291 bp, Cannabis sativa
aaaaaaaaattatataattagtttgataataacacttccatattatgttattattgagtttggtcataacacttccatgttagcttaatttgacaaaaaattagattagagcctatgtcattttaaaaaatgtagaattttaataatttttgtaaaatacaagttcaaaattatactaactcttatattattacttgatttgatccattgagaatatattaaacagaatcccatgttatcaaaatctgtctttacagtttacattttaaaataaaagtgttcatcaaactatttatactgcaccacactacgtaaaaaatacagtttaaaatattttgtggtacgattgtgatttgtatttttgtcaaatcgcgtggtgcggtacaatttgcaattttaaatttaataaccgcaattcaaatcgcatgcactatatattataaagttatacaacttttgacaataagatttctattcttttatatataagaacaaatgtttgtgtatattatatattatttcttagattaagaatccaatataatgacttgatgattagtatatctgttatgatagtaaaactttaataatatttttttgtattgtgaaaactttattagagtgatttttaaatttatattataatgttgataattataatagtgtaaaccgttcaaattaatgagatatatatttctaaaaaaaattataatacatttttttttatgaaagattgttaattttcgtagactttttatttgttttgtatttagaaaagttttttagtcgatttttttcatgatcatgtatgttttagtattttaagagcacttgcaaatttttttgaagattttttgaaataatttatagtattaaaattaataaaatttaaatatttatttaccatatatataacaaaaagcagtcaaaagtatgataaaatattatttaaacattattttctgtatggcagattattgagaatttttaaaaaaaattatagattaacctaaacaactacaacgtatataattataaaaaataaataaaaagtctcgtaactatcaaaatagataaaataatgaaccataacaatatttgtaggattgtactaagtatttaccgtatctttttatttattgagaaaagaaaaaggaaaaaacaaacacagaactgttgataatatttgttaaatgtaataagtataaccttttctgctgcagacggtttctactctagtgccattttatatagaagagcatgtgagaagaaccctggtttttggaatggt

SEQ ID NO: 52904 - DNA, 978 bp, Cannabis sativa
tgagaatgagtatactagtgattacaaatatcccaattatgcatcgtggtagtaggttctagtcccagccaatgaggaaactcaggactacgaggctcaggcgcactaccttcacaatgcaatcccttaggaagccgaagaaggagcatcttgaggtaatcaatgcggttggtgacccacagtgcttagggctgagtgagccacgttagtgtctttttcgggatagctgttatgatttctacacttagaatcccctcctcaagatcgcattgcagataggtttgatagttggtaccaagaattgtacgtctaaattagatgtactaactcgtataatgggatagccgagcagtatgggaccatgcttgatagggcaggtcatatagatgcgagctgggatttagagccaattaattcctatgatatattctagatcacgggatgtagagattttagtggttattatagtcctctctcttcgtcttcttatgattatggtaaatcccttaagtgggaaataacttcccaatttccccttttacttatttttaaacaagtgctaacacattattttgtctcgccgaaatgaatctcgaggatctccttcaatcatcaagcaagaagggaaagaaaaggttgacctcctcagagaattcatcagatgtcaacgtggagcctctcaaaaggcccaggaagacaactgccaataagaagtgagctccccaagtcgtcgatctcgaggtccctgagactgagactcaggttcaaacccatcctctagtccccacacatactgaagagtccattcccaaggcaaatcaagttgttgtctcttcgagccaagcacttaagactctacctaccgaggctgggagtgttgggaaaattttacgaggatcaagatttactaacaagtatgtttaattaacatcctaaacatgaattctctaaaacaataaaaataaacacataaggttt

SEQ ID NO: 52905 - DNA, 1534 bp, Cannabis sativa
actggcatggtggcattatcatggttttggagcatctagccgtctcagtcattttttgtcaatagagatggagcatatatattcagggctccaaagaagtattttatacaattttatttgtatagctttatacaaactatctgtaattttatattaggatttttacaaccatatcatcatctatattggaaactgtaagatctaatgaaaaagttgaattgcttatttcatttatattgggtttcttacttaattaattcatttttatttgtttgactttcatctattatgtatttatagtttttgtcctctttatatcatcatctatattgggctcttacataaactatataagttacataatgattagtacttatagtgcagagattgaagaatagtgatattatatcattttcatttatagatctgatatgtgtttcataatacttatatagtttacatgtttgctatttttattgttgatggtaaaaagttggtaagtttaataatttttttttaaagattttttattgattatgtagatgggtagcttggacataagagaaagaatcgaagtgacactgactacatgtgcgataacctcaattgacacaaagtttttcattgcatttgtcttggtaattggttgtgctcaattaccacaacagactgttgtgagatcttttctccaactccattttataattattataccattgtttagttcttaaattttacccacattgttagattgctttgattgttacagcagataccataatggatttcaactcaaatagattttgtcccattctttctatacaaactttttatttttttcctgccttccctcttaattgttatgataaacttcatattattgtttggtttttttgagttaaatatttgaaaatattaattgtcaaaatatcttagattttttattagtataatagttttcttaagtgtaatttaaaaataaattaaaatattttataatatttaaataattattattgaaaaaaccgtataaaaatagagtatgtaattatgattactcttatttttcttttttaaaatttttatacaaatattttcttcaattattaacactttagaaataattttttttcctcctttttgtaaaatttacccaattttaagcaatgtttgctttatgaatttaacattcaatttcttttttggaataatttacgaataatttacaattacattatcataatttctttaaatctttttttttatacaatactactaatatattgcataaagtatttatatttaggttgtaatactcatttacatgtattgattaaatataaaattaacactacaaaatagttaatattattaatttttcttgtcttaatcactctatattaaaataatttaattagaccaaataataaattataaattatataattattttttgtatcattttcaattaaattatataacaactaacgtaaaactaaacatacgtgccttgcacgtagctttttttctagta

SEQ ID NO: 52906 - DNA, 764 bp, Cannabis sativa
aaaaacaatcttattataaacctttatgaacatcatggtgtgggtgagtttactttctcttttatattctttatcttcttaaatatgtttacgtgtattatatttagaaagaaaaaggcttggtattcatttatgtgacatattataacatttccaatacaaataagtataataaagttttagtattttattggtggatatgcgaaactagtggatgtaaaggctagagaaagagatacaattacatcatacattatattttgggaaactttattttaattattatcatcaataataatacccccttatataataaaaataaataaataataccccattatagtattctataatagactatacaataaatatatttatagaactattgagggcaaattaggattttaagagcatgataggagagtgacttcttatcttaattaaattatcaaagtatcatttatttatttatttatttttttgttttttttttttttttttgaaattgaaaagaggagagtcgaacttaagacctcctctttgtaaggagaagtacaaaccactagattatgcttatgactacttatttatttctattttgatatttcgtatttgtatttattgtgtgaaacagaaacaatcaataacttacgacatagtatattgtacaaacaaatatgcaacataatcaagaactattatttgtgtttcaagcactggacacgtggattctagatcagcattcaagactcatcagtgggacc

SEQ ID NO: 52907 - DNA, 2000 bp, Cannabis sativa
ttttttatctttattttactgaaaaacgttttttttttcagcctaatttgatagaaaaattaagcataaaaactcaaattttcctaatactacccattcatgggtaatacccattcatatatatatatatatatgggtaatatatatgacgaaattatactaacttttacttaactaaattttaaaaggtgataaaaaaatttaattcttgtttgttattaggttcatatgagaaaatatagaaattagagttttattaaataatttagttgtaaaacaaaagaattctataagggaaactgaatcctgtcattattttatgttgttgtatgtctttagtcaaaaatattgtgattacccaattcagtgttgcgttcttaatgaccatttatcaactctctttatggctaaatatttaatgtctatgtgctagctaactttgattataactattatagttcttagccatagatattgtagctgaatttgtcgcaaaattttattaattccctgaacatataattccgaactctaggcctagtatgtatgaaactctataatacacactattagatgtatcctcaaaacaataaatgaatctgacttctataatagaaataacatggttcttcacaatacaacttactagtaatattaagaacgtaatcaaatgttgatttacatgaattaatataaccagtgaaaataacttaagtgattaattaaatttctaaaatatgagttcatctaaaaaaatatatgtacgtatgtattatgaatgtaatctttagcatattaaaataccttatcactttgtatgtaattatatgtggtctaactcaagtgattaattaatctgatccttcttaattttcctaaaacaaatgcaatgctaggtcttataaaaacttaggcatatatttggcttctgaaaatagaagcaagtgaatgtttttaatttattctcattaaataaatttgcaagatgttggtttgagttggatttatcactcttaaagataaaagtaacatgatgtgaataatatgtaattttatttaatcagagatggtgtgactactctctaattaattaaaattatagaaatatcaattctactatttatctcaaaaataataatttagaattaattatttcaccttatatatatataggaaacttttatcatcatttgcaagtaatatatcctccacaaataaaacaaacattactctcacggtctttgtggtatatatataattaatttatgattttcttttcaaaactaaatgaaaagtttacatgaagaaatttcaattatgagagatttattttattctataggtatactctttaaatttcatatgttcaccaccatttgagaaaattctttatggttgtctgtatgccttctcctctaattcactattttggaattgattaatgaattgaaatgagagcaacaaaagccaagtttactataatagaatcttttattaaaacaagtgagaaagtaaattttttttggtgctatgaattgtttctcgaacattgtctacaaattcttccaattacgacttgatctaggagataatcttttccaccaattctctgcggactttgacagagttaatgaaaaccaaaggtactttgttccattactagtttttgctacctgcatcattaggctgtacttggatagatggtccctaaggttcattcctgctttatacaattcaatttgaagcattctgaagtgctccaaaaactatgcatctgttatagtgagaatttttcacctaaaaacttgagaccaggctcctataataatgacacatggactcactctcctcgaggagggctgagatgtcagtgagagacctcttgagtgcaagcctcgcctgaagcagatttagcgggatgatgtgaccttgacagtgtctagtcgcattcgagtagctcgcatggagcaggaccgaagatcggtttaagactcgcatat

SEQ ID NO: 52908 - DNA, 4475 bp, Cannabis sativa
ctacccaggctgttgggcaaaaagcatgctcgagggtgcgtacgcgcactaccatgatctagcacaggggacaagatctgatcctctgtcaaaaaaaggtataaccctctatagagtgctattttgcaaggagctaacatgtccaatgtctccagaattcatgccgccttgtgagatccgtaacgaaggatgctgctcttggaagtcattgcctcttgctgctaggtttgggagtcatttcttttaattcccccggatgccttatgtagagaccgtgttcacctctttgatcgcgctacgtgtctgattaataaaaatttggataacattaataattatataaaaaaaatatatgtgaaaatattcaactctaacacaaatgccagttaaagttatgtttagttgggagaaataataatataggaattaaaatgagaataagaataagaataaaaattaaatggaatcaaatttaaaatgaaaggaaaaaatttattaatattttttcatcttgtgttgcaatggattttctttcaatttcaaaatagaatagtcattccaataaaatggtaaaaaattattccatggaataacactccaatactttaaaatgcaactaaataaaagaatagttttcattccatttcattaaccctaaccaaagccaagatccccatcttcccagataaaaaaagaagtaacatttagttgggaggaataaaaatatagcaataggtatgagaatgggaatttgaagaggaattcaactgaatggaatcaaatttaaaaagtataaaaagatttgataaaaagtttattaaattgttttatattgcattggaatggtcacttcttttatttcaaaatgaaatagtcattctactaaaataatagaaaagtcattccacatttcaatattttaaaaccatacaaagaaatgaaataaaaaatatttctttccataccatttcattacatctaatcaaatgctagatctacagattggtcttctgaaagtagtttattagagattgtcttaccaagtaattagccaaaatatgtgtagcacaaacaaaaaactggttacatcgcactgagcatactgtaagtggtgaaattttctgtgaataaagaagagaagatacgcacaacttgatttgacagtcaaggaattgaccctttcgtgatctctgttttccattttttttttctttgacaaaccctttagtgacctttgtgatgctgctttaacaagatctgtatcaatgttggaataacaagtgttaatcaattacatgtagatgaaatattttctgtgtaattggggtccatatgggatcaattgtctgagttaaaagtgttttaataggctaacctaataatagcggtttggagaagctataaatgaggaaattagactctataccctttttatattgtcttttttcatttttaccgtcctttttaaagtataagtattattattattttattttatttttattttacctttttttttaaacactttaccaattttgcccttatgactttaatatactttccatgtaattcctttatttcaaagtattttggatacaatacatataaaaagaagtatgtttcaattaaatataaattagaggtagatttgattaattgataaatataaaaggtatttttcaatatacccctataaaccattctatttttcttttcgggataattccataatacactattttttataaaatttttacatttttgcatttaaagattttttttaacatttttattgtgttctataaaagctatacgaaaaatacaagaaaattacgtaaaagtaacagagaaataacatctgaataacatcaaaacaacaacaaaaaataacatacaaatgacaaaaaattaaaaagagtacaacataaaaatacatcaaaagaccttattttatccttattttatgtaactaaatcaccaaaattgtaaaaatatttaaaattctatacaactgtatttttgtaattcttttattgtttttgtgtatttgtgaaataattgtacaatctaaccctatttggtacaatcatataggggtggattgggttgagttaggttcattgagttgtgatgaatatatagcctttaatatttatattagaaacatgatgaaatgatttaacctagaacatacaaaaaaaatgatgcatgtgaatatatatatatatagtgctttaaaaacatttaaagtgatggtgatagtatcattttatgggtagcaaagttaataagaatgattgattctcatgttatattttttggtagaagtagtaggataactatggactacacgttagtgatgtgttttaattaattttcttgtgagaataataatgtaatttatttataaatgtatatattttgtgaatgtaaaatgtattttatgtataaaagttgtctcaaaaaatgggttgcattgggttatatagtgttagactgtgccaacccataaccaatgcataattatatggtgtatcacttttcagcccgatgagccatgatctattcttaacataaccctttacaacaaaaaatgagttggattggatgggttgaacggtttggttcatattttgtgaacatcaatgaaacaaagttagcaacttcgcataccgataaggtaaaagaacatgcaatcatcagcctaaacttgagaattgacacagttgcaaatatttttgaatttgagttttaatcttttgctgagttccactaatgggcgtgggcacacatattttttgtctactcgtagcaaccttttttttctaggataaaaacttgttattataaattaaacagataagtcatttacaataacagagtttagagatggaggaaaagaatccatccaaaagcaagcttcatccaaccctaaagaatatttaggtaaagaatgagcagctttgttagctgttcgtttagcatgtacaacagatacacccgggaaaaaggaaagtaagcaagatacatcattcataagatcatttaaagcagagatacaatttgatcggccatataaagcattggtaaccatcatagcatccgtttcgacttggcctagctgtagatccaattgattggcccaaagcaagctgtgaaaaactacctttgcctctatttgatgagatgcaaagtttccgaggagaggcttcgagaaagcagcaattacagccccctaacagttcctgataacagctccaatgcccatttggttattagatgcatttatggcagcatccacattaattttgaggcttctgggttcaggtgctcgccaaggagagtccggaaccggtgctggtggaggattctggtttgctgtagcttcaggaggccgaaacttagcttgagcatgctgatagttggacaagtaattggtagcaaaagatgccaaaagtacaacagacttagccttgttaccatgaaggatccggtttctctctgtccaaatggaccataaaatgcagataatgttttccatttcaagcttggaatgaagggtagacaagtgtactaaataatcacccttattcatttgtgcagcaacattccagtcaaaaagaaaccctgtagcctgccagacagcctttgcatatttgcatccaaagagagcgtggcctactgattcccatgcttgtcgacatacagaacaggtagaatcggtgatgatatgtcttcgtactagggatgtagcaactggtaaagcatcatgaaatactctccaagcgaatattttaattttatgtggcagctgtagtttccaaaaatatttccaccagtttgtaggagaatttgaggtggaggagagatctgaatcttcaagagaagcagcatgatgatatccggaatgaacattgtagatccctgaagtatggtggtgccccagatgaggtgatcatttgccaagaaaagtaactcaatggaatggtgagtatacgatccacatcaatacttgaaaaatactcatctaacagctgcttgttccattgccggtcttcagtgataaaattggcaacaacagtgtttggtggtccctcataatgggatggttaaaagttcatatggcatgggatccacggatcggatgcacaattgatgtttttgccttccccaattttccatcgtaacccaggttgtaagagttctctgcatgaaggataccttgccatgagagaaggggagtgaccatgaggagcctctaggaaagaattgtgtgggaagtatcggcttttcaatagtctactcaaaagagatgatgggttgtcgagaaatctccatgtctgcttggcaagtagcgcttgattgtagtgtatgaaagaccgaaagcccattccaccatcaagtttggttttgcataaaagtttccaacttcgccaatggatttttgttccattttcattagaaccccaccaaaa

SEQ ID NO: 52909 - DNA, 759 bp, Cannabis sativa
agaatgtctccacctgcaaaagacaaatttctcgagctccaatcctagctgtcattttatcaaccaaaacactacattccttggccaaaattcttttcacacaaatagggatccccaagtacttgaaaggcacttgactcttgctaaaacccaaggcttccaagattctttggacctcccttctatcacatcatctttttcattacttttggcttgcatttctgtaatcctctgctcccaatcctgggcagcctgtagtaggttaacattagcccgaccgctagtcctacctcttcaccctctacctcggccataaattttagtgggattttgacttccctgatcgccatttgatccgaccgtgttgccttggcttctagtatttcatcgggcatccattttattggactagcctgcgaaatcataagttagcctagtcagaccgcgatcaagattaaatctaattttcacttacttgagaatttaaaacatgtgcctatttagctatcgaactactaacatacatcaaatcattcctttcttattcacatattattaaatcaaaatactaaagcatataaaggcttactaaactatgagtcgagcttatctctgatgatgattgtacatatcgtgacgatctttgatttagtaaataaatctgctatttgattttctgtctccacatatctagtgtcaagtcgcttggctactactctatctcgaacaaaatgaagatccacctcaatatgtttagtt

SEQ ID NO: 52910 - DNA, 3712 bp, Cannabis sativa
  modified_base (3662)..(3666): a, c, t, g, unknown or other
cctggtaaaattaattccaacacggccgcccttgaggtcttctatgaattttgaaaggctaaccccataggaaatttgattacgttggtcattccaaaggtatgtatcttgattactgtgcaggtcagagggcctaagaaaaccttgaggcaaccacttctacatttctaactgaccagagcaccgaaactcctactgctgaaaatgttgaacctctggcccatacagacaaaacagatctgtacaaagagcctaggacccctgctgtctaaacatttttattctttttttttatatgtgtctgttcggcccataggcattttttatggacaaaaataacctgccaaacagtttttaaacttgggttatatttttcattttaagataactggctaaccgggcagcttttaacctcgggtttaccgtgctttgttatctttttcaacgattactatcccttttcttgataaatatctatgcaactgtgtttgttttttttttttgagcttgttatttacttttaccaatactttgcacgagtataattgcccccccaagtgaccgagcagtctattgactcttggtcacttatatttcaagattatactttttgtctgttcggttctttggatttgagcagaactttgtatgcatttaatggtaaatttataacttgctaatagaattgacacaaacagaatttaaatatccatctttattcattcattggtcagaatatctttattactgtagtaacttacataaaagccaatatacaatctaatccgatcattcgctaaatttaaacaaaacaaattgcacttaaaaggaaattgtactttcaaaggtggcggtcatctgacctgagtacttagtcatttcatccgaacccgtaggcagcatctgcccaaaaggccatttacttaagagtaaatgttctttggttttgtacttaaagtggtcatccgacttggtacgtttattgatagtattttttaaatgttccccattccaataccttggcactagaacgagttctatatttttgtcatgccgcccaagtttgtatgctcctcattctagaacttcgatcacctgatgtggtccctccacgtttggtctgagcacaccaaccgtgctgtcttttgtgttcaaaaatactctttaaaggaccatatctcccacaaaaaatttttgtgcctttacttgcttgttgaagtactgagccacttttagttgatgggctaccgactttaggcttactaaagaattcttttcttcaatttcgtcaagtgattctgctaggagggcatgattagcctcttgatcataggtcaatcttctgtgggatggaggttctagttctacggccaacatagctttatagccataggccatagcgaatggagtttgtccagttgctgttttttcagttgtccggtatgaccataatacttctagtagttctttcgaccagttccccttagcttcttcaagtcatttttttaaagtatctttaagtgtcttattgactgcttcgaattgaccatttgcttgagggtgtgcaactgtagagaaactttttccaattctatggttcatgcaaaaatcagtgaacaattggctgtcaaactgcgtaccattgtctcagactattttgtgcgggagtccgaaccgacatattatgtttttcattacaaagtccaatactttctagatgtaattgttgccaatggcttggcttctatccactttgtaaaataatccactgtgaccactgcatattgtactccccctttagctttaggtaattgtccaattatgtcaattcgccaaatagcaataggacaaggactttgcatctaagttagctcatcgggcggtgcacaaggaatcttggaaaatctttggcatttatcacatttcttagcataggcctatgaatcttccatcatggtcgcccaaaaatatccttgccgtagtattttctttgataggctttgcctggctgcgtggttgccacagaatccatcatgtacttcagacagaagttgtgcaacttcttcttatgtaacacatctaagaagtggcatggagaatccccttctatacatggctccatcgatgatgatataccgtacaactttccttctcatcttttgagcttcgaatctgtcatttagaagttctctagtattgatgtaggctactattggtgtcatccagttcggagctgtatcaatcatctcaatttctttcgcacaggtgatgctgggttcttcaaggaattgaattgggactacattagccttatctgttatattgctgctcgcaagtcgggctaaggtatcaacaattgtgttttcttcccttagaattttcctcagagcgtaactcttaaattatgcacgcagatcctgtatttttcttaaataggctataattttctcccctcgggcctcgtactctcctgacacatgattcactaccaactgtgagtcactacagatctggatgtgttcagtgtgctgctcctgagcaagtttcaagctagcaatgagggcttcgtactctgcttcattgttggatgctttgaatttaaatttgactgccccatgcaggtgttggcccccaggtgtgacaagggcaatacctgcactaaaaagttgatttgtagctgacccgtccacgtgtaatttcttggtaggtctgtcttcattattgttcagttgagattcttgtactggctccaggttgtccttttaactgctttcttctttgcttgtgcactcaactacaaagtctgccaaggcctgtcctttgacttgtgtttagggtggaaagattattttgcactgacccaactctactacctttttgagtaaccttccagaagcgtttggtttttgtaatacttggtgtaatggttggtcagtgtatacccaaacaggatgagtcttgatgtagggtcttaacttccttgttgctaagataaagcataagtaagcttttctatcaatgggtaccatccttcaacttgaacaagtcttttgttgatataatagattagatgctagacattattttcatctctgatcagctcgtcactcacaacatcaatgagacaccgtctttgccccatcgatcgatcatctctgcaaaagaatcgtcttggtaacttgccataatattaccatactaatagacattgttattattctccaaactttctgcaaacaacaaattgaatcacattagaaagtccaaaaagagtatcatagaaaatgtaatacttcatcaaactagtaaaacaaaattatcttttcgaatactttacaacaaactgccattatataaaattataattaaaagtgtaattgtaatgccctaaaaattaggcacgctacaccaaccgattaagaaaccctaatcccctaaatcgggattactagaaagataagcgtgggaaatttaaactttatttgaaacagaatgaaaattaaacttgtaacaactttaaactttacaatcaaaagatacatttttcgggatcctgtaaatattttcataaaaatattacaagttcattttacgagccgacctaaatggcaaaattagagttacaaaatacatcaccggtagaccccaacccgcttggtctnnnnnggcccgaacatgtacaagcatcgccaaggtctcgcactcatggcat

SEQ ID NO: 52911 - DNA, 1653 bp, Cannabis sativa
ttaataatttttagaaatactctttattgtaagaatctaaaaaaatttttacctactacttattttaacttagggccggttctataaaaagtattgcatgatgtccattgcttgatagacatgttatatatatactaatgaataagatgcctgaaatttcaaaaaaaaaaaatgaataagatgcctgcactttaaaatatgtactaaaatattacacttaatgtgacactaaatatatttttttttttttaaaaaaaaaggtatggttatttgaaaaacctgtcagatttagtgtatatttcgagtaaatatatatactaataatttactattgaactctatatattaaattttaattaaaatgtgtgatttataattagtttgcaccaacataatataacaggttattgtttgtattggacaccagccatgcgctttcaaataatatacgtgtgagattctgctacccttatatgagaaattaatccatgtatatataaacatacccaatttatatatatagagagagagataagtatttaatctgtatttccatacccaatatgcagcagtgaaaccagcaacaccagaagacaagtgaatgacatatccaccagaataatcaataattccattaacagaaaaatacccattagtagaccatatactgaaagccacaacagtatacgaaaacgttagccatagaggaacgaacaacatccaagcatagaaattcattctccccaacaatgctccagcaataagaatcaatgttatagctgcgaaaacaaactgaaagtacaccatagttgcatttggtatcattccaagaaacgctctctggaagaagtatttctggtccaatgcaacattggcttttccccaaagaggaaatagtttgtcaccaaaggacatttggtaaccccaaccaacccaacaaactagaacgcaagcgaatgcgtataaaaccatgaaagccgaatttacagcccatttctttttcaccgcgccaccgtacaaaatgagcagccccggaacactctgcatccctactaatgttgccgcggtcagttgccacgcgttgtcggctttgttcatccattctggacttgcaaagtctggaattaggttagaaggtaatggaacggtggcattgagattggccattttttatatttttcctcaaaagataaacaaacacaacactactacttcacagtactcaagctttgttttgttgtgattttgtgtgtttgaattgttaatgtgtgaagttaattatataaagtgccaaccaatgtccttttaaacatagagttttgtgtttggtttctcaggacaacaagctgtccaattgatggttttttggatggaattttcaatgggaggattctgattttgaagtttaatttattttaattttgttgatttttatgatatttttggtgaagctgtcactgagcaggattctctcaggcataactgataattgaattatgtgtttttattagttcttgacgttattaacgatggtatcttgtttggctttggtgatagatgtgttataattccttgtttaatactttattaacaatgtttaatgatgttgggtatgagcacaaggtaaagaaaaacattatttttattaattaa

SEQ ID NO: 52912 - DNA, 2558 bp, Cannabis sativa
  modified_base (2069)..(2069): a, c, t, g, unknown or other
cgcttattgaagaaaatatatcctccagataacacttgatctctatctgctatgaacctgaaacgcactagaaaaaaactatacgagatcattcccaccttgtcaattttgtctttccaaacacgccttacaaatccatctagaatcgacattggaggatttgccccatggacatagcaaacaatagaagaggtccagaaatccacttcttcttatatatcctcttttgtaattttgacaacaaacttggaatctaggttacgaataacattcccagatcttaggacaggaggaataacttcctttcctcaagcgacaacattcactgattgatgttgagctttactgaattatttagcctccatgaaatgagcgaattccattcgaatctcatctcttccagcactctccttctcctagagagctccatttccgcctctgcaacttgcacttcatcattctcatcttcttcatctgagaacaaaataggctcaattccaaggacttcatccatggatttagtcctcctcgcatccaaagtagaatcaggtccgcattttttcttcttcttcgttggtgattttggcttactctgtttcattgctctcgtcttcgccatagcaccagctcaaggagctgagagaaaactagagagagaaagcccctaagttcatgattcatatttgctctcaaatagtaagaacttaaataatcaaaaattataaaatagtgtgaagacattatatattatacacctttaataaattaaaaaagaaaataattgaaatatgaatttggtgaggcattctagaaacacgataatatcttcatttgatgaagctccctttaaactggtaaactaagttttacaaatatatgctaatccattagaaaattctttatcaaatgtacctctaggtgcaagtttgcggtcttgtgttgtattatattgtattgaattgagttaggttatatattatatttttatataatactatgttaaattttaatttatactaaaactaggtaacaaagccgcgctttgcgcggttgttaattttttctttaaagataaacctatatataattcgttattgctgttattttttgttattgaagaaaatttgataaatatgatatgaaaaaaataaaattcctatgatagagtacaattctatataaagtacataaattaattattagagaatttcttatgaaatataacatgtattataattctagaagttggtttatacacacaattgaattttttatacggatgagatttattacttttgaaaagctacaaataatgaaatattaatgaaaaatattataatagaattaggaattaatataaaacttaaacaagtatatgaaaatattttttttatatatatattcttcacaaaattgtattgatgctactatttaaggtaagattagtggtaaatgtaatttaataagcaagaggcaagagacaaccaaataaataagaattttttttgaactatttggtgactatagaaatacacaaccttttgagtgattcctcaccttcaaaattaatgttatttttatattataaatgttaataagatgatatatacatatatggataatataaatcactaaaaattggataaaatttgaagttagaaaagaagcttgtggtatcaatgtctttttgaacttttttatctacaatattaatacattaatatgtttcttattatttacatttatacgcatgattaattagtgcatgctttttgaacttctttcttctatggataattccacaatttacatattaacattaaaatttaggtttaattgattaattggagcaattacatatagtttttaaagaaaaatagaatattacactttataataagtataattttttttaatgaacacgtattcattattattattattattattataatatgaaaattagattaaaccacaatttttttttcaaaaaaaattgaataataaaaggagaagataacttgcaacaaatgatctattaaaaaattacacacacatatatatatatntatataaatatatattaaaaaaattaaactacctatatgataacttattacttggtctttaactgaaagtttctcaatttactttgatagattttttttttttttgaagatactttgatagacttagaacacgaacattggaaaattttaacaagtgggtcatgtactgatccaaatttactgcatgagaaattttgaatcacataatttgttagtccacatgaaaaggtaactctatacattcaaaattgtttttttcattttgtaatctttttagtgcactataagaattagggaattgccaaaacatctaatatataatataatagcactaattcattaccaaataccaaaatctttcatatttagttcataatttatctcactaaaggcttttggttagtaatacttacaacataaaaattcagagtccaactcgtaagatctcatttgagcgtgatgttctcaattagattaagagcatattat

SEQ ID NO: 52913 - DNA, 3296 bp, Cannabis sativa
tccaatatatgattggatcggatcggatcggatctagataggcctaaaaatattagatgtgatccaatgaacacccctactcttagtgatgatgatgatgagaataagcttggtcagctacaatctatgttagatgcaatactttataaagaggaagtctattagaagcaaatggcttaaggttggtgataaaaacaccaagttttttcataaacatgcttccttttgaaagaaaactaatactattaagtacctaaaggatgaagatggtaatgtgatttacagtccggatgatattgtagattcgatcacttcttattttttgatctttttttttctcagggtagtgaaattgaagctgctgcttcaatctttacttctctgggacctagtcttgaggagtctgatatcagttttttagcctagaattttactgctaatgaggtgagaaaagttgtctttcaacttttaggtgataaggttgtaggtttggataatttaaatgcttacttttatataaaaaaaatggtctgttttgggtgttgattttactaatgcagttctagattgtcttaataagggagttgatttttctgatgtaaattctaccctaattattctcattcccaaaaagcagcatgctaacatgctgaaagattttagacccattagcctatgtactacgttttacaaggtcattttaaaaacccttgctaatagactcaaattgattcttcataggattatttcccctttttaaagtgcttttatatctagtagagtcgtctatgataatattcttattgctaatgagcttattgatgtcattaataatagaaaagttgggaagagagggtggactgctttaaagcttgatatggctaaggctgttgaatagagttgaatgggactttctcaggaatattatgtttcatttcaacttcccagttagatttgtctctctcatctagaatgtgtttctactacttccatctctttttctatttatggtcatgtctgaggtaatgtgaagcccactagaggtcttagggagggagatcctctctctccttatttattcatcctttaatctgaagggctttctactatccttaggagttatcaaagcaggggtcttcttcatggtattgctatttctagaattgcccctcccatatctcatcttctttttgttgatgaaaacatcttattatactcttctcattaaaattcaagtcatgctttaaaccatgctttcactgtctaccctaaagcttctgaacaggttataaattttgtaaaattctctattttgttctctcccaacactcagaccgctatcagggacctgttctttcacacatccatctagaaaatcggcatttcatcactaaataccttggtctacctcaatgtctctctcaatctaagtatccatcttttacttttctcaaggataaaatttcattgatcattcactattggcatcataaatggttttctaaagctggcaaagaaaccatgatcaaggttgtccttcaagctattccttcttatgcgttggcttatttttacttacgttttaaattctgtaaataaatcaaagctcttgtgtccagattttggtggggtcctctgtagaaactcgtaaaatccattggaaaaataggaggtctatttgtcagtccaaatttgtaggaggtttaggtttcagatctttagtccacttcaatcaagccatgcttgccaaacaagcttggataattcttaagtgtcctgattctttgcttagtctaacccttaaagcccgatactttcctaattcttctatccttgagactactcttggccatatttcttctttctcctagaaaagcattttatgagggagagacttaatgaaacaaggtcttatatgaaaggtgggagaaggtaatgatatttacactatagaggatcattggattttaaatttaaatcgtattcctcttctctttctccccctatgtccactttgtccttttttatctctccgcctggtgcttaggatactcctaagctccatcattatttcgatgatcatatcattgatagtatccttaatgtacccatctctggtaattgttgcaaagatgatttaatatggggtcaagatcactctggtaatagtttccacctcaccattagcagtagcagcaggatttgcacaaatgaaaaccttaggacgcttgggaaaggctccatcaaagtactccgagggttgaaatatggtgccagtgaggggaggctcgagcatttcatgggaataagccacatccttttgagaggaaagaattttatagattaacttgggaataacaagcttatgagtatattttttacctcttcgaaatgaaacaatttgatccaagatataagaacccaaattgatggatgcccctaaggtgatgcgaaaaagaaaatgagccaagtcttgagacaccacagttttattggagtttggaagccaattgctaaaagcaaaccgcatgagtgaagcatggccataagtgagatgagtgatgcaaagactttgtccaggttgccattcaacttgagcaccagtgagatcagtaatcatgaggtgacgatccatattcactagagcatttgttacacctttgtgcagttgcaaagcttcggtaatatcatcctcagtaaaggaaaactaatgtcctcgaacatacactttaccaatgaactcagatttcttatcaagaaaatcatcagacaaattagcataaaattctttgacaattccatcaatatacccttcaaacccaataagagcattctcccaatgatgatattgaacaaactttacaataccatagacacgatgagcatgtaaattaaaatttctttcactctcaaacttacgggtagcatataagttccaatcacgctggttatcatgataataaaatctggaatttatagcttgagagggagagatattaccaggaatggtgctcttcatgggttgtttacccttggcaggtgcagaagctttggctgcagaagcagaacgagaaggggctgctgcagattttggcaagggtggctcaggctccatatcagtttcctcactattagaggagacaacaacatcttctggaagttcttttttagaagaaaaagactcagttttagactcggagtcgtcagaagacacttccatgggttcttcttcttcaccatcagaactcgtggaggccgagggaggatttattttaagctttttggcagcaggaatt

SEQ ID NO: 52914 - DNA, 3271 bp, Cannabis sativa
  modified_base (3166)..(3172): a, c, t, g, unknown or other
tccaggagccacactacacgaagtctgtgtcactccgtacccgaaaaaatgggtctatgttggtgcgagactggaagcagctagcggatccgtcgtagaaggaactagagctcgagggactctaaaggcttgtatataagcatccctaaagtgaataatgccttgggcttttgagataaatacagtcaatgtttcagctctctttctttgcatctgtccccgtagcagagaaccaacatctagtccagactgaagggccatcaacttcatgtcatcactgacctttgttttggctgcagcctccatcatcctcttgataaaagccttcaagctttcattttttgctgcttgacgttggtaagagagccaacttccatgtcaagatcgtgtgcgacaaagaactgtttatggaagactggcagtaaatctttccaactatcaatcgatccaggagccagaagcttccccccaatcttttgcgaacttggtcaatgtcaaggaatagcataagcacttggcatcgtcgctcacacgtgccacttgcatcatcttgttgtatttttccaagtgtgtttgcaaatctgtccttcctttgtacaactcaatgtgtggcatcttaatgttttctgggagcagggtctccgtgatccttctcacgtaaggttccgtgtcctcgtcctcaaaatctgagagggccccactctacttttttactagcttagttagagctcctattttctcctctaatctattcatgtcgctttcaggaagatcacatcctcgcattttgtcactcaagtggtttctaaggccaccttcatgtggcctcaatttttcacttttataccttttgtacttggcgtccaattgccaaataaggtctatggtggaccaactgtcctcaaaatatccatcaatcgtccttccattctggttgatagaatcactgtggtggtttttccgccccttgggattttcccttttggcacaattttacatctgggagtagaagggcatccaagctcgaaatcaccggtggccttctgtgtcttagagggctagctggctgatttgtgtctttccgaggaagtttagaagtagacttttatgtgggttcatctacgttgcctttacctttatccttgatgggatttgaggttttggcttccgtttccccaatagcacgctcttcagccataacttttactataggttatcatcaaactctaccaggtcctcaaacttattttggaaacgctccatcattctcttcattttcttagtgagtttttactactctgctaatttcgtcttcgtagcttctaattccttagtcactcgctgtaagtttgggtcatggtcataataataaccatatttgtaatacccgtccttcacgtaaccatttccattgtcttcttcttccctgtcttcaggattttggtaatcattgataccatcatttaacttttcaacgtcttgtcctcgtttctcagcattggcagcaccctcttctcttacatggccttgttggagattaggggcaagagagtctgcctcctccataacattatccaaaggaactttcttgcctacgtttttttgagtgaacaccatggttgaggtggtgcagccgctagcaaactttcttcagctctcaatgaaagcaccaaaatatttatcaagatttttggaaactaataaaataaagcttaagaaagaaatataatagcaaataatagacaaatgatttttatgtggttcgagcattattgatctctagtctatgagtcagttgtattggccctatgggaaagtatttggataatgcaatgtgtgctttctgcataaaacttagctctacactccttttgtttctcttgatgaagaagaaagcatgtagaaatttttgtagagattcggctagtgtaaaattgttcaccctttgtacataaacaatgagggtatttatttgcttatatgtgaataagggcattccctttacccacctagggtttcgtactaaacacggagcaagggcaggcactacaacatgaagatctgaccattagttggtaggaaactttcccatcgtgtggtgtatgtctgtagttaaagatcccatgtggacaaggatatgcatcactcaaaggtttcacctttaaaagttgttgcctagatatgttgttgggcaaaaagggggttttagaggcacgtacgcacactaccattttctgttgtaggggataagatctgatttagtgtgagagagtggataaccgtcactttaggttttggataggatactgtagaatgagctccgggatcaatgagccaaagccttctcggatcatactgacctactacctttctggaacacttgatgcaccagataactctaattctcaccaaacgcaaatggatagtgagagtcatggatccctatccttacccgctaatattggagacctttgattagctttcgaaatataatagtctccttagtgtcatctagaaaaaagtatatactgctcacagatcgtcaagagtggcacccttccatgattgctacgtattaggcatccgagaatacagataacaatgctgatttactttgagacatagagtatttataatatattgtaatgccactactaattgcttaatgatgtataattttggtaggaatgctattgttacattgcttcactccatatattatcgatcggcgttgcttcctttcaccctgtagtaatattataaagttgtacttatcgtattttaaaatagtgaatgattagaaaactttataaaactaacagaaagcactattatcattaataaatagattgtagtgccactactaattgcttgattatgtataatttttgtaggaatgctattgttacattgctttactccatatattatcagttggcgttgcttcctttcatcttgtagtaatattataaagctgtacttatcttattctaaaatagtgaatgattacaaaacttcataaacctaatagaaaacactattataattaataaatatattggaagcatagtggataagagatattaaacataagataacctaaacaaattacaatattattgttccctagtcctcaatggtgcttttgttggaatatgttttaccnnnnnnnagatttactaccatgtatattgtttaacatcctaaatatgaatttctaagacaatgaaattaaacacatataaaatttcagaaaaccttacattgggtg

SEQ ID NO: 52915 - DNA, 903 bp, Cannabis sativa
aatcatttgaaatgagttttattattattgccttaacaaagtattaatcatcaatggtgatttcaatagactctctaaagtcatatgtgacgcccccatttaagctcttgtttagcttttattctaggattaaaatgtttggatttaaaaaaaaaagtagttaggatttgtagcttacttttgacaagctatattttaaattagaataattttaccaattgcttcattaaaaattttatataatagttatccaaacagaaaaaataactcaaaatttttattttcttatactttagttataacaaaaaagtagaagtttaccgaaacaaagtattgtcatattataaaagttagcatattgtatattgaatattttagtaattatgtaaagttaatccactaattgctatttatattagggtttgattatcatttttacacactttcgaggacaaaccctacaattatttattatatgtaacgttagcttagcctactgattaatgtaaactataatgtcaaatttaagtttaaattatattttcagagttataaagatgcaatctttcttatttgacattatattgtcttaataatacctctcatgatatgatatgtagtacggattttttattgtttttaaattgaaatgtatagaatcttatattgattttttttcatacataattaatataaattaaattacattagttatgaaaagaatgttgatatttgttatgctaagaaatacatgatgaaatagaaaagaaaaaagaaaacctaacctctcattcatgtggtatttcatataggctgtttagtgatattttttttcaatagggtaatgattatatgttcacacacatacttgacgcatcttgtgacaagtaattacatatcatc

SEQ ID NO: 52916 - DNA, 1464 bp, Cannabis sativa
ttttttttggattatactttagttggattgtttgggaactccaactcaattttttgagattaggatttcatggatctgaaaattgaagtcaagacattagttttatgcgaattaaattagatttttggtggaattttagtttcatagtagtttttctgtactttttttttcatgaattcgaaatagtccatgttttaattgattctggttgtcttttcaggtgaagtcgtcggaattaatggtggttctctttctggttgggtttcattttggttgtgttaggttgctgggttagtcaatcaaagattgtgtgcgtgaggttgtttgtttcgttccgtgtagttgaagtagtagaagaagtagcattttagtaatatttaatttatggaatttaacttaatgttcatatgtgttttttgtaatttaattattttttttttgtatatatataaaaacaccccataaacttttcaatgttaaaagtaaaagccaactaaataaagaagaaaaaaaactcaacacttgaatatataaatgaaagatgaacataaataaataaataaataaataacaagaacaaggagaagagatgaaagcaagctctacacacaaacacacaatcttaagtggagaaatcaccaaaatttaacaaggtttaatcttttgtccaaaaatcttattttcccttcctctaaacactaaaagaagaaataaataaaagtagttttgggaattattaactcttttggtgattagttgaaaaaaaaagtgtgttaaacaagagaactttaagtatctattgatagtatttaaacaccctgtaatttacatcacacaccccatagttgttagtaggggtgcttattaaatcacatcaaatctttttaggtatatccagatttgataaaattatatattagatattagattttaccatccgatcctatctaattaatttcaacaacattcattagatgttggattggatcagttctatctgttggatgtatttcatatatatttattggtttaatttgggtttattcaatattttagacctagaattttttagatcatcagatccatcaaatattttaggtccaatatgtattggattggactagatccatacaatccaaaaaaagagagtaaaattttaatgttaatttttatatatacatatatgttttacgtataatattataaaatctaattactcatccaaactaaatgaagatactaattagttcgattggatgttggatgtattggatttttgaacaccccatctaacattcgatctgatttaattagatattcaaaaataatatccgatcagatcacagttgtatatctaatctttgtcggtcagtagtaattggatcgatcgattatcattaaaatggatcaatttatgcacacccctagttgttaggatgccttcaataagtgttaatatgatat

SEQ ID NO: 52917 - DNA, 1889 bp, Cannabis sativa
gaaacaagtatcattaaagtagaaacaactctaattgagtatggaaacatgtcaaattaaaatggaagcaataaaataaaaatggaaacaactcatattggaaaaaaaattatattaaaattggaaacaagtagtaattaataacaatggatacaaataccataaaaaatagaaacaacataatctttacatggaaacaactagcattatgagtgtgaggaaaaaaaatggaaacatgccaaaaagaaaatagaaacaacttacactgataatggaaacaaataccataaaaagtaaaaacaactcacaataaaaattgaaacatttggaaacgaaatggagaaaaaggaaaataaaaaaaaaaatgaaatggaaacgattaaccaatcaaatataaaccacaaagtatttagtttggaatttggtaatctatgttttattagtataaaaacacttgtgaaaatacacattttccttcattaaatttttttttacaaaattttgagggtaaatatggaatgttaagatactttatttagggtaaatagataaaaccctatataaacccaatcatctttctttcctttctctatcaacctctccctgtctctctctcattacattgctctctctctctctctccaataaagcaaaaggcaatataccaccaccactaccgccaagatacccactctccatcactctcctccaacagtctctccgttttgcttttgaagctagcgccgccgtccaatttcagagctacagtaagtgtaaacatctttagtatatataaacagtattaggattataggaatgaaaatccatggaagtgttttttctcttttctttttgtttatgacaattctttgtttagaatccttcacttaattagtttatgataattatttttatttatgataattctttgtttagaatccttcacttaattagtttatgataaatctttttgtgtatatttgtaattcctaattagcttaattagactcagtattctttttgtttaataatcattcttacttggaaaaaccatgggagttggagttggacttggacttagatcattggccattgtcaactgaagcaaacaagggctcaaacacactgaaataagtagcagaactccaataagcttgttaattataaaccagtagttttaattattagaaaagttgcaaatccacatcttcaactcattcaatcagatattctccagatattctccattacatatcaatgctcttaaagtacataaaaattatagtctattttcttaattatagtctttaatttacattgtgcgcaccatacccctgagaattaaatatgttaaattaaatatgtttcttttttctttgtttttttgtcattcttgtagatatgacaaaagtatccccattaaagaaagaaaggagagcttcatcaagtcggaaaaaaaaaaaaagaagaaatgagaatgaatttccggtatattgatcttacatttctattctttaatatattttaaataataagtatttcgaatattataattacacgtttacattccaaaaaaataagccacgttctatgccaaatatgtatttcaaataactagacagtaacatgtcccttattttgtgtgtaggatttagatgcaaaaaatgttaatttttgcaaaatcagcaatacatgtgcaaacctattggtgcggtttagcaatcattaaaaaatttctaagtgagcagcagatagacagatttaaaggttgttgttttggatttcttcttgatatggatgaatctcttcaaccaactaactgttggaattatatttatccaggatcttagatctatttgcaagtatgttgatttaacaacctaatattg

SEQ ID NO: 52918 - DNA, 2377 bp, Cannabis sativa
aaaaatgacattatgaggaaactaactaaaaaacaacgaaccatttttctgggtctttacctataaaaacagtagaccgttttttttgctgcagaaagataaagagttttcaacataactcaaaacgatctcaaacttcaaactaagctccaaatcacataaacatatcataataaaccaattccaagcaacaaaaccaaaaataacctcaatatgcaaatttcaccattgttgagccaagtttgagttcttgaactcaaacttgctcaactcaagaatcaaccaacaaaaacaacttaaacaaaagttaagcaactcaaaataacttcaacccaaataatcctacgttcggacataaccaaaacctcaaaaatgcatgcttgaacaaaaactaagcttctaaaaatcaaagaaaatctagggtttactttagattttagcttcttgattccttgaaaactagctgaaattattgaaaattgaaggagaaaccctctggtttcttaaggccgaagaggtggagagagaaagagggtgttggataaaattagattttcggttatgttttatctattaaaaacttaattttctttttaagaaatcaatactagataatctgaaatgaaacattggaacttttcaagaccactacaagacaaacttaaaacccttaaggaaaattccaaaaattaccctttacttggagcgtaagaaataattaggtttaggggtaaaatagtccaaatttataaccccgtctaattccgataatccaaaatcaaatttatgattgtcccaatagaacgaaggttctaagccaacccatgtgactctaacggccattcgtcacattttctatcgttacttagcaaaaaacataaaatactaaatttcacatatagcatatataatacatttagaatttaataaaatctttagaattgaaaaattataatcctaatgcctatttttagaaaataggacccacaacatgcatattcatatataatcataaaataaaagtaatttaatgctaattgtcctattaatccatattccaatcatacagtcattataatcttcctctatcacttgcttcatctttctcaaggggcgatatacacatttgtccattttagatccatttccatccttcttcctctaaacactaaacatcagactttccaaaatcactagcttcatacatcacttctttatttttattggattaatcgccttataatatttagaaaaagagagaggattaggatttcatagaaatatgtttttaagcttaaatgacaagggagttttttttttcttttttttttttttagaaaagagaactcaagaagtttacccatataaccatgtatattagaaggaataaattcaccctatttggggaccttcaagaaaattaaaagaaacttttgaatatattaagaaaattttaaaataaagcctcactctaaaataacatttcactctcactgcatactcaaattgctatttttttgacgtggtgaacagagtcacacatgattaacaaagcagcaaaccacaatcggcctcctcgaaccaggatagctcatcgtctaaccgaaggacaagttttgccaaccaaccatgagctgtagatttcaaatcgtgagccacatgggacaaaactgcccccggaaatatagacaataaagctataacgacttcaaacaacaaacacattctcataattataagttgtcgtcagagctagcaaatctgaaaaaacatcgcaacaccaaaccaaaaaacacagttatattagaataacaatcttcaaaataaaaattaaaaaataaaaatagaattaacacacaacccatgtcactagttcaacataacaaaaaactaaaaaaaataataggcatgtgggtttagagtatctccaataaagatgcaaatgagtaatccaaatgcaaaatttagctcaatttgttaaaattctattttaataatgtgtcaaattgtgatgcaatatatatcgcataacaaaaagtgatctaagtttagatcttaacatagtatgatacaaatttgtatcacaataaatattatacttttatatttaccattatgtcattttgaatattttattattaattttaattaacaagccaaatgacttccatcttccattattattattattaaattttatatttatttttacattattaaaattattttatatttttttaataaattattaagggacatattaaattgaggaattacccgatatactattttattttttttttttttcgaatttacggtttgagtttctaaagtagttgcagcgctagttgcaatatgagtttctatacgatttttt

SEQ ID NO: 52919 - DNA, 1238 bp, Cannabis sativa
ttcttgttgttttcatgttatttttactaaaagccgtaaaaatatataaaaaaaaaaattcttcaaacgcaaacgtaaaaatgtaattttttttacaaaaaagagtatcttatataattatcccaaatgtaaatgtatttcatttaacaatatttaaataattaattatattttgttcgattttaaaaaactcatgtaaaatttatatttatttttaataattttttaatgtcaaaactagaagtaagtttttttaatagaaagaattcataaacttaatgtaattattaaatttttggggaattttaaaaaatactcttttttatattttatttataattttaccatctaaaattttttatttacaaaagtacgcttttaaagttttaaatttacaataatacttttttatcagaaaaaatacgaaaacaactaaaaaataataataaaaatcaatcacacaacaactatacaacaacaaaaaataatcaaaaaaaaaaaaaaaacttaatgacaactataatacaaaatatcatgctaagagaaatgctaatcaagttgcacgtggattagcaaaatatgctctaaagttggatggaacaaatttcctatccaattttctcttttgttgtaaatgacttttgatttataataacaatatattttctaaaaaaaaaaataataaagttatttataatactattttttaaagatatttataaaattattatactatttaaatatatatattattaaatttgattgtatttgtagtattttaaaaatgctattatatgatactttaataagaaatatataattttaaaaaaatatatataaataatgaaatttataatttgctatttcagatacgaaatcaattgctttgtttatgtttaggagtttcgatttaggataagtcatggtggtggtgtgaataatgggatagtagtggtggtaacaatagagtggtaaaagtggtggtggtaacaatttgatggtgacaatgataacggtggatacaaaaagaggaaaaagatgaacaaaaagaaaaataaaaagggaaaaaaacggaaaaaatattcttttcaaaaagaatctcttttaaatcttttttaaattattaatattatgtatactaataaaatttatacttatatacacattagtagtccatttgaacacataatcgaccaaatggacagaaaaagtacatatcgaaacgattgtgaaagttg

SEQ ID NO: 52920 - DNA, 1107 bp, Cannabis sativa
  modified_base (32)..(71): a, c, t, g, unknown or other
  modified_base (709)..(709): a, c, t, g, unknown or other
cgctcttccgatctatcgttttagaaagttcnnnnnnnnnnnnnnnnnnnnnnnnnnnnnnnnnnnnnnnnagatcctagtaaaataaatttcaacacaaagtttgtacaagaccaagaaagaactcatcaatacccaagtgtttaaaagtatcataataagcagcaaacctggaatatcgccaagctttcctggacctggagcagtctagcaatgcatgcttattagtctcattctccatcttacaaacaggacacaaacgagaattaatcacacattttttaaacaaagaagaagcaacagggattgcattagacaacaaacgccagacccaaagtttaaccttatgagggacaatagaagaccatattcttgtccaaaactttttagagtcagaaaatgaagaagaagatggaaggtcctgattagagaaagccaaatgataagcagatttaacagtaaacaatccagaactctcctttcgttaaaagcataattaacagagtatgtttacaactcggctgattggatagtcttatgcgagataagaatatacaaactgttgccttgtgcctcgatgagaaaccaggtaacttcaagtgtataagacgaggcactaacctcgttaattacgtggaggagatataacgacaatgaagacacttggcgtataatatatggtatacaaactaagtataacagatgggtnaaccaaagcgagagatagcgaggcatccacctcgccgcaggaaggcatgcacgcgaaaaagatcatctcgccaccagaaactgtggttgtcaaatttaaagtaaaagcgacgaaacatgcattatcaaccttggaaagatatatgacgagctccagcctgctatgaagattaattctactctattcccagcgagacattccaatacgatatggcttacgccatatttaatacatgtttattttgacccagtaaaagcgggatattcacaactgtgtgaaattaaaataaaattcgcatttacttaacgtgatatgtaatcagatctcatgattttaggggataatcgttgtaaaaagtgacagtcaactttgtaaattaattgtctactatgtgatta

SEQ ID NO: 52921 - DNA, 1956 bp, Cannabis sativa
  modified_base (603)..(603): a, c, t, g, unknown or other
  modified_base (696)..(703): a, c, t, g, unknown or other
  modified_base (981)..(984): a, c, t, g, unknown or other
ggggtttagggtggttttttgatggtttgggagggattgattttgaggtaggttttttacggtttagggttttggggtttagggtttgggatttgggttttagggttttgggttttgtagtattggcgtttggggttttggggtttgggaatcgttatgggaatgtgctggggaatggaaatgggaatcgaaatggaaattggaatgggaatggaatgggtcagggaatgggaatgggaatggggattgggaatgggaatgggccagggaaagggaatgggaatgagaatggaaatgggaatggtccggggaattggaatgggaatgggccggggaatggaaatgggaatgggctagggaattagaaagcgaatgggaatgcgaatgcaaataggaaaaggaatgtgaatggtaattgaaatgggttggggaatgggaatggcaatgctaattggaatgggattgagaatggggatgggaatgggaattggaatggcaatgggaatgggccagggaataggaatgggaatcggaatgtcaatagcgatgggaatgggaatgggaatctaaatgggaatgggctagggaatgggaatgggaatnggaatgggaatggaaatgtgaattgaaaagggaattggaatgggaataggaatgcgaatgcaaatgggaataggaatgggaatgggaataggnnnnnnnntgggctggggaatgggaatgggaatagcagtgggacggggaatgggaatggcaatgcaaagggaaagggaatgggaatgggccagggaatgggaatggggatgggaacgggaatgggatttggaatggggatgggaatgggaattggaatgggaatgggaatgggaatgggaatgggtaagggaatgggatgggaatgggaatgtgaatagcaatgagaatgggaatgggaattggaatagaaattggattgggctagggaatgggaattggaatggnnnngggaatgggaatggaaatgtgaatgggaataggaatgtgaatgcaaacgggaatgggaatacgaatatgaacgggaatgggaatgggctggggaatgggaatgggaataggactgggccgaagaatgggaatgggaatgcgaagggaattggaatgggaatggcaatggcaatgggaatggagatggggatgggaatgggaatgggaatgggaataagaatgggaatcggaatgggaatgggagtgggaatgcgtcgaggaatgggaatgggaattgggttttggggtttagggtttggggtttgggttttagggtttggggtttaggtttagggtttagggttgttgttggggttggggttgggcactactacaaaaaggaatattttcgtcggtttttaagtgacatataaagattttgcgtcggtctacaaaaccgacgtgtaagccatagacgcaaatagttttttatttgcgacgtttctaaagtgacgcaaaaaacaattttcgtcattttaaaaccgtcacaaaaaacttatatcgtcggctcttacatgttgcataacttgttgaaatactttttttttcacctattgcgtcggttataaaatgaagcataaatgtaggtaaggaaaaattgcagatttccatacaattttccctacctgcattttttcagattttagaatggttttatataatagtaaaaatataataaaaaaaattaaaataacgataataaaacttatataaaatttttataattagtaatcaactatatgattgttaatgataaaattaactattaactaattacataatactaaaattgttaatagaaagaattctaaaatttatattccatatataattaaaataaaagttgtattccctacacataactatgtactcattccatctaaaaaaaaattatgtactcattcatctaatatataaggcttcatgaactgg

SEQ ID NO: 52922 - DNA, 1178 bp, Cannabis sativa
agtatgcgtccataaaacttaggatttatcttccattgagtattccttgtattatttttacaattgagttgtatatattttgatttattttctattgtaataaaatttctaatacataacatctcataaattagttgtgcatacattcagagtagataaaaatttgatttgattaattttttttattatttttatactcttcaattagtatttcatgataagtttattatttaaaaaaaaaaacttgacaatttctttttttaaaaaaaaagcattgacaatttgcagtcatttcattcgtttgcattatattttcattttgttttctggcctgttggactgtgatagaggagtcctgtaaagagatcttccattttcctcatttctaattggttatttcaaattggcatgtatttcacatttcaaactatataaacataattgttttatatataaatttatatatatatatatatatatatcacaaataaaacgtgatttaaatgtatatgtttgctctacattttagtactatttggtatcaaattatggtgatgagagtattaattacaaattcttacttaatttttgcgtttaaaattacatgcttgatgttaaaattatatttataatttttttcatagctgtatttgttttagttataatattaactctgtaaatttttaataaattttgaataattcacaagactaaaaaataaaattcttaatattcggatttactacgtgtgttatttttatttaaaaagaaatttactacgtgtattcaaaaaaaattaaatatatttttaacattataaataatttaaaaaatttcaaaattacaggatgataacaacagtatcaagtatcatgaaaaaaaaaagaacaaaaaaaaattaactagaaagttgactgaaaaattataataaaaagtttactctttattattaaaaaaaaaaaaagaaaaagcttagttatgcctctccaaaatgggagtgtcccttcaaagcaagagaagtgtatgtcgatcaattgtctcacatgttacatttatatataatttaataaaatttaaagtacgagaattttctacgattcctactaatcttttcatgcaattactttaaattaccaatcaaaacatgttattactagttaaaagaaaaaaaaaaaaaa

SEQ ID NO: 52923 - DNA, 601 bp, Cannabis sativa
atggatgttatatcttatatcatagtaaatattatgctaaatttatatcacttttttatgaatcgaatacttatattggtcaacaaaccaactatttacaaagcaggaaaaaaattgaatgtatttaataatgaataattttattattatacttacaaatttactatatatagttttcttatatttacaaatataattatttttaaatgattaaaaataatataccatttagttaaaaaaaaaaataataattttagtatacttataaatataccatatggtcaatttgggagttcatctcaccagccgatgatgtttggaggttcaatgcagtaaccttctccgggtcaatttttcgctgcaacaaccacagactcgtcaatttgtggagattttatcttcccagcaaccatattacccttcaccgcgccagtatcgcaagctcaggacaatgcacaaacaacccatctaaatttgaacaccgccagtttagattttttagataatgtgcttgatgaagacaataataattagtttaagttaatttaagttatgtgtggatttatttaagtttttaattatatgtggatgataattattt

SEQ ID NO: 52924 - DNA, 690 bp, Cannabis sativa
acttaattgtactaatagagatattacacataggagggtgtcaggcaccactagtgccttttagcatttctcaatgaaaatagggtaaatactattttagatcttatattttataaaaattactgattgaactcctcattttgttatatgaaaattcagaccttgtattttttaaaattgtacaaaatagactctgaacttaattttcgttaatttttaaataaccaacctgaagctagtttctagcatgaatatgtgcataaaaaataactagtctttttgtaacatctccagatcagattattattgagttttaatttgacaaaaattaacccagcatctattttgtactattttataaattcagggtttaaattattatttaacaaaataaatagtctaatcaataactttattaaaatataagatctaaaatggtattaacccataaaaatagggggatttcatttgcacctcataaagctataagtacactccattttaataatcactacaaaaaatcttacttttagctacgacaaaacttatgaataaaagtaaaaaaaagtatgactaattataaatcttcatttttattttgtgactaaaatgtgtatagctaaaagtattagtcacaaaaattacaatttgttgtgaataaaaattacaagtattgtgactaaaactaaa

SEQ ID NO: 52925 - DNA, 5390 bp, Cannabis sativa
tactcgagttcatatttggaaacagagaggtgtttgtgtcagtggaggtattaagttttgaatcttcttcactttcctggtcaatgtctattctagactcaagaaataaataagttgtgtaattggtcacttttggttaaggaattcttctgactttcttaacggcttcctcgaggtttgtgaaaccatcaactttatctaaaaactcttcaattctttacattgatttaagtttcaagtctttccataatcaactaattattattagtcaagctgtcattgccatgaccttggcgtcttcactgagtatctttgcttgcatggtggcctctaagaatcattgtaggtaatcctttagaggttcgtcttcttgtttcttaatatagaccaaattattgggcttgattggtctgtgccttgatggggagaattggacatagaatgcttgcttaagcatttcccaaagaattgattgatcatggagaaagtttgagataccattgtcgtgctacttttgatagtgtggttggaaatattcaacaaggagaatcgcctcgaatgccttgtaggtcagtttgtactttgaagttgtgtatgtgagagagggggtcttctttgctagtgtatggaagccatactagatttttgaactttgaggggatctctaaagccttgattcaatttgagagaggagaagaccactcttgatctaatccgtactctattggctttggaatagtgatacccttaactacaacgacaagggtgtcaaatttggcattacacactggtgattgtgtatcagttggccgcttcttgttaatgttgtcatgcaggctcttttgtcttttaagttgatcaaaggcattgattgacttaggcctttttgttgttgcctggtcatttgtccttgctggcaactgcagggattcatcccgtatgatgatagagtcatctctcaagcatttgctttgtgagcaactgcttgcaatactacactaactatttccttcaaaatagtcctgcttagagtgacatgtgtggagggagtttaattgattgctcaagttcaacacgtttccatgtacccatggaaagcattcatactattagtcatcgggacctcgagtgaagtacctacaccaacaaccttgttcatctcagaagtacttccgagtgtggagtagtagttaattgatcttcagcctcctctaaatctcatactcttcactttcctggtagagcttttaggttcttcccctatgtctcactacaggtccctttccctttcacaaggtggccaagagtcattatacttatgaagacaatcccacggaggacatcggtttctcacattgttcgaattacttcaagtagaaatgtgattggtcctatcagctgcatttggtggacttgtgtgtctacgatctcgagtttgagtcctttcagacactcgctcatagctcattcccctaacaggtaactgctcaaaattaggctgagacctcatagaaccacatttcttagtccgagtcctttcagacgctcgcttgtagttcacttctttatggggaatttcagtgcctacttcttgctgagtagtagcctgaagtgtttttttgcttgttcatggatgatttcttggttgaactgatgaattccttttggaacaaagctcacaaaaaaggaaacagactatagtttgaggactcaagttgtggctcgcaatgaaagcaccaaaatcttaacgctaaaaagttgcaaacactatcttagtggattggcgaggcgaataatgaatgtaagtatataatttagagagacgcacaaaatttataatagttcattccccatgtcgcgatggtaatgcagctacgtctactttgattttttatcatcacgcgatggaactatagaaaaatggctaagtgtttaagctttaatttgtttagagagatgctctaaccttatgtctacattttttgaatgtaaaaatgaactaagggagctctcctttaataattgaaggaggcccttgaaaatagaaataaaataatgaaaaaatataagttggctatttttgaccgtagatgatgatctaatggtgaaaattaacttcggaggttgatcgtcaatttttggaacatgggtctcgatggcgggacctgcctcgggtatgctagagcttattttttctaactcccttagggttgaaatttggaattgataacttcaaaattgcaaatgaaatgtgatacataacttgatcgatcgttgaattatctttgtaactcaagtttaattgcatcaattagataaatattaagtgagttatggtcgtttttttgaaagtttatcagaacccatcgcccaggttgacatcgagtgtggaggttgacattccagcacccaagttgacatcaaatgtcaacctggacacttggtaagtgaaaatgttctaggggatgtactttattattactaattgatatttttacatcactgactgagtctatttctatgttcgttctagcgaagctagtcactaattctcgaagatgttgcaaacctatagaaatgagagactcaaaactcttctttttcgagtgttcttcccatgttgaaaatgagaaatacaaagttttgaatttgacttctctgactttatgtatcttagttaatgtgaaaaactagttggacggtcgaaaaagaatcataatcaaataagtagaacccagtgcaccagtcaatttattaacctaagaactcgatacttcatttctgggctctcgagttgtggctttgatacttttaaggttcttaaacttgaggatgaggtctcctaccccattttgacaatcccagattgaatggtacaatcgaattgtgcattaggatgatcgaaaccagcgcactgggttgattgagagcatgggcgctgggcccaacaccaggtcaacctggacactaggctatgcttccagggccttaggtttgtggttttctagagttttctaaatcttcattatttttgatgatggaaaaagatccaagaattttttttcgagaacatgattggagactgcccaagttgataatatgtctaccttggcgctgggaagactgctaggtgtcaacctaggagctgggtccccattatagcccttcagaagttcaatttggtcctcaaaaatatttgaatcttattctttgtttaaaattgagaccatgctcagaagaattctcaaaaagtgtaattagatacaacctgggtttccacaatgtgacccagtcgttgggccttgcttctagcacccatgaagtgctatttcttccccaaaaatacctatcttcttatttttgataaagaagaagatgataaaaatgtcaaattattggtctgatacttggaagttgcctagattgacaaattgtcaaccgaggctcttagtgcccaggcacatggtgctccgagtgctaagaaatgaactttcttcaaatttgattttgatacctcaaatatatctttgatatgtctagtccatgttccaatctaaattttaacccattttcactaagacatttatgaaaactgaaactctagctgaggatgtcaacttgggcattaggtgaagccctaggtgcccatgttaacttatgggttgcaagttcatgttattttacctctcgaggcctggattatgctgctccatgtcttcatggcaaataacatttaaatatagtgagttagaaatgagttattgaaggctaaacttccatcccagagttctcgaagtcaatctttgcgcagggctagggacccctcccaggtcaacttgctatgactcgagacttctcaactttgatatgtcatctttcttggaacattttaaacatttatctccatgtcattaaggctactttttgtgtagacattgaccatttctcgtaggcaattttctgctgatacagttttaggcgcatatccaagctctctagcaccctcatatgaaattcgaactccatttcagtgtgagcttttgctactacaaagaatggaactttgtaatgctttgatatatttttttttaattttgttttgaggtttgacaagaggttgtagatgctgtagccatgagttatttcttggaacaccattctgattgctttgattatgctttcatgtcagtcagagattagacattgatcttctcgaagtttgaatgattgtatgattttatgaagaaccagtcccatgctttatcattttcagaatcaactatacaatatgcaagagagaatatttttaattatgcatcttatgcatttgcattaaccaacttacaaccatacacaacctttagcaatgtgtcgttgataatcatgacaggcttttaatttgtcaaactttttagagcatcattcaatgcaataaatgcatatttgaaattatcattttcttactttttggatgttaattattgtacctaagtttgtttttagtagcatgtacaagtatttttgcaagatgttgtaagtgtttccatgtagcttacttagtgcatgttccttactatgccatgcctccatgtagttcatctttataccgtatttttcttccatttcaccttttacatctctcggaatgcactttcattttaaggttgaggaactttggttttacaaaatatgctatcaactttgcagttgcttgtcattgatccttaaatcttatgggcactgcacatgtgtgttcttcttcataacttataattatgaatgtttgcatcttttcatttttttaagcctttaaaatccatttgccatttgagtccaaacaaataatattgtattctttaaagcaagatttaaatatcttgtattgaaatattttcttaatttaaaaagtagcataggacacttatccatgtatctttgtctttgtaaatctatcctttttctattgtttcgtgacatcgatctatgatgataacttctttgtgttgttaacttcttcttcttttttctagttgttcttctgttgttgtacaatttatttaacaacaggcttggcatatatagtcggggaagttaaaatattaagcttctttggaggttttcttttggttgttttcttgttgttgttgtatggttgactctgctactaatgtgccagtgtcaatcaaaataacatcttttggaactgatcttcttcttgtggtggattgtagttgcttatttgttattgttgtgttgttgtaaggttactgcacatctgactacattgagtgattgtcattttctatcattattagattgttacacacaattgtttgggtagctatcaataaggattgtgtttctacgttgctgaatgtgttcacacacaa

SEQ ID NO: 52926 - DNA, 998 bp, Cannabis sativa
ttttttttttttttttatcttagacagatatatttatatataaatatatatatgtgcatttattagtttggaagtgaaagcatgagggggtctgacgtgaagccaatgatcgagccatcaatgacctaaaattatgtgatagaatgcagcattgttgtactcctttatcattccataaatctcaccaaaactatttagttaaaacacacaaaatataatagaaaagcttataaaatgaatgtatatatactactaaaatcaaaatattatatttatattttgaagtataaaactatatatatttattaattaataatggatggtcataatcaaataattaataataagtcaactcaaaaaattataagtagattatatatttattctttgatcgtttcagaaagtgtatttcattggaggagccgtctctactttttttgttatattgtgatggattatatgcattaatgtttgcagttctttctaattttttaaaaaagaaaaacatatgtatacaatatgagtaatattatatatacaataaaagaagtatatatgagaaattttggaattgtttcagttcataacttaaaatctgttttcatttttttaatcagaaataacatttaaaaattaataaaaggcatttgaccaaattttaaaaacaatattttaaaaattgagtttttaaaaactaaaaaataaaacacatcaaaatattgttttctattttcgaaaataattttttagtctaacatattcttttttacatttttcctcacatacccagacttggatcgggggcccgacccagacctagaccccggaaatggaccccagaccaggacggaccccgggacccagccttggacctcgaacacgaccccagatccggaccttgggtctaggttcgagtcagggtctgggtccgattccagaactggggtttggggtctggagttcacgtccgggttaagtctgaggttcaggtctgaaat

SEQ ID NO: 52927 - DNA, 842 bp, Cannabis sativa
  modified_base (343)..(347): a, c, t, g, unknown or other
tcaaacttggagctttaatggcaagtcttgattttgagcttgtagaagtgttttgttgctttgaatatgttctatgtgatctaaataccaggtgtggaagttattgtggtgtttggggttgatttggttgagataggaacttttgaaagtttctcgcactaaaccggaattacggttcagagggacctgtaggaaccagaattccggttggtccccaagaaacctcacagaactggaatttcggtagggaaccagtctaccgattggggcagttttgggaaacctagtttttcccatttttgagatgtttagggtatttccatgttattcatcgatagggaannnnntagtttcaagtttaagtccccgaagagtgatttagcgtgtcacttacctatgttgtgattgttgtgatctaggagcctgtaattcgtcgagcagttgttccactcaggttggtggacacacctaaattcggaatcaatgtaagattagtataatgttatgcatatatttatacatgtttagcgtacatgttagttgccttcagactaggcaaatctatagccatcagattagcatgtcacgacatcggtgaggtgtacatagagttgcaccgagatgccaacagatatatgctaggccatcagatagtatgagttatctactacctcatcggtatgaatagagttctaagtataggctagatttgcagttagtcatattttatcgagaacgttcctgattcagttagggttatggttaggtgtatgggcggatgattataacccgggatattagtttgtttttatggtatgcttttcttactgagtctgtcgact

SEQ ID NO: 52928 - DNA, 1717 bp, Cannabis sativa
atacctcataaccctcttggctactatccaatggtccacaccacgtttgcttaaatatctgtctaacatcccaataatgcacgcaatatctaaatgtgtacatactggaagatacattagattcccaacagttgatgcatagggaatcttttgtattttttgaattttaaggttacttttagggcattgactaagactgaatttgtctcctttagcaacatggttatcacctggtctactgtaatgaccgcgtttttagaatatgaattagtaaaggcaattaacgttaattattaatatttttcgaattatggataaatttatttaattgtgggtcccattattaaaagtgggcaatagagttataatttctcaattttggagattttattatacgctagagatattatttgtattatatatgaaatatacaatttttatgatttttgctttgcgacgacggaaaatgcgatggatagccatttgagtcacatgggtaagtctagaacctttttcttagtgggatgaatattagaataagtagaataccgaggttgagcagggttatagtttttgattattttacccctaggcttaaattggcttatgcttatgcaccaagggtattttagtcatttggtaaaggggataggtggctagtggattgtgtgacacctagctagtttattttcagcataaggttaatcaaaattaagctttattcatttggaagaaaatagaaaaaaaaaaatcaagaattcctctttctctctctcttccttactcgaccaccacaaggactagcaagatcagccctaatcttcatcaattttccagattttagctggaaatctaagtatttccaagtggaggtaagccctagcacctcaattctttagttacttaagcttgaagtttagcttgattgttcaattttgagttacaggggctattagggttaggttgatttgtaattgagtttttaagtttattttgagttgagaatgagttcttgatgttgtttttgtcgtgtgttgtggtgaatgaccaagtttgagtttgaaaactttgggtcattaatgacatgttttgattttatgtaaatttctgggatttactgcttggaatatgttgtggggtgttgtattaggtgttctggaaagtttggtgaggtttgggcgcgttttggacaggtttttggattgcttggggaaacctggtgcaaaccggttaaccggtttgccaagtcctgtaaaaccggttaactggttttgggacaggtttcccaagcaatccattttgtcgattcgtgttatttttagagccttggttgggtaatttcttgtttcttagggtattgtagatttagttatcaatagcagaaccttaagttggaggtttgggtttcccagattagggttttggcacgtcgtttacccgtttatgttatgtgattagggcattcatccagcatgaagttttccgttcaggtcgactagcttacttgattacttgaattcaaagacgaggtaaaaatagcgtagaacatatgatatatatatgtgaatgtatgtatgatatatatatgcatgcttattatggctagtacactaccaacacgtgtacgaaagtggtacaaagtgcattggtatagcgtacaatgtttaaagagtacgttacggtgttaccagcacaagtacgggaaagtacagggtgt

SEQ ID NO: 52929 - DNA, 809 bp, Cannabis sativa
aaaataagaaatgaagtgagaaaataaaccttttcttaaaaaaaataaactaaatgaatatattagattctaagaagttagatctcgtgctcattacaaattaagttaaccagtatggaagacggatcaaccataccaatgacattaccaacaaaagcctatttgactacattataggccgcaaaattataaagtcttgaaacaaataaaaaattacaactagtggaaagatttgagagcattttacattgcattacatagttaccaaatgaaagtaattcccttgagtgtgttgatcaccgtctcagagtcgctatttatcatcacaaacaaatgcttcctacgagttgctgattctagggctagcaaacaggccgcaacttctccaatgagagaattagagaagttgagaatgttgctagccacccacaaaaccgactccttatgatctcttactaaggccaccacacacattgagtcgctaccaaccttaacgtcatagttgattttagtccaatcgtctagcgagggaccaaactggaggcgtagatatcaccgacgtaggaaacaaacaagaggcaaaatctacataacaaataaaaatatagtcaatacaacgcttaatgttacatatataattattagtatgaaccttatcgttccgagtttttcatatcgtgtccactacaattgaagcatacaaaaataattcttagacctcatttttctttcaagctccatagaaaattaacccaatcccacattcgggccacagactctggcacaggcatctgttggaaattatttta

SEQ ID NO: 52930 - DNA, 1285 bp, Cannabis sativa
tatgaaatctcattatttattatttaacgataatggtgtttttataaatattattattatgttattctttttatttgacaattcgcctttagaaaaaaaaaaatagttccaccgactttcttaagtcggtaagcttccccacattgtttagatatttaatagagagtcattagactatcttgctcgatatcatgaagtagtccctctctcttcaaaataacacaacaagaaacctttagttaaggaacactagagtccggtgttcaaggagattaataggtaaaattcccattcaatagtataagattatattttcttgtgatattctttgagttatatataaatgattgtttgaattatacctcggtatgattgctatgcttgctttctttagttggaataattgttttgaaatgatatatgaattagacacttgggaacaaccttaatgcttacgtagagtataaaaaaaataaatactagtcttccataattttggtgagataatagatagttttggcccttttgaacaactcatatattttagtgagatgatcattgagattgataataccattggcctttacttgtgtactgtaatattttttttagtgaaattgttatattatagttatggtttatactaagtacttggttgtgtggattataaattttattaaatggtgagttaccttgttgtcgtacttgtatgaggatgtatcacaggtatatatgggaacaattggaatttatactaagtatagattatattttctttttttttttatatggattgatatcctacaaagctacagtggaatagaaatttgttatgccatgattatctcaagaataattattgattgaaaaaccagttgaacactcaatggttgggattttgttacttgcgtttgagtgcatgcttaaactattttatttgacctgattatacttatagatccattttatttgagatagttacgaataaagagaataaatgtaactaataattaaatctataattggacaattattagggtcgaatcactcatatcttgagcaaagagtatttcactaataagaattcgtaaagctcgaaactaggtaagtaaagtactcaattacaatataagaattttatgttttataagaatttgttgtatgttatttatcctgctcttagttgcaaacttattaacatttcagggtagcatttcatgcatgatatgtagagatataaatagaaatacatattttgagtccatgcatgatttttgagaaaagc

SEQ ID NO: 52931 - DNA, 768 bp, Cannabis sativa
ttgcttgcttattggacgactgctaagaacattacttcccttcctttatctttttcctaagtcctccatattttgtctacaccaagcctctacaactcaaataccattgatatacacggtttccaagaacagggacccttctcttttcttacttttattaatttattgtttccaagaaccttacaactaccaactttaatcagatttgtgaatattgagtctcacatgggtcttgtgttcataagttcgataaaaatttcacctagaaatctatattgtattatagtccacacactcttgagaacataactcgggtgtgtcagatctaattaataaaagcaaaagtagtcgtagctccattaccatcgcaacatggggtgaactactataaatcactggtgtcacactactacaaaataaacttttagtgttagttcaattgacgttttttttttaaaaaaaaaaactgacactaaagaccatccaaatctttggtctcgaattataactaacacccatagtgacttttagtgtcgattagtatactgacactaaaattatatcttagaccaaaaaactttaaaaaaaaatatacatacagattgagcataagtatcagtttataactgagactaacagatccttcggtctcagttataaactgaaacttacaatgcattaatttaaaatagaaaagcccattttaaaaccctaccctaataatataaaaccaaaattaaaaaccctacccctctctctctctctctc

SEQ ID NO: 52932 - DNA, 1908 bp, Cannabis sativa
atgacccctaagtattaagagtttaaactagatagagagcgatactcaccgctctcagactaaattaaagctctgtgaattcctcctaagatcaaaaatccttcctagcaccagtacactaggaaagaagactcgttgtctcatattcattacttggaattgcagaccaatctgtaaggagtaagggacaacatacattttagaattttccttaccatgttaatagtcattgctcagcaatggtatctcaagcttccccctagatctattgattgatggaaaaattagtggatgcttttggcaaccaattccctccttctcgacggtgccatgtcaaacccaataatttggtatatgtgaaacaataaggagattaatccctcaaggactatattaaatagctcatagaggtagttggtcagacaaaaacacttagtgtggacgaaagagtaatggcacttgcaactgggctcaaggagatgagtcctttttgatctgacctttgtctcaattgagtttacactatgaatcactttcttaatagtgcaaacagctttatcaagcttgaagaaactgtcactcgagtgaagggctcgaaaatcgaaaagaagaaatttccaaactctctaacccctaacattggaatgccgagtagtgggggaaaagaatgtttgaatgtaggcaaaagagataacaacagagtgagaaaaggtaactcccttggtggaaagaaagccaaaactgggggcaagcccatgtaggagtcttaaccttgtttcaccacttattttattctctttgccccaaaagaggagatcaatacggccacccagtcaatggtgtcataacctcttgccttcaaatagtcagggaacagggacatgaataaattctatcactatcataacaattagggtcataatacaaatgagtgtaattagttgcgagacgagatagagttttttatgatccaatacattcagataccgtgactcgtatagtgtcagctaccctcacaatgatcccttagttgtttaggtgcaaatgtgtttgtcactcaaacacttagagtgatgatcgattatggggcatccacaaacatcttatttaagaaacccttttacaaatgtgtttgtcactcaaacacttagaaccgtgcaaacaactaatgcaaggctttagcggagcaggcataactccatgtggtaagatcaaactgccactcatagtcggaattaccttaagctagaccaccatcatggccacattaaaagtgatgaacgtaaaacataatgcttagaaggcaagatttatttgacattagagctatcttgtcaatataccacttcaccgtcaaattctaacaatggttggtatctattttctccttggtgatcaaggaaccagccgtgagtgttataatgctttgctaactctcaccacgaagacctcttgtgttgcttaaacaccagggggacgagcaaggcctccctcacaaaatttggagagacgaaagacacctgcagaggtgaagccaaggaaaagatggagacaacacctaaagccacttaaagttgcacccaagatgggataacatcaacccctattttgtagaaattttctcaggagatggtctgactgaggaactggaggaaactaccctcaacacgaaaaacctaaacaaggttgtcaagaggggaacaaacctgatggaggctttgagccagatgcccattgcttacctcaagagaaatgaagacatttttgtgtggtcgtatgaggacatgattgggattgacccccaagtcatatgtcatgcccttagcataggcaaagaaaacttcagacgtgtgtaacagaaacgtaggctccttaacaaagaaacctctaaagctttcaaggaagatg

SEQ ID NO: 52933 - DNA, 2321 bp, Cannabis sativa
  modified_base (32)..(37): a, c, t, g, unknown or other
aagttcatatttaggttgttaaacaacatacnnnnnngtagatctaagatcctggtaaactaaattccaactaaaataccatcattcccagcagccctccttttcttttcattcatcttcttcttgtttgtggaaataataagaactagtactactagctcatcaccatcttcaaaactccctccaggaccatggaaacttcccattgtggaaaacattcacaacctcatgtttggctcttcattaatccatcatacaccaatagatttagccaagaaatatggaccattgatgcacttgaaaattagtgaagttccaaccatagtaatctcatcaccagaatttgccaaacaagtgatgagagtccatgatgttaattttgcatcaagaccctcaattcttttttcgaaaatcatgttatatgatggtgttggtcttgcttttgctccatatggtgagcattggagacaggtaagaaagattttcatgcaagagcttttgaatacaacaagagttcaatctttcaaatacattagagaagaggaaatgcttaacttcataaactcgatttcatcaaatgttgacaatgctattaatctcagtgaaaggctcaacatgttgatgtataacgtcgcgtgcggcctgtggtaggacaaggattcacaacaaagagtttctgcctgtgttgaaggaagctattgaggtatcattagggtttgaacttgctgatttgtttccttcttttaagttattttatcagatgagtcgttctaagtttaaacttgagaagcttcgaggaagggcagaaaaaatatttgaagagataatccatgagcacaagaagcaaaagccaaaagagagaagtgatgaagacttggttgatgttcttcttaagtatcatgacaatgatgaccttggatttgccttgacaaatgagaatatctatgcaattaataatctgtaagtaccttcattttatatcaattagaaaaacacattttatattcataatcattactttcattttatgctaattttttatatatgaaagcattaccaatgctaaactttacaaggttgcaaacaggcaattctacaagttgcttgtgttggtaatgcacttacattagcactttagatttaaaaattttttatgtctcactctccctttttttgcatgacatgaaaaaagtacatataatttcggataatattatatctcatatatatagagtataatttgtgatttttgtttttatataaatatatacattaaatacagaatattatatattaatttggtaatttcaatattatttaccatttagtaaaccttatacaataatggtcatcataaaaagttagttaattaatatacactacaaaaaactattatttttagtgacaactttttaatcacaacataattttttgagactaaaacgtaacttttagtcacaacaaaatgctacctgtgactaaaatatagtctttagttacaagttgtcactattttagttttagtcataacaagtattgtgactaaaaacacatttagtcacaacaaattctaatttttatgactaaatacctttagccacagaatttttaatcctaacttaagaatgataatttataattcgtaacaatttttttacttttagtcacaagttttgttgtgactaaagtaagattttttgtaatgaaactaacatgatatataagacaatatggtcatcatgttattttctattttatcaattttttttctgctcacatttttcttcttattattcttttattttcatcactatatattttatctttcgtataactttatattgcaaaaaaaattaaatatatttaataattcattaagtaagatattaagctaaaaaaaatagaaattaaacattaacttataagttactccaatttatatatagcacttatgaattattaacaattatgcttaggaaatatttgctgctgggattgagacatcagcaacaactgtagaatgggctatgtcagaattgatgaagaatccgaagataatgaaaagggcacaagatgagattagagaagtctttcacagaaaagggttgggaaatgagagagcactcgatgagatgaaatacttaaaatcagttatcaaagaatccatgagacttcatcctattttaccattgatagtgccaagacaaaatcaaaagaagtgtgagattaatggttatgagatacctgctaaaacaaacactataattaatgcatgggtaattggaagagattctaattattggcctgaacctgagattttt

SEQ ID NO: 52934 - DNA, 2006 bp, Cannabis sativa
ttttttttttgtaggaaaattattatcatattattgttgtatttatttttaaataaatatgataagttgaatgatcatgtaacttcactttttacttaattataaattaatattattatcttaagataaatcaattatttaattatattatttatgtgaaattaaaaattgaaattatcaaaaataagatatttgaaaagtaaagtattatttcacctctctatattatcattgttttttttttcacttttgagagtattttttgtttttaacaatccttttggagatgaattattattgtttaattaatttttttaatgttaaaaatgagtatcatgatcacataatcaataaaaaaatatcaagaaatttattttattacaaatatagaaccattagcatttattaacacaaattatattttaaataaataaattaaaaataaaattttgcatgtacttgttgtttgcctctatttttaggtatgatcattaatattttgtattatctacactattgagagtgggataacattctctatacattaataaatcatctgaatatttaatgagaaaaaatgtattgtaagaccaaaaaattatacaaatattagggaagaggaaaaatgagaaactatctaatattacactactatacatatatatatatatatatatatgtgtgtgtgcatacataacatacataaaagtagtcttatttaaaggaaaattcacaaaaatgctgaaattttggttaatttttacaaaaatactgtcacacagaaatcttttcaaaaatattgtgtttttataaaataccggtaaaacacaaagcagaacaactcaaaacaacagtagaacaactaaaaaacaccagtgaaaacttaacacagtatacagcagtatgaaacttataaaaaaacagtaaaaaagtaaaaaataccgcctaacagtatttttataaaaaaaaatggcaaaagttagtataccatgtaaattttctatttaaaattaaaacatttaatccataatacgtatttacaaatagatattaatctataaactcactattttgtttccacaattgtctttaaaagattttagactaccactttcgagtaaatgagacaacaaatttatatcaagtaaaatattaaagtataaaaagttattctattattatttttttctttaaaagtaatattaatctataatgtatatagagaataatgaatataaaaaatatgatattctttttaaaaaaaatatatataaattaaaacacataagctattgtaattgttatttgtagataactatttaagtgtgagttataaaattaaaagtcactatattaatcatatttatgaatgattaaatagtatttattatttataggtaattacttagggatgtgagttataaaaaataaaaagacattatattagtatactactatttttttcttcattaatatgcactttaactacacctaaatgtggcttaataatagtaataattatatatatataaatagtgtaagttataaaagtaaaaaatacacattgatcatttaataaatacaatgtctattagaattcttttttttattattattattaattagttgttattgatgttaataaatgaatacaaaaaattaaaaaaaaaatgtagattagagaaaattgagcataagattaagagaatgtcacatcaattaatatataaatattctaaatttgagcattaattttaacaaatattggaattgaaaatttgtaagtgtaattatagagaggaaggtcatgatcaccatgactacaaaatgtaaataatttttttttttacaaaattatatatttaaaaaaattaaaattttatttaataataattcaactatctattcgtatcaaatcaaaataaatattattttggattaatattttttgtttatataaaagcaaatacatattgtaagttattttggtatagaaacatttaatt

SEQ ID NO: 52935 - DNA, 1550 bp, Cannabis sativa
cgtttctttcttagccttgaaattaatcgaactaagggagtcatctctatctcccaacgacctttcaccatacagttactcattgatataggacaaataggtgccaagccagcctccacacctatggaaataaacttgaagctgagtaaagataaaggtgcaacactcacagacccgactgtatatcgcaacctcattagcaaactaatttacctaaccatcacaaggcctgatatcacttacgcaatcatcatcttacctagtttctatcttgtccccgggtgcatcaccttcaagccgcccatagtgtcttacaatatctcaagaagactccaggccaaggcattgttttccttcaaacagcgtccccaacatcactgcctttgcagaaacaagcctctcatctagtgatgttcaactttccttctttgctgatgctgattggggtagcatgaagacacaagcaaattgatttcagggtattgcaccttccttggtaaatccctcatttcattgaaatgaaagaaacaagttgtatctcgatcctctgctaaagctgaataccgagctatggccaatgctacatctgaactgacttggatctttgccattctcaaagatttgggtgttcctgtttccacaccacctaagatgtactgtaaaaacacggttgcaatccacataagtaagaatcttgtctaccatgactgcacaaaacatgtggaaatcgattgtcacttcattcgagaaaaggtccaacaaggctccttacaattgatgcatgtctcctctcagaagaatttagccgacatattcataaaggctcttctcccttcccaattcaacaatattgtatccaagatgggtgtcattaacatttacactccatcttgagggaggctattagagttagttaatatagtttagtcggtaagttagttgttaggtgtaaatgtcagttagttaagttagttagtctttcatcctaactaactgagttgctctatgcctatataaactcagctcatgtattcctgcaatatatcgagtaataaaacaatattcaattccaattgctctgtttttctctcatactcactaacagtcatgaaccaaaaattaataaaatacaccctaatggttgattaaccttgatcacatttaaattcataaaatttgcaaataataaaaaaattactaaaccactaaaatcatcatcatcaatatctttaatgaatccttctattgcctcaaatccaccacataaattaaactcatatgaattaatataatcaaaactccataaaattaatatcaatccttaccaaataagccttttaacatgtgtggatgagtgatgagctgcaccatggttgactcgtatgtaaatgagggaggaaatataatgacaataaaatagagagggaaaacgaattgatagagactgagcctctaatttttgatctattcaacctcaaggccaaacaatcgactccatgagcaaagaaaaatttgatgctctgttcattcaaacgagagagagagagaga

SEQ ID NO: 52936 - DNA, 2316 bp, Cannabis sativa
gtttgactctgtgttttgttgttgttttggttttgttttgttaactcttagggaaatggtaaattcccagtggagattgttcaatcaattgatctgtttaagaacataattgaaaaaatagttgtttgaggtgtgtgatttcattattatagttctaatatttttttatgcttgtttttgatattctttaatttttttgtgttgttttagttttttttttaatagtgttttcttatattttttataggattagaaatccaagtacacccggtcggaatactaccattccagagttataacctctggttattacactgttattgaatatattaaaaattttctttctgaaacccaattaaatatgttttcaaaaattgtattggaagttgtttttgattgcgtagtagctgaggacattcttcagtgtttcctcgtctttgtatgcctgacctttttcaacttctgggtggtgtttgtctgttattagtttcgcgttgttgatgtcaattcctggatctagttttttactgttgttttcatgtttttctaccatttcttcagcaaccagatttgcatagtcaactatgtcgaatttgatgttctcaaattctcttatttctaactctcctccttcttctaattggtgtttgagtgtgtatgattctgttgttattgtgttgttttcaagcattgttgtgttgttttcaagcattgccacattttcttgatatggtgttgttgtggatgtgatatttgacataactatgttcttcttccacattttcgcaccccgatgaagtaagtagtatctgtaatagctcttcatacttgaaatcttttggtatgaattctccactagcctcatatttgacataattatgttcttcttcccattgtccattgctctttatcataattggtatagattttataacctgtcatttttcacaatatttcatttacttgaccttttttccaattaaaacaccagtaaaataacactaaaaaacaataaataaaaattattttgctggtgttctttttaattatttgactgattctcttgattagcaatgaatatatggttataaaccaaaaataactttagaacaaccttgaattttgtaatgtacattatcaatcgtttcttagggatgatctatatgaatattttttttcttttttaaatagaatgtataattatacattttcaaatcatactttttataattttttgaattttcagatctaaatctgggtgtgttactgttcacaggacaaaagaaaaaaaaatgggccaggatagtataaaagaaaaatatgggccttgacagtataaaagaaatttatgccgtgtggaagtatttttgtaaagattagggaaaaagttagtatttttgtaagtttccctttacttttttaaattttttgtatagaggtattagttatgcttataatattatttttgtaaatttttgaaaaaatttaaataatttataataccgaaaaatacgtttaaaattttttgaacgcgtgttgtaaattaaaatattaagaattttatttttggcattgtaaactatttgaaatttttaaaatttacaaggataatattgtaactataacgaatactgctataaaaaaaaatattctggcatgtgattccaaacatgaaagttaactagataaatgtaataggagattgtaattagcactcctctttttatgatactaaatgcaaaactacttttatgatagggaaaaataacaaaataatgaaggttttattattacttttttttcaatcaaaataatgaaattattttatttatcttttgaactggttatttttcgaattgatacatggtactagatgatttatttcatctaaatatagtgagtagtctctcatgagagtaacacaaacatccgattttttgtaagaaaatgatgaaatgtcaagggtaccaaaacctatggatacctcgaatgatagaaatatacgagaaggtgcgaccgagaaagaatttagtcgcacgctactatgtatctcttagtatggaacataaaagagggacatagagagaagtgagcatcaatcgtaacgtatatcgattatacgtgatgacatgttgtttctcccccacttccaagtgaaagttgcactttcactacaaattgtcgaaggacccaatatacgcaattactcgtatgaacccgcaaattcatgtgttgccaatatacgaatggcctcttacgatctatatagtcgtgtccattcgagactttaataagaatggtcacaattgttctctc

SEQ ID NO: 52937 - DNA, 1397 bp, Cannabis sativa
tgaatgaggtacgttcccatctctgtcaatttttcttagtgtttttttatgacattttggtttatagtagcagcttaagcgaccatttgcaacacctttccaaagttcttcaactcttgtccaaccacaagcattacgctcatctcaaaaaatgttcatttgctcgtcaaaaattggattatttgggtcacataattttgagggaaggagtagcggtggaccaatccaagattcaagttatgttagagtggcctaaacccaagaacatcagggagttacgaggtttcttaggcttaacaggttatattatcgtaaaaatttgtgttaaagggggtatagtgaaatggcttggccattgacggagcaattgaagaaggacaaatttggatggaatgaggctacaactatcgctgttgtaacacttaagcaagttatgaccatggtgcttgtgctggctttgcccgattttgaccaaccctttgtagtggaaactgatgcgtcaagatacggcgtcagggctgttttgatgcaaaactagtgacccgtggcttattacagtcaagttttaggacagcacgcaaggttgaagcctttttatgaaaaagagttgatggcaattgtatttgcaatccaaaaatggaggccatatttgttaagaagacagtttgtggtgccgactgatcagtaaagtttaaaaattctacttgaacaaggtattgttgccccagaataccagcgttggatggttaagctcatgaggtacaattttgagattcagcacaagtcaggggtaggaaaccgagttcctgatgctttatcaagagttcaccaaccagttgaatttaaaaatatgcttgtttctcaaggtattgactgggtagcaatgcaacatgaagtgcaacaagatccgtttttaactagaatggttgctgatttagaataggggaggtcgagagtagctgagttttctttggagcatggaaaattaatgtacaaaggacatttgatattgtccaaagatagctcacttattcctactattttgcgagaataccacaactctcatttgggtggacatttaggtgagaataaaactttttgaaggattgcttttgatttttattgggtgggaatgagaaaagtggtggttgactaggtatgagaatgttaagtgcgccaaaaacataagactatgaatacttctcctgctggtttgttgccgcctatagcattaccctcgctggtttgggatgaattgactatggatttcatagaagggttacccagttcacacgacatggacactagggttgtacataaactattgtaaactgcccaacccgaataaccgtccaaaccaaactgagataacccgacaaaaaatacaaaccgaaaaa

SEQ ID NO: 52938 - DNA, 1395 bp, Cannabis sativa
ttatatatttattaaaatttagcagataaatatagggataatctcacaaatacacaaaaacaataaaaaaattacaaaaatatggcttcacagaattttaaatacttttacgaatttttttattttatttacagagaatgcggtcttcttatgttgtactcttgttaatttgttgttgattttttgttatctatatgttattttgatgttacttttatataattttcttattgtttttatgttgtttctatgaaaaatcgtaaaaatgtaaaaaattctttaaacgtaaagatatattttttttttacaaaaaatagtcccttatgtaattatcccataaatatattcttcatttcatttcgatagagtaatttacaatgtaaatatttaaatttagctttcagttgtagattgatacttaagtaaaaataccttctattaacattctggaccttctgtaagtaccttaccgtaagtaccaagtcagtacttacgtgtcactactctttaaattgtctacatcattaaatttggaactgagagcttaacttaagtatttacgttgtaaattactcgttctcatatattgtaacacaaacagtatattataatattatatatttgtgtgaatggaaaaaaaaattatatcgaatttttatgaatttgaaaaatgtgagaaaaattttgtctaacgaatcctagctgtgaaatataataacagtagcagatgcatcacttgattcacatccatacaaacagatgctaaaaacgtgacattaatgtggcgtttggttggaggtaatgaaataaaatagaatgaaaaagaaacaattttcattctattatcactactataaaaaatagtttttctcgacgtttttaaatagtcgtttaaagtattcccgtcagtttctataaccgtcacctatacaactgtcacaaaaccaaaataggcaacggttaaaaattgtcgctagtgtggacttcccgacgatttgaaatcgttgcctataacagggtataggcgacgtttttaaattgccggtaatgtaaaaaaaaaaaaggagaaaaaatacctatttttctatcattaatggcagaaaaatctttattttcccccattttttttcatacattagttttataattttacctaaattaaaataaaataactaattaattttattacaatatcaactaactttaaaacacattaaatttacacaataacaaaataaatatatataataaataaaaaaatatataaataaataaatgtatttataccgagctcggagggagagagagacggacaggaggtggtggtagttcgacgtatgagacggagatgagaggaacatcgacgggaggtggtggtggtgcgacgtatgcgac

SEQ ID NO: 52939 - DNA, 1116 bp, Cannabis sativa
atataaatgactttatcaagatcaccatttaaaaaagcggtcttgacgttcattttccatatctcataatcataagtggcagctatggaaagaagaatacaaattgatttaagcattgacgcatgaaagaaggtttcgtcataatcgacaccttctcgttgtgtgtagcttttgtctacaagcttagctttaaaggtctctacctttccttcagtatttctcctcttcttgaaaatccacttacaccctatgggcgtaatatcttctagtggagtttcatattcccagactttgttggtgcgcatggattccatttcttgatccatgatattgttctacttgtcatgagtcagggtcttccattgcttattagtaagtcaatggatcttccttgtctatgttagagacaagaacatgtacttcatgttcatagcagacatgttgtctcacaatcctcccactatgataatgtaccaggatttcctttttaagaactgtggtaaccgttgtcattcattcaactaatggtgctaaaattggtcatttagaaatctgctcatttctaatttcctcgataactacttgactctggggtttgtgacttttcatatagtcatgttcaaaaaaagtaccatttgttgacttgattgctatagaaataggcacttcgagtttcatttgaatatcctacaaacatacacacttttgatctaggagcaattttcccaatctagggtttaagaacatgagtaggacaaccccaaatacagaagtattttaaattgggttttgtcctattccataattctattggggcattgcttatgctctttgagtgtactacatacaaaatgtaggtatccccagaagtttagtgacagtgatgagtaacatatcatcaatctgactatgtctaataagatctagtttcttctctttacaacactatgctgctgaggtgttctaggtgctgtaagttgggactgttgggattttatgccctaaataaaacctattttaataaaattaaatttactaataaattaaagatcaaaaattattttatgttgcatggttcaaatgattactttcataattatatgtttaatgtataaa

SEQ ID NO: 52940 - DNA, 922 bp, Cannabis sativa
ataattcccagccaaaaccctagctcgggtttctgttaattctggatcttgcatttgtacctctttgatttgctctaaaagagtagattgcagggtaatattagccaactgccccataactaactcaatcttagctcaggtcatctcatttcctagctgctgggagatttgtttcacagtgctcaactgactctaaccctttctgcttaaggcatcagcaaccacgttggccttactagggtgataaaggatttcacaatcataatcctttaccaactctagccaacgtgaccccaatagtgactgctaagagtatggcttacaaagtatgaaacaatgatagaaggtcatgaaataagagtgaccttgactctcgcctaaatgggacaacgtcagattttttttttgatcgaataaaaggttactagaatggtgtctattttagacaagctaactactctatacaatgaatgctatctttgactctcgcctatacgagacattgatatcagtttgttaaaaatcttagaaaataattgaatatattttaatttttagtttttttacaaacatatcttttatacttgttattttctaaatatgtgtttgaatttatttgagccaagtaattatgtagtgtcaaaatgttgtttaacaatcatcaccccaaccctcatttactcaactcctttgcaaatgaactccaatgtgcaaagatgacttctagtcatgagtatcacttcacacttgctattattttcatcatcactaaatcttgacggccaggctacacacggtcactgctggtcacttcagttgggtcaagatcatcacagacatattcgacattgtctagttgtggaagttgtatgactaaccatggattccacaagaatttcttttatatatagttgtcgtttct

SEQ ID NO: 52941 - DNA, 537 bp, Cannabis sativa
  modified_base (443)..(455): a, c, t, g, unknown or other
gaactttgattagatatgataaacagccgtaatatctattcaattcaatatcacctagttttttttgtttgaatggaaaaggatgctttatttaaactttattatcatccattgcaatctttaacaattcagaaggagaattgtttttaacaaaaatacgatctgacaaataacaagaactacgtgcaaggaaatgcgcgaccttattagtagaaacgcttaacaaatcacaaatgaacatgagacaattgagaaagtaagtgctgacaatcttgtacaagcataccaaatgaagatggcaacaccacatcaaaatgaatagcttgaacaacaatgagacaatcggtttcaagcactactttgctccatgtttttcttttaatccaactgagcacttcttttatgcccaacaattcgacaatttcacctagttgatcctagannnnnnnnnnnnnatcctgacatgattaggttcgatctcgagagtgttatttgtgttctttgatttgttagtgaagcctactttttggtcagggt

SEQ ID NO: 52942 - DNA, 1338 bp, Cannabis sativa
ataaaatttggggattttaaaaaagttaagatttgatctaattatatttatatatataattatacagtttaaattttgtatatgatatgttttaaaaggaatatgatgaattttcttccatcgtattgtacaaatcaaaagagtatgttttgaaatttaaaattcaatcgtacaatatagagattgatcaattttcatgttttgttatttaaaattttgttgtataattcatatgaatatattatgtttatataaaaaaaagtatgatataataattaggggtgtttacggattgatttagtccgaatttttaattttttcaaaccaaaccactataatacagttttttaaaaattcaaaaccaaatcagaccaatgaaatgatcaaaccaaaccatactactcaaaaatggattaatttggttcgaactgtgatttgtatttcgtacttattattttacttttttttacaatataattgttcattttttcaatattttttttcagttttaataagtttataatacataagtaacaataaaacaattttatcgtaataatataaactcaatatcaatattctacttaaaattgttcccaaatattatccaaaaaagatatgttaagtatatatataataattatacagattggtttggtttgaaccgctaccgagatttcataaaccgtgaccgaaccagagaatttaaaacggtctaaattaatcaaatcattccaccgaatttatttggtccggtctcaaataatttggtccgaatttgttaggatttggaactacaaattgcaaattatatgaacacccctaataacaatacacgtttttttccttttcttaaagaaaccaacctagtgtatatggtatggctttagtttcaataaatatatctatttgattaataataatcgcaaattatggtatatcaattcgattaagtttgtatatttatgtgcctatttaagtttaatatatatataagttgtatatgtatatatacagcccattatataataatacatttggtcaaatatatgatttatttattttctatacgatttcatgtatatatattgagtattattatatatttactttggttcaaacaattaaattcaaattttagttttggttttttcttaagaatgtctaatattttaaataaattaattaaaatatgtcaccaaagtgactttttttgtgtagattaattttttaaaaatattaagatggttgtgtgtttataattgatgcatatattgactaacccaaaggtaagtgaatattttgttaaattttaaacatacttgtggcgataaatgt

SEQ ID NO: 52943 - DNA, 1205 bp, Cannabis sativa
  modified_base (1166)..(1179): a, c, t, g, unknown or other
tcaaaaacggtaaaactgacggtaaacttaataatttaaagagaaacggtattattagaaataaatgggaaaaaacgtgtcccaatgtaattttccctttaaatattattaatggtactggtaaaaaaaaatattcatgtaattttattattatattaaatatttactcatataattgtctcatgtgttgtatttttatgaatatatattattttagactttatattttagaaaaattacttatcaatctctttattttattaaataataatttaggcttaatatttttcaaaatatatgattgtgattggttcgagccacttgtgtcactcattatttgacagtgtggaagagttgtctaaactctccaattttgttcccatttaaagagagactaactcaacatttttttttttttgaataaattatacaattttattaataacaattaactaaaataataacaagcatttcaatcggaacattttccttgttagagacatgactaggattataattaataaaacgagttaaataattagtcgcctattctccaaattatttgacaaaaaaactaaaattaaaatcaaataaaaaagattgcagcatgcatcacagttaatcttaagaacacctatattcagttttatatctaccattcagaaaatacaacattacagattgttgcagcacgttcattcaatctcatagcttgagcactcaactattgtgtaagctacgcaatcacactactaacaactccttcagtcgtagagaacaacttgacttgttatttccaactactctactaacatcgatttgatggcgagccatcgaagaacaaagaagaaccaacaacgaaacaaaacaaaataaaaccatgacatacagacaagactaaaacacttaaagccatgtcacagaggcaagactaaaacactcaaaatcatgtcacatagtcaagactaaaacactcaaaaccatgtcacaataacaaaaatcaaattgcaatagtaaaacacagccccgattaagccgcacctatgctcaaggatggtcgacgagcctggctaaaaaaaagacaacctataaatttaggagcaaaaaaaaaactacaattttttccaacatttgtacactattacttgttggaaatattttaccannnnnnnnnnnnnntaccatgtatgtttcattaacatcct

SEQ ID NO: 52944 - DNA, 895 bp, Cannabis sativa
tgatcagatccatgttggtgatggcactggtcttcccataaacaatgttggtaagactttctttcatactaatctcacttctaaaacctttattctcaataatcttctccatgtacctaatatcactcgaaatcttctcagtgtatctcaattttctcatgataacccagtttattttgaatttcatcctgagttttgccttgtgaaggatcaggtctcacaccaagttctgatggaaggcaaacttaagaatggcctctctgccttcgattctgacactgtctctcctagtcctgcaagttcttcatctgctgcatatgatttgcagcctcaaagtctgtctttagctgtcaatgtaactagttcagactccaatgtttctcttttttcattgtggcatggcagattgggtcatccatctgccaagactgtcaaaagtgtactgaatgcatgtaatgtccctaatgtcaataaaactatctttgatttctgtactgcttgttgtaaaggtaaaattcacaaattcccctttccaaattcagaaactaagtacaccaaaccattacagcttattcactctgatctttgggggccttccccaatcttgtcatcatgtggttacaaatactacatacattttatagatgcattctctaggtatacttgggtgtttttattaaaatgcaaatcagatgccttagcaacctttctaaatttcaaaaaccaggtggaaaatgagtttgattgtaaaataaaatcactccaattcgattggggtggtgaatttcaagcttttgaacaaactcttctcacacatggcatttctcatagactttcatgccccaccactcatgaacagaatggtgtggccgaaaggaaacataggcatctcatt

SEQ ID NO: 52945 - DNA, 895 bp, Cannabis sativa
atagtaattgaaattaaatattattgagaataattattaaatttgatgtctttatttaacaatgtaattacatagtagtaatgcaattaaaaataattaataggcatcaattgtatttttcaatacttataatctcataaataattaggtatacttatattttataattacaaaatatattatttttaaacaattatttattatatattgttgctttaaaaaaaattattattatattgttattttttttttatgtagttactaatttatttgtcaaaaaataagaatttgtaaggctcgatatccaaccatacttttgttaaaatagaatataataccataataattaaatttcaatttcaaaacatggcctaaataattgtaaaaatcaactaaaattattattaaaaaataattctaaaaaataaaatgaaaaagttacttacaattagtatgatgagatttaggttggattattaatttttctcttcttaataataataataattccaaaaacaaatctcgaaataataaccataacaatcactaataattattttgagatttagggaagaaaaaaaaaacgaacaaagaaaagttggattttttttttattctcttcttgaatattattccaaaaacaaatccatccccaaaaaattaagggaaatattattttatatgtcattttttaatattttttttttttaatttatagttttggttcttttatctagtggtttcaatgtaggttgttacaattacaatttaaattgttttattaattgctgtgtagattttcgtaaaaatacaaaaaaaaaaaactaaaaaaaaaatctcaaaattaatatatcgctaactaattgtaagtgtcatcttttaaaaaacaccgagt

SEQ ID NO: 52946 - DNA, 1406 bp, Cannabis sativa
atatgtagactttaagaatgtcccatcaactatcaccacaggaatacaatgcaaccatccttttcttgaagcattcaatgctacaaaaaggaataagaagccatcttcctctgttttgagctccacaaaagagactggatttgtatgatgcaacaagtaaagatacttggctatctcagagtaagacttaactacatttcctctcactttttcttttgccttctgtattgatctccaagctttgctgtatttgactctcaatccacgaattttcaactcatttataacatctgcaaccgtggttttagtcttgatgtttgtgaatttgtacttgatcatgtcttgaatgatggttgaggttgcttgacgttgatctttcaatcttatcttcatatcgcagctatgattgtcctcaaaagtcataattataaattgcattgtgtttccattccttgatgcccttaacttccagctgcaatttttgtcaaagcactccgctaggaactgtcttttgcaagattttttcacgcggtactgaaaaatgttttctaattgcatagtggctcaacacagtcttcaaggtctctttatctttgtaaatttgagacggagctatttcttgatagtttttgttgttgattactgaatcttcgtctattttaatctcttctgcatcgttgtttgcttcatttcccatttctattatttgcttggcaaccaaccttgcattggagatataattttcactctcatctgcatccatgtcaacagttgcttcttcatctgaatttgatgttccttcttcagcttgtcccaattctatacccaattcgttataagttgatgtacttctggttgaaaaaaaagtggtctcaatatggttaatctctgttgatgtacttcttgttggaaaaatagtcgactcaatatggttattctccattgtaaggcacaacgggtactttgtaaaatatgaatcttttttcttcaactccttgtagaagtaaatctggaggtcatcttctatgtggaatggagggtagttgtcttttccttggtactctatttttagagttgttgatcccagatctatcttcagctcattacatatcattccaaccaaggtgttgtagttgcaattattgggaatgaccattccgcgaacttgaaagttgatgtaattttgattttcatcccaatgaccactatgttggattacaatgaaaattttatccatattttgcatccagaaaagatagtatgttaatattacaataaaaagttgatgtacttttttgctcataaaaaaatcagaaatataatgagaaattatgcagtcaacattttatttgtttaatatttgaattttttagcaaatggaagaaatcaatattagtatgtaccat

SEQ ID NO: 52947 - DNA, 3253 bp, Cannabis sativa
gtaaacaatgatactcgaaatataatagttcagcatagcttaatctgcctagtcacaactagaaaaaccccatttatctttgctttttgtatggtctatatcttcggtgttaaaaaaactcaaaatcgaaaactttttaggcgatgacatataggtttaaaaaatgttggaacctatgccttcgattattacaaataatcaaagacataggtatttattttctttaaaataattgatatttttaccttcaatcgaagccaccgtttaacaccgccacctccaagcctcaaaacccataaaaccctaaattcaaataattttattttttttttttgactttaaattcacttaatcctacgcttatgtactatattaataggtctttaacaataaaatccttaaacaatattattttcgaattaaaaaactcaaaaatacaaaaaatgtaatgcaaggtaaaagacatcaagttaaagtaatttataccttaatacaagttaaaagacaacatcaaaatcattaaaatcgatgccattaattgaccgtcgttgtctaaaaaacctaaaaaatctatcagcctaaacatctatgtttgcccttaaatcctaaaataaattaaatttaagtattattaccgccaaaaattaaacttagatatttatttatatttaggagttaatatcttaagtatttatgctgcaaattatttttttttattattaattattgaatttttttgactaataatttactctgtaattttataatagtttttttttttttgaaacagataatagttttttaaagtttttttaaaaaacacatgtttcaatttagattagaaagagtgagacttgatatttatttgaaacaataagaataaacatgttttcatttccactttgctgtaaatgaaaaatagaccccaatcaacagaatcttttactctttcatcaaaaaaaaaaataaaaaaaatagaagatatataaaaactttccttaccaatattgttttgggtccagtcaaagatggcgagctccataaacacaatactatgaataaaaattagtataatttattaatattttataaaaattggagtacttttgcaaaggaaatgtccaatttgtactttaaggataatttaaagaccatgaagaagataatgcaaagacgcttgagattcgaacaaaaataaataaataaatagtatgatttatgagaaagtgatttaagattggtgaaccaaaatagtcactatcttaaagagatattagaaaatattgtctataaaagtatgaagtcatatataaaaatataaattatttcacttatcacaatcttgaaacaaaacttttggattgtgaaggaaactaaacgtaccatatacattacaatgtatctgaatatactccctttatgtaatttccttttatcttatattttttgactaccgaaaagtgtacaattggaaaaatcaatatttgctctaaaatttagaccagatatctaagaaaataatttgtgtacatttaagtaatcaatgtcaaacaattaataaatgagaaattattacaataagcaaacatatttttaacaatacaatatataagtaagaatggtcaacagtacacatgattttttttttttttaaaatgacaattttagataatgattaatatttgtatttgttgaattaattgatcggggatcattagaataaaaatcaatgaacaccggtcacaccacgtcttatacaaagtccaatcaagtgtgtttgtttttagaaatattaaggggtattttattgtgccaagtattacgagaatagagttgatatatttttataagttaaattaatattaaattttttataatttaatttaataaataatataataaattaataattaattacaaggccacattaatatagtatagtattgtacaacatactgtacctaaatttatttaattttgtgatggttttattaataaaaaaattatatttaattttttaaaatacaatatttttgtgagagcactattacaagggtttcgaaatcaatgcctgtgaatgccctgcatcggttacagcagatgacatcgttaaaaagtgcaggagctcaaccgagaaacggtaatggtgggacaagcgagtgttgtctaagcttaacttgcaccagagccaccagctcatgtgggttcgggccaaccacatggtctatgactactgctccgataccgctaggttcccaaccgttcccactgaatgtgtccaccaccaccactagtccatgatggtctggtttggtgtgtgacaatgtaaaaagaagaaagatggaaaaaatgaaaaaaaaaaaaaagtatggagcttggtgggaagttatgcatgtttgtgtataaaaacatgttctccatgttttttaatttttggtttatgttcgttcttttgttcgtttactcttatttccttcagggtgtatgatatgattagttttcaatatgatttagtttctacttacaaaagattttagatattggtcactaactttttgttaaggaaggtcactaacttattattatcgttaagtgaaaacaatctcacaccaataaatccatcaaatttaataacaataataacattaactgaccaataaattacctaaatattttaattgtgattattagatgttattttgaattggataacaatggtgttggatgttcaaatatctaaattacatgtatattcaattgaattaattaatattattatttaattttaatgaataattaaattgtaaatgtggttccataaacaccaaattatggggagaccacacaataagaggaaaatatagttaattaatggggtaggtgggggagagatggatatgatgcactgaaagaggggaagaaattaggcagagtggtccgataatgttaaaatggacgtcatttttttcttttgggtggggatacatagccccctttaaagagaacttattattttggcagagataatcagaggacacaaaccccacgaagataagataacttcaaacatattttcccaagaaagcaaaattgtccaaaaaatatacgagccttggaaaatgaggggccctgataaattggaaatattgtttatgtttttatatagtacatggatattatttgagtaaaactagtaaatgcattcggccattcatatttgattatgagtgtagtgatctgtcttttcccgctt

SEQ ID NO: 52948 - DNA, 1523 bp, Cannabis sativa
ggaaaagaaaagaatggaaatagctttctggatttatcaagcctaaagtatttctagcaatgtgctctcttgatagaaacttggtgtcttacaaaaagaatccaagacctctatttataatgttttgaggatcacatatgaaaattaaagtcttttcaccacatggatgttaccagcactttaattggtatttaatggaataaaaatgttggacaagagagatggaaacatgctcaatcaattcatgtatatttatggatgttttaaaaaattggttccaagtgttcgtaaaataaccataaaacaacacattaccaaccataaaacaaccatttctagaaaaatcaatattgagtttttgtaactcctctccgagtcaaacattttctcaatgtctcaatacccatttaaattatataatgagtattataatagtttctaacaactagaaacttatctcattaattccataacttccatatgtaaaactcacttaattacatattatcaattgtgatccttaagttaaaatctattttcaaatttgtaactcctcatatgttacaacttttatgtgtattattatacgatatatattaatctcataataatatataatatgtcatatttaatattttaatctatattatattataacaaataatataacatatcgttcctttatctcttcattaaatgaagctagcaagataaacctagcacgaatattattatcatgtcatcggttaaatgctcccctgactgcataaccagaatgttcatagaatgagatccaaggagtttccacatagacacgttgaaatagattttctctttgcaaaagaagttctatttcaattctccattcagattggaaatcaccatcaaacatagttatattgtaatagggatatgtattcatattgaattgtcgtcctatttttatcgttattagactgaaataaaaataaataatataggaaataagcaataggatataaatacaatataagtactataaataaaaaataaatgtcaagtttgaaatttaaatatgatgcatgggaaaacttagaaaaatacgtaaaacaatttagaaatccacgataagattatctaaaaattaaagttctgccttagggtcggtcaaattaatatcaaataatctacaagatttgtttttgtctttattaattgcaattaaaataactcttatttcttacaaaataaagtacagtttgtttggtcaagttatgtcccctagtgtcaaaaacagggacatgactttgtgagtgtaacccattattttagattccatgacttaacttagtaacgctgacttaaggatcggtattgcactaaaatacatcactttgtcctatcctaaaaggaagctaactttgaaaatgtatggttcaacacctttctaatggggaaaaaaaggggaaatttacaaaaatactggaatttgggttaatttttaaaaaaatactggcacacgatttttttttcaaaaatactgt

SEQ ID NO: 52949 - DNA, 742 bp, Cannabis sativa
acaagagaacaaataaaaaagtttgatcctctaattgatcaaatttgtcttttatgtgttgttgataatgagagcataagtcatttatttttttattgtcagtataggaagacttgtttgtaggaagttaagtgttgaatgggataaaaatgtgcttctgtggatttattctaattaattaggtggattcataaagcaaagaagatgagtgctactaagaggagtatcatgtatgttactcttgcgactttactctaccacatttagagagttgggaatgatgtatattggtaccatataatatggcatataattaacacattatagatggttgaaaatgatatacaagttatgattactcttgtaataaaaaagctcatacaatagatagagattggtttaatttgttatgtcaaaaattgtgtatagtttttgaatttttttgggatatggttgtacgtggttggttaatatatttagaagttgaacaatataatgattcctattcataaaaaaaagcttattttataatcgctctataaatatgtagttgtctctaaaaagcactggggttcttgtattctcttcttccctattagagaaaaatacatcaaataatagtatattgtttgaagatcaaaactatctatgcaaattctattaatggtttcaggttagtgcttccactctcgtgttcatcatcttttttttatttagcaaaggtgttaggctaaaattagtc

SEQ ID NO: 52950 - DNA, 809 bp, Cannabis sativa
ggtagtgaataaatggtagaagtattctttctctttttacattagggctagtctagtgataaacacatctcgaaaattcaatatcgataaatatgttagaatattgagttgatatttatatagatatatctatagatgtgttttgaataggattataatttagaatatatgtttcgaatgattgaattataagttatatttctaggtttatttcaacttaatctttttaaatttttatagatgattaatttattaatttctcaaattggtttctctatttatgctttcacctaaaaatgttagaaacatatttataagatgtgggagacttatcattgggacactcatggtggcttcttcttcttcccgccaaaaccaaattgtagtttaaattaaaatttatgagtataaataagcaatttaattaaattaagggtaattaagatttttaccgatgtaccaaattatgctttctgaattttttagtaagtttgaaatttcttccgaattgatatcctatcgataaatatcaaatacttatcaaattttgatagttaagaccaaacaaaacaatgaagttattcattgctacaaaaaaaaaataaataaccaaacaaaacaacttatcgataaatcattgataatatatcgataactaccaaagttgacaaaaaaaaatataaaaagagaaaccatcgagaatctattgataaagtatcaaaaacgtatcgacaatcaaattcggtcagaaaataccataactaccatcatctctcacacaaatccaagaaacacagtatattataata

SEQ ID NO: 52951 - DNA, 1384 bp, Cannabis sativa
actcggacctaaacccggacccagacacagactcagacctaaacctgaacccagacccgaactcggacctaaacccgtaccccgtgacccaaaattggatgcggaactgtaagcgtatcgggacctgggaacaagaccgagggactgggacccagtctcattctcggaactagaatctgactaggacgaagacccaaaccgagatcgggacacggagccgaattaaaacttagatcgggacttaggacacgaacaggaacctagagacgtacttggacccaaacccagacgcacaacccggaccgggattggagactcagacttggacccaagtcctagacctagattggggaaccaaccttgaaattagaaccaaaatcgggacccaggagtgggattgggacccaagacctgaccctggtttcagtcctcgacccgaacccgaacttggacacagacacggactaggacccagtatccgaattggaacgagaccgggacccaagattgggatccgaatcttgacccatgacccggggcttggacccaaccggtagttagtttctcaatcttagaatcgtaccaagacccaaacctagaaccatttctagaccaggatccaaatgcagactcagactcgggacccgaaatcaaaacaagaatcggaatgaggacctttgaactggaattggacttggacccaaaatcagatctagatgcagaaccgaacatgaacccggacccaaactaggatcgataccaagacccaaacccgaacccgaaccgacacttacgccacgacctgcgacccagaacctgtaaccctggactcgtgacccaagacctggaccagaacccagacttgtaccagaacctagacataaacccagacccagacccagaccaagactcggaccaaaactcagaccgaaaaactggacccagacccagacacagaccaagagccgaattcgtaccagaactcggactcgaacccaagattcagacccggaccgagatcaggactgggccccagacacagactaggatcgagccctgaacctcgactgggaccagaacctggattgggaccgggacccgggacccgggaccgcgacgcgagacccaagactcaaacctgggacctaagaaccaaatcgtgaccttgatgggggactttggccccaaacccgaacttggaccaagacttgaacaaaggatccgaaccatgggggacttggacccaatactgggcctcaaaactcagacccaaaatttgaccctagagtcgagacacaggacccgaccttagacttggaacccaggacctcactaccaggacacaaccccaaactcggacccaaactaaaacttaggactcggc

SEQ ID NO: 52952 - DNA, 1482 bp, Cannabis sativa
aaaacttacacagtatttatgaaataaaaaatatagtatttttgtaaaaaattctgcctcacagtaaaaaaataaaaaagttataatttcagtatgaactataaaaactctaaaaatatttgttacacttcaaatactcttatatgctaaaatattaaaacttattatttttgaaattttaaaaatatttttttaaaaaataataaattaagtgaagtgcttgcagcataaaattttaaatttttaactattgaaaaaaaaaaaaataaagaaatggtctcaactctaaataccaaaagcaacaagtattttactaaagtgggggcgaaaatttatttaattatagcattattcgctatcaacaaaaatacaaatatgattctctagctaccaaattatacttttacctgccgataaagcaactttagccaaagtataggcaacgccgttgcaaaatctattacaatgtctaaaattaatagcttggagcctattacaaagaccaaaaatataatctaaaagtagacccactgaagtaatggtagaagtattatttttaaggctaattagaattttttttttccctaaactttgacatgtaataaatcatgttacctgaattttttttgccgttaaaaattcctcctgaaatattgaaattgttagatttaaggactttttcctaatttcattcaattttactagttcagtgattgtttatgtgctaaatcatgctcttcaaattttgatatctaccaaatcatacccctcgaattttgacatgtactaaattatgtcacgtgaaatttcatccatgttagacttccttactaaaatagacaaaaagtccttaaatccaacaatctcaatagttcaagggaaatttttaacgaccataaaagttcagagagcatgatttagtacatatcaaattagcctatttttaatgttaagtgttattattttttatttttctaacaaaaaggagatcatgttagcaataaaattggttattatattaaaaaaaaaaaaaaggatcatgcataaagatcattttcctacctctttgatctttttgataattttgggaaccacgtgctagctatagaggtcttatacctcaacctactttgattgggtcattagtaaattatcttgaggatttctatcaaataagatagcaccacctacaacaagctagatattaagagcttaaatcataaccattgaagcaagtttatagtaaaataagatagttatttttttgagagcaccacctacaacaagctagatattaagagcttgaccatgggcagcgtgtcaacctacacctcttggaagaaaagtgcgatcaagcacaatctaagtggccgcataccaaaaacgcacttcctgatattacaacttgaagttcagggaacaaaagttgcgaattggagacatggttcttcacaaagtcatgccctatactcgcaatcctag

SEQ ID NO: 52953 - DNA, 1239 bp, Cannabis sativa
ggaaaccctacacggttccattatgtcactaacgcccgtacctacgcccgatatgttgccaagaagaaaccttacaacggtttcattctgtgccataacctggcaatggggaaaccgtacacagtcccattctatcactgacgcttgtacctacacctgatacatcgccaggaagaaaccctacaatagtttcattctgtcactgacgctcgtacctacgcccaatatgtcgcccggaatatcgcatcacctaatcaggtgagcctatacattatgtccataatatcatcacattatcattgtctaatcagacaatcaataatgttaggacctggcaaacagcggtttcgattcatagtcataactttataacggtttcccaacaggtacaacctgaatgtcaatatccatacatcacattacctactcaagcaagattatgccatggcctggcattcatcgtagatatatgtatattgcattgcctaataaggcaagctcatgtcataatctaacattcatataccgcattgccttaacaggctagctaagcctatgccataacttggcaccatatcccctaatcaagggtacttatatatcatattgactaatcaagcaaatctatttcacaatctaaatttcatatatcatatcacctaatcaagtgaagtcatatgtcacatttgcattattactgtctaatcagacagtcaatgattacaaaacatgtcataccatgtggtatattatacttttcttactttttatccagattcatgcacgtcgaccaacccaaatggagaaacttccccgatgaactcagccctatgtcacaacaacggtaaattaataagtgtttatctcaaaacactgcttaacagttgcaaatgataacttggggttctctaccacaccccgtagtacaaatacactaaaataaaacttatattttggctctaaaatataaaccatatggtagagctcctcgcaagctttaaaacaatatatagaatgtccaaaacggacacctgagtgaaaagttatgacaaaaatataatttctaatcttgtaggaattttcaaaaacggtagaacacgaaaatctcaaacttcacactcactaaaacactatcgaaacttatccaaatcactccaaacttcacagggcacatatataccataaatattaccatccttacgtaacagaaattaaaattgagcccttaaatggaaaacg

SEQ ID NO: 52954 - DNA, 1713 bp, Cannabis sativa
agctacacagcccactccaaactgccccttttgttcaaataaagccccatcaacattaactttaatcttatttaacacaggtgaaatccaactctcacaattttgccccccatcatccaaaggagacaacgaaaggcccttcctcccctgagcaaatttgtattgatcaagcatatttctagctgatgttacaatatttgaagcaagcgaactcttcttttgccaaacaaagtcattccgcgcacgccaaatagctgaactcaccatcgccacttcctccatttcaacttcgtgccccctggtgaaaattcccaacaaccagctgctgaatgttgcagcccctgccccgatttccactatgttgtgatgccaagcagcctttgcaaacgaacattccaccaacatatgttgaataatttcagtactagagttgcacaaagggcagtcagcattgacaggaacatgacgcttttggagttaaaaacaagttggaagcacacccgaagcagctcgccataaaaaattactaatcttaggatgaatttttaatgaccaaagccgcttccaaaaatcagtattggcatctcggcaccaagcacccttagattcttgcaatagcttatatgcacttatattagatatttaaatttaataataaatataaaaaattagactaattaggatttttaccctccgaacatatacctgatcatatcctttaaacacacatttaaattattggttccactatcaaagtttaaaattttaagggtcatcaaagcaaaataacctcatttagtgtaaaaggttagacaaatgtcgtattttaaataatgttttgtggatatttaaaaattaaatgtaatatatagtaaaataaactaagcaatctaatttgagatttgagcaaattattctcttaagagcattcacgatagcttctttaaaatagaaaagttctaaaaaatttaaagaaccgtactaaaaatacgctacaacagatactttacactctttcattataaggtttctttaaaatacactattcatcttctacattatagagtactattcatttctctaaataaattttattaattattttagattttaataattatttttatatggggatatttgtatatattatattatatatttgaaatgaataaaatataataaaattaaagggtgtttatccgatccaatccgtactattttgttcatagtacacccgatctgcactaagtgtagattttatattttagatttaatccaatccgcatagtaactcaaatcaaatctgatccaatatgtaaaagtacagattagattggttattttgaattggttactttttaatacttattaaaaaaatatttttttttttcacataactaactacaaaataaaataaattattgttgtttcatgtctcaaacaataaattaacataaataaaacaaaaaataaaaaattcaaacaaaaaaataaaaatagtgtatgtataaataaatatttaattttgtgttacattatattttcttataaattcaattctaaaaaaaatcttacaagaatggaatatatatatgatctatatatataatatttattagattatttttatattaaaatattaattatatatgttttaaaatatatatatatatgagtgactatttaatggttacatttttctttaacctgtaa

SEQ ID NO: 52955 - DNA, 2336 bp, Cannabis sativa
attgatcgtctgtggttggatgtgatccaatgaacatccctgagtagaatagtgtaggctattctctcaattacactacacgagaagaagagagagagtgggtaggatctatagaagaaattagagagaatttttacttcaataataagtgcattgaatagtataaataatagctcttcaaaaacttttatttatagttaggagtgtttattggactacatccaatatttttaagtctatctagatctgatcctattatatattagatgtttactatccgatctgatccaattaatttcagtcatccaatcgaacaaatatctattggatgttggattagatctattctatttgtttgatgtattcatatatttatatatatatatatatatatttgtttagtttgggtttatccaattttaagacttagtattttttttttggatagactcaggtttatctaatattttaggtccaatatatattggattggatctatccaattcaagaaaaaaagagtaaaattgtaatgttaatttttatatatatatattacgcataacaatataaatataattactcatcaaaactaaatgaaaatactaattagttcgattagatgttggatgtattggattttcagacaccacatccaacatctgatccgatccaattagatattcaaaaataatattcaatctgatccgatcataattggatattcaatatttggcggtcgattgtaattagatagatcgattatcattgaatttgatcgatttatgcatacccatatttatagtgaaagggagagacacgaaataggaaagttaattcccaagcaattagttaattaaataattaggaaaaataggaaaacaatttgcttggtcaccaagcttgtagtcgaaatcctatatggattataagttttggatttttctcttcacttgttcaaagtccattggactcaaaatgtctatcgtttttatttttataataaccgatttatctcttgtatttaaatattagttttaatttaatcactaaattattaaataaaacataatctaaatattttttattatcttgacaataaaatgtcatgctcgccgttcaagccattcattccactcagccaatattttttgtgtttggtttaattgttaatgattgcaaacatcttttatcctctctttctaatgttcatttacgttttgttaaacgatcaacaaatcaagctgcctactttgtggctaggcacgctcgattctaatctggtcgtagcattctaggaacttctattcctactgatcttcaagctattttatattcagaatgctaaattaatgaagttgatatttcttgtcaaaaaaaatatcatgactaataaaatttcccttttaataatttctctattttctctaagtgtaaaaatttttataattgacaaagtcaataatgttaattctaattaattaataataaactaattattgatacttactacttgatacttatctcgaatattacggggatcatagacccatgaaatcttagttcccaataaaataagtctgaaatttaacaaataaatttcataacttattaattattcatgactctattatagactcaaaattacactcatgatttcacggaacgctctatatataccaaatatagatacgctattagttaaccattatttttatcaaaataatcaatgattctatatagacgtacattgagttgaaactaaaattactatttccctttcaatgcattttttcctaaaaatacttaactaacataaatgatattactaaatataattactgaaatgaaggctctatcatttatccattataagctagaaagaaaccatcatttcacttctaactaatggaatctatagatgtccatatctatggttagctctctcactcaattatactaccaagttctcaaaatacaagtattggtcagtgttagggtttatgccctaaaagtaagtatttaatggataatatattagagaatatatgaaatacaaacatattataaatgaatacgttaattatagaaatataattaataaatatctaaaaattctatattcatatagagaatatatgatcttgtaaggaagtacaagaaagttaagatcatacaatatgaattaaacagttggtagtgtattaaagtatgggatttttaatatgaaattgtcaagtacggtttactaagtgaaaaatcgagtttttacaaatgtcaataatatatacgaaaaatataaaactgtatacgtttgcagaagtagaatgtaattctgt

SEQ ID NO: 52956 - DNA, 754 bp, Cannabis sativa
atcgaaactgaagcttgtttttgttataaggtcgagtattagggtagcaagagcagccaaatactctaagtttgctatagtctggttggagattgtataggacttgaaatggagacatgttggcaatcacaggagagggtaatctgttaatgagataggctgatgctcgaactgcttcatcccaaaactgaaggggaagagaggcatgagcaagaagagtgaggcctgtctcaatgagatgcctatgtttcctttcagccacaccattctgttcatgagtggtggggcatgaaagtctgtgggaaattccatgtgtgagaagagtttgttcaaaagcttgaaattcaccaccccaatcagattggagtgatttgattttacaatcaaactcattttccacctggtttttgaagtttaaaaaggttggtaaggcatctgatttgcattttagtaaaaacacccaagtgtacctagagaaggcatctataaaatgtatgtagtatttgtaaccacatgaggacaagattggggaaggtccccaaagatcagaatgaataagctgtaatggtttggtgtacttagtttctgaatttggaaagggaaacttgtgaatcttacctttacagcaagcagtacagaaatcaaagacagttttattgacattaggaacattacatgtattcagtacacttttgacagtcttggcagatggatgacccaacctgccatgccacaatgaaaaaagggaaacatt

SEQ ID NO: 52957 - DNA, 4957 bp, Cannabis sativa
ttccaaggcttggaaactaaaaagagataaaacatcaccccagaagtcaacctgggcgcctagggtcttaacttagcgcccaagttgacatcccaattaggatttcagtttttgggcccatcttagtgaaaatggcttaaactttatagtttaacatgaataagacctatcacgaacatatttgaggcactagaatcaaaatcagaacacctttagtttttagcacttgaggcactaggtgactagggcacccagcgcccaattcgacatattttcaacatggggcatttccaaccagtatcccgagaattttatttgtctccatcctaaacaaataatgaagtgcttttgggaaagaaacagatcgacttggaggtcaaaattgggacccaacgcctaggttgaccttggcgctaggccataactaacaacatttcaaaagaattcctctaggcatattctctgttttcttcaatgattatgatttgggttcttttgagaaacaaacagagttatttgggagataaaactaggacccaactcctaggttgacctaggtgttgggtcaagcgtccaatttgacattttatcaacctggaccatttctaatcactttttttgagaagtcttttttgcatattctccattttttgcaaatatctaagataagagtatttttgggaatcaaacacaattatctagtggaaaagctgggcccaatgcccaggttggcaacggtgctgggcctagcgcccacattgacattttatcaacctagactatttccaattattcttctcaaaatgtgttctgggcatctcttttgttttcataaagaaaaaagatacaagtgatctcgaggagcaaataagattttcttggggtcgaaatagggacccaatgcccaagttgacatgggcaataggcccctcacctaggttgacatgcaacctagttcgcatagttttgatcctcatacataaattctattctaagcattcttcttattttggtcaaaaatggtgtaagagaccccattcaaaattttgaatgccttagcagtatcaaaacaagtctaaggaagccacccgggatgcacctaccgcccaagttgacgtatagcctggtgcgctgggttttcttatcaaaatttgattctgtctcaagcatctaactattttttcatagtaaacaagagccataacttctaaaaagttaaattaaaactttgatatttcaccctttagccaaggaggaatatcgacaaaatcaaaaagtttcaagtctacctgatttcaccagaaaagcgacatctctgagaactagtgaacaacttcaccaaaataagtaatttgaataagtaatgtaaacgtatcacttaggcatcaaaaaatacaagtttgggatgttttttcacttactcagcatccgggttgacgtcaagatgtcaacctgggggctagatgtaaacttggttgctaggttgtcaacatgggtgttgggtgctaaataacctttagtaaaatagccataactctctcaatattgatcttattgatacgattcaacttgagttttaaagctcttttaatgctctttaaagttatgtatcacacttatatcataattctgaagattttgagtccaaaatttgttcccaagacaagtggaattttttccacagattgcctaaaaacaatctgacgaacgagatctaaactctaaaaattgacaattttcatcaagagttaatagtcaccgttagatcataatcaatggccaagattagcataaacttttttcataattttggtattattttattaatattttaataggacctccttccctataaatgaagagctcatctagtttatttttcacattcttctatgtccccataaggtcagatcatctctctctctatattctctctctagaagttggatttcttgccttagctagttttcttgtaattttttgtgaggaataaaaactcgaagtagatgtagttccattaccgtcgcgatacaagatgtgaactactataaatttcttgtatctttctatttacttacattaaattatttgtcctctcgccaatctagagagagagtgttggccagatttctatgttaatattttggtacttttattgggagccacaacttgagatctcaatcatgatggttgaaccaagattaacaagtgttgacagaagcaccacaactggtcaacccactaggggcacgccaattattggagctggtgatgagacaacacctacatcccaaattccaagcaaaagcctcggaaccagttcctcagctcatcctctaaggccaccaactattgctggtattgatgccactaatcaaattctagctggagagccacacatggagttggaagaccctgagaaagtcgattcttgggttgaacaacttagccaattagtggctaacttacaacaaacactcctccgagagtctcttgataagaaacatgaatagttccaaacatggttcatggagcgttggagaaatgttgaaaatcaacatgctgaataagaatagagaagagtatatcttgcttagcgaatcagagaagcctatagatctgacaacagaatggctcctccaggagttgcttcaactagagctagaaacatccttcatgtgccaactggccatgttggaacaagcgcttaaggggaaacctttaatgcggatggtacttctaccattcttggtaaccgtactatttagcgtgcgaactacaagcgagcgtctgaaaagactcacactcgggagcgcagaccaacatgcccttcatttgatgtgaaatgatcaattgctagggaaacagtctacgagagagcatccaaaaggactcagacttgagaatgttgaacaccgccacccatcgctgataggaccaaccataatcttgctctatagaattatccttacaggtccaatgattctaggccccgtgaccctgcaaagcggaagggacctacattcaacctttgaggaaggactcggagactctaccatgaaatagcggggtatgagatttgaagagtgagaaccaacaaaccgctcaacactcagaattatttccttgatgaaagggttattttgtataggtactttggtcgtggtcctaatggccaacagtaagagtacttccctcgagtggatggggaagagttgaacctgagcagtcagttcaactctcttcgcacttatgacgctactgaagactattttgaggggaatagtcactatagtactccaggaaattgctctcatagcaattagtccaaggatgactttgtcatcatatgaacaaatccccagcattgccttcacgaccctgtggtcaggaagctgcagccaaacccaagtcaacaaatattttcaatcaacttgggaagtagaaagacctttacgacactcaaaataagaaatggttggcggaagtgggagcttttagcggttaccccgttaactgggcaactaaagttacaattgggatgcaaaccaccacctatggtatcaatagggtcgagtttaattccttagttgctctagtgaaaggaattatgacactgctctcaagtcgaatcaaagctttagagattccttttaagttcaagaatcctacctgacatcaatacagtgggaaagaagactcgttgtctcatatccactactttaaagtgcaaatcgatctaaaaggggtaagagatgacatccgatctagaattttccctgccacgttgacaggtctagctcagtgatggtacctcatgcttgtttctaaatctatggattcatggaaagagcttgtggatacttttggaagtcagttcgctccatatagacaacgccaaatcgaacccaatgatttggtagatgtgaaacaacaagacaacaaatccctcaaggactacattcaacagttcttagaggtagccactatgaccaaaatacttagcgaggatgaaagggtcatgcaacttgtagctggactcaaggagatgagtcctctatggtgaaactttcatctcaaactagtccacaccatgatgacatcctagatagagctgatggctttatgaaactagaaaaagttgtttctcgagctaaactcaaaaatcaagaagaataaataccagactcccctgctcctgacactaaaatgcaaaggcagtaagaaaggaggaaagaacgggggaaaaaggtcgaataatggtggaaatcagactaactcctctagcgggaagaaagctagaactggagacagatccatcaaggattatgagcctagatttaccacctattctattttcttagccccaagagaaaaaatatttacagcaactcagtcaacagtgtcataccaaatgtctcttccattcaaagagtaagggaagagagaaatgaagaacaactgtcactaccacaataattatggtcatgacactaaatagcttttcttttcactactttgagaggtgaatcaaagggatagagagtgattgagagaatggtgttcaagctttgtattcaagttctttggggtcaagaacttgagggtgtactcggggttgggtgtgagaactgtgactgttctttgtgtgagactcaagtttagagtagtgtgtatgctctgccattggtgtttatatcctctcttattctccattaatgaatgcttgatgatgtatcttagctggagtatggacagggatatgtttgatctcgaggaccagaactaggataaaaattggtgtccacctgctctttattttttgttcttattcattgagttgattaagtgtttgttgatttgttaatgttaaaagcttgagttgttttgcagattaatcttgataatcttgttgttgttactttgaaatttacaacacgaatctatagtggagtca

SEQ ID NO: 52958 - DNA, 2014 bp, Cannabis sativa
caagtcaaaaactaaggaatagacagagtattaaatgtgaaaatcagctcaaattgaggctgatgctttgctttctatttataccacagtatgagggtttacagccaaagaatgatcaattacaatcaaccacgtgtacaaagatattttgcaaatggaatattgataaaatctattctaacggaatgaaagggacagctggggagaatcatcatttgaattgttgtaattccaacaaacttgggagtgcagagtgttgacaaaactacccctgcatttatctcgtgacaccacattattattggtgtttgtctctccttttattgctttcataatctgatttacattcacacaaccaaaaattaatgaagtattttttgtgatttaattcttttgaaatttattgttaacttgaaattgatatttaaattaaagcatattttgtgttattgtagaactatgttacgaaaacatactattttttatttttattatatagaataattatttcacattgtatttgtacttataattatattttatatgtattttattaaaaaaatatatatatatatattccacatacaattgttcagattaaagatcagcttcatgataagtactatgtagtaaaaaaaaggtgatgaccaacttcataagtgttgcaggaaaaaagatacagcttcataataacttttccaaactttctattctactatatttcagaatatctactcactaaatttgtagaaattattaataataactttttgttatcagtggtatattattttttgggagaatttttatttttgtagtttttaaagtataaatttgtaaaaatatgatttttttctcaaaaaaattatttaatggaaaaaatttagaaaacaattaaaaatatataaaaaaaacataatgtatgtgataacccattaatggtaactagttacccttctgaatctggttagttatccttatctgattttctctttttttttttttcaattttttcataaaatatttttttaaaaaaaaaaatccatatttttacataaaaaatataaaaacttataaaatttataatttcttccaacaattataaatagattgttcagtctatatcattgattccatcaaatttaacactgtatatatgtctacctatgtgtgtcgttgaaataaaaactaattgccaaatcttttctctttcatgtcagtattaatatttcataaatttttaagtaagaaagaaaattaagttatcatcacaaccaaattattgaaatatgtacacataatactgaaaatattatagttaagtagaattagcatacctcattcatcatgcattgtacatgcgctgtatatttgcagttagtgcatctgtatacacgaaattgtggattcctttcttcttcacaagaatcacaataatattcgtcgaactcttcttcatttaatgaatcaacaagactcaatttgtgaatgtggtagtcatgtttaaccataaaatggtaatggaccacatataaaatggaaattgtaagtacagtccatgcaacgaaacaagagtgattgagtacgttgaacttcagaattagtacgattagatggaccttgcaatatatatgacctcacacaagcatcacattgaatattatgatcacaacatgagtgatcgtgactacggctttttacagttgtgtaaagattggtacattttgtacttaatttaaagttgcatccactctcacaacaaataaaactaagcttacagtctttcttgcaacagacatcgcaaatttgaagcttagttatttgaagtttaagaggttggtgtgaatggaaaggatggttaattgtttgggacaattcagcacatgacttttggaggaaatttttacatttaagtgttgtgcaagaataggatggagtggaccatggtaattgacacgcaaaacaattgttaccttgatatgcatctttaccatcatcttgatcgataatggcc

SEQ ID NO: 52959 - DNA, 4603 bp, Cannabis sativa
taaaatttattcaatacgcgttgacaattttattaatgtttagaaagataaaaattaatattttagatctaaggttttttttttctttaatttcatgtgttaaatatctattgaattaattaatataattttcaaataaaatatattaattatataaaattataaatatatttttaaaatatataaatataattaaatgataattagatcatttcagtttgattatttcaatccgattggatttttaaaatttacatccaatctaattataattggatatccgattctattgcattagttaaattaaattattctattataattagattagatgactttgtacacactctattattagtccttgcttaaaaaaatggaaaaaaagctctaaataacacaaaacataggcttaatttttcaaacaatattcaatttcattttttttgtgataaccgttataggtttgcatatatccaaatttaattttaaaagaattgtgaattaaattatatttaccaacaattattttttttgtttagtaaacgtgaaacaactgaagatacttacgatgtaaagtttccgtcattcgcaattccctaatgattttacgataacataagtatcaatagaaagttaaataaaaataatcagtcgatttcggtcattcccagcattcatttttggatgcccatcgaagaaaattcagaaatgagtggaaggagagggagagttttggtggtgggaggcacaggttacttgggtcagcatgttcttcaagcatttactcacttcgatctcgcttttacccacttttccaatcatcctcctcggtatttgctccacaatgctctcgcttttcatgttgatctccgaactggccaaggttttcaagccatttctgatacatttggccaggtgggttccaaaccctaaccccaaaatatatatttattttttatgcttttggttgattattgggtttctgaccgttggatttgtacaatgagatttgaattagtgggtgtgcctgaataatgcatttgaatttagataaagggacttgttttaatgcgtacttcaacactgtgatttactggtctcatgtagcatgttttgtgaaagtgtttctagtttgctgagctgttaatctgatttatggggattttctgtttttgtatttatagttgttgtattctagttttcggtgcagagattctagcaaacgaaataggattcttgttgtaagagatttctaaccatcttcccttgaccagacaaggcttgtgttttttttggtttagttatcattgtggagttaacaatttttctgaaattcttaaaattatagttttttctgattataagcaataagtattcatatcagacatgaggttctatctatgtattttcactttttccatggccacacgttgacatggtaataagggtttttgaatgtttattttaactcaaaatgccagccagatgttgtggtgaattgtgctgcactttctgtaccacgagtctgtgaagctgatcctgatgctgctatgtctattaacgtgccatcttctcttgtaaattggctgttaagttttgaaatgaaaaacaccttgttgatccatttgtcaactgatcaaggttagttgtatggtacattttaagttttcttgctattgagttcccaatgaccaatcatttcagcacagatgagcttatgctggcttgcgagagctcacaataaagatcataaattccattttctgttgttttgatggaattaaaatactgagttgcttccattagcgtatggattttaggaaagattcgttacataagtctctaagcttgagacataaatcatatcacaaaattgcacaagaaattatgccttcaatacatctctctctttttttctggaagtataatacatctatttttgaagcctgaatcattgtagcctctttgagctgcacaacctgtgtaatagttcctacatagtcttttaatcagagtatcccctgaatcagtagtttagaactgttaagccttttcaattatgattctgataagtgcaaccacagccttatctagggacccaagtgattcaattttcttataaaatcttagagactatgttgactgcactcatttaatttggctgtcattcaccactgcccctcctctctctatttcttaagatataggatctgttgccttcaactaattctcattcctactatcctttgacttctataacctccgtacccatttctgcattcatggcatttgtatgatttattactttcttaattttgcagtatggtcccatacacgatcagatatctcttgtctgtttgaactagctgatgttatgctttaacctcaagatactatctatggcttacattgtaacttccataatttcatatcagtttatgaaggtttgaagtctttttacaaagaagaagatgaagctgttccagtgaatgtttatgggaaatcaaaagttgcagcagaacagtttattactgagaaatgctctaattttgcagttctgagaagcagtatcatctttgggccacagacaatctcaccagtaccgaaatctcttccaattcaggtatagagaaagatttaaaataatataattgtattttcgttttttatgcttctttgccaggtgattacgtagtaaaatgaaatagagattaatgtcaagtctcactctatgctaccggcttcatgtgagtagtaatagttgataagtgtaactgctctaatgatatatacttttttccttttgtttcatttctttgtctttatatttggttttaattgactcttatctactctgctgtaatttcaatcaatgcaataagctttatgagtttcagcttccttgtttttggtttctgcgtcaatgttattatctagaaccattctgattgcttaaaagagttaagcttacatgtgtgaagaacttaatctaagtgatctttgtctgagtatttagcccaattaattactctatgcctaagttatgatcggtttctgtttacttcatgtagtggattgatagtgtcctttccaaaggaaatgcagttgacttctttcatgatgagtttcgctgcccagtgtatgtcaaggatgttgtttccatcatacttgctctatcagaaaaatggatatcaggtatgttgtttttgttagcatgtatgttgtttctgctacaaatttttgtgctcttttgtacattttgaacgccatcttcatccatctttaaaggtccactttggttctcaaggaaaactctaggaagggaaaacataaaagcaaataaaaggggaaaccatagaatagggaaatcttttcctctttggttatctagagaaatagaagaaggaaaataacatagtgggctaataaggggttaaaggaattactgaaaattgatgtattacccccttttcccttctacatatatttttgtttcaactgctttttctggtaatttgtgggggcaaatattgtatatcattatgctttttctgggggcaaaacattgtataaaagaaaaggataggctggacaaattttccctcccttactgtgttcttatctacagctgaacgtatcagatgtccgttcattctacctatgtccattaccattgttgaattttcactttagtttgttgatgtggtattcatgattctttcctcagaaggcaagcaaatacagttcctactaaatgttgggggaccagacagggtatcccgtgttcaaatggccgagatagttgcagacgtcagaggatacgataaatcattgatgaaatcagtgtctgcatcttcagtaagtttagcattacattctttcaagtttccaatctgtttgatgaatcaagatcagcactcccaaattcccaatattggacagtataacaaagtagttcaactgggagggagttaacaaagattttgatgatcttttgtcatttatgtggcttatttcttttatgttgaaattttaagattgatcgtggagtgaaatcccctgctgacatatcaatggacattacaaaactggttcagacacttggtatttctccagtttcatttgaagatggcgtgagattgactcttgcaagcgaagctaaatcttgattccaattaattaaaacatattatttcattcatttctcccatactaatgagcgaataatagagagttacagaccctttttgttttgttgttgtgtaaaatattattggttgatataattctcggtaaatatttgcctaaaccaagaaggttattttataaacttatcttggagcactatttctttagggtgctttatagtccaataaatttgtttagccatgtttcagttattgtaatctgatttgcttgtaacactgagttcaacagaatgagaattttaaaacaggtacgaactgtgttaggtaataagaactgtaatattaacaaatatgttccttaaaaaaatttagtgtacattatattaaatgaatttgacttggaagttgaattaaatttcatagcaattggagtgcttaataattttttttttttt

SEQ ID NO: 52960 - DNA, 785 bp, Cannabis sativa
aagtcgtagccaagaaaaatcaacaccaagctcacaagtatgtgtttctggatggaagattttaccgatgagggttatcgatatcctatttgaagtatatagacggaactaaaattagtgttgtgattcgtgagatacatgaaggcttctacgaagatcatacattggaacccagactctccaagaagatcatctgtcaagggtacttctggtcaataatgaagaaagattgtatagattaccttcggactatgagtagtgccatcatgattctaaggattcaagagctccaccaacaaaaataacactaatgaacagtctgtggccttttgttgtttagcgaatttatttagtaggctctcttccacttggaaatgaggagttaaatatgccattgttgttgtctattatttcaccaactgggtcgaagcataaacaatgaatacaatcacttcaaaaaaagcgttggacttcatcattaaaaacatagtatgtcattacaaacgttttcacaagattctatcagataatgggaaacaatttgatggtgatcgattcactaatttctatgtctaacacaaaattgtaaaaaatttctcaaccatggcgagattataggacaatggacaagttgaagttgtaaacaaaaattaagcgaatgaatgaaaatgagggctaaaataagggtttaaattgaaaaattgagcaggatttttaaaccacatagcctgaaggttaaacactgaagggaatactatggatgacagtttaaaaccatcgactat

SEQ ID NO: 52961 - DNA, 1132 bp, Cannabis sativa
atcggattattattaaattttattatgacaaaaaatttcagggtcctatttgtacgatttaagaaaatatagaatctattttgtcatttaacttaacaaatgattccattaataacttttacaaaataatatttacccttttaaaaattgaaaaaactgctgcctctatctaggggttaacctctaaagtgcgtgtaactttttaactttttgttctcatcttcgtaaattcacgactttgtatgatcccgtgaaagtttttcttctagtagtgaggtgaggcgtggctccacaattaatgtaacttgcaataaatttaattgcatgaagtatatataacttgcaagttacaacgattagttaaaaaaaataatagaataataataataataataataatagatgttttgattgggagtgcccacttatccatatgatgatgtatagtgatagccaaaatcgacttttagcccacgtcgtttgtatattagccggacaggaggggtacattaataagggtcgtatggggaccaatatttgaaggcaaaaaaattaggaagaaaagcctcattaataaagcgaatttgagaaggggaccatatatcgtatatatgtaatgtacaatgaatatatatcactatactaaattatttttcaactcataagttatatcaacccagctagctaggggtcatgacaagccatgtggtgccagggcaacgatgcctctttcacaagatcaaatatatatatgcatttccatgacaataaacaacatgaaatcccaccatgttacatgttttttaattaatttctcacaagggccacaaaagcaaaatttgcaaggccagccagctagtttgatcactattgctttttccttaaaatacggctttgtcttcacgagtacattgcttttgttcaattgaatacaacttaaaagaaaataaaactttttagttgatatttgtgacgggagaaaaataatttagtattactaaaatcttaaggagtggtacgtggaacaaaatatacaggacaaataactttttgcccttctatagtttgtaaaggagttattatattttgttacattttattccgtttacaagcttggtcataaggtacccac

SEQ ID NO: 52962 - DNA, 837 bp, Cannabis sativa
aacaatattcttaaatcaaaataagctaaagtgaatattcataaactataaataaacataaaagtaatagttcatataactaaaataaaaatactaaaagaaatttgttgttgagtcgtcgtcatcatcattaacatctctcagaatctgcggttgaggaacatccggcatttgtgggtagtatggaggcatctgcgaacttgtcatcatctgagtagtctgttgcccatgtggtgttggcatatgtgatgtctgctactcatattgttgcccttgtggtgtcggcatcatttgaaaagtctgcggcatctgtgacatttgttgtgtcggcatcacctgtggcatccaagactgtgagatttgagacgtctgaggcgactgcatcatcatctgcatcattacttgtgggctagttggcgacgaggactatgacatcatttgcattaatgttttaaacatccgaaattgtttaaattgatgagtcatttgttcaggaagttgataaagctgctgtaataattgtttaaataaaagtggaacttgctgcgactggtaatacttagtgtttaaaaagataatattaaacatttttttagttaagatgcttagtttttaaaattaaatgcattaaattttaatatgtttataataatacttatatattaaataaatttaaaaaatatattaaaataaaaatctaattatttaataattaaaaaaaacaaattcaaatttctctttaattaagatacttagttttaaaattaaatgcattgaattttactgtgtttataataatacttatatattaaattttaaaatattattaaattaaaa

SEQ ID NO: 52963 - DNA, 1001 bp, Cannabis sativa
tgaagttgaagaacctaatattgaagttgaagaacccccaccaaagcagaaaaatactaggggtagaaccaaaagactagatataacgaggctggcaagcgagggcaaaaaattagaaattgagtacaacaacctcggacaacaatggggaaaagcagcaactgatttagtttcccggattggggtgtgggttcgaattaacataccacttgtgaataaaaagtggccacaaattgataaggagctgaagaacagattatggaatgatgttaaggtaatactaatactactattcttgttttttttactattgattatgatttgtatctataactataatttccaaattttgcagggtaagttcgagctggaagaggaggcaaagagacgaacaattcaaaaagctggggagagatggcgggattggaaaaacaccttaacaaaaggtatttacaaggttaaagatgtggctccacaacttcttgagaagccaccgagattgtacgaagacataatcgatgagaccgagtggacagagtttgtggcttcaagattaactaaagaatggggggtgacgagaaagaatgcccaagctagcagggcaaaaaatatttacccccaccgctctggacgaggtggtgcgaggatggtggagttacagatggagaaagagttaggccaccaattggtcaaaattgatagagccgatttatggaagagacttcgcacaaacagtaaaggcgagttggaaggcccagctgtggaagttgcccaacgcattgtaagtttaaagtctaattgcatttatatttttatgtttcataatttaattctaactctatttatttattatgtttgtaggatgacttgcgaaagcaactcgaagagggaacaataagtgtggaagggaagaatgacatcttgaccatggcccttgggacagatgaacatggtggtcgagtccggggcttgggttatggtgtcactcaaacccaattttt

SEQ ID NO: 52964 - DNA, 1818 bp, Cannabis sativa
tggtgaaaaatacaccattccttagtttgtgaaagagtgtttacattgagaatcttggtatgctcggttgagtaacaaatgtacctaattccaacatgggtaacacatctaaaaaaccctatatcaaacaaaagtaagatatctatttaaaagaaggtatgctttaccaactgcaaagccaaaacatatatgagtttaaagctcttattgtaaaaatgagtaaatgcaccatcttactagaatttacagcatgctgacacatggcatgaattaaaagggttttttttccttatgattccacataaattgtgctaaagtggaaaaagtttcctaaaaggagattagtgcttgttgtggagggaagttgtctcagggtaatgatgcatctaaagttaaaagattcttgtgccttcatgtcacttcagacacttcaaaatatagatatttcttctcataaatctggaatctgagttaggatgagaatgtacaaatttacttattcatactaatgtactcactaatcttattaccaaatacaccagtatatatatatagttatatatatgttttacatgtttttctccttatacaacaggtaagagtactacatgatacaacaaatatgtaggatcttcatacggtgaaactcaaattacctctcctcaaaagtccgagttggaagagagaaaaatggcttttatggaagcagacaatgaagaggatagtatttgaatgtattatatcagaaatcttcaatgcactgcaaagatgggttccccatcataaaaatctggttgcaatgtgctctgcaatagctaaacttgatgttaaacccggtgactcgattccgaaaaggttgacaagattagctacaccatgaatatctgccccctgaatggagaaaatcaaagtaactgttatcagtccaacaaatttaccagcaaaaaatgtataaacaaagcatattgaaagttgaattaggaaaagaaaaatcagtctggctagattgcctttgcacatccctcataaattgtatatagactgtagaaagacaattcaaataaatcctaataattatgtctaaaatcatggctaatcacaaatggattctacagctagaatacaatacaattaaagttgatatataattttattcttcttgatttctgtattctccaagcatatttgggtgcacataacatatcattactcttaagctaattccacatagactattgatgcattttgtaaccagttgtaatcacttcgtttagtttacttcgcaatcaagtcaacaatagctatccatttagctacctgattctatgaattgaattcatatagcagtatctcacaaacttattacacactatttgaatcttcctcttaatcagtttttactcggacatctgggcttgcttagcaggattctctgcctaaacctctgatatatggatagcataaacaaaaaaaaaaagcaatagctacgtaggtggttgggagggactcaaacctcatatcttgtgggaacaaatcacaaaccatttgacctaccccttttgagtgaatctatctcacaaatggacacaaaagaatactaaatttcatttataaagattcttcagatcattgaattgagaaactacaaagtaaaatatgctcccattaagaagtgcaaattgcattttgggtgtaagaatataaaagaagatgctaacacaggtcctcaactatatgctttctggctgatattaattacagatagttgagtaataaaatttaccaagacacataatatcaggcataagaattgttcaa

SEQ ID NO: 52965 - DNA, 2939 bp, Cannabis sativa
ttgaaaaatattttcacttttctacttttaaaaacagaaaactgattgaaaaagtgttaccaaacgccaccaaagttgttagctgcaggtcgaggagtcttgttttgatgcagcagcgagtacgcactgctaacactcaagctcccatttgattcaccaatccagtaccaacagtcatcttcaagagtagaactcaatgggaggccgaggatgagagtagcatctctaggattaaacatatcaaggactaaatcataatccaagtaacgagaatatgttaaaaacagtgcagaaacattctggtttgagagcccaggattgatggtagtgacaaacggatggtccttgtcagggagccacggatggtcaaggatactggtagtcataccagtctgaatagtgcgacgggctcctaatttgagaagcttttgggcactccaaatactacgccaaacaaagctgggattggaaccaagatcagcactaaggaagtcaaagttggggaaatattttgctttataaacccgactaacaagtgtgtttggattgcataaaaccctacacaatatttactcatctctttctaacaacaccactagcccctttcttcccttttttttcttggataaccagttgcccctttattcgttccccctctcccttttcttcctcttttgatggattagaactagctggccaaaccagtcgtcttcgctaactccaccacttgtccaaattgagatcttcagatggccaaacaaaacgaaaaacaaacatttggccagattttcagtgatcatcttcttggcttctcatctccttgttttctgagatttatcccataatatattttttcttatgttatttttattctaatggcagatctgttttttttgttattcttctatttttttttttttttgcaggttaagcattgtttgaggttgtgtgtcttgcgtcgtcggggttcacatttgggcatttgggttacggtgttcacttatggatgagagcgggtttagagtttcatggttgggcttggttgggctcacagaggcggtgcatctcaccggagtggattcaatttcttcttagatttaagtttcaatatatttttttaattttggttttaattttttttggtaaagattttaattttagttaatcgtcatatatgtaaatatatatatatgtatatattcatttatttttttatttatttattatctctgtatattgtatgtagttaaataggtattgattgtatattgtatattgatgtttgaatatagattaatatatatcttctctcttagcattttttttaatgtttggatttgaatatcttttctcttagcattttctttttcaataacttctctcttattaatatggaaaagagaaatcaatttaaggttcattcatattaatgaaaaaacgtttcagttaaatataccagcgagacctgctgctattgataatgaataagcaacggggtgtcagcccacaagtattaatgatgaatagcgaccctttattaccagcaaaatctcatatctttactagcagactgttctgccccaaataatggtatttgttgttgtgtatactttagccgcggattttttagtcacaatataaatttaatgatttataattagccacaatttttttacttttagtcacaataaaattttttgtagtgtaagttaatatagtcattgatagagtatgcaagagagaaatgtgaagtgaatagtttgtaagagttcacacaagcatccccaaccttagttaattccattaaagttgtatcatcaagtaccaaaagtcatctaacaattaaataaaattaacatgaagttaaaaacactaatggtatggggtaccaatagaaacagaagacttaaaaagaaagtgtaagtaagtgaacaattcaagaaggaaaaacttaatggccgctgatttcactggcttcgccgctgattttactggcttcgttaggcaaaagaaaatcaataagacgaagagctcaacgatttgttagccactactcaacaagatcaaattcattccatgatttgccaactgaaaatcaataacataaatatctcaagaattcaaaacccacacaaatggaaatcaacaatataaacgataaagtatatttagcaaaataagaaaaaacatacatgatcagtatatttaaaagaaaattaaaaaatagtggtaataataaggagtattacctggttaattatctgtgatgagatgatttattgaattgtaggtattatacctaaaaaagttaaatcaactcataaggtaaaatgaataattcacttcaagaaaatttggtattcatattactaaaatattattaaaaactcttagttttcataatttattttttgaattatattgaaaatattattgaatactctacaataattctcaccttaacatcatttgtggagtagtatgtttaactaatttaggactctgtttttcgatagtgcaaaacaaggtagtcaaacatcattaaattagataaacaaaaaaactaaccttaacatcttggaacaaccttctctgatggacatacaacaaaagagccgacagcttcttgtatagtaatcatcggatggctaggacgaaacaaataggcacttggtgagataactttgtctttgtcaacccacacttgcatgaattcagatccaagagtaatcccatgaacttctatgttcggatcgctagaacaccaagacccagcaactatttcatccttccagtcaagtaagttgcaagcattattcacatcagaaaaattactattctttctatggactacattattgtcaagatgattgcaagaagagcttcaaggctttaacaacttgaataactcagcaatttgcttcttcatgctacctagt

SEQ ID NO: 52966 - DNA, 1064 bp, Cannabis sativa
aaaaaaaaaaaaaaaaaactgagtagtgaaaaaagcttagggtttgatgcataattgtggctggaaatacctttacgacagaaaaatggtgaggagaatccatggagggaggagagagtagagagaagaagaatgagagtttagagagagagagagagagatgcaacagcgtgaagtggaagtcgaatataaaactgtgaaatgaaattaattaacataataataataataataataataataattaggaatgagatgaagagtttttatttatttatttattcattcattgaaatgaaattaaataaatggaaataagtgagattgtggggaatcgaaccacagacgtcaaagaaagaatactcaaaaggaaaagaaagaagggtttgtttcgttgtttccaggaaataacattttgagaggcgccaaattcaccaaaaatatataatattattttgtgttttcttaatttcttttttttttttttgagaaaaatacttcaaagaaacaacaaaaaaaataaaaaaatgggtcaaaagcattacccaaaatatgagaaaagaacgagaacaaatacgacaaaaaaaattgtatcattattaatataattaaatattagatcttacataatttaaaaaaataatttttaaaatatatcgttaaagtattatctatataagatatattgagcatcactaatacctaacaacaatactttaaaaaaaaggctacaatatttacttttttattgttgttagaaaccttaaaatgtctaatactatattgatatggtgtattgtaagtaattagtatattttttatgttatttattaaattaaaatatgtagcatttaatatttaattacactaataaaaatatctctagagtacttaataccttaaaagaactattaaatcatctctaattgggacaactaaaatagtcaatcataatttttttgtactagacaatcacaattttttaattaaaaatataaaagggcgatagtactcattttagatttttttttttattactattctcttctctcttgccacataat

SEQ ID NO: 52967 - DNA, 753 bp, Cannabis sativa
tttctctcatgctctctctttatcaaaaactagatctgaaaccagatctgaacccaaactgtcgacgatgaatttgacccatcgaagccaacaccgttcagaccttccgccctcttcaagcaacaccaagacccggtgaacgagagataatcggcatcgtgaggatctacaacaacgaacgaggaagatgcgacaccttcagaggagttgcgatttagtcttctcgtttgacgagatctcatttttgtggtcaccttccacaagaacaactagtaggtcgtcaaggagagagagagagagagagagagagagagggatttgtcagttcatataatggtggtgggttgcgagtgcgtggtctgagtattagatgagttcatgggtttgtacggtggtggtgggttgtgggtttgtacggtggtggtcggttatggtggcaattgtaatatcctaagattaagaaaaatagattagcaaaccctaactagttaaatgtgtattgttatggaattatattattatataatctattatatgtgaattaatttgatatatgacatgttaagaccccgtggtgagtcaggggcattttagtaattttgacccgagaagagtaaaactatggaaattaaattatgatgtgcttatggactatatcattatatagtatgtcttttttaggtgttttctgacaggttggcgcggtatagtcacaatcgggtatttcaagtcgaactgggttcggggccgaaa

SEQ ID NO: 52968 - DNA, 932 bp, Cannabis sativa
gttcacactaccttccaacacatctgctcaccaaggttcttctacgaatcataagttcttctattcacaatcatttctttcttcttacaaacacagttatatggtctaatacacctcccttatctacggaatatgttaatctaggtcaccacatatgcccaagattgatcgtttttgtgagaatatagacatcatttgctcttaatccttgtaatatttcacattaataaagatgcacaactgactgtttgctaccgtaaacgtaggcaaataaaatttgctgaactacgtaaatttgtgtcttatttttatttaaagcagtatatatatcatatatgtatatatttaaagtaatatacatttatattattaaatgtttagctagaacccctaaatattttggcgacttcattgaggagtgttttccttaatatatatattcctatcaatacataaaggaaaacgctcaagtttgttctcttatttgaatccaaatgtctatctctgatactcgagagcaagacaatcagatcagatcagaaaccttgcgaaatgataataatagtaccaatctgacaaacagatgatgttgtgttaacaagattggaaaagcttcaaaaagtccaagacaacatgatgcaactgttgagctcacttctgccacattcacaccaagaagcatctgttgatagaagcggtttacctgaaatgcgtgtgatgaatgaatctcaaataaggcaagtacatactattgaacaaagaactcaggcaacacctgataatgttcgagggatcagaacttttgagaatgctgaaagggtcggtgaagaagctcgatcttcctctgaatttgtcacaaaagatgaattgatcggtctttttaaagccaaaagagggaagtcatcatcatcggtaacttctatcgattttca

SEQ ID NO: 52969 - DNA, 1487 bp, Cannabis sativa
ttccatgctttaactttttgctttacttattattattttttttccgagcgtttgatttgttttctttgctctatttgcttttgagcatttgcttttttgctcgcccttttttttagcattcactttttgcttgctctatttgtttgtgcttttgctttatgtaacactttttttaggttgcaatgagtagcaacctttcttctcctttaaaaggaagacttgtcattagttaaaaagacattgtcacaattttctttttgaaattgagactctctttggatctcctcgtgttggaccgtcttttcaatgatacttttgagggcacaacgttttgttgttgaatgagtgtcgcttcaatggtactgacaataattggttttgtcagtattatcgccctcttttgctttcttaggcttcgagagatttatagcttttgtagccaataattcatccaatatttgttcgacatcatcttcatcaatgaacaaatccttcacagtctctttttcaattgactattttaataatattttagatttttctttgcctttgtcatattttacaaaggtagccattgatacgtatggcatatcattttgacgagctatttgcacctcaacattacttgttttggaaaaaagcttactgaatgtttcaggttctgtggagcataagtaaactgctatctcgggaatgagattttgtctacataattgaactgcagatagctcagacaatttttctggacattaaagtcgaacacttttccatctagtaataaattcattgacaaatttatctgatctttgcttagtttcagttaggtcactaacagtgacttcccttattgagcttacaaactgagcaatgaaggctctttgcatgtcatcccatgtgaatgccacccctttaagtgactgtacaaatcgtctaatgagaaatgcatttaactgggcagattcaccacatgccgagacaaagtatgctagatgttctttgggggacccatttatcccatcaaacttttcaaattgtaagcttatgtaatttgggagatatggaacataatcataatgagacgggtagggtttatgatatccaagaataggcatgtttgttgtttcataacattctcagatactttccatgattagtgcttccaattcgagatgaggtattgaagttgatggtgtaggctcttttgaacaaggttgtatcgacaggagttgttaacacttgcccctgttccacttgtttttgcttacttaaactagcttgtttagctaattgtgttgtaagatattcaacttctgcgtctttctctaccaactttctttgcaactcttgaatttgtttttccaaactcttcgttccaataacaaacactgacatattgttagattcaatgtgctacatttcactaacttccttgagaaagtattctcattatttgtagatggaaaattgcgaaatgagtcactggaaca

SEQ ID NO: 52970 - DNA, 655 bp, Cannabis sativa
ttgtgcaattgcgcgatggtcataattatattgtgtctcataaatgagttataatcattaaaaaatcaaatcaaatataatttatgattattttattttatatttttttattttagaaattcatataaacatgcgttttgagcgggtggtgtaaataagatggcgtaaattgcgatcgtgataagatttatggtcaaaatggtggagccttaacatatctcatttgccttgattaccgtttttttgtattgttttggccctttgctattttccttttttgtattttatataatcttcttaattattttattttatatacaatatattatttttatttatgacttaattaatagtgttaattttgggcatttatttcttattcttgctaggtatataatatttgatttatacaggtaatattaattatatcaagttactatttatgttttaattacttttaagttaattaattttgattttatatatttccaacttttttaagttgtgttgttgatttattctgatttattttttttttaaaataagtgaaagacatttagattttagtacttttgtttgaatgttagtgtgatgaagtgttttaagttaaaattttaattttagtttaatcgtgggtgatttcgttcagtttggt

SEQ ID NO: 52971 - DNA, 570 bp, Cannabis sativa
aatgaaaagatcttcaaaagttgtggttatggaaagttagatgacatccagatgggagttcccagaaatctaacttgttcatccagaagaagtctcgtggaataatagatatttttcggaagggcgttcttggatgccaatcatgtccacctggatgaagtcttcagcaaagctagcctccctccaaaaaggagttccaaatggccaattgttccctcttggaagggagtcccggatagtcgactccaattgttgcctttcttatccaggaagtcccttcagcgtacgttttggtctgtcttccaagaagcgtacgtctcatctggaagtacttcacttatgctgatgtgagatattattacgagttattaactttgttaagtcataactaactcaaaaacttatcattggcagccactgattttaggatctagtttctcaacctataaataccactaatacttatcattcaagagtgtgattgatcaaacaagctacaagaggtgatcttgagagagaaagattgagaggtagacatagagtggtaaatataagagagagagagagaga

SEQ ID NO: 52972 - DNA, 707 bp, Cannabis sativa
tcgtggactaaggctcgttaatgctccaaccacgtaaaaatctcatttattaaacttcctacaacttttctacatgttatttaatcggttaccgaaaatctcagtcaacaaaatataattataatttatattttaaaaaaattaagtagttgtcgaaacacaatcacaaacaaataaaccctaggtccatttcaaataataataaattagtattgagacattctcataagtgaactttacacctaaaattaataagaagatattttacactagaatacaattttgaccatttatctaaattacacacttaattattatagtgaataatgaatagtgaagattatatatagtgtacaatctttatcattgtatcatagtatcttgtaaataattgacactatatctaaattacattatatgtatatattattctcatttccaaatagactcatcaattcatcaaccaatgaaaaatagctaagtactagatgtagtactattgggttgatgagcatgaatgtttaaggagacgtagaatgaaattaacaatatattctctctccttttttatataattttttaattgagccaacaattcaatattatatagtcaatataatattgtgtcggtgtaaagtaatatgaaatttgaatggaccccattccccatccccatcgtaagttacagtgagtcctactagtcaaat

SEQ ID NO: 52973 - DNA, 1116 bp, Cannabis sativa
gaatcaatttgtacaaattataaatgggtctaaattttgatatggagtattttgttagaggcaaaaagtaaaatttccctacaaaattaaaaaaaaaatactttgcgagtcatattcccatttgtttcaatcttttttctcacttacattatcttacctcacttacattctttaatcattaataaaaatatatttttttgtaatgttttgcagtttatttggatttgatctttaattgatttacatattgtaatgagattgatatcttatttttttctttattttttctattgtgtttaagttattatttttttaggtttttatttattttatttttaactaaaaaatggtatttttgtaattttaaaaatataaaatataaatttttttttttttaaaatttaaagttgtaaactataaaaaaaaataggaacaataaaaatgtaaaaataacatcagaaataaataattatgtacgtaatctttataagaattgtagtgtatttttacattttgaaatgataataataatatagaaacccaaaaatttaaaaataaatggtgaatggaaagtctgtcatgtggtgtaaatggtggtacttcattgtcttatcttcctagcaaaatagtctcaaatttaatgtgttgtttacttgaaataatgtgttttaccctccctttaatgttcacttgctttatgttgcatattactataaaataaatacttagccagattgccaaaattacttattgtaccatttaaatttaatgcaaaataaactattaattaaaaattacaattacaactctagctttatttaaaacaaatgtttaaaccaatcaagatttactggtgattaaaactcaaaatattcaatattgttattggttcttctagtgaatacccacaggcttgaattacttttgagaataggttcagaactttaacatattaaaatattaaataaattgtgtcatatattaaaataatttggcgtgcgtgactcatccggcctccgtactaaagaggtatggaatcgacagccttgattatatagtattatatatattatatatacatactatatatacactctttatatctctactatatat

SEQ ID NO: 52974 - DNA, 637 bp, Cannabis sativa
aaaagaaatcagtgaatgctgaccttagccttaggtattaaacagggtctacattttaatattttctgtaatttatttattatattaatttaataatataataaattattaataatattctcatcttaattattgagatgagaaaatttagaagaaagaaaaagaaaacattcattagcatttctgaatatctttttgtttaattaaaagtcaaaaaataaaataaaaataagtcagtctttgctattttattctagaatacaagacttctttttggggttaattaattttactgtgagagtttatgaaaacaacaactaaaatggttttttttttttcttaataaaacgaataaagtaccttaaaaacatgattagaacattattaagagcttaactcttcttttcttccctttagaaagaatattttacaaaatagaaccagggtaaagttagaaaggattgggttatttttttgtggtgaatggagggtaatttggtaatttgaggtgttagtgaaggtgatctaacatagaatgggaccctgggacagtgacccatatcccacggttgagatgaagaggttgaagaatcttagagtgaaggcatataagtttgaaatgacgtaggaaagtgct

SEQ ID NO: 52975 - DNA, 862 bp, Cannabis sativa
ttgttactaagaactttcagagttcctaagatgccaaatttctgatttactaatgctgatcttttcctttatagtttccttgggaggagaaaagaaccctattttgtctgtccaaatgaagggtgtcaaaaccttatctagcaagtcgaacatgtaataaacttgaacggtaagagtgtcaaaaccctatctggttagtctcccatgtaagaaactccaatgttgttccactaagaatttactataaagttggctgagatctaataccaaaaacacaataccaagtattcctatcattctaagatttaagtacaaaaaatcacctgatataggtcagcgtatgttacttttggatgtttagacttcacttcttctgatatcagaaagaaaaaacacttatcagataactaagtgaagaaaagctccattcaataacacacatataaacataaaaaccattttaatcgtcccccataacgtgaatctggaacatgacccacaattgattctcttgctcgccacactgaagtgactcttgacagttttatgaatgtttattatcaagcagctcatacctcaaacccataatatgccaaataggtcgataagctttttaatagttcgaattatcttatctgactacatacacaaattgctgaaattactcaaagacttttattgattaagaagcagaagattacatccacgagcattcgagaggcttgtaatctactattccacatttgagaggattgggctctccaataatcgagataactctaaaaagttctttcacagcccctaaaaatctcctcctcccacatatatatagtctatcgtttacaataatcccttccacatc

SEQ ID NO: 52976 - DNA, 847 bp, Cannabis sativa
tgaaccaaaaccaaaagaatatgaacataaataaaaaattcctaattcagactataaatactcgaatcagaacctaatttcttgacatatcaaaacaataaaataataatgacaaattaaatccaaaatccatttcaaagattaaatgtgaaagttaagcagagattttttttttcaaactttccaaaccctatagattaaaaaaaatacaacagaattatacctgcaacaacaaaaattcttcctcaagctactcttattatgctattctcatttttcattttcaaatctgagaatgaaaaaaagagaaaaaaaatcagagagagagggagaataaatcaataaatgaaagaggaaaaaaataattggttgaaaggaaatgatccatactcatcagcaagtgccttggcccttagcggtgggcacaacctacaaattaggaggtaatatgatcaaataatgacagaaaaaagtcaaaataaactttaagccagaattcaagtcgcaatgaaaagtagcatacccttctactttcatccatatcagccttgtttcctaccaggatctttttgacattatctgaagcatgctgttcgatgttgcgaatccaattcgtaatatctgaattagttaaaaggcagtgttagtgcaaaaaccatacaagaaacaagaggctaattaacaataatttataaatattaactttaacttatctgaaaaataaaacacgtatagtaacaaacattaagtgaaagatttaaaataaaataaagatattaatttaaatttaaattcataacagattgcactaatctagggtaaaaaaagcatttatttaacaaaaatt

SEQ ID NO: 52977 - DNA, 1085 bp, Cannabis sativa
tttattcaaattatttattgacttgatcgtcagagtcccctcagctggcaccatcccggtgtcccaaggtctcaatgatcccctttctcttttgttctacaggttgccagtgtccgcgatccttccattccgatcattgtagatttggccctctacaattttgcgcccaccgtggggccctgacgagtaagggacacgtatccagtaccatggccaatttggaagaaggagagatcgacgtccaagcctagatagctattcttgtatctcagatgagggaaaccaatgaaagcctcagaacactacaagaagagaataaagcattctgggaagagaatgctctgctgaaatcaaaggtggagatactagagtccgttcaacgtagtaggatggagtctcagtcaaggtttcacgttccaattccatccatgcaatcccttgattccactccgactaaaaacgtaggccaatgtccaacggtcataggaacaccacaaagccaacaacacaccaacattcaaccacaacgattattggagcagatggatcggtaccaggggatctactctaacacatggaccctctttggtaggtgacgagaccatgaccgaagcctaagtcacatcagttctagacagaagcgttcccgcaccaactactcaagaaggacaactcaagacctctgacccaatcactccaagtattttgatatctaatgttcatgttgtttcatttgcaggtcaagccgtcgcaatgacacttgaggagatgatcgaacaaatggtagcaaggaagcttgaaggcatggaggctatgattcacagaatcccaagagtccctgcacctatcaaaaagagcttaccaagtagcttcatagactctccattcgtggatactatagctctcgtggagatgccaaaaaagtttgtcttcccatcaatgaagatgtatgacggaacaacggaccctaacgttcacatagcaagttacaagcaaagaatattcacagccgccatcccttgtgaattgcgagaggcttgtatgtgtaaggggtttggttctagtcttgtgacagtcagtagtcc

SEQ ID NO: 52978 - DNA, 980 bp, Cannabis sativa
gcaaaaacacggttttttaaatatcaactaaagcaccataaataatagaaaatacataaatcaagcataaatataagacaccaaaatttttacgcgaaagctcgatgcaagaaaaatcaagaggactgcagtccgcttaaatcatctactatcaccaattttaatagggattacaaagttcttctatagtataactaaaagctcacaaataacatggtttgaccaagtcaaacacccatcgaaagatcacttctttatatattaaatataaataattatttatatttatctaaatattctattatgtgtgaaacgtggacattaaccaccattaattgtaaattttcaccaagataaggttgagtaaccactatcatattcttacaaatagggattggctcaaaggaaaaaggggaggcaatttctgattgacagaaactctgccaaattgtaaatacaactaaaactcaaaaataataaactcgtggagtaggtagattttaactacaaaatcacgaaaaaaatatctagtgttcacttattattttgtctcttattttcttgaatttattctctaattaattatcttctaagattaagtttacgaaaaatcatgtcaacagtttggtgttttcattgagagaaagaagttttaagagattcaagaggaagaaattcaaattcatcatcctcacaatcctaactataaaattagttaaaactgagagtctaatggaatcatcttctactaatcatcgtcaaagtatgcacgaaataattttaaaattcctacctactttacacaacattataaaaatatatgtgaagtatatataagtttttggccaccaaaagagtacacaaaatatatgcaaatattcatatatataagagaaatactgtatataatatatagggcaagactatggtaggacctaatttttttttatcattgattttagatcatgtggttattatga

SEQ ID NO: 52979 - DNA, 1359 bp, Cannabis sativa
atgtgactactaaagaagtcaatctattgtttcgtgtaccaagacatgtgactactcacaagaccaacagagattcttgctcataaaaaatgacatctaaagataagaaattatacagacgacagagattcctctggccagctaaaaagtttatctgtttctagttatatatatatataatctagaatcctatagattctttctcaaaggaaggatatagttgaattttttatcatttctgttaatagaaaacctatatatagtgaccctcattatgaattataaacacataaatttagataataaaaatctcatctttcttaactcaatgtctttctaaattttctcttagcgtatatctctctactagtccatactagtctaaccaagcctatactcaactctaaatggtatcagagctcggtatcgttctccttatctttcctattgagaaatcccaatctcatacatcatgaaaacaccttctaatattatcgcctcttccaacctctcaacacataccataccagtatccatgcctcttacaataagcccaacattacgacgatcttttgcgagaaaactcgatatttaatatgaaattttgtatctttacgatgacgaaaaaaattgtataatatgaccttcccttaataaacccatatcaagctttcttcaaaccacaaagcctttttactaaaacaataaaaatcctcattaaacaaaacctaaaaactgtcaaagaatatgtccaatcaaccaaatttgatcaatgtaaccttcctattatagagcaagaacaattagtcactctccaaatccctcctgagttttcacaataatagatagaccaaggtctaactcacatctattttggggcaatcaaactcgccttaacccatcacgggaggaaaggcttaccagtctattcaataacattgcttgatacaagaataagaaaattttaacatgactctataggcaccctagaagcaacactcaatacaggcacaatcatcgttacattatatcccaatttttgcatgtcattgagggataaacaattagtagatgccttgaaggttcaacttcaaattgtgggcatagatcaagatcctgattccttaggatctacactacactatcaaatggcctacagggtgtgtttaccgagatttttaaaaaactaattataagaaattagaactaaggaaataaataattcaaaaaaaaaataaacacacaaggtttttacgtggttaagatgttaatgagtcttattccacaagtcgatattattatatatttttagctagaaaagcctttgggaatacgatgagtataagttctctatttttt

SEQ ID NO: 52980 - DNA, 1352 bp, Cannabis sativa
ttagacgcaacaagctactattaggagcgactctaataaattgaaaattatccattgcctaaaggtaggaattttcctgcttatactattaggggcgacaaaagtcacttctaataccctaccacctgacacattcaaaagtcacccctaatggtcgctcctaatagttttgcatttaaagctcaaatctccttcttctccgacccattctcttccttttcccattttttatctgaaaaatctccattaacgaccccgatcccatgaccacgaacaagaagaagaggaggaggaggagagagcaaccattaaccaccctgatctcgagaccacgaacaagaagaagaggaagaggagagagcagccattaagacccctatagcaaagtttgtcttttactttcttttgtttttaattttagaattttttttttactttcatcttcttattttttttttctccatttcattctttctaaaaatacaaagaaaaaaaaaccaatctcctaaactggtgtccatatcacccgtccgcattgttcaactgcacatttaaccaacgttgtcctccactcaatctcggccaagtactctctctctctctcattctcttttactttttttatgatatttgtattattgcacttgactaattgtattattgtattgagattatataatttataaataattttttattacatgttttattcatatattaatcttattatttttttattatttttacaaaataatttgattaatttgtattcatatatcacttaaaagataaaattaatttatcaaaaagttatttaaaaagaaagtagataataaatttgtaattttttatgttagactttgatatatgtatttatagtgatatttttaatcaatacatattttgtgtatgttattttttacaatgttatatatttttatatgtgtatatgagtaggtatatatgtatatgtgtatttttttacaggtgtatatatgtgtgagtatgtaattgtaaatgtgtatatgtatctatgtttatgtgtgtgagtatgcctaggaatatatatttatttgtgtgtttatgtatagagtgtatatatatgtgttaatgtgattgtttattattataattgttttatataaattaaatattaatatttctaatattatagtttttttttaatgtaaaaatctttagagctatgtcgcccttaaaagtcaaaaattaatttttaggagcgacttttaggggtattagaggcgataatgtcgctcctaaaagtaaacttcgagaatttgtgtattacttttaggggcgactagaggtgactttttagtcaccctaaataa

SEQ ID NO: 52981 - DNA, 898 bp, Cannabis sativa
gcataaaatatcaaaaacatgaaatttcatatacaacataaataacacacctagaattaaagtatatcttcataaattcataaatcataattcgaaatcttatttcagaattaagccctaattatctgctaattctcatactaaggttaagcggtcattacaaatatccccccgttaaaaggatttcgtgctcaaaatctaacctaaacaactctggatattgagccctcatggcggacttcaattcctaggtggcttcctccaccttattgtttctccagagtatcttgaccaaagctatggtcttgtttcgaaagactttatcttttttgtctatactctgaactggttgctctacgtatgataaatctggctgaagctctaggttttcataactaagcacatgagtaggattcgatacgtatttctgtaacatagagacatgaaatatgttatggaccgctgaagtgttggaggcaagggtaaacgatatgctaccagtctaaccttcttgagaattttgaaaggccctgtaaacataacttgccccttttctagaaacatttgatccccttcattggagacactcgtaggaatacatgatttcctatatgaaatcctacgattctatgcttaactcttttgcctactctaggaggcaagcattttggccttgatcttttctatagcctcgttggtctgttgtactaattctggacccaaatatttcctttctccagtctcatcattccagtgaattggagatctgcactttctaccatacaacatctcatagaaagccatccctatagtactctgataactattgttgtataaaaattctatcagtggtaggtactttctccagcagcctttgaaattcatcacacaggcactg

SEQ ID NO: 52982 - DNA, 2636 bp, Cannabis sativa
agtagcagtcatgagtgcttcaccccataagaactttggtagatttgatctattcatcgtgcttctaaccatgtctattagagtgcaatttctcatttcaacaacatcattttgcttaggtgacccaggcgtagtgtattaagcaattatatcattttcttgtaagtagttagcaaaaggccccatgtgttgtccagattttgtataacaaccataatattctcctccacaatccgaatgaaaaaatttaatgactcttcctaattgtttctcaacctcatttcgaaagactttgatttttcaagagtgtcagatttttctttaatcaagtaggtgagaccataacgagaaaaatcatcgatgaaagttataaaatatttgtttctacacaacatggtggaataaggtccactaatgtcagtgtggataatttctaataaagattgaatatggttggcagtcttctttccatattagtcaatttttcacgagtacaatcaacacaagtatcccgaccaaaagcatcaagaagaggaataatctcagctttaactaagtgatcaaccctttctttagaaatatgacccaatctttgtgacaaaacaataagggtattttcttaatataagatctcttactcacaatattcacgacattaaaagagaaagctaagggagccaatgacaatttgtaaagaccatcagaataaaaataatttctaataatttggaagtcaagcataatgtcaatattattattggcaaaatgaaaagaatatccttgtttaaccaaaagcggaagcaaaactattcaagacaatctcagctataaactgtaatttaaaaataaatgtgccaatatagataacatcaactccaacatcatttcccactttaagctttgactcactctcatttggcttgagatcccttagcccctttaagatagtagaaacatgaacagttacaccactatctaaccaccaagaatatataggaacatcaactagattagattcaaaacaaacacaagctaatgggttacatagttgtgcttgcttcttttctaactaagtcttaaatttatgacagtccattctcttatgttccaattttaaaagaagaaacacttgacaagtgtattttgactttccattgttattcttttgttcagtcttatgctcctttccattaccattctatttagaagcataatcattcttattcgtgaattttccttttcctttcttggtcttgagttaagaaacatattgagcagattcaatcttctccttttatagcttgctttcttcaactacacactaagaaagtaggtcattggcactctatatttattataaatgttgtaggttgtcttgataagactaaaagagaaaataagtgcatgaagagcacgatcgataatgtaaaaatcaggaagagaaatattatgatctttcaatttagactaacattcttaattttcagaataaattctcttacttcatttgattcattatacttatggttgtcatttcatccataagatgtccagtttcgacatttttaccagtgtcatatagtttttctacagtattgaaaaactctttggcatttgtagtgtccagaaaactactcaatagatgttcaagaatggatctttttatagtaataagactaagacaatttgacttttctcattgtgtatgaagagttttttgggcagcagtactggtatcagtaccatcaacaagtttttcttctcccaagcgtaagtcgaaaaccattatgcctaaagtaaattccagatctcgttttcatgccttaaagttggacgcattcataatttggatggaagcgataatgttattcacagaaaggagatagaatacccaaaaaaataaaacttgatcaagctatatgagcaatgtaattagaaaatattttagagtcaactggtcattataaactcttatttggggtgagaatataacacacacttaatctaccttcaagaagttaacaataaagaaaaaatacatatcaattaagaatttatcacctttgggcaaataaacttatttaaagaatgtatattaattcaagccaaaaaataataataaatatatatatttaaattattatctttagacgaataattaaaatatacacatttaatattaacccatttcatggaaagtgaactaatatatataactactatctttgggcaagtaattacacatatagccaaccaaaataaataatattttttacaatatataaaatttggtgataaaacaatcattgaaaattaataattttcaaccaaatttctaaaagagatatattaattgcttataatatatcaataatcaaaaaataaagtgtccaccataatacattatttttgcatcaaataatcaagttttacaactttagaaaaacaaataatggaaaggtgtgaaagtaagaatattggtagagattactaaagataaaacaaaataagcgagtgaccaaaataagagagtgactatgtcaaatagaacaagaagaagcccgaaaaaatttgtatgatatagagatttcaaaaaatcatcaaaaattatttttaataattttttaactgcataa

SEQ ID NO: 52983 - DNA, 1095 bp, Cannabis sativa
ggcataaaacccaacactcacctggttgctgccttacattagtaagggaggatgcttcaggtcgtctatctcttgctgtctaaaattgtttcttaaatcttagacaactgttcccaagaagtaattgaatggtgggtaaacttatttaaccagctattgttgtcccagtcagcgaggtggggaataaaatagaacgtaagttattcgagacattgttggctcgcattatggtattgaagttcttgaggtgagcgaatgggtcccaagtcccatcgtacggcaagacgtgagggtttttaaatccctggggaaatttagaattcataatgtctgaatggaaaggctcagattcttcgtccaagtcataaccatgcagtttcccatattccccatcttagtatctcttgaatttatcttctaattcaatgattcgtaattggattggatcctcttgctttcgattagcatcgagttgttggcataaatcaggtgcattttgatttaagcgcttgcgtaaatcaggttgtctttgattcagatgttcacgaagatctgcctgtgttcgttcatggttgctcacagatcttgtatccgagtacctctcagattgacagctcctcgtattactcctactctctcgatcattattacagtgaggtctatctccttctcgagtatgcctttctgactgactgtgttctcgggatcttgactatctcaagctagaacttaccttgtcatgcacaggccttctccttcgagaaaggctagatgcacgccccccgctggggtatatgtatgcctcctccttatcagtttgagaaagacgctaggggtgcctcagtggtaacccacttgtcctatgttgtgtcctaagatttctctcgtttttacgagggatctcctgtttccttattctgggctaccttatgttctcgtttctacaagaagattctggcatgtcattgttttcattcccctgattcgtaaatccatggggtcttcgaggtacccctcgatgaggtgctttattgtcttattgttcgtcttctggaacatccctagtttccccaggttgctcctcctgggtgttct

SEQ ID NO: 52984 - DNA, 567 bp, Cannabis sativa
ttatttaataactataatttttctctctaaattttaatatatactattttttatttaactttctcgagctattaaaaattctccttaaattattgaaattattggatataagaattttcgttcgattccatttaattttattaacaaacgcccgttagtaaaattaaacgaaaatttttgaatctaacaatctcaataatttagagatacaatattttgtacatatcaaaatttaaggaaacaaacctattttaaattaatatgggtaataattcacaaccttgtggtagtattgaacacttaaaaaaatatctaatagcacttcgtcgctctctaaaaaatgtgttaaattcgatacatactaaaattaataagttattgtgtcaaatttagcataacaataaatatacttttttatttataatattgtcatttattattaaatatcaatgagtaactttaatatatattttaattacaatgttatcattatttattttgaaaaatatttagtttattgtagtgatagcttagtagtttattaattacacctcttctcataaaaat

SEQ ID NO: 52985 - DNA, 2536 bp, Cannabis sativa
ggttttagaaagtagaaaccttgtttttttttttttttttttattatatttattttgaaagaaaatatttatatattggagaaatttaagaccaaaattatgtagattatttgtaacaaatcactttttttttttattattttagtaaatattattttagactatttgttttgtaaaaattattaattggactttctgttttgttaaatgataaatttagtaaaattatggtcctgtttggctaagtttctacttttgtttatagctagaagtataagataaatataaatttttgtcttatttttaccgtttagataattattatatgatttttttttaaaatgaaaagtatttttcaaattgtttggatatcattaaaaaaattgtgagtaaattaaaatctatgtaaattattttaatttttaaaatagcttcttttaaaaggatttttaaattattttttttttttattttttatccaaatacccgcgaagaacttttttaaatttaaaagttaaaaaagaacttatagaaactaacccaaacaagaattatgtagattacttgtaagaaattatttctctttttttctttattattttagtaaatattattttgaattatttattttgtaaaaattagagaaaatgattgagacacacttaaattacacacacttcttatatacataatgatgtgtaattaatctcaactatacaattaaaagtattatagtctcacttaaaaatataaatgactaatatttattacacatcattgtgtgtaatatgtgtgtatcttgcattactcataataaattgaattttgtatttttttaaaaaaaattgtacaaataatatcctaagctcaattttcataaaaataaaacttaatgataataatataacctgtagagttagccctcaagtgaagtgaagcgaggcgagctaggtgtgcgctttgtgccctagaacgatgagggctccaaaatgtgaaaaaaaaattattcatatatagatgaaacattatataaaaaacttaataataacctaatttagatgtgttatgataagttcgtgctataaattgtattcaagtttgttttattaaaaaaaaatatcaagagttgagctccggtactgttttatataattttaaaaaatacaggatatttaatttgttttaaagtggtcgtgtacattaaatttatttaagacatcttgtataatttttaaaaattttggaataatttacagtataaaaaataatgtccaaataatttattttacacgcgtataaagttaaaaaatcatgtgtgcgataaactgttaaaactttattttcagcatgttaaacttttttgaatttcttaaaattttgttggatgtcttaattaactacaacgtactacacgaccataaaaaaatagactaaaaaattttactgaatgccaaaacagatagaggatgcaccatatagttttctaatatttatatattggagaaattttcacttaaaagagcaaattatctaaattatcatttgtaagaagactagtattaattacaactttctattaatttcttagttaattttcacactcaaaacacgcaatcaagctatccgaaagactatacttacgaacgacaagctatctggaaggatgtccgaatgtatgacaagctatctagaatactctacttatggaagacaagctattcgaaagactctacttacgaagataagatatccagaaaaattatttagactggccacaactttactaacaaagcttttcggatcaacaccaagtgttcttgtttatgcttttgttgtttaataataataaacacaattcaatagtgtactcacaagcttataattatcacaattagcttctactattgaaccattattaactatgtttattaaaataaaattaaaccaagtatatattattgaaaatcttatgtcaaaaattataaacaaataaatacatgaagctattgatattaccggatattcaataggacaaattttatatatttgttggtaattttatcttatttgatgaacttcatatagttcataatataatataatggtatgttaactaaaccaacctacccacataattatttattttatttagaaaaatgagctgtatattaatcctaattaactccttaattaattaattaattatcatagttggatgaagcatcttcatctcaatagcatttgcttcccacgaagttattataaaattcaactcttcaattttatatttcatgctataaaaatatttatatataataattacaattaaattaataataataacacaataatattctcctatatcaaattcagacatgcagatctcaacaataaatatatatatataaatataaatatatattttgtaaggaattgacaataaatattaaatatatacataaaatatatttatattaatgtgtaattattaatcaacaatgaccggagttagaaaatcttcaaacccaaaattatg

SEQ ID NO: 52986 - DNA, 4090 bp, Cannabis sativa
ccccctttaacatttgtaattattgcataaaaaatgacagtaaaagtactttattttacgattttgttgcagtcgtacccttaagtgtcaactcagaaacacagcagtatttccctgctcggtgatcactacgtgtttttgagttgatatttaacgagctttctttaattgaatttgttaatcactagtgaaaattgacttatatttgttagtaaaacttaggctgcattttaacgtattggaatgtcattcaaacgcaacctttgatgctatttttttcttctttgttcgatgaccgagcagggaaatacggctgtctacttgctctatgcttatgctaggatatgttcaatcattagtaaatctaacaaagacatagaagagttgaagagagtaagtaatttctactttgctaataattctaactaattaactaactaattgctaaaccttactttgttttaaacagagtggggtgattgttttggatcatgccggtgagcgcgaattaggccttcatttgctacaattttccgaggtaagagaaaagtacttaacaataactgtcgtgttgtatcgtgtcgtgccatgtcgtctaaattttgattttgattctgattttgcaaggctgttgaagaagcagtcaccaatctgttgccaaatgttgtgtgtgaatatctttacaacttgtcagaaatcttcacaaagaaattttataccaattgtcaggtacatatatatatatatatatacatagtcacttcactgatcaatctaaacaaacattattatgttatagactaagtttacagtacactccttaaaagggtgtttcggtactccttatttatttttgcatataaaagagttttttaatctattttttttatgatggaatacgttatacttatttaagactacctaccacttgtaaattttcagaaaatttcgaatagtttataatgccgaaataaaatttgcatatattgttgcacacgcgtgactattttttttatacacatgataaataactatgtaaattttatttttagcattatgtaaactattcggaattttctaaaaatttacaagtagtcttaaatagttacaacatatgcgatcatgaaaaagaaaattactgaaaaactcttctgaatgcctgaaacagataagaaatctacccgaacgaccttttaaacgggtcgaaatctcctatatactaattatattattgatatgtaaatgtatggtcaggtggttggatctgcagaagaaactagcagactcttgctttgtaaagcaacagcgatagtgatgaagaaatgcttctatttgcttggaattgagcctcttaacaagatttaatatatatatatgtttgtattcaacatttttgacaatttgtagactacttttttctagtaaattcttattatgaggttagagcatttttttttccataaatatcttcatataaatacatatatgtatttttatttatatttttacaatttatacattttttttaagtataattttaaagttttaaaattacaaaaatatatttttagaaaaacaataagaaatcaatcttacgacaactataaattaagaaaaaaattgacctcatatgcaaaaggaaaatttgtaatagtacttacgactctagccaaggcctcgtacttaagccctaactccaaacctcggactcaggcctcaacctcagccccagccctaagtttggaccttgaccctagatcggtccccaatgccaaccctggatctaaacccttgactctggacctcggacttcgcccttgagttcagctccagcctcttaccccggatcatgaaccctagccctgtcccaagccccaacccgaaccttggacttagcctccaaccttaacccccgagcccaaatccataacccaaatcctcaaccctaaactcccgatcctagactctagtccttagactcgacccgtgacctcttaccccaaatccaaaatctcgcctcaacccccaaccctgacctcagaccatagacttagccctaactcctatcccgaccccaaccatggctttgacctcaaaccaaggcctgtccccagccccgattcaatctttaccacaatacaacataagttcataaatattacaggcacgcttatacatcccctttttatgtattccataagaaatattatggtttgtattaaaactaagtgtcctaataattaatatagtttgaatgaatcaacccacatggaaaatccaaccattttttttaaacaatccaaccattttcaagtactgtatctatgatctgttctaataaaaaaattcaacaaattagccttgacattaaaaatttagctttctttctatgcttgaatcattaaaaaatctgtctttacaatgaaagattgaacatttgaagcttatgtagtattttttctacctaaaaacaacagagccacaaaactgtctgatccaaaaatccaccacgtgttgaccttctcaagtatcaaactgtgaaaactattcaagattccaaaatctgttttttagtggaccaaaaaaccttattattattattattattatttttaactgtctttgaattatcattatcatcatcatcatcaaacatctgaggctttagttaattttctttcatttaaggtgtttcattattcaccaccttcttcttcaatggcttccaacatttttctacttcactcacctccttcttttcatactactagactcagacccacttcctcatacccaattggattaagaagtagtaataataatcataaagggttgtctgtaattacatgttcatcttcaaatggaagagaacctgactcagtcaagaagaagaagcgtgaggagctctctgctaggattgctgctggagatttcactgtaaatcaatctgggtatgtttaaagtttgaacctttattaggttagtaagctgacttttcactttattaggttagttttcaatctcaatttcactataaaccaatctgggtatgtttaaagtttgagtcttttcaggttagtaagctgatttttctgttttctttgttgaaaatttgatttttatttttgggttgttttggtaacttagttttccatctcaagtgaagaatggtttgtcaaagttgggagttcctaaagagacattggaattcttttttagttgggttgattccaatggagattatcccaaagttccagaagcaaaagggtctgttagagctgttcaaagtgaggccttttttattcctttgtatgagcttttcattacatatggtggaatttttagattgacttttggaccaaaggttggttttttatggtttttgattgtgtttatatacatgggtcactttctgcttttgctcaatcacttgctttttttggttgttgcagtcatttttgatagtgtctgatccttccattgcaaaacatatacttagagataattcaaaggcttattcaaaggtaagaaactagagagcttaattctctctttcttttgttagtgaaataaccacatttgggcacaagcgaccaaaaattacactgtgcgaccataatgatctgtttgcaaccataaatttacaatgtaatgatcttacaatgcaaattttacaatttcaagtttgttagtttagctcatattagacttcctttgcagggtattttagccgaaatcttagagtttgtaatggggaaaggacttatcccagctgatggagaaatatggcgtgttcgtcggcgtactattgttcctgcattgcatctcaaggtattaaactactgagtgttcagttatcataatctctattcaatgtcagtttttttccattccctattcatgtgagttttcattaaggatggtttagtgtatgccttttcttgagagacatgaagatgcttagttagagaagtttgatagacccccaattcggtatgcctatgctaagcgtgggcattaggaattttagttttggaaagtcttagagattgaattgtttgtattaagccttggctctttgagagaaact

SEQ ID NO: 52987 - DNA, 934 bp, Cannabis sativa
cagcgctgtgttattttttaaatagaaatattatctcattttatatatagtatttttatttaatttgattgatattttacataaagtattttatatattaataaagtatatatatatttgagtaaaagctaatattttatactattatattaaattatctaaaatactaacatatactttaatatattctaaatataaaaattaatgtgaaattatcttatataatattttttttaattttttttttcaaatttaagatttgggttgcttctgtagtttttacggaagtttctatgtgggttgctatgtgtattttggttgcgatttagattggcccgttagttgctatagaagtttctgtgtggattctgtaaaaatgtacgtaaaaaaactatttgaaagtttaaaaataaaaaaacataaaattaatttatactataaaatgatttaaaaataattatataatttgaaataaattatttagaaaacaaaaatgtaattaaacatgataattgtagtaatatatttctttcagaaataatttgataccatttatttgttaaacgaaggtggcgtttgttaacacttttattttttaaatttctcaatcacaaaagtaaaagtaaaatttttgtttttaaaattttaattttaaaaataaaaatgtgttctgtaacaacttttgtttttcaattttaaaaacgtaaaaataaaaatgtgttctgtaaattttattttaatttttatttgttgattttatttaagacgggttcgaagccaagtttgaggttaggatcggggacgggtccaagtccaggactgggatcgggttcgatttccaggatctaagttggggttggattctaaaatattaatgaaaaagatgtttaaaaaaaatgttgaaagtgttattttttaaaatttagattcttaa

SEQ ID NO: 52988 - DNA, 1873 bp, Cannabis sativa
  modified_base (1055)..(1061): a, c, t, g, unknown or other
aatcatcattcttatgtcgtaatcgaaaggttcgtggcaaaaagtataagtcataaaaagtataatttgctgtgtttttagtcgtagtacttattgtgtctgaaattaaattagtgataacttgcgcctaaatattatgttttagttacaaataattttttgtagcgtatattgttgcccctaaaattaaattagtgataacttgcgcctaaacttatgaagctgatttcctgataaatgattttgcttcatttcagagaaggtatatatataattcaccattcactataaatacacattttgacatataattatagtattgggatagaataatttctcttttttgaagttgactttcccaaataaaggaattcagttcttcattgagaaggtatatattagttcaccgtccatcctaagtatataaccactaattactaattaaggagattgattgaaagtttcactaataataataagtcatgaagtaatgatagagaatgatccattaactaaattagttcaccgtccatcctaaatgcatgcatattgatcactaggatataatgatctcgatctctcactttggagaattttccttgggacaaagaacaatggtttattgaattaacaagatttattaacgaatgatttacgaattacttataattaaggagctttattgaaaatttcaacaataaaaatataaaacatcgtgaagaaataatagagaagatttatttaaattagttcactgtctattctaagtgcatgcttactgattaggatataatgatcttggtctctttgctttcgagaattatcattggacaatgaaaaaatttattgaattactaaaattatcattattattatatataacaggtgtgtcatcacccaactgtgattgcttgccattgtgaaggtagaggttggaaattttggggtgacagcaaccttcacacaaaattttggggaaaaggtattagttacaaaaattacaatttgctgtgactaaatgtttagtcacaagtaattttttgttgtgactaaannnnnnntttagtcacaaaaaatttatgttgagactaaaagattgtcactaaggtaactattttttgtcagcagggacgaaataaaatttgtgactgacagtaaatcatcaattctatattgtgattaaaaagtctgtggctaaatgtattagtttcaaaaattacaatttattatgactaaatgtgtttttaattgtgactaaaagtaaattagtgacaacttgtattaaatactatgttttagtcacaagtaactttttgttgtgactaaaagctatatttagtcacaaaaattttttgttgtgattaaaagattattattaaagatagtatttctttcatagtgttgattctgagctaaggcaggttaggcccatgcctagggcccacccaaaatatacagggcccaaaattgcatattaaaaggcccgataatattcgcacttcactttaaatacaacgaaaaaaattaaggctcatatatattcaaggctggctgaattaatgtgacgagttataagtgattaattttaattcttcatattatttatttaattaataataaattatatcaataataatattataataaaattcaatttcaattctacaattatcttgttcacatttaattttcatatgtaaacttcaattgcaattgataataaatactaataatacatatatatatgtataaaataggttcatggatttgttgaagatgatttgggaaaaaaagttgctacaatatttggaaagtgggatgaaagcttgtattatgttaatggtgatagaggaaaaaatatgaaggcatgtag

SEQ ID NO: 52989 - DNA, 1652 bp, Cannabis sativa
gggctaatcccttatcttgaatttcatcaagcaagtccattgcttcacttattttccgagctttgcaaaggctttctacaagtatgttgtacgtaacgatgttaggggtacattctttctccaacattgctctaaacgtttccatcacatcttcgttccttgcagccttacaaagaccattcagtagagtgttatatgttatcacatcaggtgtaacaccatgactccacatgctacttactccctcaatggcatcatccaaattcaactgtttacagtaaccatcaatcaatgtattaaaggtaaaaacatcaggaaggcaacctttagaaatagcatcattcataagtttacttgcatcagaaacacaccccatcttgcacaacccatttataactaaattaaaagtccatatatcagggttacagccattttctgacatatcattcatcagctgcaaggcttgcaaaataagcccgtgctgagacaaccctctgatcacagtattatacagaacaatacttggctttaagccctttcccaaagcctcagcaaatacatccatggcacggtctatgtcaccctcctgccacaaaccattgattaatgagcagtatgtgaactcatcaggcacaaagcccttataagttgcatctttcagaagattatccgcattttggatcttaccctgtttgcaatatccatcaatgatagtgttgtaggtaaatccatcaggttcaagcccatcatttaccattgtatgaagatagcactcagctttgtcaacctcagactttttacacaaaccacagatcaatgtattatatgtaacaacatcaggagttaggccttccctctttactccatctaacaatctgacagcctcactaagcaaaccttttttgcaaagtccttgaatgaaaatgttgaatgtaaacaaatttggagatacccccctcttataaaccttgttgaaaagtttttcactctctcgaacatctcctttcttagcaagtgtatgtataagcttattgaatgttgtaatatttggacagaaaccttgagaaagcatgttcacaaataattcataagcctcagcacgatagtcttgttcataaaatccactgatgaccgtacaatatgcaactgcattaaactcacaaccctgggaaggcatgttattgagaagcctcaatgcagcatgaggcctattagtcctacagaaagacttgatcctaattgtataagtatatacatctggttcgattcctttatctttcatcctcatatacactttgtgggcttgattaaaatatccagcctcaatgagtaaattcatgactgcattataaaattgcactgaaggttcacaattataaaaatccatcctctcgaaaatattaacagcttcttgaaccttacctattcttccatagtttctcatggctccaatatacactccttcgagtaaaccattatccacgttcatcctcatctccaagagtaactgttccatagcttcaaactccccgtgaaagccaagcttatcaatcatacatttgtaagtaagaaaagtatgcttaaacccatcttcccttttcactgagttgaacatttcaagtgctttgagtggatccctttggtactttacc

SEQ ID NO: 52990 - DNA, 1339 bp, Cannabis sativa
taccaaaatttgtaatggttccgtctcctgaaataatgtaaaataattatttgtttcagttttagaagttgcaaacaactatttcgatctgtcaaaaaaactaataaaaaactcttttcagcaacaatatttgcaaataacatttcgatctggacgacaattttttcaaatcaactattaaataactattttgaagcattcagtaattaataagaatagattcatcatttctcgtttgcagatcccaaacaacaattagtttactagaaaacaacttataaacaactgtttacagattaaaaccctgtagcatctaattatatgcattataatattttttttaatgcaaacagttgctgtttttttgttcagattgaccaaaatttcattattatttcaatttattcctgttttcctcaatttataacaaattctcaattatgtagaataaaagataggaagatgtacatgacgaaattgtattaccttcaattctttctttgattcaatcattggtgagtttcaatgatttccagatctccttctcttcgattcttctcctctgaacgcgttgggcttttgactgaatgttgtttttgagtttttttgtacatcaatggaggttgaatgcttttttttttccctttttgtttttggatttttcaggatctgagtgatttttccttaagatctacatcttttttagatcagattttcctgattttggaaggaaaatagtttagattgagttgttggggttcgtcggctgggtcacgtaggaggctctcctccgtctttgtttccggtatttttgtaatttctatttatgtttattttccctttttaggtcataaatgtaaatttgtttctcataagattttttttttggcttttttcagtcttaaccaaaaaaaagtaacaatattacaaaaatacttcctgttggctaaataaaaaaatatacaacccaaataaaataattacacaaataccactttcacacacctttaactcaggatccatgcttcctgggcaactatcacgcaaccatcgcgcaaccatcgtgcaactacgcagaaacccagcgcaaccgaaacgaaaatttaaccagaaagagaaccaccattaattcttgcgacttcacctgagaagacgactaaaatcaatcaaaaccgggactgttttgaattcataaaaaaatgtagaaaaactactgcgaaactaaaattcaactggaaatctagtttaattttcttaaaactaatgtcttgatttcaatttttagatccatgaaaggcatatctcaaaaagttgaattggagttcccaaacaatccaac

SEQ ID NO: 52991 - DNA, 891 bp, Cannabis sativa
ttggagctggtcttgggaggagttctgaaggagatttctcgagtaagttccctctatcacttttctttcattcttcttaaaatagttcagaatttaatgcattctccgtacaggctggtgtgaagatggcttatgcctactctcgagccacacttcttaaccacgatgcgaagggacgtggacttggccaagaaagacgctgaggatgcacgggcctagctcgaggtcatgaggaaggaacttggagaggaaaataagaaagtcattgttgctgagaccagggttgccaagctaaccaaagagctacaagatacgccatcgaccacgtagcttgaggcagaaaatgtttctttgtctcaggaagttaccagtatctaagatgagagagatggtctccaaagtcttcttcgcaggttggaggatgaggccaaggacaagaagaccagggaggaggaacttgaggcagtggtcgaaggacttaagaaggaggttgagagccaacagtctaaggtggagaagcttgagaggaatgtggataccttagagacagccagtctcaagattttttatgacttctgggaggccaattccaaagggaattttaattacctcggcacttccaaaaacatgtatcttgattactgcatggctcaggcagccaatgagaaccctaaggcgaccacttcaacttctcccactgatcagaacattgataatccttctgcccagaccgatgatcctctggctcctttagacctagttgatccttaccaagagcctgggactcccgctatttgattgccttctctttattatattttttgtatatgtctattcggcagtaggccttcttctgggacaaagtggccggctaagcggtctttaaacatg

SEQ ID NO: 52992 - DNA, 723 bp, Cannabis sativa
catcaaataattcagtttgatgtttagtccatgcatgtggctcagtgtaagaaagaaaaaagataaatactaatttagttccttgtattttatctcaattctcatgcaccgcacatattttattaaataaccaaatggataatctgtttcacaaaatagatcaaaatgaattgaagccaattttggacaaatattttatttctcgttctttacgaaaatagataatatatattattaagggctagaaaataattaaagaaacaataaaattttgaaataagtatttttacatgatttaggtataaatcttagtccacgattaaatgggtatcgtccaaccacccttcgcctgtcatcctgcgcctctgcttcaggcggagaaagctgtacggaatcagaagaagagtcctaggcaccggtgacggaagaatggggtatcggattttggagccattttggatgggtttccatacgaaagcgatgtatcagatcataattacaggaattcttgttgagtttcaacaattattcacgctatattatctctttactttcattttactgtgttggttttattggttttttaagttttataagtttttaaaattgttttttaagtagttttattttggaaattgttatcatgtctagaatgatttattttatctatttaacgattaggtttgatctcccgttaataaataaacccaataattaatccaa

SEQ ID NO: 52993 - DNA, 704 bp, Cannabis sativa
  modified_base (307)..(314): a, c, t, g, unknown or other
catgattagattatggattagtaaggtaattagatataattattaataatttatgtttgtgtatgattgtatttgtaaagactgcttatctttaatttagaaattagcagataaatagggtttaattatgaaacttgcatattagttatgaattatcatttaacagagatttatttgaattcagaatgcatttatatatcatatattaaatttcatatttttgcatgttttgtacccgacaacattggaacgcagcgtttggctattagaatcacattttagtatttttagtatagcggggcaatannnnnnnncattgggaatgtcaggaatagtcaagattttaaaaatgaccaaattacccctaagtggttttgtgactttttggttaagtggaaggcaagatggtcattttgcctaattgatttcttgtcctttagtggactttagtagaatatgttattccgatttttatcccttaaattaattagataaacataagctttatcttattttagccaaaattagaaaatcaaagaaacccatttatctctcttcactctatctctctcgaaacccttggagaaccagcagcttgtggtgttcttcatcttgtttttgtcggtttatagttgattcttggtgaatcctttgaagataatagctttgacacctttctctttagttttcttatgtttatagtt

SEQ ID NO: 52994 - DNA, 1283 bp, Cannabis sativa
tttttaattaattgattaattaaataagaaattggtaatattagaacacagaatgtcaattactattagagcagtttcctaaactcttagtgagatcttatggttattttcatttgatttgttttgtgtgaaatgtcattttttgaacaaaattgctctatatctcattcttcaaaggttggcaacaattaaagaatgtctaagtcctcgagatgttatatttattcaaaatattttatatccaacaataaaaaaggtgtacaatgtagtcaatgtcctagttttggacatatacaatcagaatgtgcaaatactttaaaaagatggtaaatctttttaaaaataaaaatttcaatcattatggaaaataatctgttagtaaaaagagatcaaaattcaagcagaattgggttaagaaaaatgaatctaaatgtcttgctaattttacttgtaaaaacacttgtatttctaacagttggtattttgatagtgggtgttctagacacatgacaggtgatgatcacaagctcactgacttcaatcccttgaaaaatggtgatttcacatttagaaatggcatctctaataaggtacttggtagtggtactctaaattgtgaaggactaccaatgttgaaaaatattcttttggttgatggacttaagactaatttaaatagtataagtcaactttgtgagcaatacttgtttgtgaattttttcatgatgattgttatgtgtttgggaagggaaagaattatgcgttaaaaggttatagatctgttaataattgttacatattatcacacgcttgtaaaatttacactagagagctcgtagaaaataaaactatagtcttagattatagtgaaataagcaaaacaaatagcaaataattttactaaagctattaattaagtttgttttatttctctaaagtaatccttaggggtttgtactgtaacactctattttttaggcacgctacagtaactttttaattattgtacacacctttgcaaataaaagaatctcaaaaattgtgacaaatttaaacttttgatttaattttaaacttttataaatatatacatatattcgtacaaaaagtcaagatccgacttctaaaatttattttcatgttcataatatattttataaacatgtcacataacaactacaaaataaagaccaagtcgtcccaagaccgaactctactggtcgaaccatcttgatgttgggttttgagccctaaataaaactcatttcaatataattaaattt

SEQ ID NO: 52995 - DNA, 811 bp, Cannabis sativa
gagagagagagagaaaagaaacacaaaagaaaaaaaaattacgatacttttttaacaacaatcaaaaagcttcaagggtaagtattcatggaatgctctcattcctattctttttcttttgatgtttatttttatatttctctctattcatttatgccctctccataaataaaaatggatgctctcatccaaggaatgccctcattccacaaaaatattggatgccctcattccttcaaaaaaattggacgctctcatccatggaatgctctcattccaccagaaaaaataaattccctcatatggaatgccctcattccactaaaaaatttagatgcccttatccatggaatgccctcattccaccaaaaaaaattggatgctctcatccatagaatgcccttattccaaaaaagaaaaatagatgctttcatccacaaattcactgtcaaaattatctgtggtaaaatataaattttggttcgaaaaaatattgagttagtatcgttcttagctctttatatgtaatggttagactggtatggaaaaatcgcgatatgccaaatcgttggatccaaaacaaagacaaatatagaatcagtatacctgaaacgaatcgatcaagtcaataataatagacaaaaatatccgtgtacaaagtcggccagtaaagaataaattactcttggcatatgtggaaacgtataaatatatatatatgtgactattcaatggttacatttttattgtaatcatatggttacatttttctttaacttgtaatagcaggttattaataggtaaacattcc

SEQ ID NO: 52996 - DNA, 761 bp, Cannabis sativa
cttggatcaccaatacaatcatcatcatcatcatcatcatcatcatcatcatctcaaaagatggatacacaaatagaaaaagtttaagtctcaccaaatggatattgtagaatagcaccttagagaggacaatcgccaaatcggaaccggtacatttgaagagcaccttgcaaggattcaccacccaaaatttgagctaaaatagatgagaatcaaccacttgatcttcaaagcaaaatgacaaaacccccttctctctctagctttctttttggctgcttgctgctcacgaagcactctgctgcttccctcttttttttttttcttttaattgaatcaaacaaaatgggacttaagcccttattggtccaagcccaacaaaaggggcggacccaacatgatgctggttgtgtgaatgagagtttgcatttgagattcaaagatctcggacaacttacaaaaatactgccacatggcaaaaataacttttatactgttttgtgactttttttttttattttatactgtaaacacagaaaataataaacgaggtctccatcttccacatccacagacaaaaccaccacaacaacaccaaaacaaccgaaaaacaaccattaaatccggtgagatgaagcagaaacattaaaagcattaatattgggacaatcatggtttttctaatgttgtttttgggttgttctactattgtttcgtatgtttaacaaatgttggtttcaaattacacatgttaaaccaac

SEQ ID NO: 52997 - DNA, 1269 bp, Cannabis sativa
ttttagcatggcctcccatcactcttcagtgatggccattgcgcgataagcagtgcaggggtagccactacgcgatttcaaaagcgaacactaagctgtaagcttttgttacacgtaagaccaactgtatctaaacaacttgctaacaaagattacttcttaaagttattctttgccagttccacatgcgtacaccaagcaacaccccaagaaaattcccaggcaaggtctatgaaccttagtgaattacaagtgaccaagagaccgtaagtttatgcatttacttggggagcaccgacaccatacaatgcatcgaactagcatgtagaacttatgcagagaaattttaacgcttagaataagctactaaatctgcctctatgttaagtgcaggcatacttttgcttagcataaagaaaagtaaatctagatacttacatgtcaaggccataaaaagatagctaggatgatcatatgtccatgataaaaggatttaaggccaaatgctagtagtgttaaaaaacaaagggtctataggccaaaagcaagaacatgaaagccttgaggctaaatacgaatatgaattgattcacatacataaggccaaggccttacaagatccatacaaccaaaaagaaccagatagagttcctatagggaccatgtactgggctacgactaaggcagatttccttacaggttctaagccatagattaaactttgggcaatcgtacctaagggtacttgctagaccatgttagcgtacaagctggatatcagcaaagtacaagtcttaagtgtaacaacttgaacaaatgttgagtcttaagttgaacattcgactataatagactcaccattaagtttcatacaaagtttctaagggaaccatgtatgagattaaggttgtatatgcctgcagggccataacaagattgttgccaaagtcaaaagaggacagaaagctagccacttgcttagaaccaaggcccaggccggccagggttcccaagccttgaatggggtggccagggtcctatgactcagccaagaactggccagggtcactaaacctaggcatgacacggtttatagggtgaaacactagagctggcccattcccataattaaatactaaggccagccaggtctcaagcaagatctcccaggccagcaaaggttagttttgaatctaattgtgtgtttttctttcaaaactcgaatatcagcctcatattctttatggatcaaagtgtcaagaatcacaa

SEQ ID NO: 52998 - DNA, 1018 bp, Cannabis sativa
tactggattacataaaattaaatatttttaggtatatattaattctaatctacttactacttactgtggatcttttaacattttttttaacaaacaaacaaaaaaatcaaataatttataattttagaattaggattcatataccttgcatgcgtattttcgatatatatgtgtttgtaatgagttgtttgaatcctaattttgacattttaaattatttgatgagtcatttattataaaaaaaaaatttacttttagtcctaataaaatttgcgtgtaaaagtaaaaaaaattgtaactaattataaattatcattcttatattatgactaaaagtcctgtggttaaaagtattagctacaaaaattctaatttgttgtgactaaatgtatttttaatcacaatacttaatttgactaaaattaaattagtgacaacttttatctaaattttatattttagttataagtaattttttattgtgactaaaattcatatatattcacaaaatgtatatatatattataactaaaaaattatcactaaaaataatttttatttatagtgatatctgtacaagaaatgtcacttttgccagtatatttttgtgctggcaaaaattagttttgcgctggtataatagaatttacttgtgatgtgttgacaaatcaatgttggtattagaacttttgccagtataaaataaaaagcgttgacaaaaatgacttttccctatgcgtaaatacgttggtaaaagttagattttagccactgcaaatgtatactagtaaaactttggcctttttgacagcgcagtttgtgaaatatgctggtaaaagttatttttaccagtataatagtgaactgtgctagtaaaagtgacatttcttgtaatggtaactataatagaaattgttacgaaaaataaagaaaacatatatccatagattatatgaaatatataaataaataatgatagggaaaaattactagttattattgtgtaatagctagctag

SEQ ID NO: 52999 - DNA, 1261 bp, Cannabis sativa
attctccttttagctgtattgatacagagatataatactacacaaatcactatagtgatgggatctgaagtacctctctaaaggtaacaatgtcggaatcatagttgactaatctcaagtatgagtatagcagtgggtgtgtgagcgagagatgacttctcagacttagagcttgggtttttgacttaatgacttagagcttctaacttgcacttcagacttaggcttttagggtttgagtaaggcaatttatataggagagcttaaacccttcaaatccctaagaaatatgtaaaataagatattatttacatatttaattagtaaaatacaaatgactaaaatatcccttaaaatatatataattcctcaatttttgtgggctattaaggtcgaatccatagtttgtcttgctatccacgtgtgaagctatgcaccaaaaacttgccaggccaaaagctggtcggccatgcatctacaagatgcatgctggtgagccatgagatgtccaaaacctagctggcctatgctagccataggaccagctaggggtggtcgcccagcccttttaaggtggctagttcatcacttcatcatcccacttgagtatttggacttatcgttggttgtagtgattaataggtgactcgaccttcttgctggttcgttatactgccacgtggcattgatgttggccacgtagacattccacatcatgtgggtaaaaatcgggataacatttatccccaaagttcttgtgtggatgtctatgtggataggaaccttccagcttagttagaactgatgtagccttaactgggtaaatcttgcaacatatttagcccatgattaattgctcttgactgtctgacctcacttgttgcagtaagttaactgcattgctcttctacatgctttttagttgaacattacatggcaagtaaaaaggtgatcccacagaagctatataagcttatgggagaaaaccactcttcactttccaatttcattctctctctagaaaaagaaaattttgaaagctccaccttttctctagaggtcgacccccacatttctttaagtcctgagatttttgcaccattttcacgatccaagcttctcattcccttcaccaaaggtttctgatagtggataagctttctattcccgttatttatcttgtaaatagacctaagtcatcaaaagaccacaaccacattcttttatatctatggccgttgcatcttgttcatagtagttt

SEQ ID NO: 53000 - DNA, 1052 bp, Cannabis sativa
ctaatcaccataaatgatcaaaatgatgtaattctgaatatgaatatggtaattgtttttatttttaaatttattaattaaattatacttttattattaacatatttatttttttttgcaagagtcatatacagtaaatcttgaaaattaggacaacatataaaaagtttataattaatttaatgtatttttttatgagatttatttcatgtaatcatcatattacattattacttaagataatattagtgagatttcaaaaaatttggtaatttttttaatttttagcaaaattacatttttatttaataagaatttgatattatctttcttttttattaattttggcaaataaaataaaaatatatagaaaaaaaataatgcatgattaggttttttttttttttttttttttaaatggatttaggaaaaaaattgtaaaattaaaattcttaaaaaaaaaaggagtcgaatcaatctgatccatataaggtgggtcaaatctgatttgatccgatccgattaattagtttattacaatggagcggaacagatcattacatgattcggatcaggtcgaatcataactagttcaaatccgacatatatataggactccgactcacttaatagtactaaaaattcagtactactatgtgaacaaatctgtcccagtgaatcaaacaacatttcattatctaagtattgtttttattttggcaatgttggtaggtgtaaggtagattagtgcgtgtgtaatagggtaaaaataaatagagccattaagagtggccaaacgaaagtaaatgtattctcttttccatacaaatcctattttgcatcattcttcaaaatggtccctacttaattatccaacttgtcttaattcatttaataaaaacaaataaataattaaacaaaaggtaaatttgtcttagatttttttttgggctatcactagtgtgattattaaaaattaccaaagcgaatagtgtttgatttaaaaagataataaaaacaaaaagtaaaaagaaaaaagagagctttattaa

SEQ ID NO: 53001 - DNA, 1315 bp, Cannabis sativa
acagtataaaagaaaaaaaaagttccaaaacagtataaaagttatttttaccgtgtggcagtatttttgtaagaattgagtcaaaattcagtatttttgtaagtttccctaaaaaaattgaccattgctaagcccaataaacaattaaacaaaataatcaattaaaatcctcattcatttatttaagagtaaagcccaataatacattatttcacttgaatacaacagattccacttgaacacaacatggagccacccacatacgatcacaaaacctctcctttccagtttccactaattctttatatacttgaacctagaactagaacctgatgaacaatagctaaaatacttgatatacttcaaaaaataaatattcgtctcaaacttaaaaaattcggttaaaaaaagcatgtgtacatgtagtttaaatacataccttaccatgtaaatcaatgtataattgtatatagcatcctccagctgttttaacctaaacatttatttttccctcaaaacaaaattttgctccttgttatgatatgttgtgaaaaattgtatatgcaagtacatgtaattatcaacaagtaataaagtgataagttgaatatcgtttctacagagagattgaaaattagaaattaatttacaaaactaattacgcacaaattggtttcaaaaaaataaaataaagtgatgataatatgtaaaaattaataaacagaaactatgagaagaaaacgagctagaattattaaattgacctaaaaatgtaaaattgataaaatggtgcaaatgagtattattgtaaattgataatgtcaactaagaatttaaaatgtcataatcctttttccaaagtatttatggtatgattctctaattaattaacataatcatatgcccaattaattttacgaataccaatttaagcacaattatttgaagtcatacaaggcaaatcacacttttccaaagtaagtaattccactatccttattttttccaaaattaagattagcttgcaacttacgaatgatgatcaagcaaaaataaactattacacaataagaactcttgaatgaacaaaatcatttcactaaacatagcaacaaaatatcacaatctctagtcaacaaaataattctagcgaaaaaagaaattaactcataataaattgtgtaaaaattacaaagtttcaaataagagaaggatgaaaagaaaaatctatattgaagttgtcataatactccaaattttctttgccaaaattttcttcttcttccttttaatttttaccaatctcaaaattaaa

SEQ ID NO: 53002 - DNA, 1284 bp, Cannabis sativa
accagctgcccctgttgatcaagtgttaccaccaacacctgtgccagtggtgggtaaccaggggtatgtaatgtcgcactgagattttgtatttgaggggtttgtgaagctgcaacctccgacgtttctgggaggtactgatataataaaggctgagtagtggatgagtactattacccgtatcctggataatatgggggtgacaagaacagaaaaagtgaactgtgcagccttcctattgcaagaccatgcccgtgtctagtgggatattgtggcacagactcgggatgtcaatgtaatgacttaggaagaatttaaaaattattttgaagagaagttctacaacattgctgtgaggacttcacatatggaaaactttgtgaagcttactcaggggaaaatttcagtggtcgaatacactctagagtttgatctgctgtctaagtttgctggtgatatggtgcccacagatttcaccatgaaacagaaatatgtgagaggactgaatgccacaatcagtcgggacttgaagattaccgcttcacatgacactttgtacaagaaagtggtagagctatccttgattgctgaggaggttgagcagtatgtagctaaagagcatactgcaaaggataccatcacagaatcgaaccctcctactagtggtaatgttagtaaggggatcgacagtggtaaccctgatcacaaatggaaggttaaggctttcaaagcatcagggggttatagaaagttctggggaaatagaggtggctgtcaggggcgcgggtcctcatttcgatgttatcccgagtgtcctaaatccaagaaacaccatccgggtgagtgtcgggccaagacatgttttcagtgtggcatggtgggccactttatccgggattgtcctcaggctaagaaagaggaacccaagaagaatactactcagaacccggggtgactttttattatgactcaggctgacgctgatgctagtccgtcagtagtgacaggtcagttgtctattaatcgctattcttatactgtgctgtttgattcgggagctactcactcttatgtgtcgagtagagttatagaaagtttccataagctatgtgatatatatgcttcggggttcggtaccccgttaccctcaggagaccttatagtatccactaggtggattcgatctttgtctttcttgattgacggttgtgaattgaccgtcaatctaatagaattgcaactatctgattttgacataatcatgggaatggattttctgtctaa

SEQ ID NO: 53003 - DNA, 1835 bp, Cannabis sativa
tctagacatcaatacaacgaataatgaggaacctctcatatatatatacatacataatctcctgaatctagctaatgaccaaagaacactaaacaattcagaagataggtgtataccaaatctctctctaaagatcatatctttctatttttgttggggtatatacatatatacccattaaccaaaatctacagtaagcaagtatatatatatatatatctcaccaacctcctactataagcataaaagaaacagacattttacatatattcttacgaaaaatatagttaaacccttcactgtatgtataagggtttctctctattttatccaaacaaaatttatatccattgttcttataagaaccacactcaaattttttttgaagatgaagacatttaaaggtggaatctttcatacaaaattgaaataagaaagcaaaaaataattttctaaaattaaaatacacttgcatatatatatatatacacacacactcaaagaattctaagaaggaacacataccttttctcaaaaagttcttggagttctgctgaagaggagaaaaagccaatccctcatgtctcgtttaaacgtattgccttttatatgcatatataattgtattgttattattattatttcttgcaacagtacttaaaacacacaatttccaaaaaaaaaggtaaaaaaagacgcagtacactctaaagtggtcaaagatgtgaccaggggcggacgtatattatacaatataagggccatggcccccctaaaatatatatgtgcttagatatatatgtaaattgagtttttttgggtaattattgtgtaagattcttttgaaaaagttaaactaaaatttataaatattaacttctttttgtccatatatatttactttgtttactttatttatttattttatataaaatttttattttttctttctttttctttaaagcatttaattgttctttaataattaatttgcttagtaggatatactattttttatttctttctttttcaatgatatatattgatttgcttagcaaaatagcaggacatgtcattttttttttaagtaccactttaaattttttaattgtgtataaagtgataactcttataactacacttttataattaccacaaaataatttttttcaactataaatatagtaaaaattacatttcgtaataacacaaaaaataaatatttaagtagtttttcactagtattgtatattaaaaaagagaaattgttaaaaaaaattaatataaattcacttatcgataactttgatatgtaaatagtttggccccccttaactttacattctggcttcgcccctggatgtgaccttagcagactataatatatacgaattattactattattatatattattattgttattatttatacatcattactatatttatatgatattgaattggctcttggcccacgtaaaatttctttttgactcacaaaaatgtcaagaaatattacttttatattaattgaaataacttgacattgtccatatattgtgtgctacaattttggagcatggccattatccttaaagaaaattgactgctaccaccattactatgtttattgattattgaacactattttacaaatagattgctactcatttaacaatatttatattgagtgctcattgttcttcacaatcaatttagttaattcctacattgagtcataagttgactccacctatttatcaacctccttgagcgcaacatcaagagacaaataatgactcctatgagtcctacatattgactgtggcaattt

SEQ ID NO: 53004 - DNA, 2580 bp, Cannabis sativa
cccattcaaactattctttcacttctcttcaatatcttaaaatctctcaaagttttatacatcccacaacaattacttggttactaaattctacgattaacctagaatccataagattacgtgataataatcttagtggaacattattacatgatcttcttggaaatatatcaagttattccaccaggaattccttagagtctttggagttgagttctaaccaacttggtgggttaattcttgatgaccttgaaaacacctttccttctttgactgatctttatcttgacaataatcaattggaaggtcattttcctaaccgtttgaaaacatttcccaatcttaaaactctagatataagtcataacaaattcgtaggattattgcctgacctttcatcaatgccaaatctaattagtttcaaagcatccaacaataagtttagtggtacttcaagtgagagtattggcaagcttgacaatttaaagagcctagatgtctcctccaattgtctttctgggtatgtctctcatgtactaaatttacaatgtccgagcttaaagaatctagatatttcttataacttagacatgtcattgacattcaactccaaatatcctatcatccccccatttcaattggaaaccataagtttggcttcttgcaagttaggtcctaaatttcctaattggctccaaacccaaacaaatctcagacatctagacatttctaattcaagtatttctggtcctgttcctaattggttctcaaatataacttccaacttgaattatttaaatatgtctcacaaccttcttaacaacaacttgaccaattttccactttcacaagaagtttatcctgtaatagttgacttaagttccaaccaattccaaggttctatcccaccttctcttctcgttaatgcaacccgcttgtatctctccaataacaaattcaccgatttcagttcttccctatgtggagcaaatgagtgggacaagtcaacagcagtaattgatatttctaataacaatttatttggaaacattcctgattgttgggaaaatttcaaacaattgggtgtacttaatttaggatacaataagttgtctggaaagattcctagctttatcaatacgacaagtattagaactttacaattgaggcacaataatttctcaggaaattttccttcctcattgaaatattgcacttcacttgaagttctagatttggggagaaacactttgaaaggtccaataccctcatggattggggaaaaactaaacaacttagtttttctcagtttgaagtcaaataagttttatggaagtatcccattcaatctttgtcaacttactcaaatacaaatattagatttctcttctaataatttatcaggatccataccttcttgtattaagaatttcactgcaatggctcaaataaattcttcagagacgaccatctcttcaatcatggaaatggatcattatcataatttttgtcctatatacagtcctcgttgttttgatttcatttggtatgacaataatgcttcaatcacatggaaaggggcacaacacgagtatgtgaggattttaggattactaagagttattgacctatcaagtaacagattgactggggagattcctatagaagtgactcatctctctcagttggttgcactaaatttatcaaggaataatttgtttggaaaaattcctaaaaagattgggaaactgaccaatcttgaagtgcttgatttgtctcacaataaaataagtggtgaaattcccataggccttgccgaggtatcatatttgaattacttagatctatcaaataatcaattgtcaggaagaatccctactggtactcaattacaaggcttcaatgctgctacatatgccatgaatcttggtctttgtggaactcctctaccaagttcatgccctggagatgatgatgatgagtcttcgcatgttcccgcttacaattcagctcatgatgatgacaatgataaaaatggtggagaatggcttgacttgtcatggttttacaagggaatcggaggtggattcattattggattttgtggtgtgtgtggaaacttattaatcaataattcttggagagcttcctattttcgattgatgcaaaatattggagactggatttatgtgatgatcatcattaaatggaatttcttgaggagaaaacttattgagcactaactagtaagtattaatttctttagtaactcttttaatttataagaatatatagttttaaagatgatcaaagttctaaatataactaaatatagaatttttttttattgtattctttgcagatagattctattgtgaagataagaattaagaaggtaaatatttaacattaattattctactttgtagctaaagcactcaaatcatcaatttatctaatcttttaataatatacatgtacataaaaatttaacccttttttttttttttattttacatcaaatttatatattaaactatgcatcgaatttttttatttttgttctttatactactttaa

SEQ ID NO: 53005 - DNA, 1595 bp, Cannabis sativa
  modified_base (388)..(393): a, c, t, g, unknown or other
agtaagtggcaactacttcacaatatctcatgtagtcacttgggagacctaatgagaaaatcacattagttgtactcgcatcttgagaactaatttgataattaagattcactaattaagttatttaatataggatagtacataaactttagtaaaccgcctaatttaaataatccgctcaaaccaaagcgagataacacaatgaaaaatacaaaccgtaaaacctgaaaaaaaaaaaaatataacccgctcaatctttatattgaacaagttgaaaaataatacaagtccgctcaatcaactcgaattaactcgatcaacctgattaagatgattttatacatatatgtgtatatatttttaaatatatatttatatatcatataannnnnntgactatttaaaaaatataaagttcaaagtaatatgtattttcttatggtggttgatttaaactttgaattcaatctatatatagtttgtctcatttcactaaaatataacaaatgagtgtaaaaattaaaaaaaaaaaaaatatatatattagtggtcaatatagatgggttaagccaaccaaactgacaaatttcattaattaggcgggtactattttctttttccttaatcagaagggttccgcttaaatttttgtaacttgatttttacattgagttaaataaaatgtagcataaattgaccgaatcgatcaacatacacccctaatttaatatggtatttgaaatattttagttgtcattgtcattgacattattaacactcccttataatccttcaattcacttaaaaaccctaccaatgaagaaataaaataatttgttctcgcaatttgaaatctccaaactatacctttaatattaatcttattttagtaaacatctactaattaagggtattttttgaaagaaaaaaatagttttgaattttttaaccacgaaaataagaatacgtttccttttatttttaaaatataaacataaaaactgatgagtatcttttgtttttaattttaaaaacaaaaaaccagcatatgtttgtttttttttttttttgaattgtaagaaaatgagagtgagagagaagaagaaagatgaaaaagataggctcacaaaatatgtgagctcagccactatatattgaatccaataaacatagtttgttacagatgagagaagagttagttacaacactataacagaaaacaaattctttaactaactaactaactaactttatcctaatattccccctcaagttacacttgggcacctaagtgttaacttgtcccttaagtagttgaattgagtgatggacaaaggtttagtgagtatgtcagcaatttgatagtgtctatccacatatcaaacatcaagctggtttgctaacagtaacaccttgtcacaagcgaaatggagatcgttttctatatactttgtgcgagcatgataaactgggttcgatgcaagtgaccctgctcctagatagtcacgccaaagtatagggctttgagggagattgattgttatctctgtttttaaagactagatccatgttaattcagcagtggcaagagctaa

SEQ ID NO: 53006 - DNA, 1150 bp, Cannabis sativa
atttaggataagtcgtaatgatataactactgctatggttatatttgtaggtattacgtacaattgggaccacctaaaaatgagttgttgattaaggtacaattcaagcaattttgatttatctctattatattttcacatttgaaaaagacattgggtaagtaagtataactaaacttataaacatatctcatagcttactggcaaaacagcatacctgagatgggccagaaattaaaaaggtccaatataaatgggtcaatgatttatagctaatccatttctcttctaccatagcttagggccggtaatgaggttgtggaccatagtacatggatgagtctgatcagataatattccaaaaaaaaaaaagaataagaaaattatgtgaaagtaatagaaaatcaagagctttaatctggagactagcaatgaaattttatattattaaccaaattaatttgtacactggaagtgactttttagtggcaattttttacttgtgacttaaatgtcatgtttacaagttgttactatagtttcagacacaactcatacatatgtatagtttcagactcttcttcatgggttgtaattttttttttgtttctatactatataattttgtaatctataatgttgttaaacggttgaaatatctaccggcagacattatttataatgactgggaagcctaaattttcttatttattgatgccacttttctaaaaaaaaggatgaaactaaataagttgtgatttttgttacaatacttttaactacagaattttttaaaaataacataaatatgatgatacttttttagtcacaaattttatttttttacaaatttataaagtaaaaatatgtttggaattgtttgaagataggatataaactaaaacaatacatataaactatatttattgtttacattagttaagtatttatacataatttaatattgagtattttaatttgacttaaaatatgtacaaaaacccatatgtattaaattacaagacttattgcattaattagattaagtagtgttggtgacattatttggtgccgcgtacaaaaattatcaaaaagaaaaggcgatacatttttaaatttcataattttttttaaatagaaaaagctatac

SEQ ID NO: 53007 - DNA, 1303 bp, Cannabis sativa
  modified_base (130)..(146): a, c, t, g, unknown or other
aatcatgaacaaatatatatgttttggagttaatagaatttatacattaaatataatcatgaaagaaattatctgaaccatgcaacataaaactatttatgttctttcttaattagtaaatctgattatnnnnnnnnnnnnnnnnnttagggcacaaaacccaacgaatttgtctaccaccataaagattgaatccgaacaaaaaatccatttaaatatcaacccatggtgaactaggaataggtaggggtgtgtgaagatcatttggctgaacccccgatttagcttgtctacaagtgacacatctaccacaaatttgctccacatctcttttcatgtggggccaaatgaagggttcttgtaatacaactaaagtcttaacaattcgaaaacgtcccatcaaccctcctctgcgggattcccgaactaacaaatctcgtaaagaacaattaggcacacacaatctgtgctctctaaacaagaaaccctcattcctataaaacttaccctcactagatttttcacaagcaccatagatccccctaaagtcatggtcaacaggataaagttccttaatgtgttcaaaaccaagtaacttagcataaagagtagagattaaggcatacctacgagaaagggcatcagcaaccacattctacttactttgtttataccaaatgacatatggaaatgtctcaatgtactcaactcatcctgcatgtctcctgttgagcttgtgttgccccttcaaatagttaagggattcgtgatctttatgaatcaaaaaatctttgggccacaaatagtgttgccatgtttctaaagctcgcaccaatgcatacaactctttatcataggtgggctaattaagcgcagccccacctagctttccgctaaagtatgtaaggggtctccctccatgcataagaacaacaccaataacgataccagaagcatcacattcaatttcaaacatgttagaaaaattaggcaaagcaagaaccacagcgcgagtaagcttgtgtttaagcagttgaaatgcctcctcttgtgcttcaccccatttaaatgcaacattctttttgataacttttgtaagcggtgctgcgatggtgctaaaatccttcacaaacctcttgtataaactagcaatgccatgaaaacttcgaacatgagctatagttgaaagggttggccactcttgaatggctttgatcttctcttcatcaacctcaatacttgtagcactcacaagaaatcctaggaaaacaagcttatcagtgcagaaagtgcacttactaag

SEQ ID NO: 53008 - DNA, 1379 bp, Cannabis sativa
  modified_base (30)..(41): a, c, t, g, unknown or other
tttattgaaatattatttataggtagctannnnnnnnnnnnataaaatacattaaaaggtagaacggtaaatttgttcctattcgatgtagatcatcttaggggtgttcatacaaatcgataaaccgaaaccgaccagaccgtaaccgaattttcggttccacgtcatcaccgaatttggcggtcggtttcgttttcgattttttttgagatggcggtggcggtcggtttcggtttttgaaaaaaaaaatggttaaaccaaaaaattgtaaaaaccgtcaaaaaccgcaataaactgtccaaaactgccaaaaatcgtacggtcagttttatactgttataattttttaaaggtcggttacgattttcataaaataaaaaactgtaatcgaccggtcggttataaacttgtaaaaatcgaccataacagactgattttcacccctagatcatctatagaggatctttgactatttggattgtagcaatggataatttgataacgtatgtatatcttggtacatatagagcgttctatataattaagagtgcgatttcgaatctatagtggcgcaaaacacacagtccaaaataatatttatccataattatatattagcgggtaaatactattttagactctatgttttgtaaaagttactaattggactttcagttttgttaaatgacaaaatagaccctatattttccaaaatgataaaataagacctttaattcaatttttaacaaatttattttttaatataaccaactttaagataatttctaacttgaatagatacataaaatgtaactagatttgtcataacatctctagattggattattactaagttttatttcgacaaaatatcaatttagggtcttatttatacaattttagaaaataaaaggtccaatttattatttaataaaacatagaatccaattaataaattttgtaaaagataagatctgaaatagacggctttaatttaatgaattatgaaccagaatacagttaaatttagagaggagaagagaatgagaaagaattaggacggaggttattatgcttataagtgataatcacaataatcctaataccactacaatgtcacaattaattcataaaaaaaaaatatcacaattaataaattaatttcttttgcgataaaaacaaaaataaaaaatgatttcttgtaataaaaatattaattagctttggttttttagccaaaaaaatcgctatattattgtttatcggacaacgtgctcctaaaaatcaactccaatgtacgatggaatactggccaatgtcggccatcactaccaataaatatataaatctacacactcaaccttgtctgtttgatctcc

SEQ ID NO: 53009 - DNA, 1167 bp, Cannabis sativa
gctatgaataagcatcaatatacagatatttggtaatacaaaaccattgtaccaataatacaaatcatattcatttaatattataaattatatatatatatgttacctcataaagtaaccatcttcattacatcacattgcctaatcaagcaagtcgatactttagtataataatcctctattgcattacctaatcagtcaagcccgtgccatagcctgacactcatatgtcgcataactgcatcacctaataaggtgagcccgtgccaaagacttgcacccatatatcatataattgcatcacctaatcaaatgagcccgtgccacaacttggcactaatatattgcatcgtctaattagacgagcctgtacctaagccgggtacttatcatatgtcattgactcccgtacctacacctgatacgtttctaggaagaaacccaataatggtttcgatctgtgccataaccagacattttcatatcactgacccctgtatctacacgtcgtcaggacgaaaccctaaaacgattttattctatgccataacctggcaattttcatatcactgacgcccctatctacacatccccaggaggaaaccctttaacggtttcattctatgccataacctggcaattttcatatcactgacacccctatctacacgttcccaggaggaaaccctacaactgttttattctatgacataacctggcaattttcatattactgacgcctgtatctacatgtcggcaggcggaaaccatacaactatttcattctatgccataacctagcaatttttatatcactgacgcacatatctacacgtcaccaagaggatgacatcacctaatcaggtgaacccatacctatgctcggtactcatatgtcactgacgcccgtctctacctgtcgtcaagagtatcgcatcacctcatcaggtgagtccgtatatcacattcataatatcatcacattattattgcttaaccaatcaatattttcattatataacaataataaccatatcttaatctcaatttcaatcaattagcaacaatactaattgtattatgatataacatgttatgcagtacaatgtactttttgttgggttttatgccctatataaaactctgtttcaatgtaatccagattat

SEQ ID NO: 53010 - DNA, 571 bp, Cannabis sativa
cgttgattagcaacgagttgcacactatgtttaaaaatcacgtaatacgcctatgtagttagggtgttacaaacatggtagggattgaacctaaagtaatcttcaatcacttcaattttgacaccaattagatttctaaatatgatttatgcatttagagagatttatttgaattctaggtgtgttatttatgctatatatgaaattctatattttttatgttttatgtccagcaaaattaaaacgcggcatttggccaattgaatcacattttaatattttagtaatagcaggggtgacttagttagacattgggaatgccggaactatttgttgtttttgaaacaaccaaattacccctaggtgacaagtatgctttttggtgtgtgcttgggcaaaatggtcattttgccatttgactttctttgccttttagtaagactaaattaagtagtgtatgttgattattccattatcttagttagataaacaccaattaatcaataattcattttattcaaattagaaaatcaaaaaaaccattttttcttcaagctctctctctctctct

SEQ ID NO: 53011 - DNA, 628 bp, Cannabis sativa
tcctctgcatccatattccacgtgattttatctttttctgggtttgaatttgatatttttccaccgggatatcttttatgcgatattctatctttttatattgatattttccaacttttcatctattttaaatctgtaaattaaaagataaaaagcgtgaaaatactccaaacatgatttaaactaaataaaaaaatataataaaattaacctaaatttaatactaaaaataacctaacattttgtaaaaaaaattgagttattaagctcagtcgttgcggccaagcttatggtcgtcagtgattgttttagagggaattttcctgcttattcaaacaactatttttcattaaaaaaaatcgttgacgactttttcgtcattaatatatattaatgacgactttgctgtccattgatattgtatgtcgccattgattctttattttgcaaaaaaaaaaaaactatatttttatcactgagaatacttaaatgttagtgatactcttacttttagtgaggacacaaaatttgtatacaataaagaacactataataatatataataattatgtatgcgtatacctgattgatccatagtaattaccgcaatttgatagtgcaatactat

SEQ ID NO: 53012 - DNA, 1198 bp, Cannabis sativa
accagagtataatgggacaggagacccctcggaatacgtatgtcagtttgagcaaaaaatgttaactgtctccgtcccactagaggacttggaggtgatcaagtgcaagactttttcacgcaaggattgagaggacccgctctgcgttggttccacaacctaccatccggcacagtaaattcttaccaggatctcatcctaagattccaggccaattttgcgataagtgtgcgaaccgccaaggtggatacgaacttaatgttaatacattagggcctcgacgaacctctggaacattttatcaacaggtttagcgaagaatacgtcagtatcccgaaatgcaccgattcagtggcgacaaaagcactaatgcaaggattgatacacggttcagaattaaagaaggagatcatagtggaacctgacctgtccctcacaagggccctgaccatggcaaggggatatgtggccttggaagtagaagagaagcgacacaatgaggatgcgtcgcgcgaaactttgacatcaggagatactttcctcttcgaatctaagaaccggacaccagctgtacgacctcataatagaactgacaaccgctcggccaacgaaaggaacacccaagggacaataatggtgagtatgggtgaggcggggcagccgcacgcccagcggggagaaaaggagctaccacggatgaccatttccctaactgagttgataagacgactgcggggattgaaggaaaccaagtggcccccaagaatgaccacgaaccccgtcaagagagataaggggcgatattgtgcttttcacggagagcacggtcacgcaacctacgagtgcaggcagttgaagatagaggttaaccgtgtggtgaaagaaggattcttccgggacttcctcatttcggacgtcgcactccacatccaacgggggagtaacgaaagccaggatcaatccctttagcgtacattaagaaaaccgtaaatgtcatctcgggagggtcagacctgagcgggaattcagtacgagcttcgatggcccatgcccgacgggtccaatcagtaagggctatgacgttaatcgacagtgatggccctgacgtgctcttatcatttaaccgaggggaagcctctgaattagaacacccccacgatgacgctcttgtcatcaccctggacgttgctcatgttcg

SEQ ID NO: 53013 - DNA, 969 bp, Cannabis sativa
  modified_base (139)..(139): a, c, t, g, unknown or other
  modified_base (268)..(276): a, c, t, g, unknown or other
  modified_base (543)..(547): a, c, t, g, unknown or other
aatcgtaaatattatttaattttttgagtttattttttgaaatttgaatgaagcgtttaaaaaaatttcaaaaattgtaggatttgttagagagattagtggataagatatttgttttaatttaaaaaaagattgtttnattttttgggtttaattattggctttatttatttgttaacgtttaacgttaacagtctgttaagttaatcgtgtaaggctaaatgaaaaaaaagaatcgttaaaccaagaattgccgttagatagacannnnnnnnntataaagatatatatatttttttgcattaatttagttttcttctcaaatatttttagtaaatttagtgacttttaattaattttattttgtttttaataacgattaattttgaaattatttagtttcctatctataattattaatctcaattttgtatatttttaggagcttaaatgcaaatattaaaattaaaggagatttaagaacaattgaagcatcattcaaagactatgtattcaccaaaagtccaaattgattagtggttnnnnnttttttttttttttgaagaaaattgattagtggttattttaaggaaaacttacaaaaaatactgatttttggctcaatctttacaaaaatactaccacacgcagaaattacttttatactatcttggccaatttatttttttttttttatactgtaaacaccaaaaaaaatgaggcatccattttccacaccaacgaacagaaccaccaaaggaacacctttacaatcgaaaaataaccattaattctagtgagattgagaaaaaaaaaagtgaaatcgacgtcaaataaataatcatgacaaaataactgtaaaacaacattaaaacaaatcaaacaaaagaaaggaaaacatgattgaaaaaaacaaaaaatattatgcacagcttcaatacccaatgcaataacagttatatttgcaag

SEQ ID NO: 53014 - DNA, 930 bp, Cannabis sativa
tatggatcaatcaggtacacatacataattattatatcttattattgtgttctatgttatatacaaatagatcttgggttaattgttagtttatataacatatgtaacactagaaaaaagttctagaattattaatgcatcgaaatttattaaaacaaattaatttggggccatgcatgctcaccttatatttattagtatttggtattgactacgtaatacttaacttagagaaaactcaagacattatataaaaaagagtatacattatattatatatatttatatataatataacgttaacgtatttatatgcatggcgaagacatgaatattggcttcgtggctcctacgtacgtaccatattttcttttattcacatctatttattttggtattattaattataatacacctaccatactatataattagttatgttctcttaataactgaataataaaaatatatagtatatatattatgctgtcagataatttaaactggtcgttggaattaattgctatatatataaagtaaataactgcaaaatctaaattatacataatatattattatattttattcttgctttattatgaatcaggaaaattattattcaactatttttggctgccttgattgtaacttttgtgttttttttttttaaaaacgattttatatataattgacttaatcaaattaaatatagatacctatatttttctcaaaatgcaaactgtaaagttattgactcccactcgtttgtgacagataaatgctacttataattatatacatgtacaagcattattaatctctcgattattacttttgctgcttttttaaaaatgtcacttttcatcatttgactttttctataagaggttacacttttcatttgacattatttatatagttaaatattat

SEQ ID NO: 53015 - DNA, 2419 bp, Cannabis sativa
taaagttttcctattctgattaatagtaactatcccaactcatgtgcagttctatataaatatattatattcatataaatacaagtcccatgctgtccaaatagttaagattgagataagtcaaaatattcttgttatatatatatttatatatatcttgcaaataatagtgccaatatgtaatcatgcaatttatacacatatatatatatatataattgaatatgtaatatagccggggaccatatatatataggactatagatattgcattaaagagctccatgcatggcaagtttggacaaggtgatcctataacttttttgtcaacctctctagaaagacctgatgaataatcaagaagagaggaccactgtcatcatttatatatcactcactatataataaatatatatatatatataaattctccttttcactgtgtagtagtgtactcactactactgtcccattatgtattattatttctaataattaatattatcatataaaaagaggtgagtcgttttcacgtttactcttataccttaaaaaaaatatgtatctataattcaaaagtaattgcaaaaagcaagaaaatgttagatatgcatataaactatacatgaacagataaccaatatatattgagatcatatattcattcatagccaacaaaaaattgcacaaacttctagctatagctacggacactactttttttatttaaggtagaccttaggtaattaatgctacaaattaatacatataaagtaaaagaaacacacaattgattaactaaataaaaggagagatataagtataaaattatttgagaaatgctaaaaaatactaatgagtaattatatattgatgtaattaatatatattttaatttaataattattaaagaaacaagacactacttctgttagtttgtgatctagttactaagtcttatacacataacacaacttcatttgttccaacaattagttagttaggtggttagttctatataaaactaaccgaaactaactgtaataactaaccctagctaaaatctttcaattttatttttttagtttagagttttgggtacgtagctagagaatcccttataaggagttgctctctattgctgtgttgctaccattgttatgtaacctatctctcaagctaattgaataaaagaagtgccaagaagggttgaaccatttttctctgcaacttgttcttattcttctttatttttctttgttgaattctcagtttattttttattatgtttttatttcttttagttgacaatccatgattgatgcatgctctatgtttttgatctttcattgtgtgattgcgtaatcacaacaaattgtatcagagcaaagtttaaattggagtgatcaagaactgttcgattgaagatcgaaacatcaagaactcaatcaagaaatggcattagcaaagtatgaagttgacaagttcacatgtgccaatgctttcaatctttggagaatcaagatgagagctttgttagtacatcaaagaataacaggggctattaatgctgaggcactccaagttgttgaagatgagaagaagaaaatggagattgaagctaaggcacactctgtaattctcctctgtcttggagataaagttctcaaagaagttgcagatgaaaaaaaaaagctcttggtctatggaataaacttgccacaatctacttgaagaagtctcttgctaataaattgtatcttgaaaaaagaagctaacactttgagaatggaaaacaacaaagaactcaaaagacacctagatgatttcaataaaattgttcttgacctgaacaacattggtgttaaaagtagatgaggaagaccaagctatcattctattaagtaatttgcctaaattgtatgaacactttgttgatacaactctttatggaaaagacactcttacaatgtctgaagtaaaggtagcattgaattcaaaggagatgcagaagaaatcagatgagacaacagaaattggtggtgagcggttgttcgtaaaagacaggcatgacaagaaggggtacaatagatccaaacatagcaatgacaaagggaaccagaagtcaaaatctaatcctagaaacaccactgacaagaagtgctattattgtgaagaacaagctgaaaaggaaaaaagagaaagaaagaggacaagttgatgtggctgcagatggttatgaatctgctgatgtcttggttatgtctaatgcagattctggacaagaatggatccttgactatggatttgttcgttgggtagctagagaatcccttgtaaggaccttcgctccattgttgtgttgctaccattattatgtaacctaattctctaattaattgaataaaagaagtgccaa

SEQ ID NO: 53016 - DNA, 1308 bp, Cannabis sativa
ttgtttaattaagattaaattcctctcctttgagccttgtgtgagagttaggaggccattagtagtgggtacgacatactgaaccccgccctcccttacatgaataacctcaattgttaaggtccatttgccttatttgaataactgtagtaggttgattacactagtataacctaataaaattaattagcaacataattaattttgaaatacatgaaattaatttttcatcaaattattttgaaattaatttgagaaatacacacttagtttaatgaaatatatcttataaactatatgtatttttctgtatttaattaaattaagaagttataactaattagatttttctagatacttgattatttgaattttcatagaaaatatatttaagttgaaaatcagttattcaactcctggcgaattgattcttgttcgccttcaaaaaacttattagctgctatttgagcttcttgtccaggttcttcccgatgtacacacaccttgtgggatttcctgggtcgagaataacctcttctaattcctcaattggtttcaataggtttctctcatcttgaactcgagggtcaagatcttcgtctttcttctcgttctcttctaccaatatcgccatcaactgatgtccagctttcctatgctgtagctcagtgcgatagcaatcgtgagtcagcatctggtcgccacgcaccactcccatgccttcctgtgtttggaatttcaaggataggtgcttgatcgaactgactgcccctagtccgatcagtgctggacgacccaacaatatgttataagccgatggcaggtcgacaactaagaagtattgcataaccgtggcagataggggtgcctcgcctaaggttaatgcaagctcaattatgccaagactggcaatgctgtcaccggtgaacctgcaaatattcaccatacaaggccttaatttggcctttttgagccccattttccgtagagtttctttataaaggatatttaccgagctctcattgtctattaacaccctcttgatccttttcttggcaagttgaatggtaatcaccaatgaatcgacgtgaggatacctcacgttttctcgtcttcctctgtgaatacaatgggaggttcctcgattttcaccttcttggaaggttctggggcaaatgccgactgctcgttctttatctctttcacatatcttttgtaggcgttattgctttcccctacgatatatggccttcccgaaataaccaggatgtcctctccttcaacgggaagaggttgtaatccctggtt

SEQ ID NO: 53017 - DNA, 1071 bp, Cannabis sativa
actttaagtcctatttgatccataggattattagtgattaatacacgttgtgccataaatatgggttatgtgtgttgttctgtaagaaaatacgggttgtgtcgtgtggtgtgccataaaaaaatacgagctgtgtcgtggcatgtcataaaaaaatatagatcgtattgtgttgtgctcatattattcgagcttgaattcgtgtcatgctttactcgagccgtcctatttttttatacaagctcaaattcgtactctacttttccacattttatatttacaattaatgaaatagttacagggtcggtgctgaacttcagtgggcctaagaaaaaataaaaataatttttttggacactctttttttaaaaaaaaaaaagaaaatatatagtaatttttaaaatcaataaaaaaaattaagtgtatttaaaaataataataataataataagacccttaaactaggtgggccctacggaataattactaaagttatatattttttatagcttcgataatttttatataatttttcatcaaatttttacataaaaattatataaaaaattcattagaactattaaattttaaatatttactaattagtattcatattattattactactattaaatatgaggtttttcacatgtcacgctttcataatatatagattatttatgcttacgtgtcatactttctaggtttgtcatgtcttgttgtgcttaagttttatatttttcgtgtcttaccgtgcttaagcctataattttcgtgctatgttgtgtcaattcgtaatatcgtgatgtgtcgtgtttaagttcatatttttttcatatttagtcgtacttgtacctttttggctcatatcgatttcgtaccgtatcaaaaagtatgatccgtatttatagcactacataagataaagaatgggattggatagtacagattgtataggatatagccatgtttagaattatttttatgaggagaggtgtcccacttagaaaaaattgttagagattttataacaatggaagaaaatcaaaatattacaactctattgtaata

SEQ ID NO: 53018 - DNA, 1475 bp, Cannabis sativa
  modified_base (562)..(567): a, c, t, g, unknown or other
  modified_base (1124)..(1133): a, c, t, g, unknown or other
aaacttaggctaaaaatagtctaacacacccgtgcggcaccttgacttctctaagccaaggttagcctaccaaccatccgagtaacaatgcgctcatttttcgcgcgaatgtgtgcctcgtgcacacttccgtctctcgaacaactcccgccgagtcatgctcgcaagcatccatgagtgcatccatgcatcgaggttctctagccaagatactcgcattgtccataggttcccactatgataaggcaaatcccaacaccgacgctcaccttgtcacacatgactaaggtagcatgtgtggcaatatgccaacaccaagtcaacgtggcaacgcttctatcatgccccactcgatactgtccgaacagtctccctcatcgcccaaggactcccgtacgtccatggaccaatcctcaaggtgccatgcctccacgcatgttggcaagccctcgagacaagccgccaaactagttgcatacattagaactctgtccctttccaacatggtgcatccgtcccatgcgcgtatgccaactggcccacgaatgactacccgtgtcannnnnngttgagactcgtggccaaggcacaacacaacctcttttggaggatctaggccacgtcccgtgcgagcggcataccagcaagccaagggaaacgtactagtgaacctctagcggcattctttgacgcactactgggtcggcccgataatgtccataagtactccaactcatggagacatatgagtcccctcgtggtcctcatatgcccgacccactagccccactgactagtattagctcacttagcaccaaggtgcaaggggtggtggaaagctgacaccagggtactcccttaaagagcattctaagcttttaaccttataccaggaacatacatgattttggctctatagacatacgaccaaaccgcatagcaaatcacatagttttgccaaactgattgcaccattctatttgtagacccaaataaatggcgaataccaagtctcgtcccgttctggacaatattcaagatatttacgaaaataccactgcattcaaactaagcatcaacatgccaccgacgtgcaccgcaacatgcgccaccacttggccaannnnnnnnnntcacttagcttgtaacgtgccatcttagcacgaacgttacactctcccccacttcaacatctcgatgccctcatcgatggactgcaggcaaatattcctgatctcgactcctaagcttactccaagcttctcccggatcctaagtctgcacttgtccctctacctctgtagaactaccctcttggtgacgatctccctcgcccactcttggacttgatcaaagaacccgtgccagtgttgctattcagaaccacccatggagtagtgcctccgcactagaatacttctcccaacatgaactcctatgagtccatcacaacgtccttccagtcaaccaagtag

SEQ ID NO: 53019 - DNA, 6397 bp, Cannabis sativa
  modified_base (494)..(496): a, c, t, g, unknown or other
acattgaattaatggtacataataaatcaagagataattagaatggcaaaacggtaattttgagtaactctaattatgaactaatatttggagggtgaactacttatcttgattatattaatggactacaagtaagaattctgtaaatataattctatattgtcaaagagtgtaatttcatatttataatagagtaatagtggattaataaatcaaattattctattgatgagttcaataataatcaagtgtttattgaagcttcgaaatataagtccatagtcctagatcacttctatacaatactgtacaggggaaggtttaatttgataaataaatttgagaaaaaattaatttctatgagaaataattcttaagggcaaaatagtacttttgtggaaattactaatttgaataattatatcaattttgaattgtataattaaagtagcatttaactatttagttttatttgataaaactatattaattannnaaatataatattattcttaaataatattaaagagaaaaatatattattttagtgaaaataaaatatttattttaatcgtagtgaagtaaaagattaatgagaattaatcaattataatttattggaaaaataataatacgtcttatttgtgacaaaattgataaattaattttgggcttttaaatatggcccacatgtgtagggcttgacccaaacttgtaggacgaataagttaaatacttttgttttgtatacattaatcaaaaatactctcatattatattttattaaaatatactcattttttcccttttcatcaaatatatatatatactcatttttttgagtgagttgcccaatatatcgccactctctagttaaatctagcatataatttacattaacctaaaggtctaatggggacatcatctataaaagtatgtatatcttaaaaaaatataaaaatagaggtaaaaagtaaaacaagtaaagtaaaatggatatacaatgtaatttccttcttgtagaacatgtaaaagcccatatgaattttgtttgattatttataaaataaatcaaattaaatggataattatcttttaattattatattaaatatattattagacaatttatttaaaattaaaaagataatatagaataaaaaaaatataacttatttctgttattcatttaattttaaatttgaattaaataaagagtttatttataacattatgtatatactatgcataacaggagataaaacatatgagcaaaatagaaagagaacagaaaattgaaaacaacctttcaaactctctctccctttctctctacatgacacacagatacatatactagtgtgttatgtgtttttccaatctcaatcacagtgtctcatgagttgtctaatacattgtgatcagaaaattattttcatctcattgaatctaaaagcccacttttttcctcgtaagtgttgaggctgatctggaagacactggtgtgaagtcttcaacaagttctattactggattggatgttcattttgtatatacgaaaagtagcgagaaaaccctaataggcaacaagaggtaaatctttattctaataagttggatttgtattatgtattattgtgttgagatttggaatttaaggttcatattaattcaacaaattcttttaattaaatccatttttattctcttctactgcgactctaatatgaaccctagaaaccaacaatctctaccatagattaagaggttcatgttcttgtcaagatgctaagccatgcacataatttcttcaaaagggaaggttaccccccattttctcctgctttttgcccatataggccaagtcccgatcatcaaatgtattgttccaagtagtgatagcttcatttctcttattgatgtccattctcttctctgcgtcagccttgtctcgctcgttgagaggcacttggacgttatcatccttagatttagtattagaaaaaatccgcatgtgcaaacttcagagtgctttggctttctcaaatttgactttgtaagccaccatttggttgtgggccttcacatgcttgattaagttcactgatcttccccgagaacttattagctttctccctatgtgtttccctcatttcttcattgcgggaagttacagatttctccaaatccactctatactcagccttcaatttgcccaggcttcctgagcagcattcttctcctctgtggatttgtctagggtactttttggggcatacctctcctcaagagtgacttccctctatcgaacagccacatcacatttaatcatggtagtctcaagccacaacacaattacaactacaacatccacaatgcgatgggctaagagaacattctggccaaataaaaatagttaaataaaaaagggatatcaacaattaatttaggaaaatatttaaataatggaaacaaaattttaaaacttacccatataatttgatgacgaagggattaggtcaggaaaactagatccccgctcgaaggagttgcatacctctttagacgaagctgggtcattaaggtcccaatttgataaagaagatctgcagtaaaagaacctatatcactccccaaatatgcaataaatctggtagttgtagtagaaatatccaccacctactttggtaactctgtcgccggatcatgagcaataatttttgcattttgccttggcacgagttggcaagacaataagtcccgagtgtcgtgatcctcattccagacctcgaagatgagttggtttttctcatcagctacagtggcttcattgtctttcaaaatcctagattggatagggaggcttggtgccattaggacccccatagttacctccttgaaatcacctagaggagtactcccaggtgaatcttcgtgagctgtttctttcctcctcttggtagctaaagcttcaagttttatcttcttattggcttggtcatccgctttccttttttggattaaaacctcctccagagtctcctttatgtccagatcgatcactagactagctttacttacctctttagatgtttgaggcttcgcataagagggaacttcctgaagagggatggtcacgatgaaggcgtccagattcaataaagcatcaaccaagttgagggatggaacctttggagttctggccttcttaggcttgggttgtgacctggaagccttcgcccttaggacctaggcaggcacgccagctacttctctcttagcttggctctttttggcgatgctcttgcagaactgcttcaggctacttaagctttcgtttctgtaaaattcaagcacagttaaaaggcagataaaaagaaaaacaattaatgaaaatcatatttagacaaaaaaaaaacaagcaacaaggtcaagtatacgagatcggcactcaaagttggagccaatgccttcaaaattctccatggaaaaattaatgacatcctcacaccctaaaaaactatcatattcaaagaactcgggcttacgcataagggtgaacaagtctactctaactaactgcgaaggtggaataatggttcaggctatccactttttcatctgctcagatcaagtaacggctaatagggtactggaacggacttagataaggaaataagggtcgaattcatcttgcttgatatagtcaaaatctttcacttggggagcatgaaccaagtagaatgatgtattatcttgtctggaggtactagcccctcatttgtccatctctaactgggtccttcgaagcttgaccaactgaactttatcttgctccatggcttattttacttcctctgccactatatccattatgccttcccaaatctcttcgctcaaataaaaaaccaatccacaaaagcttggagcatcgattgattgatgactagctattagaccaaccttccaaagttcggtcatggtcactagtccactgatgtccaattattcattggtgcatgtcttgtacgccagccggtgcgcctcaatccacaaagtcttttgggttcgcaaataaggaactatagtcgaaaaaaaccagaataagatgtggttttgagaatggaacaatgagttaatgaagcaaggaaaaatgaaaggtatgcagagagattaggacttaccaactctttaaaaaaataatagcaaatatggatgcatgcgtaaagggaaaccggaagtgacaaaaccattattcctgcatatctgggggattcttccaagtgctggaaggacatgtacacttctttcacttctacattatggaacctgagaatgagaagaccaagaagttagtatgctgaccaaacaaaaatagtaaaggtacgaggaaagtctccttgaccactgcttggagaagttctctccggacccatatccaggaacgtcaagcccccaggtaaacaaatgaggaacttaaaaagaaatagaaacaaaatcctaaattaagccctaagtccgtgaaccataagggttccagatattagatcataatttcggcaagacctccgaggagccccatcgagatctacagaattaatagtctagcaagtaggaaagtcttagttttctacgcatggcacatattcaaaatcagcaaaactcttaaaggtctctatgtcatcgcctaaataagtcaaatagacgccccacatgatgatgtttccaattctaatcaatagaaaacccgagtttctcatggttcatggcattcaaacgaaacccattactccaaagaatgatacaaacaattaaaaataaaatactgaaagactaaggagtagtatacttgtattaatcaagactaggggtaggggttgtgagctttgaactgtcggcgaagttctcatctaaaaaatatgaagtctcctcgtaagttcctaggaatccgtttgaaaatttgatgacagggttggcgaagtgatagtcacaagaccagagttcaggataaacaaatgcaaagttttaaaagtccattgatgagtttggaactgggatcggacatccaccggacatgccaggctttatatcctgggatccaggtgtatgtcgcccaaggggtctctgtgcccctgtaatagtgttgtgtcatactttatttccttctgaggcattgtcttattctttgaataaacaccccgcgcaagagttttcatgtggagatgaatgtacaattagaatacttatcccccatgtatgggcgacatgccgctcaggtttatgcctgggggaactcttcatgtcgatgaactacttgtccagtaaccatgcttgatcttctcttaagaggtcttggttctttagctgtgagggataaatttatactaaaatcacaatccactttcccctaggcagcatatgctatgccgcctaagtactgtgcctcgagcatgctaggcttcaatcctttatttcttactcacttgcagggtaggaaccccacagacttctttcatatgataacgtgtcctctctttaaatatatgtcgtgtcacttagttaaaatattaggtaaaaaaaaaaaaaaaaagataaattgatgaagatgatgaatatgaatatgattattggagatgaggtttgaagaaaattaagaattaaataataaatttgagtaaaataataaattcataagtaaataattaagtgggtctattgaagagtttaataaataatttttagttaagcacccttaagaaagagtattattattataattattattattattgggtatcctcccatacattttataagtcacaccttataattagttagtgatatattttaaaaattatttttcttaagtaatgtcacactcataattaattacaccaatgagaaaagtgataagtatagtgcttttagcaaaaaaaaaaaaaaacaaaaaaaaaaaaacaaaaattcaaactaacaatataaaattagtactttttgtacatacatatctcttgtaaacgaaactatcgccttttaaaccaacagctacactacacaccattaaacacacaatcctacattacatattcatctattctaaattaaactaatgaaaatcaattcccaaatcatcacaaaccctagaaactagaccaagcaacaacaacacacagcttcttactaccttttcgccaacaaggttttgcatttttattttcattagatttgatttgctttattttaaccgtgttagatgtatggatcgtatcttcatctttcgtttgggtaaaatcggataagttatatgtggccttgaaatcgaaatcaaaatcaaaatttaaatcaaaactttgatgttcgaagcttctgctttgatctttgctttacatatatatat

SEQ ID NO: 53020 - DNA, 1557 bp, Cannabis sativa
aatcgtcaaatttaacagaatattatagacacttttaatatataaagatatatatataaaggagaagtatgaagcggtgatgtgtcactctaaaatcattttaatctcactatctcttccctccttaattctctctttctcttaattttttaattttatttagtttattaatattaattaataattaagaagaatatttggtaccttaaatatcttctaattttttaataaataaataagaataataaaatatttaactcttattggtattgtaactttttcaattgtatctgaactatccgtataatatatgcataattgcatatgctttcaaaatagattatgatatccctaaaaaaaaaaaaaaattatgatacaatggcttcgaagatcggtgtggcttaaagatttcaaatttgataatgaaggtaaggagaaaagatatactgagtgcttataatttattctcttttaattttttgaatggattaattatttttgcatgatatatttattataatggtgatatatatagactcaatgtgtaaagtccattatcatactcaattctagcgaagctttatttaccaactcaatgattatttatttaaggtaactgtttaaaaaaaaaatattatttatattggggttttaatcatgtcatttggaatttaatttttggttagataacaaaggattaggccaaaacataattcctgtaatttaatttcggttacgtttatacacctttttttttttttttgaataaatacaccttctttttacttactttaatttattgatcatgtatatcaccaatttattaaaaaaacatatttctctttcgaaattcttctttgtatttcaagaatttatatgatgattaatttatcatgaatgaatttttttacaatattaatttatttatttaagtaagaaaaatgaaaattgaataaaatagttacttttattattgaagaaattatatcaaaaatattaaaatttgaaatttattataattttatgatttaataatcaataaataaaatacgaccgcacacgaaacacaatttatttcctatttttctctaaaatcacactaaaactatttttctcttctctccttaattctttcaattttaatattttattaaagcataaatttacaaattgatattttacaattattttataatttttctataaaaaaagcataaatctataaattgatattttaataatttttatataaaaatataaaatattttttaaaaaagaagcaaaaatctataaattgatattttaccattattctaatatttttttctataaaaagcataaaatatttttaaaaaaagttagaaaataaaaaataaattccaaacaaaaatatcgatctatatatatatatatatatatatatttatatatataaaggagaagtatgagacggtgatgtgacgctctaaaatctctccaaaactattttgtgtaaggagattaataataaattttgattatcgattcaaatgctatctttcaattctatttttatat

SEQ ID NO: 53021 - DNA, 2279 bp, Cannabis sativa
gagacacgattttgaggtaaaccagtataagaaactggtgtaaatcttgtattccctggtatccaaggatcaaatttgcacttgatattttgcccagtcccaaccttaagcctcacaccttgaagtaacaaatctcgaccccaacatataccttgccatgtcattgaagaatagctacccttaacagcagtcatgaaatcaccattcgaatagtatcgtcccttcaaaactcgggctagcaaagtatcaggattttggaaaatgcgccatgcttgcttagccaacaaagcttgattgaagtgaacataagaacgaaatcccatacctccctccatctttgttttatataggaaatttcatttcttccaatgtgtctttttcttgtcttctgttgatccccaccaaaattgtgccatcatggagtctaattgattgcagaaactcttagaaagtttgaaacaactcatagcatatgtagggattgattgtaccacagctttcaagagaatttcttttcccccaatagaaaatagtttgtcattccaagcatgtaacaatttccatatcctttctttgatgtctgcaaataaaagcttcttatcttgctcagaataagctggaagacctaagtacttttcatgacattcactaaccggcatgcccaaaacttgactaaaagaatgtcggattgaagctggtgtattcggtgaaaaagacaaaacagacttgtcttcattgagaagttgaccagatgctcgatgataaatatcaagagctcttttaatggcccccgaagatctatcattggcttggcaaaagagcaaactgtcatcagcaaacaacaagtgtgtaataggaggagatcttcttgaaatagctagtccttgtagcctaccaatagactcctcatattgcaacaaccgagagagaccttctgagcatatcaagaataaataaggtgataaaggatcaccttgacgtagaccacgctctggagtaactgaccctttaacttctctgttgacaaggaaagaaaaagaagttgtgtgaaggcaagtcataacaagtgtaatccagcgaatattgaaccccattttgcccatcacagccgcaatgtaagaccattcaactcgatcaaaagctttactcatatcaagttttaaggcagcataacctttattccctcgtgttctatgcttcagactatgcaccatttcaaacgccactaaaacattatcagtaatttgtctattgggcaagaaagcactttgagtgtcagagataacatttggtaggacatgctttagacgaagtgcaatcatcttagaaaccaacttgtaaatgacattgcaaagactaattggcctgtagtcctttattgttttcggtttcttcatttttggaatgagagtaattagagtcttattgatagctgctgggttggctccatgatttaaaacattcaagacgacttgtgtaaccaaaggaccaacaacctcccagttgtgatgataaaacatagcagacataccatccaaaccaggactcttatcggctcccatagatttcaaagcagaaaaaacatcctccgtagtgaagtcatgaaggagaaagtcattatgagcctctgtaattgtggttggaatggtagagaggacatgatttagagcccaatgatcctcctctgaagccttaaaaagagagtcaaaataggttgttataacagaggtaatatcatccttagaatgccaagtctgaccatgatcatcttgtatacttctgatataattgttgatttccttgaagaagcttttgcatgaaaaaatttagtattccgatcacccgaagtgagccattccacccttgaacgctgctgccagtattgttcctcattagccaaaagctcatctaaaatggcttcagccgaggtgatattttgagaaaaatcactgccttgcgtaggagtgttatgtaattgctgaacccgagtttgagcatctttaatatccctcttcatatggccaaaagtgttgttgtgccactgctgcaaattcttagcacaatcggccaaactagctgtcaaattatcaatacagttcccatctatcccatttgccatccaagaatcagctattagtcgagaacactcaggggaatttaaccacatcctttcaaaccgaaatcttgactttcgtctttcaacaggttggtgattagagaaagtaagcacaacagaaagtgctctatggtccgaaccatagtagtcctcatgagacacc

SEQ ID NO: 53022 - DNA, 989 bp, Cannabis sativa
tcaaaattattattatttttttttctctttttatataggtgataaattaacttagtattacccaattattttaatttaaaatttttaatatatgttttaaaatatcaacaataataataatagtattatatgattatatatattattataaaatatttatcactttttaaaattaaagtttcttttaattaaaaataggtaaaatttatatgtaagcaaaaataatttataaaaaaataaaaaatatagaaaaactctatagaagggaaagggaccacttttttccttactagatatcgtctatatgtttcacattagacaaattatcattttatatctaactatatattttaatttatactatatatttttatattattataaaactagggcttagaaattattataaaatattttacaataatatataaaaaaaaattatataatactataatattatataatattttataaaacatataaaatattttacttgaattttacattatataaaataacatataatattatagtaaaaaaaagtatattatacattatattaacaaaacatagaaacgacatcgttgttttctgtatcgtctgaccactaaaactatttcgtacatcgaattctctctcgttcgtcatcgtcggagattttcaaaaaataatcgagtcacagatggtaataatatatttattatctccttccctttctccgtcaatgttgagttagagaaattcaccattattgtttttgcatctgagttaggaaaactcgagtgacaatctacacgtagcacagaatagagaaagagcaatttaagaatagttaaaactaatttaaattgattgataacaatagagaaactaatcaaggcaaaaaaaaacgtatatatatttattaattagacttaataaagtatctcaattaacaaataaatcctagaatctctttttttcacaattaagccctaaattagtgaaaa

SEQ ID NO: 53023 - DNA, 1391 bp, Cannabis sativa
atcaatggcagagagattcaacaacccacatccagagatttaacagatcctagtttaggtaacttcaattttgggcatccatgcgcaagcaaagaagacaaacatgggaacatttgatttccaacttcacgccttgaaaatccttccaaattttgtaaattcataatctcaagccttcgtaaacatccaaagctacttcttaggtctccaacgttgtcaatgtactgcacaaacttcattccagataagtgaagatgtccaagagatgttagtatgccaaaaggaggaagctctctacatttatcgaaatcaaataaagtgatattaacaacacttccaaggatgtcatcacggaaccaagacgggaaatgggcacccttgtacttgcgaattttcaacaatttcaaactggtgggaggagcaagagcttcgagtacgtcttttgcattctcttcagatatattttcgttgttctcccaagacaaatgcagtcgtttgaggtttcttttggctgatagattagcaaatctagcttcaactggactcatgatcacattttctaagttgctgatgtgtagatcacctcctatgttcaggtctttcaattcatccaattgacaaccttttctcttatccacaatgaaacgtgacaaagtctttaagcaacttagcttaccaatgtttggaggtaggtgtgataatctgctacagccttgaatgtaaagatggcggagacctttcaagcgaatcatgtgtttgggtagcttacgaagtttataacaatggcttaggtctaaagtcaacaaatggtgtagcaaataaatggaatcaggaaggacttcaatattagtatatgagagattcaaatagcgtacatgtttcaaattactgaccaacgaagacatggatgcagcattaagacaaatagctatgctataaaatgctcgcaatgagcgaaaattccaatcattattatcacatgttgtctgattttgtaatgccatgaaagtccttaaggatttagtggttggtatgttagaaaatggtccagctccattaaattgacacatcaagtgaccaactctttctgacatgttgaaagtacgggtatcaccattaaccaccactttatgacatttatcacccattatggattgagctagatcatgaaataaatcatgcatcttgaaacacttgatacttccatcattcggatcattggtgatgtcttggaaaaatgatctccaacataaatcattaatcatctcatttccaacgtcctccacctcaagttctggctttgaagaaattagaccatttgccatccaaagatgaattaatcgtgtcttttctatttcataatcctttggaaatatagcacaataagagaa

SEQ ID NO: 53024 - DNA, 1093 bp, Cannabis sativa
  modified_base (411)..(412): a, c, t, g, unknown or other
aatttttcttttagttattttttcttaacacttcatttaataattcatccctttaattatcaaaattatcaaaactgttagcttttttgttaattttgaaaacttcacacttttttttttctttcatttaacaaaacttgtcacatatttttctctatttcaaaaaatataaatatcaacactttactcattatttgactttcaatttcataaattaactattattactatatgtttcttaaaactttacacaatatattagttaatcttttttccaaattactaatatgttatttacaatagtcactctatattgaacattatttattttaaaattacacataaaaataaaattaaatcctaaaataaaattaatatttacgtgcctcggcacgtaacttctacctagtnnatatatatatatataaataactaaaaagggataaggtgctagacatctaatctccaattagggatgtttatataagttgtaattcgtggttttaaattttaaccaattcggatcaaaccatttaagatcggactaaatgaattcggtgtcaacgggttggtcaattcagactgtttataattttttggttcgatcaaagttttaaaatactcgtctgtgtttcaaaccaaaccaaacggcctaattctttctatatacttaatatgattttttttattaaacattgatatttaacaacaatcttaagcctaatattgataatatagcattgtgataagaatatttatttttattattatttacgtattataagttttaaaataaaaataactcaataaaaaatattaaaacaattacgaattacaaactatggttttaaaccaaactaatctgttcttaagtagattggtttgagaatttaattggtttagttcggttttcaattttaaaaaaccaacattactattttggttagaaaaaaataaaaatctagaccaaaccagactctaaacacctctccccaattctgcaatcctgaagatcgctgaagagtttgcaatcctagagatcgccgaaaaaatgaaaatctagaccaaaccagactctctctctctctctctc

SEQ ID NO: 53025 - DNA, 1655 bp, Cannabis sativa
ttatacttttgtatgtatttttctatcttttttcgggcatatgttgttaatctatttatttggtccaattattttttttcaatttaagtggtagaaaaatatgtttaataacatgttttaaattataaatattcttttcataaagtattattttgtacgtgagagtcactaagtttttattataaaagatactctctatgttttctgaatacatgtgagtttttctttttctttttttactttattttactttttccaattctttattttatttttatttttttataacaaatgacatgttgtgtaagtagtgtttttattattatttttataataataagtaataacattgaagaataaaaacaacagccaaagaaataaaaaatatataaaacaaaatcaatgaaaaaatttatgaagatgagtcattctgtatctttgtagaaaagaatgactttcttactaaaatttgcatcataattatattattcaattgtaaatataaatattatatcctttaatttggtatttacttacctttatttattttatttttttgttatggtagatttaagcatgtgaactatttgaggaaaaaaaaaagcttattcacaatttacaaagatttttttaggtcctactttagtttattagaatctattctatataaagtgtatctatataagagaattcttggtttatgagaaattcatggtaactttttatttatattaaaaataaaatagtttattattaaaaataaaataatttaggagaaattcacgagtcactttttatttatatataataaaataaatcctattaaatttaaataaaaatgtcaagttctgggaaaacgctaaaaactgcttcataggcgagatatcctgccgctctgtaatcctgtccgtacgaatgcgaaaggacttcatcttcgtcgtgttggtgaatataactctggtttacaattactccaatttgaaactttattgccagattttgcgtcgaatcctaagggagattagagttgagcattattctataaggaagattaagttcatcgctgctcactcttttgaaattgcttgcttagggatcacgcgtgagggtagcttagtggccacggcaagcgtgaaagggactgtaattagggtcttcagaacaagagatgggacgctgttacaagaggtacctacctatatctatctctatatattttgagaaacataaaaccaccacataatatataacttgattatgatcagtttttaattagttcttacgttaatgtaaagagctgagttgagtgaattatatatatagttatggaggggtactgaaagagctacgatctatagtttggctttttcttcaccaattgaatggttggcagtctcaagtgacacgggtactgttcatattttcaacctcagcaaatgtactacgtactactcaagtgcttgaacctcagccgttgcaaacatcatatacctcttcttctctgtcatttatcaaaggtatataaaatttatttcttgtatatatattcaacagagactaattataatagtattttgttatagaaagacagtagagataataatagaaattttttattttttttcttttttttatcaatttttttttctttttga

SEQ ID NO: 53026 - DNA, 12654 bp, Cannabis sativa
tggaggcttgaagcggggacgttacactaactctacttgagagatatgagacttgatagttaattacaccaataacaatatgataccgaacgggtgttagacactaataataccttttagcaattctattaaattaatgatcaaagacaagtatataaaagagaacaattaggaagatgacacttggacaaatacaacataatagaaaataggtatgtcattcattcacatgttcacctaactccatcgcaagacatctcaatcggaatttgagtaaaatttataattgtcaaaaatacacatatcatcttaaaatattatttttttttattttctcttttatacacataaaatttgacatctttcactacaaaaaaaaaaaaaaaaaaaagttgacacctctaaatgttgcccacaatttcacattaaattaatgacattttgggtgaaaaaagtaattttttgtcaaaaaaaataaagaaagaaaatatcatttagccatggaccatattaagtaaattgatcttgaaaattagaccactataatagagaaggtccattgagaaattgatggttgcgtataagggcgtgaaggtggtgctgagattggaagtaagtaagtgatgcatgcatggtgatattttcttcgatgattgttaaaggttgattgctttgctgccatcaactcctcctcctcctctcctcattggaatatcacttttgtcttttctaagtttatggagctttttagattcttcaatcattcggcgatgggcctagataactacttctgtatgaatttttttaatttcttgaaagtgaatccccatatgctcatcgtcatcctttctttcgctgagtaaaatatttttttggtttcttagcaaatctgccatcgatagaaagtaagtgttccctaacaaccaatcattcaagtagatgagaatattatagctagggaagtgctttgaaaagaaaagaactttcttatggagaattatattgcctcatatatgcatcttctcttggaaattaactctctatacttttgcttgctagatcaatactctccaacttgctattttctaataagatcgaatgtcaaaattgtcaaattcttattctctaaaaagaatattattggaattaccatcctaactttttgttgttttcattgttctcaccatctaattaattaaacaagtgcttgcttgtcatgaattgcatattggagggagtgagaaaatagttcaagtctgtgtagtagggtatattgaagatcatcatctttaattacaatttttcactcacatccattagtctctgtctatatcattaattctatttctatttttaatgttcactgagatttttatcagtgagactgttggttatacttatagaggtcgtaaattaattatgaagtaaaaaatgctttaataaccgaagagaaagtgtccagtccagtccaggggaacccccaaccccaaggtcactagcgagaagaacaggccatggcataatgcatgctggaaacgacagacaagcttacactgttacacaggtacgtactgccctgccataaaatggactctcatttgttaagtgatggttgatcgatgttgaagagaaccatttggccaccattctccttggatggtgtcagtagtattcatatttgatcatgtcatgtgtgtcctttaatttgcatgcgctcttgtacgtctcattccactaagtttaagtgttttttgactacttcttgttacattaatttcttccttgtttcttcaacttgaggtcaacattcactaatggatgctacttacttagtggtctttctttggtttcttcttttctcgctccttaattggtcaaactcttcctttttaatttggacgtttttcaggtgtgttattgtcgacttttatatctaattcaaaaacgttaaccatcctactatttttttttttttttttttctgtaaattctcaatcgaaatctccatgtcgtagcatgaaaatgaaaataatgttgttttctatctaaaaatcaaatttccgtaaaaatatataaaaaatattcatagatataagaaaagtatgattttaagtattttgtgtaaatttcgtttttttatatgtaaaaacaatttgtggtatttatgaaaatttgatgggcctaatgatagatcgaggcggaaggcccaagaaaagcccaaatgaagaaaatgggggaaagaggattgtctgtgcttgtgatgacagtgaagtcgactgaggctgagctgagctcagagcggtggttggcaatggcggaggacttggtcagagcatggaggacggcctttctcagtcttcgggacgaaatcctaaccactccgccgcctactcctcatcttctccaccaactccttttctcacattctcaaactctaatctccgctgctcccgaccttcctcttcacgagctcatctccgatttgctctttctaatggagcttctttctacttctcacaatcactctgccttccctcaattctcacgccttgtaagtctcttcttcttctgatactcgtactatttcatatttttactgataatattgatgatgattatgccatttgcttcatagatccacgacatatgccatcgcgttcctctccagctcaactcatcgtcctggactcagtttcttcaatctctccaaatcttgatccactttttcatcaccactccacctgagtctgctactgagtctcttctccaatgcttcgccacgttaaggtaccattcattcatctttttgtatctaatctgtgtatatatatatatatgtaatttgttttgttttttcaattgtaaggtgtctcttgaaaggataccggagaaaaatgtcatcttcagatgatattcaattggtaaaattcttggttggcataattgcagtctctcattcagagttgacagctaagaggatgatcatcaaccagtctgagacatccttgtgggaagttcagacctttgccttcaccatgcttgaggaagccatctccagacttggatcatcattttctgctcatttatggatatcaaccattgaggtacacataccaatatttttttgtttacctatactatatataatgcacaattatacagtctgttgttgcttaggctagtttctcatgaacaaatcaggtgtttaggaaaatgatggatgttttggcatctaagaccacgcttttggaagatagtgtcaagtccaggtaccaccaaatttgcattagcaaaaactgtaaatataagagagagagagagcttttatactaatcaatagactgctcttgtctttgcaggtattatgcagctcttttgcattgcctgcatttggttcttatggatcctaagggttccctttctgaccatgtaagtgtacctttacccgtgtacaatataagtgtgttgtaggcttgacatcaatcaacagcgtgtaggcatatctatattagcatcagtcaacgtctgttttgtataacctatatgtattcaggtgtcgagttttgtggctgcattgcgaatgttctttacttatgggctcaatggtaaaccccaatttacaattccagttgatggtcacaaggagaaggaacttagcataacagaattcaagtcaccgttggaagaacctaaaagaacagatcgtgctccatataggcctccacacttgcgtaaaaaggacatttcagcttggagttctcctagttcctcagatcatgaatcttctagacaagactttacatctgatgattcagacttcagcgatagcgatgcatcagttaaagacgctgacagtgctctgaaactaagggttagaatagcagcattggattgcatcaaggtaattttttgggttcttatcccaacccctctattattttttggtttggaatgaacctctgaaagctcacgaatttgtcttgggaatttgatgggaaggatctttgtcaagctgattctaaatcctttactactcaatggacattgctcttgccaacctatgatgtattgcaaccaaggtgaagatttattcttccaaactatcaatgttctttttagcattttcaaaatgtttaatttccttacaatatcgttttattttattcaactttcaggaagtttgaggcgagtttgatgacatgcttgctatttgacccttatttgaaggtattgctgctcttgggacctaaacatgaactattatgatttttcttttctagtgtatccttgctgactcttgaatctatgctctctaggcacggattgcatctgcctctactctggcagtcatgttggacggaccttcttcagtctttttgcaggtagcagaattcaaggaaccttcaaaatctggatctttcacagcactttcaatttccttagggcatatcttgatgcagctgcatacaggtttgaaagaaagtgctcgtggccatacacctttttgtaaagttttttttattggtccaatgaacatcatcttcagattctttaagttgggttttccacatatatctggtgtaggtattctttacttgattccacgggaaaaccatggtagattgctggtgtccttgttcaaaattctcatgcttttgatatcatccacaccgtatgattctcttactatttacattgtttagtttaaatacatgtcttttttcagttaatctctaatgacaggtttactattatgtattggctatttagctctgtaaataaaatgtgtcatgtggcctgggtacctggctattattactgtcatgtaggacatgcattatactattataaaaagtgggatttcacaacacggtcaacttttaaatttaattagacaccactgaatagtatttagaatgatgttgtacctgtaaacactcaaaagtgaggttcaggatgtgcttgcttaaagtgacttcctaacctgtcattacttactgctattttgtgctacagatattcaagaatgcctgcggagctgttgccaacagttataacatctatacagaaaaggattgaagttggtttccctttcagaaatgatcagacaggtctactggtatggttccctccctgattgtaactatttcataattttattaacttcattgcatctgtcagtgacactttgctttttcaatagactgcttcttttagttgtttgacagcagctttcactatctcaccgtcctcaaagcaagttaaagaagtgcttcttaaagaaatgaatgaaggtgagaattattttcatgccatgtatggtcgagtgttgttatttcattttgtcagattccttatcctgctgagtatagtactgtgacagtacgacattgaaattgctagatccttgtcaatttcttcatttaatattataaattcattattggctttcttgcaggttttattgaggctgaaaagaagccaggtgttctttttactttgttttattacttggaaaaagtaaacaatcacacagtatgcttagaggctctccaggtaacctattagtttgtttggaagtaccatgctttatgtttgtcagaaattattcgcttgtcaagaatctaggcattgcttgaagtaatatttggaatcttcaatcttggatttactattgtttgcctatctggacgtttcatgttttcattgttggaattagccatttttgctgtagatattacgtaattctgaataaatactcctgttagaattgtagttatcatctcatgttgtgaggccatgagcgagtattagggcatgtgtttttgttagttagctttaattagtgggaatcgaatccctcccccctcccatatacactcaaacacatccacctgaggtagccccaagtggctgttagttagctttaattgagaaagtggatgtcttccattgttatttgatccagttattcaattcatgaaagataaatagaagcaaatagaggatttgggtggtatcagcttaagcttttatttatcaaactaaatttttatgtactataggaaggcttatgcatatattatttttggttgcagactcttagggctgtttcacacaattatccagtcattatgttttcccgttgggaacaagtttccactatggtttatggatttttgagggctgcaacacctgaagctaacacaagaccatggaaggcacacgttggcagtactatgggaccttttggtgaaaagattattatagcagctataaaggtatgctttcatttcacatttggatttgtattcccgtggaggaattatgttattgtttatacgaatatgtctgttatactacattcaaatttgaggtgaggtaataaaacatcttttttgtcatatcctcctgaagacaagatttatattttgccacctattatattgtttgtgtggtaaggacgaacatgtagtgttggatgtatatcaaattttgatcaatcttagtactacagcaaatcttttttttttttggtctaaccatgagagataatctaatggttttatgcttgcactttatccgtgtaattcgttagactactgattttgtatgtgaaattacaggttctggatgaatgtcttcgtgcaatatcagggtttaaaggaactgaggatcttttagaagataaattactggaaaccccctttacttctgacaacataaggatgaagaaagtttcatcagctccattgtatgaacaagagatctcagaaggtagtaaagatgaatataatgctggtcagtcaggaattttgctatggtgcgaggcactcgagaagcattttcctttaattctgcgacatgcttctgcaatggttggttaacattgacctgatatcattaaagtaactaagaataaccttgaacgatgctgaaaagataattcattatcattcctttttctttctctgcaaggtgttaatctgtttaacaacccttattgtatcagttgtcaagaatcggttgagtatgaaatgatctaacaaaaatgtttggacttttgagagtctgtagttatttctgaaccacctctttgtgttcttgcaaggtgagagccgcatcagtcacatgttttgcgggcataacttcctctgtattcttctctcttacgaaggagaaacaggatttcattctttctgctgcggtaagctttattttttatttgtttcgcttgggaaataattatttgcagacaagtttatgcattataactaagaaactttgcagatttatgcagccaaacaagacgaggtgccttcggttagatcagcttcttgtcgagccattggtgtcatttcatgtattcctcaagttttccagaggtgattttaaagttttgtcatgcttttaagttctttgagctcaaaatgcagacagaagaattactagaaacttaaatggtatagtgcagagatcctaaacaagttgatccacgcagtggagattaatacccgtgacccctcaatctcggtatttctcttttacttgctgtttttacttaataatgctgctctttaatttggtcataagggattgatacttttctgtacatttgttgttgcaggtgcgaattactgcttcctgggctttggcgaacatatgtgattctatccggcactgtatcgatactcttgctttggaaggctccaccggtacgttctatgttacagaagctttttatcattttcaagtaacatatatttgaaaaagttattgatgtactatactttttccttagattatactgcagtttctgaatcagtggcattactaactgattgtgctttacgactatcaaatgatggagacaaggtaactatttatgttagctgtttttcatttagaatatctgtagtttctttcaaagttgcattctctttgacttttgctcagttcatagaactctttaatgtaagcggggacatacttcccttgtttgcttttacttcttaaattaaattaatgtatactatcatgtttcaaagcactgatatgatttaagtatgataatttacttttggtgcctaaagtaaacatatgttttgaaatacctttcatctaaataaaaaagttttgaaataccttccatttcttaacatcagataaaatcaaatgccgtgagggctctgggaaatctttcaagatttatcagatgtacaagtcaacatggtttttatggaaaaataacagataaaaccaccttatctccgaagaccaggggctctatggatttaccgtcaactagtgattgtagagatagtaatcaaggtgcatcaatttcataccatccagcttcttttggtgattcacgctggtttgagagaacagtgcaggcatttatttcttgcgttacaactgggaatgttaaggtacttcattatctttatgtaacttgagtatatctcagaacaggttccctctttgttatatttgttttgtttttcagtacttaagttgaaaagttgttctacaggttcagtggaatgtttgtcatgcgttgagcaatctatttctaaacgagacattaagattgcaagaaatggattggtatgtttcattttaatttatgtgtttgcatgattattttgatagtttgtatattttatgattccaagtcctatacgtcttgacttattctttcttcatctctccctctttcctagagttctgcctaatcacacatttgtttttgtagggcttcatcagtcttcagtattcttctactattattacgtgattcttctaattttaagatcaagatacaagcggctgtggcattggctgtgccgtcatctgtacttggtgagtattatactcttgtttatatgttagggtcagactcatagctatgagttaccttcatcattcactgtcacattatggtcgtccaaagataattctttgacactattttatgaggtttcattgattaggatgttgctgcatctcaacccttgtttcattatattggaccgattgtaatagtagctaagttaattctgtctttgtttcgtttcagcttatggaaattccttctccgatattgttaagggcctggttcatttaatggaaaatctaggttcaaatcagatttcagcaccatcgagtttcaagtatcgggttgcacttgaaaaccaggttaagaatccgaatttgtttgtttgctttttataggcatcttcttgggtgtcgtggtcaaataatgactctcgtctcatttgtgttgtttgtttttcattattcagttgacctcaactttgttgcatattcttagccttgcttcgagaagtgagcacgagcctttgaaagattttcttgtaaaagtaagttgtttagttggtaatattattgtttgagatttgaatccttattgattgattgtataattattaatgaaaaatatcggtttggtttgatgaatagaaagcttcatttgttgaggagtggttaaagggtgtttgcacatcatcatcatcgacgtcgtcatcaagtagtgaagcttctttggttggaaaccagaagaaagagatgatatgcaaagcaattgggtcattaattgagttgttccaaggtataaaccagtatgcaattgcccacaaatttcaaaacttattggacaacaacatcctaatccaataattttttctaaatcctaattaattatttctttggggatttttgtgtataatatacagtacagattattattaggtcaaaaagttttgttttcttttgttgtcatattttgtttattattgtaacacagtaatacagtagtagtaaagaaatttttatcttttttttttttaatgtgtatgaataaaaatgtataattgaatgagttaaaatgattacgaatgtgtcaatagaatcaaattatgagaatggtgattaatttgtggtgtttgtggacaagatttgatttggatggatttaaaagttgttaattacttcaattacatgtaattttattcttaaattactttagcaatatactacagatcacttcaaaagcgacactaaaattcaagtttaattataagatcataatcagaaagcatagaaagaaggattgaagcgaggtgttgcatgagcaaacaatggcgtagcaattaatagagtgttttcctcttcttctatcctcaaatccatcttcttaaccccttttggaatcttccacgcgaaacattgcaacagtcttcccaaaagcataatggtcatgttcgtccccaactccattccgatgcaccctctcctccccgttgagaagctaatgaaccgtagatcggtctccaccaaatcacgtcggttctcaggaagatgacggtcagggttgaatcgcaaaggttgatcccaggcagtagggctgcgaccgaggccaaggcgactgatgaggatgtgactgcctttgggaatgaagtagccagcgacagtgcagtctgcgatagagagatgtgggaggttgaaggtggaaacagggtggagccgaagagcttctctcgcacaagcgataaggtaagtgagttgagggacatgagactcttggaggagctctgcttcattgccaatcactctatcaatttcttgtgttgccttttcaagcatttctggatgcttcaacatttctgagagtgccgactctgctatggtatgtggattgttcactactgctataaacaattcctgcttatgtaattatatatcaactttaagtatatcaattttatgtaattataatcataactataactaagaatgcatgcagtactcaccgtgagttgtgcttggatttcatcctcacacaaaagtgggttcccatcagaatctttgagggagataagaacatcaagtaagtcttctactttcttattatcactccattctctaatcctctccttcactaaggagccttggtacttgttaatcacttccatggctttacgaacacttgtttgatgaccatctaagtcaaaccaacgtagccatggaagaatgtccgatacagaataagaataagaatgtgacaacacactaaacaaagcctctacatgctcttcctcttccttcccaggcccaccatcctctcttcccttcccaaaatatcttttaccaaaaatcattctcctcaacactcccaccgagtattgttgcgccgcaactctcacattcaccaccccactgccaatctggttcgcttggttataaacaaaacgaaccagattgtcagcttcttgggttctcttttcgagaagccaagcaagcttagagtgattgataacattagacacaagagctctcttcatcttcctccattggtcgtcgcagggcgacactacagtggccttgtagccttggctgagtagtgaggtggccagcgttagaggtctggaagcaaagattgcgtcgtgtttcttcaacaactctctggctatctcgggagaggtgacagtgatgagatgagtagtggtgccgaggcgaatacaggcaatgtctgtgttgaaatccttcatcaaatcatgaagccatcgatacgttggtctgttaaacaacaactcgggtatgcttccgaagatcggccacggagtgggacccggaggaagcgactgcttatgattattattaggaattagttgtttaaatttgatgaaaaatattgttagtagtaatataataattaatagtggtgctatggcaaatatgacactagataggaaagtagtagtagtagaataacaattattggaagacatattattttagatttgtaattctgatgaggcagccccggtgatatttatatgtaaatggccttataaatatgtaaatttaaatttaattttcatggtctaagataaatacttaaagtttatttttaatggtaataatgtctaaattatatatttacaacattatataagtaactagccgttaattgtcatgtcaatattggtcaacatgacaatttttgattggttcaggtcattaattttttattttttatttaaaaatttatttaaatataccaataaaaaataatgcgtggataataagttgacatttaatagtcaagtatttacagaagttctgaaaatatatcttaagttttattaccgtaaaaaaattaaacgtatgtatatttatttgtaatcgaaaattaaatttaagtattagacggcaaattattttaaacgaaattataacataatttggtgtattcaacatcctcttaattaccaaaatctttgagtcaagtgtcggcaacaattcatgttgtacttaaatttgactaatatgatatgtaatcaaataattaaattttattttagctcatataatttcaaacataattttacaatatttataaaattttaaaatatatctggaattttaaaatataagataccattaaacattattatataaataatatatatgtgatgtcatgctcccatcttaaaatatcttaggggctggcaaatttataatacagtagaatctctattcaagaatacacttgggaccaagtaaattatattttaattgaaaggttataactaaataaagttacaaaaaaaattaaaaaactaaaaa

SEQ ID NO: 53027 - DNA, 1272 bp, Cannabis sativa
taaatatttaaatttaatataaaagtatcaacaaaattagataattatttttatataaatcttaatttaaatttaaattagacgttaattcaattaattaaacgtactctataacaaatttaatagttacattgtttaaaattctaaacttatttacttattttgttgtctaataaaattagttagatatattttcttataaataaattagattaatattttatatattttaaaaaaatataattaaattgtatcaaatttaatttttattattattatttaaattaataattaagtaatagcaatcctaacacaattctaatcaaacattacatattactaatacttagtatattatatctatttctattttatataaaatgtaactatgtaacataattcttagtttaatggggttttttttagttttttaggttaacttaacaaaatattcaaaatatttctatatatatttaaaaataaaagattatgtagatatcatataaaaaataaatttaatttaattatatttatttaaaaataaatatctatttataatatatatatatatttaaatcttaagaatattattatcattattttttaaaaaaatatatgtttgggcataatatataaaatgaatattaaaactaattaattctctaatcaaactcaaattttgtcaaaatattttttaatacataatccttatatataaagagagatcaatataaaatatgtataacaatgaaatttattcttttattgtatatataaaatatgtatatataatcacatctaaaaagcacatcaatgtagccgcatgctaaaaaaatattttcaaagatgaaaatctcaaaccctattttaaaaattaaaaaataaaaatacattacctaattataaaaattgaacataaatgtattgcacttaatattacttaattaaatctaattaaaaagaaaactaattatacgtgcattgcacgtaatcaacctagtaaatagtataaattcacaagtaattataatcacctcacatccaaacacactatcttttaaaataattagtgaattagattattattagttatttccctcttatctattgatgattttaaatgtaattagctaactaaagtaaatagagcactcacaacaaataagttataatagctaatagtcaaaagctttgttaattctatttttaacatatttaattgacaaaaatattttattatttattattattttcggctggtatgtttaattt

SEQ ID NO: 53028 - DNA, 1590 bp, Cannabis sativa
  modified_base (204)..(217): a, c, t, g, unknown or other
tgtataagaactctcattaataacacagactcgtggactacgactcattaatacctgaaccacgtaaaaatcacctgcattaattatcccaaagctttcctcattatctaatttagttgttaccaaaaatctcggtcaatattttggtgctttcattgagagctttcgaaagcgttgttgaggaaacaacagtcaaagaatcannnnnnnnnnnnnngaaactcgaaacaacacacgccaacctcatcccccctaggatcctcaaaacccagaaggcgaagaggcggcttcatgagtaaatgtgggctctgaggagcgagatgagacgaacaacgaggaatatgaagagaacctcaaagggtacgacgtttacaacgaaggtagttacaccgaagtgctggtcttaaggcaaaaagcgactaatcatgaggctaaactggccgcccaaaaggaacagaataagaggatgcaagagataatggtcgccatgcaaaaagctatggaaacagctggaatacatgtgcatcccaaggccatgcccttaggactagaggaaacacaagaggaatcctcaccaagcactcaggggcccaagaccagggaaccaagccctatacggtatccttccgatgaataccttgagaaaaatcctactttgatccctagaagaaactggaaggcacaggatccctgaaaggtccgctctaatttcccaaaagggaaaggtccacagaggggcaagatccctcgagcgagtcttggcccttgggattaagaggatcgaaagagcgtattcgtgcaccaagaacccgaagaaagggggaggaaaaatcggaggtgtcccccggctgttataagacagaaaattaacgagaagtatggtgacttaagaaaccatcttgaaaagaaaaaacacgcattaccagtcttcggaggcgccttgaacgaaggaatcttggttgaactagcaatactctgcaaagacatcgctagagtctcctagagacagaaaggggatgatttcgactctaattgcaaggaccgggaaccatgcacccgacacatattggaagtagagcttcccaaaaattttaagatgcccgaaatggcaacttacacgggagattcagaccctactgaccatctgtcccagtttaacagggtgatgactgtcatgagggtcagcaatgacgcaaaatgtttatgctttccactaacgttgggcggctgtactgaggaatggttcaaaaagttggagctaggatcagtggactactagaacaagttacaagtcaatttttagagacagtttgtcacggcaaggaagatcaacctcgaggtcagcgccctgactaacataaaaaaactgccctcgaaaactctaaagaacttcataaaaagatttaaagatgaggcttcaaagatcaagaaggtggatgacggacaacagttggcccttcttcaggatggaatccgaacggagacccctttctagaacgaactgcagaaagagggagcagctaatctccaggacttttagaagagggtccaaaaatacattaacttgaaagaagcccaaatagtggctta

SEQ ID NO: 53029 - DNA, 838 bp, Cannabis sativa
tttgttcatcagttcaagaaagaagaaaataaacaacaatcatataatcttttcttctatttccatccatggagattccaaacaaccaagatggcttgaaaatagagtatcatcatggtgtgtgccttgctcgaaacccgaaaaccggagtaatagaacaccatcttcctattcctcaagctgaaaacgttttcggaaatttcttttattatgatccccgcacccgtgaaactaaatttgtcatcaattctgaaaagggttacgagattatcaaacttggtaaccaaaattggagacctctacaacccgatttccgaaaaggccaacgcgtactcatgttcaaagacaaagatagggagaaattactcttcttttacgccgttcgaactccacaacaacaaggtaatcctgatttagagattagttgttttgatctaagtactgaggaatatgagaacttcagaaattttccaagaaatagtttctctgatgtaactaagctcattcctttctactggaaatctgatcctgctattggtgaattgagtaaggaagatgggcttagggttttgataatgaagaatgattatagttggaatgaacaagtgatagagatctcctcagctttcttaaatttacatttgattacaatgaagtttttgcctattcattttgtgaagggtgtacttaggtttcaatgcaatgataatcaagactattatttcttttacaacatacgaactggctctgttaccggatatagtaaagaatttgtaatatgaatcaacataagcttttctttttcttatttctatttcttttcttgatcagagaatat

SEQ ID NO: 53030 - DNA, 1114 bp, Cannabis sativa
ttcattggaccacatccaatatttttaggctattcagatctgatccaattatatattagatgttagattttaccataatcaattcgatacaattaattttatctaatcgatcaaacatccattaaatgttggatttgatcggttctatctattggatttatttctattgcattgattcagatttatcagtattttagacctagtatattttgaatcggatcagatctatccaattttttaaatgcaggtccaatccaatcccaaagagaaaagttaatttttatatatgtatatattaagtgtaacacaataaaatttaattactcatccaaactaaatgaaaatactgaggagtttgattaaatgttagatgtattggattttcagacaccacacccaacattcgatccgatctaattggatattaaaaaataactaacatccaatctgatccaatcacaattagatattcaatgtttggcggtcagttgtaattgaaccagtcggttgtaattagattagatcgttttatgcacactcttcaagtgtgcccaacccataattacatgacatatcatttttgagcctaatgagccatgacctactcttaacataaccctttattataaaaaaaaataagttaggttagccaaattaattggtttagtctatattttgtgcacccctagcaactagctagtaagaccttctttaatgattgtactactttgactaatttggtacaaaatctattaccatttagtgcaacaatttttataaatttacactaaaatatcaaaaattaaatatatatatattttacttacaaaatttcacattttatacttatataactatgcatatcattaaaaataatttatgattatatttaaaataaattaaattgaaaaaaaagttaaaacttaaaagtaaaagaaaaagttatgcattcaaaattttcttattaatagtctgaaatttagtacatattaatttagtttataatttgataattttgtaaattgttagagtagaatagtgtgaagatttcaccactattttggtgggaataatgcactatccttagaaatgctataaaagataataatatata

SEQ ID NO: 53031 - DNA, 1462 bp, Cannabis sativa
tttttatatttaatttataaagctctcaacttaattttcttattcagaaaatgtgtattattttaaaaaagaaatttatcaacttaattttttttgattatggtaaccagataaaacacgtacaattaattattattcattaattaagatcgagaaacacaacctaagtacgtacacacaacttacgttggggagctagcatgcatgcaaattcatgcaccacgtattttccttccttctttcttcttattaattactaattaattacttgccaattaatcaatatcatatttggaataatataattagtgatattgatggtcaaacaagtaattgcactctttcaaaaaaaaaaaaaagtaggtataagtatttgctaattggtgtgttgatgaagaatttctcttcaaggagcatagccactagatccaccgccgccacctccaccagatccaccgccaccgcctccaccgtggccaccagcaccaccaccgtaacctgaccccgctccttcaccactaccataaccacctccatgtgctccaccaccacccgaacctcctccacctccgccaccacttccaccaccaccacctcctccgtgtccccctgcagctcctcctcctgctccatacccgctaccagagcctcctccataaccgccaccagcaccttcccctccaccttgtccaccaccaccaccgccgcctttaccaccaccaccaccggctcctccaccagaaccataacctgcaccacctccttctccggctccacttccatacccgccacctgcaccaccagttccaccaccaccacctccaccgctaccgccacctcctccatgtccaccagcagatccatagccttcaccgccaccttctccactaccacttccgcttccatatccagcggctccaccattaacaccggcatcaacaccaacatttaggcctacaccaagatgatcagtagtagtgacagtggcatagccaactgtgaaagtaccaaagtcttgaattttttcattattagttattaaaagagctctagacgcatatgtagtaattaccaaaccaaataaaacagaaaaaacaactgaaattgtacggatagacattgggaatttttatgtatattttaattgttataattatatggttagaatggaagaaatgagtgctataaataagagagggaaggaaggagtaataaagtgcatactaaagatagtgtgggcgcacacacatgattattattatcatagtcagtgctccaatacgcagacatatgcgactttcttagtactataattaattgtgctaatcttgttcaccattattatattatttatagtgagtttatgctgtcttcctcatctgcctctataaccaatattattttaatttagtcttgtatttgtataattgttgtgggttttttaggtgagggaaattttcta

SEQ ID NO: 53032 - DNA, 789 bp, Cannabis sativa
taatccctcctcattaaatgacatgtgtcatacttcgcagaaacgtggataacaacgccccttggactgttttagtctattttttttttatagtcgtatatgttataattatttaagacaacccgcaaaattttaagaaattcaaaaaaaattaacacactgaaatcgatgtacctctttaaaagttttacactactgtactccaacctgtttcgacattcgaaagacttttttagtctatttttttatggtcgtatacattatagctatttaagacatcctgcaaaatttgaaaaattttaaaaaaatttaacacgccgaaaataaagtttgaactatttattttacgtgtgacacttttatttagatataacaattgtggtgattttagttaattaatttaaaattttttattttattaaaaaattaatataataataacgaatatttttttattataacttttggtgttgtggttggagtagaaatagtttttgacactaaattctatgataatgtgataccaaatttagtgtactctttggagatgttctaaaaaagtgttaacaccactacaagaaaacattaaaatacctaaatgtttataattttattattatcaattttggtgggctaattttcactttgcattgacttttgtggttgtaggagttctaatgtttaatattctctgccttaagtagagaaattcaaaagttagactaaatttttagtttcaataaagggcaacactatattattcataagttttcaaatataagttatttt

SEQ ID NO: 53033 - DNA, 1244 bp, Cannabis sativa
tcgtttctttactttaattctgacaactacattttctggtgacgagatgatctttttcgcgtgcatgcctcttatggcgaggtggactcctcgctatctctcactttggttcacccatttatttgtactttgtttgtataccgtacattatacgctaagtatcttcattgtcattatatctccttacgtaacgaggttagtgcctcgtcttgtacacctgaagttacatggtttctcatctaggcacaaggcaatagttagtacatttttatctcgcataagactgttcagccagccgagttgtaaacatactctactaatgatgcttttagcgagttattccatgtcaagtgtaattatgattacgtgtttgagttctttaatcttcccaacttgacacttgtcttcctctcatgtgttgtcaaatttggggtataataattgcccctaaaaaagttcttttttaataaaaagtgctttttaatgattacaaaagttatttttgtcatgatcccttttgaaaagacgtatgttctttgattttggcagttgtgcggtttcgaggtatatcagcattaaatgaccatcttttccacttccactttgaattatatacatagtatcaaacatttccctgatctaacgaagccgatatcataagtataatgtaagaaaaaaggatccaccttttcattattcctctgttttagaaagtctgagaaattcttaagctttttctaagaatcaccatcgagtttgcctgaggacttgcatgccatccctatccttcacattttttctacaagattcctctgacttcatcttctcaaagcgaaccttactacattcgaagatttgcagacagaataataagtcattgccccaagttctaactttaaacagtaagttactttaatcctttacatgcttgttacattatctttaattgctgcttaatttatttgtattgttgccatctcatttggttttggtagtttgttagggttaaattgtatttaggtccatactagggttcaagtaatatgtaggttttgtcagaatctctaactcaccaccttcgggtttgataaaattctctccagggattaggactactttctgcttgtagcaatgccccactcttattcaagaatttatcgtccaaaagatttagaatttgagtttcctacagaatcagccatcctgtataaacccaacccttcaaaacccacctccaaattaga

SEQ ID NO: 53034 - DNA, 1379 bp, Cannabis sativa
gattgaccagatggtggacgcaacctcttggttcaagctattatccatcatggatgcctactctggctatatacagattaagatgcacattacagatcaagaatgcactaggtttaggatcgataagggggtatactgctacttggtcatgcctttcgggctaaaaaatgctggtgcaacatatcagagaatggttaaccaaatgttcaaaggccttctgggatgaaatatggaagtttacgtggacgacatgttggtcaaataaaaagtgtgtggaagtcatgcggacgacctcctagaatgcttcgaagtggtccgaaggtactgaatgaaacttaacccgaagaagtgcacttttggggtcaaatcagagaaatttttcggattcatcgtcagccaaagggaaatagaggcgaatcttaaaaaaattcaagctttactgaacatgccttcccccaagatgcacaaagatgtgcaaagcttgagcagaaaagttttcgctctaagccgattcatttctcgatcaataggcaagtgcattcccttcttcaacattttaaagaagtgtcagaaatttgagtggaaagaagaatgtaaggaggcatccaaaaaactaaaagaacacatggccaaacctccgattctatcaaagccagttcacggagaggatagctatgatatctccgaatgggcttcgactccaggtgactctgcgtttcgaattcccggcttctaacaatgaagctgaatatgaagccctgattgctgggctgaaattagtaggaaccgtgggagccacgagagtagaagtctttagcgattcgcaacggtggtaaaccaagtctcgggagagtatcaaatgcgtggagaaaaaatggccgtgtatatagcaatttttcgggagctactccatgagttcgcggattataaagtggaaagaatccccacagaaaagaatacccacgcagactgtttggctaagttagcatcagacagcgaggttgagaaacttggggtggtacccgttgaacgcctcgcggaaccgagcatcaaagttaaagatgttgtggttgcagttagccaaagacaaactggatgaaccccatcatcacatacataaccagaggcgagttgcctcaagaaagggcgctgtccagaaagatacagtaccaagcacactgatatgtgatgatggacaatattctctaccgaagaggactcagcataccgtacttaagatgtgtatcagaccctgaagctaagcaagttatgctagaagtccatgagaggttctgcggagatcatactggaggtccgagtctctcaaagaaaatattgagacaaggatacttctagccaacaataaaaaaagattgtat

SEQ ID NO: 53035 - DNA, 1393 bp, Cannabis sativa
gcccatgttgacattcccaaattggtaaaactttatattggcacatcaactagacataccatggacatatttgaagaatcagaaactatattcggagcaagttcatttttgagcacctggtgctagagtaccccagtgcccaagttgacaatttattaatctgggcaccttttaagtatcagatcgatgatatgacttttgcatcttcacgaaaaaagtgttatgggaattttttctgtcattagaaataatgaatattcaagccaacttggggagaaaactacaaactcgagcccctagagggaccagcgcctaggtgctagtgcacaggatgacaatcaatctggtgcactactttcgattactcaaatgccgaatttgattcgattaatgaatccaatatggtaaaaaattgtgtaggataccttgtcctcaagtaaaaaaaccttggaaatatcaaaacaagatctcgagagctcaagaatgagcacctagcgcccaggttgacaaatgtcttggtgcgctgggttctacttatccgattctaattctgttttgaccgtccatctagcttttcataatgactaagatccatgaattcagaaatgtcaaattcacaactttgaaattttcatttccaggatgggaaactcattcaaaaatgaagagtttcgagtctctcatttctgcaaaataacaacatcttcgagaattggtgaccagcttcgaaagaacacaaaaacagactaagtgatgtcaaatatcacttaggcatcttaaagtacatcacttggatgtttttacacttacccagcatctaggttcacttcatatgtcaactttggcactgggatgtcaacttctgcactggatgtcaacttcggcactggaagttaacttgggtgcttggtcatgaactgcctttagcaaaacagcaataactcactcaatatttatcttattgacgctattcaactttcattttgaagctctttcaatgctctatcaagtcattatcacactttaatcacaattttgaagttatcgacaccaaattttacccccaagggagttacgaaaataacctccaggttacctacaataggtcttgtcgggctccgaaaaatgtccatcaccacgagaagctaattttcactgtttagatcgttttctactttcagaaaatataatttttgttttccccatgattttgtgggcctcattcacatataaaaggagagctaccttagctcattttgagtcaacaatggggtaatccaaaggttagggtattgaaaggactatatttaatgatccttatcaaaattaaagcatttcctaatcattcccctcgagcccaatgcaaaaagagtcatcatatcataactatgtc

SEQ ID NO: 53036 - DNA, 2510 bp, Cannabis sativa
tctccagatacatgatttaccactagttgtgtatcactgcagatgtcaatgtgtccggccttcatttcctggactagctttagcccaccaattagagcctcgtactcggcttcgttgttagatgctttgaatctgaactagattgcactgtgcaggtgttgccccctaggcgtgacaagggcaatttctacaccagatagctgatctgttgctgacccatgtacatgtagtttccaagttgctttatcttcattattacttagctgaggtgtttgtaccgactcggggttgctttctggtatgcttggtttttgcctgtgcattctaccacaaagtctgctaaggctttgcctttgattactgtttggggttggaaagtgatttcatactgtcccaactttactgcccgcttgagtagccatctagaagcatcttgcttttgcagtatttcgcgtagtggctggtcagtgtatacctgagccgtatgagcttgaaaataaggcctcaacttccttgttgctagaataacgcagtaagcgagtttctctatcaatgggtatcggccctcagcctcaatgagtcttttactgatgtaatagagtgggtgttgtacgctgttctcttctctaattagcattgcactcacggcatgtttcgtgacaactaagtatattcccagttcttctccgtccagaagttttgagagtacaggaggttttgcaagttctgcttttaccttttggaaagctttttcacactcctccgtccactcgaactgcttgtttcctcccaggatgttgaagaatggtacgcacttatctgttgattttgaaacaaatctgctgagcgcggctatccaaccagtcaagctttgcacttctttggtttttgttggcgagttcatatcttggagggcttgaatcttctgtggattagcttcaattccatgggcattgacgatgaagcctagaaactttcccaagctgactctaaaggaacactttaagggatttagtttcatattgtactttctgacgactttgaagcattcgtccaggtcgtctatgtgccccccagcctttctggatttgacgagcatataatccacgtacacttccatattttgcgtaatttggtctttaaacattttgtttaccaatcttctgtatgtagctccagcgttttttataccaaaagacattactttgtagcaatatagacccatatctattcgaaaacttgtatgttcttggtctggtggatgcattttgatttgattatagcctgagtaaacatccatgaagcttactatttcatgccctgttgttgcatctacgagctgatcgatcctttgtagtggaaaagagtctttagggcatgctttgttgaggtctgtgaaatcaatacagactcggcatttcttgttcgggttgggcactaatacgggattcgcgaccctagccaagtagaaagcttcaattataaagttattgttgtgtagcgtttcaacttcttccttcagggctactgcttgttctttgtccaacaaccttctttttgttgaactggccgaaagttgggatcgatattcagaacatgtgaaataatagaaggatcaattccaaccatatccgcatgtgaccaagcaaaaatgtctactttgctctcagaaaactttggtcgcttctgtcatgaatctactgatatatgcccggagaggctcgcctggtctttgcttaactttgaccaagtctcctagatgcagtagaagttggcgtgaggaggagaattgtgcatggaaattcgaagagaaggttttccatgaactaaactttctaggggccaacttgaaataccattgctcagcaaataagccgctcagcaattgtatggtcagaatcgatgcttgtatcatctcacatgttctgaatatcgatcccaactttcggccatttcaacaaaaacgaaggttgttggatgaagttgaaaagttgcgctgcaacaactttataattgaagctttaaagaggaaaggggagttcttcggattgtcttccgtcggctagaagaggagaagaagaccaaggagggggagcttacaactaagattgagtattacaagtcagaagtggcgaggcaggaagaaaatgtacatgccttagagacagctggtctcaacattttttatgacttttggaaggctaacccctaggaaaatttcaattacctgggcgaggccgaagacacgtatctcaagtactgtgcttctcaagtggcttatggtgaaccggatgcgactgcttcttcctctggccagaatgttgatgtacctcccgttcagacaacagatcctccagctcctaccggcccagaagatccgaaccgagagcctgggactccagctgtttaaatacttctcctttatccttcttttaataatttcaggcataaggcctatttttaagacatcatgaccggccaagcggtctttaaacttggaattatttttc

SEQ ID NO: 53037 - DNA, 1482 bp, Cannabis sativa
tggaaagggcgaagtagaagaaagacaaaaaggagccggcgtaagcaacgggatattcatattatactttttgtcccaactcatgctcacatgcatatgcatacatatagtttttaggttacagagcatatatttgtttttgggaaattttaaaatcttctatatcaaaatttaaactttaattaatttatatataattttttgttttcctattttatcctagctaattaaaaaagaaactgaactaatcagtctcttcatctaacatttctctctctctaacacttatctcagattctcaagctaaatctttctcaatctctccgctctctatctatcgacctatctcggtgaacggctagaccttatcatcgaaaaaattcatacacattcacttcaataataagtaggtgttgtttaatgaatttcttaaatatgtagattagtatgtagtttattttcgatagatctgtgtggttgttgtttgcattggtgttgttttgctagattttttcattgaaatggcgaaatttggttttctcgccaaactgagttttttttaacaaattatctatgtttttacgattatatattgatatcttctcgataatttgggtaaaaaggtaagggatgacaattttcaataatttttcaatggtatatcgatattgtttcgacccaagacaaaatatagcaaaattaatcacacaaagcagaattatcgacaaaccattgatctatagtatatcgataaaccatcgataatctatgggttatcgatggcaggataacatattttttacttggtatttttattaattattgatggtttgtcgatgatgctgccttgtgtgattaattttgctatattttatcttgagtcgaaatagtaatgatataccatcgaaaaagtgtcaaaaattgtcatcccctacattcttaccctaattatcgagatgatatcgatatataatcgaaaaagcatcgataatcaattaaaaattctactttggcgagaaaatcaaaatagttaattaaattatacggtctcgtatacaaaaaattaatggcacattttaaaattcactatataattagaattgagtatattcaaaatgattaattaaaaggttccatgtatttgttcaacatggtaagtacacaataaacatgttaacgaagataattaagaagttttaataatttttatggcccttatgagaatttaagtgtatttataaattattattatttttaaataattaatattgttaaattatataattagtaatttaattgtcaaataagaattcatacctaattaatacttgacatttgaacatagcttatattttaaataaagtgtaattacttaaggtttctccaatgagacactaaaatctcaaaaatagtgaagtttagacacaaaattgcttcaacaatatctaaatgtcatcatatatatgtgagaatctatagtgt

SEQ ID NO: 53038 - DNA, 1087 bp, Cannabis sativa
actaatcgctctcatcacacatatacatttatataataatttactttgtactgattatgaagcttgcattgaatagccacctgggtctgtttcttagttctagtgatgacatttgattgaagtgttcttttacattgtgattttagaagaccatttttgtaatatgtgatgaagttgcatgtttacattgtttctgttaatctcctgttaatcctcctactttgagtgtttctgttgtcattgtttacataggttatgtgaccattttcttctgtttacatgatattttgggttgttttgtaatcttgtaactgtggattatgagttgggatataactgttattatctcttttcattttgctaaatgatattataatttgaaaacctttttgtggtgaactcattttcttctgctaagcccttatcatgcaataacaacaaatcgaaatcggagcagttttgacacatttgaattgcattttctctgctttatttggttcaaaatgtcaatgatcattggtatttattattttgtgtattgcattttctttgttttaagtggtgaaaatagtttataagtgttgttaatttgaaactcaagtgcattgcctcagttgaggcataccacattcattaacattactcaaaccaacttatagaaactcctcaatgcttgacatattttatatatgacatgacattttattttcaaaactaatttttattttgagacaactattgtttggtaattataattatatataaattagatgttcaagggcacgtgcgagcctctcttcaccgaatttactttaagttacatataaattaaattacatactacttctttcatatatactgactagatctcaagccaactaggagtagtgtgtgttttttaatataataaagatgtgtacatataaattacattgaaatagatgggacttcttttaatatagccatttttttaagtgtcattataattgttttatgtaagtttaaaggaaatattaattatttagagtgctgatgaagaatgtgtgcatattttttttattttcttttatgtgatatgatgaagaat

SEQ ID NO: 53039 - DNA, 1064 bp, Cannabis sativa
atatttttctttagtggttagagagacataaaataaaataaattgtaatataacttctaaatttaatattttcttttattgttttatttgaaaagtatgtagagacaaaacacttacatatattgtaactttatatataatataatcaatccatatatataggaagattttaaagagttgatatagcatgcttaaattcttattatttctaatacttatttttttttttaaattttttttactaattttgtaaccctctatatgtagaccaaaaatcatatatatatatcatactaatactatacttaatactaataacttttattttcacaataatgatctattcattcatatatctttttcaattctcttctcaacgctatttattatcaatcataacatttaagaaaaataaatttttatttttttatttctttttttactaaaaaattacaaaaattgacctatgacattctaaaaataaaaccatcacttctatcatatctatacattcattcattttatgaagaaaaaaaataacaaaataacaatattataccatacgtttttcattattacatgatatctatactcatattttatctatataagatatcctcatttaaaaagaaacaaattaaatatagaggctaaattttactttgtatcacatgaaatcattattacgacttgagtcttttatatatatttctaatagattttttttcgcagaaaaatttcattataaaagatctttcactacaagaaacacaactaatcattaatttgatgagtatgatcatcattcttgctgcaattactttttaggtgagtcttaatattttccttaaatttgttgattttacaagtgttcaatagaatttcttcatttttatttattttttaaattttgtgtttattgatttgttaagtttgtgttgtgtatgataattgctaggaatttctcttgtaaaatacatattgtagtaatgtgttgcggtattactatacaaacttttttcttctaatctttatcctcttattttttctgattaattagttaa

SEQ ID NO: 53040 - DNA, 980 bp, Cannabis sativa
gtcgagttttttggcaaggcacgaaactggcacgagcgcacgggagtgatacagtacaacataacacatgcaaaagaatatgagcttgcgcctagtacgatacgaataaatatgagtccagacacgacacgattaatatggccttaagcacggcacaacatagaaacacgaaaacacgaatttcttaacacgtaagcacaacataaaacacaaattcaaattcatataatattttttttatttagtagtgcatctactcttttatataaaagtgttttacttaaatgtatttttatttaataattcatctactctttcatataaaatatgacatgaacataatttttcttattgagattgtgttgaatatttttttttgctgaaagagattatattgaacattatgtacaattttatgtaaaaatttagtaatggaccacaattatggtgatataaattcatttgaatattaaacatgtaattgtagctgttttttttaagctaattttaacttaaacattctatttgtgctttaaaatatagaaactaaattgaaaagtaaaaaaaaaatattagaatttatcataggcctctttaggtccatttgataaatacgggatcagtctttttataaaaaacaagttggcccgtttaggcctagcacaatccgggccaacacaaataatttatgcttatgggttgggcttgacttactttgaaaatatgggccaggcccagcccaattcgttttataaaataggtcaagttgggctaacgtaaaaaaattgagcttttataaaaacgggttaggctacccgaatgtatagctggtgcccaactctttctattatgtgacgtcctatgattggttatcgatattccctaaaagctattttcataaattgcatgagaccaaatacgcaattacctaaatagtgatattacatcgaaaatgacgccaagtgtcaatgtatataaaa

SEQ ID NO: 53041 - DNA, 800 bp, Cannabis sativa
ggcataaaacccaacacttaatagatacttttgttgtaccataattttggtagaatttggtttttatttcttgtttggaaaaatttgattattgttgttcatttggaaacaactgctttagtttatctattaattcaaatactgttggaactggttctttcatgattcatgacaactaatatttgcttgacatagttacttcttataataaaatcttaaatgtggaatcatgtggtactaagcgtaaaatggatagtgaaaaattaagttccttatggaacaaacggttaggtcacatctttagaaatacagttgagcgacttgtgtttgatggaatcttggattcaattaatttttcagactttgatgtttgcattgaatgcatgaaaggaaacaagccaaaataaagaaattgggttcgaaaagagctatatggatgtcatagaattgatacatttggacatttgcaggctatttcctacaccttcttagaatggtcaacaataatttgtatcattcgtagatgattactcaggatatgcataactatttctactcactactacaaattaggcttttagtgacactatatagtgacatgcataaaagtgtgggtcactaaaaaattaagagtaagttttagtgacacacactgttagactctaaatatttggtacttatcactcgaaatgtgggtcactaaaaatatagtgtcactaaatattaaaacccaaaatttataattttataaaaataaaaaaaaacatggccaatatagacgtgccacgcgtgtgagcaaa

SEQ ID NO: 53042 - DNA, 1924 bp, Cannabis sativa
atgacgcccaaggtaatccactgaacaggctcaatgagccttctgagctaggactggaccatgtcctagagcaatctcctaagccggagatactggatgcgagaccacctagaatgagttgggtcacgcctacttctactctatctgatgaggcttttagtaagatccttactagtggtttaataggagatgtccattgcgagattctccatagaaactgtcgggcgcatagccccccttcgggttggttggcgtggtctgagcaccacattgagcatggggtggtgctgctacttcgcagtattttttggacattgctacttactttgggatgtgcccaacacagctcatgtcgaagagcatcaagtatctctcggcaatgttcgtcttttacagggagctaggctggcctccgcctacctcttacgagatcaggtactattttgatctaaagtctacgctgaagcagagcaggattggatatttatattttggccagattggtcaccaatggctgggtgacactaactggacaaccatgtcgaaggttggcgggtatgctaaaaagtactttattgcacatggtcttcgtaggatcaggcaccacgaattttggtatgttccactctttagacgtttcatccctactttgtgaataagggatagggaaaatcacatcctatctttattggttgagcaaagaaatattatttggttgaccaatgtggacaatttttagaagtatggcttgtatttttctattcctagagctgcaagagtgccaactgcagatggggcctactctagagatgggaaagctcctgacttggatgatgataaagtacctttgtctcatattgcatggaatttggaaaggagagagaaggctctctgccagtgcctggccagcgggcgtttggtaggtgatgcttctattcatattgggcctagaggcttggtttttgggagacatacacgccttgtgcctgcatctaagggcaagggcaaggctgtagttgaggactctgatagttcctcttctgatatgatggtatttgatagttgataggatcatgcttctgttcttgtattgaatgtttatgattgctttctaactttgctactttctttttgcaggtatgtcttctaggttgagacttcgtacaagaggatcttcagatgtgcctactggatgggtaagggccaaggtggctaggactttctgtggtgaggatgctgccaggccatcactacctccccccaccagggcctgtaccacccggacaacctgtgatacaacatgccaaaaaaggtactcggaggtacagtagaggagtggggtcagttgctggataaaaggctgctgaggtagccaaccggcgcacagaaatggccttttctttcttggatgaggatctaaggtagctaggcgacagtggatttcacatcctttactctgccaggctttgggatctttctcttgtaagttatacctttagctctattcattttcttggcattatattggttggccgaccatgtggcttcgtgcatgtggctggccgacctttgaagcttatgtgggggctagtcgccatagcagtcccaaggggggactagtcggccagtgttgtggtttttgacgctgatgttattttgctttgttttcaggccgtgatgaaactgagctcaactcgtgatggctctcgggtttctttagatgcttttcaagagtgtgtgaagccttggaggcttcctttgtggtaaaggacaaagtcaattttgaggtggaggccttcccggcggagagatagaggatgatttctggtttagagaccatgcttggccccaggaatgtagagaacaccgcccaagctatcctcatctctgggctgcaaattgaacttgatgatcataagaagaa

SEQ ID NO: 53043 - DNA, 2231 bp, Cannabis sativa
tgtgcaggaaagggtaaatcagtcctgatgccatgagtgcgagaccttggcgatgcttgtacatgttcgggccacactaaaccaagcgggttagggtccaccggtgatgctttttgtaactctaattttgccgcttaggtcggctcgtaaaatgaacttgtaatatttttatgaaaatatttacgggatcccgaaacatgtatcttttggttgtaaagtttaaagttgttacaagtttaattttcattctgtttcaaataaagtttaaattttccgcgcttatctttctagtaataatccgatttaggggattagggtgtcttaatcggttggtgtagcgtgcttaatttttagggcgttataactatgatcaaaacaaccttcagtgagaaaaccactttgactgcttgaaacttcaataaccattcctcattttccataactcaatcaatctatgaaaaagatctttcctcactgccttgcttattattccaggtataaaaagacctagaatatttgatgtgtttcattttaccttttttcacataattcttgaaagctcccaagaaactcatcttgaatctcttactaactcgcttattagaatggagaatatcattaaaaccgccgagcataatccatggttcatttatctttgcagctagctcttttaaatcttgccataatataaatcttccttgctcttccttaaagcaataaaaaaacggtacaaaaagatttcttttcgagaagttgttaaaacttacaagtgaattagtttgatagaacaccaaattatattatctgaaatatttgaggatttcagctaactataatttgacctccagcataccatgcattattcgaagtaaaaaaccatcctccaattatatttacgtataagtcgcctaactttgatacctttctctcgtctcgagaaaactaaccgaccctctcttcattttatagattaaaagtttaaactctatttatttctttatggttattgatccctcggatgttctaactcataatcttatcccttcgaaataggaggccctcccttcttttgtactagaaaaattttctccactttttgtgcattcgccaatttcatctagtgtctgaaaagcatttaaaatatgaggaggatgaagcactatagcagtttgtttcctgccctgtttcacttgttggaactcttttgaatcaaccactatctttggtgctacaaccgagtcttccactaacaatttcttcttttcaacccatatcttcttttgcttcataccttttggctcttccttttctctacaaacattcactttgtgccccttagccttacaatggttacaaactataggaatccattcatatttcacttgaaatttaatgtcctgattgatttcattagtgaaagaaattgtattaggaaagtcttgatacatgtgtacttcagtaaggatccttgagaagttaagtctctccttattcttagtaataatctcatcaagcataataataggagtccctaaattatattcaagaacaagtagatcatatttgcctttcttaggcttagagagatacttgttacattttctcttctagtgtcccattacgccataatagaaacacttgcatttttcctttttgtccttagacttaggattggctttgttctttttggctttaggttcctttttgtctttaggcttgccactgttgttgtccttactgttctatttccttttcttattagaagaagaagaagaagaagaagaagaagaaggagaactggattttgcttcaacaatatttgattaacctttctcggacttatccttgttaaggttctcaatcacctttcctattctttctcgagaccccgcttctaagaaagatgattatttattaaaatataccatatgtgtaggtaggaacagaggaagggggtcaaatttatcctgatgggagcaatagtaaaaataatgtttataatgctataacgacgagtatagtaagcaaaatcatatgaaaagaaaaagaaggatacaaaataattatagtggaggcatttgatggatgccaagtgattgatattattcctccaagatcaccacttattcaatgaatagacataatgactaaaaataacaaaacctttgtactttgatcaaaataagtaaaaaagtgagtccactcatgaggtctgaatattaagttaagaa

SEQ ID NO: 53044 - DNA, 1600 bp, Cannabis sativa
  modified_base (1104)..(1111): a, c, t, g, unknown or other
tattacgactccgcgtcggttggctaaaaatccaatcaataatagttatagaacacatttttgtttattaaaaacaaaattttaaaaacacaaattttattttattttggtgatcaaaaaattaaaaaccaaaggtgatgtttgggaacacttttgtttttaaattttttaatcacaaaaataaaagtagaatttttttttatacatttgtatggtgtttataaaaataacacaaaaactacaaaaaaaaaaaaccacataaaaataacaacatattaacaacatgcaaatataaaaaattatatacaaataataaaaaaaaataacaagagtataatataaaaatacatcaaaaaaccatattttatgtaaatagaatcttaaaattcgtaaaaatattaaaaattctgtataatcgtatttttataattttttttttatttttacttatttttgaaataattccataaattaacctaaattaaaaataacactgtattaatataacactgtattaacactcatgtaaacagttcccttcctctccacgccaaatccgaatcgtcgtatcctccgatccactgaacaccatctcctccaccgccacaacgcacagaaccgcgaaccgatgacccttgctttttcgatcaacttcaactgggtacttgagaagatgtcctctcatctctgttacctcttctacagcaaactgtttccagttcatttcccccattgatcttacttttttcacacaatcaatgctctctggttgtgtgaagcaatcgtcaatagtttccatatgctctgcccacaatgacatcctataaccatatatctgccaaccacacattattcataacaccaaataaaattgttatcaaagcaacgaaggaccgaagctccatcaccgatgacgaaggaccgaagcttaaccgttgagaagatttcggtagattcaaggtggtttgagtttgtcgttgattgccataggcggttacgtaaatgaaaagtggctgaagtggttgtccgcttttcatgcgtgatggcaacttggcgagaaactctcccttaatttgtaactggttttattattattattattannnnnnnnattattattattattattacttaactaaaatgtatcctactatccaattaattttctatttttggtaaaatttcttaaattaattttttttttaaaataaattaatatttatatacattactttttgtcttttcttaaaaaaaaaatacattactttttgttatgactactttttaaaattctattatttcaataatataagaaatattatattaattttttttactcattttgatttacgttaatttagaaaccatatccatttaatgaattatattttgggacatttttttatttatttattttttttatagtatctattcttaataatttgtattttttcaaaactttctttttcatcatattttattttattttatttcgtactgtaaagagagtgatatagtattctctcaagttctcagtttgtcagtgtatttttgttgtgttatgtttattgtgttatttatttttaagtgtatagatata

SEQ ID NO: 53045 - DNA, 1000 bp, Cannabis sativa
acacatggattgttacaagtttaccacccaaccaacacgtcattgacaataaatgggtttacaaaattaaatacaatcccgatggctcagtcaatagacttaaagctcgcctagttgccaaagggtatacccaacaacaaggtattgattttttgacacttatgctcctgtagctaagttcaatacactaaaacttctttttgctcttgctgccataaaacaatggcacctacatcacatcgacattgataacgccttccttcatggcgatttaaatgaggatgtttatatgaaactacctcaaggttacactcccaaaggggtgataccacctaatgccgtttgcaaattaaaaaaaaagcttatacggcttaaaacaagcatctcgacaatggtatgctaaacttagtaccactctcattacacaaggctttacacaatctaaaagtgaccattccttgttcattaaaaatacatctactactttcctagctttacttatatatgtagatgacataattgtagctacaaacaatatttcagccctcaatcattttattgctacattagactcaactttcaaattgaaagatcttggcagcctacgattcttcttaggactcgaagttgcaagatcgaacaaaggcatttcggtttcacaaagaccattcacattgcaacttcttcaagaaacgggtcaccttggctccaaaccggtttccacaccaatggaacccaatctcaaactaagcaatgaatcaggtgctcctttgtcagacccaaaacaataccgcagcctcataggcaagctcatctacctcacaataactcggcctgacatcagttttgctgtcaacaaactgagtcaatacattcaacaaccccgccaacctcatttccaagctgcaatacgaattgtcaactatctcaaacaatctccaggtcaaggcctcttctaccatgctgcagcacctcaccctcttcaacttcacgcctttgc

SEQ ID NO: 53046 - DNA, 688 bp, Cannabis sativa
ctctctctctctctctcttattttcttctttatccattaccactctcacccactctttctctttcacatactttatttctcacatttttactatttttttttaaaaaaaattttaatactcttatttatctttctcactctcacaaaatttgttctatttttttaaaattagaaacacttctattttttttttacattttcttactagtcacattcgaatatgtccaatactatttatttttataaaaattaattatattttttttaaaaaaaaagagtattaattaatttcacttaagctcttacaaaattaattataattatttccattaaagtaatttatataaaattattaaattattttttttatggcttagcaagtatattattacttcaaataacaatttgtacaacctagtagcatcttccaatttgaagaggacttaaaaaaatctataaaacctttacaatgtatgaaaccaatctttttcactattagttacattcttaggccaaatacaagtaattcttctttttgttacatctttaattttatacactattctaccactattatccatagccttgccaaattttgctattttggttggcctatatgttgtacacaagggcagccaaagcagtcgagataaccttctttttaaacttactcttcttagcctttcca

SEQ ID NO: 53047 - DNA, 1919 bp, Cannabis sativa
ctattcaacagatcaaatgatgattagatttataaaaaaaaataactttctgaaatttaatggtagatctatatctataaaaaagctaagggtaatggtatataacttgcaatcggttgaaatttcttttttattttttttaaatgttgaaatttctttcaattacactatatttatttttttgctaaattttattgtactatatttacattaaattgatcttgttttaagcaaagatatttctctttcctatatacctcatctttctttctttttttcttcttttaactttcatttgccttggggaggaattttttttttggctaaatgtacttttgattctccactaatttaatttcaatttttttctttaagaaaattattttcttttttgttagaaccatcaatttccatcaaaagcaaggaaactatgtaaatactataattttctttttaatttctttttatttaactaaaccataaaaattaatcaaaattattaaataaaaaataacaatgttaatttagtacattttatttttttacagctaaaatattcaaacacatacttttgtttgtattaattagtattcatcctaataaagttaataagtgttgaaaaaaaaatcacactaaaaatatctaatattttaagtttatgctgatatgtaaaaaaagtatttagtactattttttcctaatttataacataattactagtcacaatatcactatctttgtatgtattttaaaaataataaattatatttttaattttaatattattattttatttataatacacatattaaaatattatatttcaaattatatcacttaatatatttttttgacgtagtgattattatcattcatgaatttacgatgtaaacatccgcaaacagcacatgaactaccttgaacttggatagttcatcgtctaaccgaatgacatgctttattaaactataaactactaaagtcgatcagcgaacaacatgggataaaactgcccccaaaagtttagacaataaaactataactgaaactacccactcaaagagttagagctttagcttatatcacttcttactacacgccaacttattaacatatcaagaatgatcccaaaacatctacaaaacaagtaagataaaaaatgaattagtcccctaacaataatattaaaaactaataaaagaaattctcaatagttagaaaaaaaacaactctcaaacaaattgaatttaaaataaacttattggcaaaatatctgtagcagttggtcctccttaaaattgatctacagattaacaataaataaaactctattatcatacaatttaatgaaaaaaaatatagttaatgagaatatggtaaaacaattcatattataatgtcaagatttaaaacactaatttgtcaaatctaaaaagtcggttgaagaaggcatgagtacaacatgaaacacttctcatacccattgtccatactacaaatctaccttaaacaattagaggcaagccataaaaaaaggtacaatagcataaaaggcatgaaaaccatcaaaaatatagtacaaaaatcagatagtcatcaaatctaaatcttatatcacttaaaaatttgattttctatacttagaaaatcttaaaattttttccctaaatacatacttaataatattggtaatatatgaccacattcctaatattccacaaatacctctcccatttgaaaaaaatcaaaaactgaaatcatccatggctgcctcccgaacttctctctcccatggctgcctcatcccgaccaccacgctcggccaccgacgactacccaccaccccgactacgcatgaccactgtccgaaccacgcacgacccaaccacttttctcggacccactctctctctcttcct

SEQ ID NO: 53048 - DNA, 1421 bp, Cannabis sativa
taggtcctccagccattgacacagtcgactttctccatttgaaggttttaggtgtggccgagaggccattcttatttttcggtggtcttcccctcttccttggagtgcagctgttgttaattgtcgacattgagcattttcgtggccttccccgtctcttgctggaactgggagcttcggccgagcccgaattaaatgttccaatgacattgggttgatgatgagtttcagagcttggttgtggagttgttccaggtgagtgaggtggggaatcgacgctgggtatgttggccttggtcgtaaatgaatcacattcaggatcaagtaattgtttttcaggtgctggtttaacgattataccatctgaggctttccttttacgggggcccacaaggtgttcctggactctgaaatcgttgatatccattaatgggtttagcaaagtgggttctctgaagtatttgtccactgtgaggcctcccattaacaattcacgggccttcttctgggcccaacagtcagttgaaggccaatccattagagtggcttgggacccgagcaaagaggaatagtttgggagatcttttattatgggcttcaaagctgggctgctattttgggcctcatgtccaggtgatacacgaagagtaaaagcctcagaaggttgctttaggttctcagactccttttgttcaacagaggcattcagtacttcatcttgtgcaacgactatagcatgtttacccaaatgaggaagtttatggggagaagcttgaggggtccttttcctaacccaggtgggttttggactggtgcggcttgcctcagacttttcagatatcctcacaacagccggtttgccattggaggattccccatcagttccagcagccactgtcctgagttcctgcagctcttggatggaaacctcttttgtgttgttgccaaaaggggcaatttcgcctatacccggcaaattaaccaatggaagttgggtaatagccagcgggtcttgagatgcctccggttggtcctcgtcggaaacaattctcttcttgcccggcaattgtcttctacactctcgaaggtccgccgattcaccattgcgcaacgccttgtgaactttcaattgatttcgaagtgtagggtccaggaagatttgtttttgaagaacccaatcttgaaaccatttggccaagggggatgtgaatgttgatctttcaggggcatcgctcttaagccagatgccatacattgggtaaaagtttcctgaaccatcttttacaactgtgggtgtcttgaagcatatgctctggtcatgggtaagaagcccacatttgaaacacagcttgggtaatctttcatatttatactgaatccagaggtcttttagtttctgccttcttaggaaaaaccctgaa

SEQ ID NO: 53049 - DNA, 1439 bp, Cannabis sativa
cgttggggaggggtcatcttctacctcgagccaattctgaagcggatcacgcgacccggtttctaccaggcgggctggaacaagattcaagcgattaaacacatgaaaccgatggggaaaaaaggggtttggatcgggattggatttctaatcaatctatagtgttaatttcaggtataaatggcgaaaaaggttagatttgattgtgttcaatccaaaaactcaaactaaaaagaacccgattattgtaattatttctcatccaattcaaaaattaaatcatgtaaaaacattgtagattagtctataatgagatttgcacaatcaatttaaaattataatcaataaaattcgaaaatacaaaattaatttcataataaaattaaataaatcctaaaactttaatttataaattctcttaatttactcattaattttatgcatataaattatcattaagaagagaatttaatgaggaataaaacccctaaagtattaaaatcaatacataaaaaatttaacataaaataatagcataattagtacttaatctgagaaaattataagttccaaattatatataataggcattctaataccacatgttagaaaatcaaataaacccaagatacatatttgcatataatctagaaaaacaataatagatgataataattctgtatacttacttatatctctaatcagaagtagttttatttatttggttatgaaaaagtatacaattgtaatgagacaatatatattaatagagttagactaggcttgctcatcaaagacttcagttaactagaaaaactcgcatatatacttccactaggctttatacacatacaatgctaagcccattaactatttgaactttgtatttgtaaacctaaataaaagtctaatatatagatgtatatatatacacactaagtattagtaacataaaatactaagtattagtagcctaaaatgcacgtttgattagagttgttattacttaaattttaatttaaataataataataaaattaaatctaatacaattatattatatttttaaatatataaaatttaacctggttttaaatttatttataaaaaatatatttaactaattttattttttttaataaaacttagcaactttattagctagcaatcgttaataaacaatagaatacactttgttggaacaatcctccaactgaagcacatgacctgtagaggaacaagaattcctagctaaaacatgagccagcttgtttgcagatcatttgacaaaatacaactcaatattatttaaggataagagaagagtacgaacatcatgaactaaaagaccaaaagataatgacaaagtaatttggctttgcacggcttgaacacaaactaaactatcagtctctaaaatcacttgtccccacaaatga

SEQ ID NO: 53050 - DNA, 608 bp, Cannabis sativa
agtccagagttagtggagggccccaaagtataaggaaatgtttaggaaattgacgacatccagaaccgatttcataactaccagatgttgctaaagctggaggaaaatgtggcttcatgaacacccctgcctcttctagaaccgactgcacagaagaacaaaaaagcagcaacaacgttgacgggtttggtgcgtggtgttagggtttataccctaaaaagcttataaagacagttctgattatttaaataaagagtcaaacatttaataaatgtgtgaatattaaattattaatatttattattgaataatttatattaaatattggaaaatttcttattcatatatgagactgtggcttgtagctgtacagagaattaagaccacttagcaataaataaaacaatcaacaacatattaaagttaaggaatctttaatcaatggttgctagtatagttcactagcactagcccattcttcggtgtaagtaatcttggtttagattactgatgtagtgagacatcaaagtgaatgtgttgtatataatagagattatatatgaaaatgactgatataaataaagttttcttgattaacatgtcattta

SEQ ID NO: 53051 - DNA, 2003 bp, Cannabis sativa
tttttctacactgttatctgcaacgccaaaaaacaaaactcatattagaaaatgagaaagaaaggaaaagaataaagctttgagctttaagatgtaaacaaacctgtagactaatgttaatactagctctctcactctctctctctctctgtatatatatatatctatttaaatctgaagagggtgggggacatagattgaagagtgaaggtggaagagaatatatatatagggaaagaaggaatgaatgaatgaatgaaggaaaagaaatgtattacgtaatgggcgtaacgggcagcatatatataatattattatattatggaaatgaccaacaaggctctaccaggcaaatctaatatttgaagactaaatttattttaaagaggaactaattttatttacacagataagatcttcttcactgtatctatcaaaaatagattttggattgtaacaagctgacttggattaaaatcagttgataagccgaaatctttttgtttacatttttaccaagtcaattttggataatctcaaatcattcaaatttcacaagtaataataataagacctaagcacaggtaatatagagatagtttttattcagttaatgaaaacaaactttcccttttttaacaaaattaatggaaacaattaacaaactttccttttttcaacaaaattattgaaaacaattttgaaaacaaatttgaatacagataatggcctttttttggggctagtttgcattggaagtgttctcttttttttttatttaacaattgtattgaaagtgttttcattaggcaacttttaagtttagaaagacacaatttgaaaacaaatcttttccgttgtaaacatcatctacgcaactctcacgtttgtttatttaaaaaaaaatctttttttttttttgagataatttaaaaaaaaatctttaaaagtaactctgaagtaaaattttattatgtttgttatgattttcttaaatatatatatggtatattattgtgtgaataatttgtggtatttatattatgtttagtagttaatagttagaaagttttaattccaaaataatattttaataattaaataaatattatgttcctttgtgatttgaaaaatatcctttgtgctatgtgatattagtatattttaccaagaagatgatatttgcattgcaccttaaaacaactaggattgctatttgatagaccatcttgaaggttgttcattggagtgatcttaccatatatattatgtggtttaacttttaagataaattttaaaaatattgatgttgagtgttgtcaaaagagacaagagttatatcatttatttttaggtaaaaaaactatttttaccaaaaaacttcattaatttaatataatgggagttgtccattgaagtgatcttgccacaatctagtttaattttcaaaattaattttatgtgaagtgttgttcaatataaacaatgatcaaatgattatttttctcatttttttttatttcttattagaaaaattatttttatttaaaaagtcattaatttaatataatatgggacctcctggataaattttagagttgtcaacaatagcgttttttttttaaaaaaaaaaatgtgataataaatcttaggtagatgatagagaaaataaataaaaaatattttaaaatgatatgtatgttttgacaattaaaatatataaataaacgcttaaataaaaaaaatggttttaatattatttattaaattaaaatgtatattctaaattctttcagaaaaaaacaaatgtatatcacataaataaataaatttttagtttcaaaataaataaataaattttgagcagttaatgtaccaaaaaaaaatatggaataattacataatgcatcattttttgtaaaatatttatatttttacgttcaaataatatttttgtacatttttacagtttttcaaaaaataatacgaaaacaatataaaat

SEQ ID NO: 53052 - DNA, 963 bp, Cannabis sativa
tttatatatttattttttgaaatgtagataccctagacaattaattatactagtttgaagaaatttttatgtcaatagttaatgtgatatacattaattggaaaaaatatataatgaattatgtactaaatatatttagacaaatctttaaaaactaatgtaagttatcctacatcaaaataacaaatcatgcaatcccatatggataaataaaattaaatttgtattcaaatcttcttatattagtatttgggatttgaaaatttggtatgcatattccaccacacattaccatatatttgtacttttacatgtgtacatgtgtatggtaatcataataaattgtgttttgaatgggagcgaagcatcaatctcttgaagctatctcaagtagttataagagagtgcatgtgtattagagatcttgagttcgagttgcagtttaagacagaataaaattatgaggctttaactttatatacaattttgtaagtatcacattaaaataaaaaaaattggtctcattcccacatcaacgtcttcttctgtgaaaggttcaagagcagtcttctgagagtggttcggttcggctccaattaatttactattattagtttaactccaattaatgtttttatggtgttagaattataaggagttcatttcttaattaattttaatgttgtgatcgtgtttatgtgttgaaactaatttagttttttcattagtcttgtctttcgacatggttctttagtcttgtcttttgacacagttttttagtctttttcttttagtttttctggttcgagtcttgtcttttgacatgagttgtatagctcagaattattatggtgttatggtggaaacattcaagaaggagaaaattggatgtgttcaacccgaaattgctgagataataggcattaaagaagcattgagttggattgcaactcattcgtggga

SEQ ID NO: 53053 - DNA, 2378 bp, Cannabis sativa
agatgatttattaatgttgactttttgtccagaagcttgttcatagctagcaagcagattaagcacattggtggcttcgaaatcattagctttgcaataaacatagctatcatctgcaaacaacatatgagatacaacaggagctcctctagccacacgacaaccagttatccaccttctttgtacaaaccgattgactagtgaagagaacccctcagcacaaatgagaaagagataaggcgacagtgggtcaccttggcgaatccctctacttggtataatcggccccattatattactaccatgagtaatgctatacttaaccgtggagacacaatacatgatcaatgaaacaattttctgattgaatcccatatgtagcatcatttgttcaagaaaaacccactccactctatcataggccttgctgagatcaagttttaaagccatatacccctcctttcccatcctctttcgtttaaggtaatgcattatctcaaacgaaatcatgatgttatcagaaattagtctacccgacaagaaagcactttggttttcagatatgaccgaaggtaaaattcctttaattctattagctagaactttagaaattaccttatataatacattacaaagcgagatcggtctaaggtcactcatagactcaggatgtttctttttaggaataagcacaatgttagtttcatttaattcagaactgaaagaacctgaatcaaagaaacccttaacttggttgataacatcactacttacgacatgccagaacttctgaaaaaatcccggagtcataccatcgaggccaggtgatttatccaggtgcatttgaaacagagccttctttacttcttcatctgaaattggctgaaggagacaatcattctgctcattcgaaaccacctgaggaatagagtttaccacttctctacaatcagtcgaggatgtagtgaacaaattttggaaataggcagtcataacctgggccaaatcactctcccaatccgaccatgtaccatcatcctttcgaagcttttgtatggagttatttcttcttctggagctagccatagcatggaagtatttagaattttggtccccttctcttaaccaaagttgcttcgatctttgacgccaaaaaatttcacgctgtaagagaacatcctgcaacttaacttcggcctccttgtatttctgaactgctaccgaatctctgcctttcttccaacatttcatatcagctttaacttctttaattcgatctctgaaatttccactgaaatctctcccccagacctgcaacttctccccacattgatgaatcttttgtgtaatcggccagtcaactccaccttcccaagtttctttgacaatttgtaaacacattggctcacggagccaagagttttcaaacttaaaacatcggttagcagtagtttttatagcattatctagcaacagcaacagaggacaatggtctgatgtagatacctctagattgagcagtttggcaatggggaacatatctaaccagttttgggacaccacgacacgatcaattctgacttcaatccacgcattagtacccctgcccttctcccacgtgaacggatagccagttaattccaagtcaatcaagccacaagcatccaaagtctcacaaaaaccttccactaaccagttgggatacggattacctccccttttatcagtttgggaggttacattatttagatccccaacaatgcaccagggaagagtggaacgatctttaagtgtcttcatgagagtccaagtgtttcttctcaaactcctattcggctccccataaagtccagtaagccgccaataacctttattcccacccaagatcgatgcatcaatataattctgaccaaatcccaacaagttaacatccccttcaactctccataacaacgctactccaccactcttaccttgagcatcgacagaaaaagcaccctcaaaattaattgcaactcgcaacttttctattgtttccttctttgacaaagtctcacatagaaaaactagattgggtttcttttggacaattaaatccttaatgaattgtgtagcccatgggttcccaagcccatggaaattccaggataaaacactcataatgattggtgggcctgcacaccaaggcccacctttacatcgtttttttggttctggttgacttcatcaacattatccaccatagtgtcatctatctcacgtgatcccctctgccccttattctctgtacgccttctcttattttctaaaattagcattgtttccttttctatttgacttactgatcttgcctcctcattagaatcttggtcattact

SEQ ID NO: 53054 - DNA, 837 bp, Cannabis sativa
gcatcaaccataagtattgtatgtctctgttcttcttgaggatccctatgtagaacttctgaattatttctatttctttgaataggaaggctactaaccttggctccatcacgagcagatacaacagttccataataactgtcaatccaattaacaatctgttgtggttgtcctaaatgttgaccatgagtaattttgtttctctccgtccatatggcccaagcactaataataattttctcaaacaaatccttttctaccacctcagcagcatataatatcacatttttaaaatcaattacctctctcacctcatgtagaaatgtaaactccagaagtttccaaatttcttgtgcaaagggacaccagaaaatagcatgagcattagactctcctccaaatccacataactcacatgaattattagaaactatttttcttttttccaatccaatacgcgttggcaagatttcatggaaacccctccacgcaaaatgtaaaattttcctgggtatttttaatccccagaattgcttccaccatgttgagaacacatcactagctgatgagggtaatgacttatccaaagtcatcgcagtgttatatccactgcctacagaataattaccatgattagtataatgccaaaaccacgcatcttcatgattgaatggactcaacgggatggaagaaatacattctgcatctggaggattaaagtgttgttgtattatggtaaaattccaacatccaggtgactcaataagatctgacactcttgccacctcatacgctggagctgagctaggaaggaaagaaggtggtcttggtaaccat

SEQ ID NO: 53055 - DNA, 1597 bp, Cannabis sativa
gtgagcttgtcaagcctttggtcaaacaatctgccacttgatctgaggatggtatgcatctcacttctagttcttttctaagcactttataccgaacaaagtgtatatcaatctcaatgtgttttgtccttgcatgaaaaacaggattagaagcaagggcacttgctcctaaattgtcgcaccaggtaacagcagttttaagagggaagccaatttctttcagcaatgattcaatccatgagattttagccgagacatgggccaaagcacgatactcagactcggtacttgatcttgacacaacatgttgctttttggaagacaagaaacaagtgtgttgccaagataaacacaatatcctgcaacagatttttgatcattagcccagtctgcatcggagaacccagtaatgtcgagttgagaatcagagctgatgtgaagacctttgttcatgcttcctttgagatatctcagaacgctttttgcaccactccagtgtgctgtcgtgggagcctttagaaactgactcaatttgttgacaacataggcaatatcaggacgagtatgacaaagatattgcagccctccaatgatgcttctataagctgtgatgtctctcaacggttctccatcattcagggacattggttttcctgctgtagctggtgtagggcacggcttgaggttgataaactttgttctttttaataaatcttcaatgtatttggtctgtgttatgtaaaggcctgtttcgtccctgtaaacttcaattcccaaaaaataatgtaaggaaccgagatctttcaatgtaaatttcctgtccagttcagcaataaaattattcactttcttgctattgttcccgattactattatatcatccacatagatcaaagctatgataatagtggaatcatgtataaagaagaagagtgaagtatcagctctagaatttttgaaattccagcttatcaatgttgtctttaacttgtcaaaccaagctctaggggcctgctttaggtcgtatagagacttgttcaatttgcaaaaaagtgttctttccctttctcttcaaatccttcaggttgtgccatgaaaacatcctcttcaagtgttccatttagaaaggcattatttatgtctaatttccttatatcccatcctttagaaactgctatagcaagaataattcttagtgttgaggctttaatgacaggactataagtctctttaaagtcaattcctggtctttgatgaaatcctttggcgcccagtcgtgccttgagcctttggagggttccatctgagttgaacttttctctaaacacccacttgcttccaattaaattctgaccaggtgcaggaggaacaagaacataagttttgttggtctttaaagctgtgatttcttcattcatagcattgttctagcctttgagagcaagaacttcagcaacacttgtcggttctctagagctggggttccaaacagcttgtccaatgaacacctttggcttaaaaatgccagccttggctctggtgatcatcgggtgtcctagagcagcagtaggttgttcaattgtagcagcagtaggag

SEQ ID NO: 53056 - DNA, 821 bp, Cannabis sativa
atgagaagaaacgatttatctttgagaactattagctcatggatgccaatttttatgatattgttagctattcttagtgtacgaataataatgagaatattgttaatagtcttgagtattttattaataagtaaagggcttgcattaataatattaagtcttggagtagtaacaatggtattattaggaatcaattcacgaccacccagaaagacttggacaggattactcaagcattttaagtgacaatgatgttgtgagaaccaaggctttacaggcttcctgaatggtattttttttccgtatttcaaatacttcgtacgataccaaataaattcttgatactttgcattataaagatgagatcttttgggagcaaaggtcgagagttgaatggcttagagctagaataaaaacactaagttttttcatcacaaggcttctgctagaagaaagaataatttcattagatctattacacttgaggatggttctgttgttaggagaacttctactattgtttcacattttgttaatttttatacttctttattttccactcaaggatgtgactatgcagctattatgatgttcttgttggtgccaatagttgtattttcccttctcaggtctccttacttgataatccttttcactgaggatgagattagggaggctttatttcatctctctagggataaagcttcagatttggacagtctgaatgctttcttttaccagaaaaattggtccactctcgggtttaatttctgtaaagctattttggttgtccttaacaataactcgaatatctctcttat

SEQ ID NO: 53057 - DNA, 1097 bp, Cannabis sativa
ttctctttgtttttctctcttttctctttgtttttcagtctcttctcttcgtttatcaaattcaagcctctcttttgtaaggcggatgtattctttcctatattattccttctcatcatcttttttctttctcttttcatccatttcgttcaccaaatcaataagattagcaatggtatcattttgtctcttcttcttctttgcagcttttttctcaattggtctctgcaaattaacatctatagatggtcatatagtaccttcatctaagaactctgacatatgactatctacaactattgatcttcttttacttttcacattgctactctctaactaaagattcttttccaatttggctgtttcgcaaaagactccaacaatgaaaaaagttgaatggagcggagtggttacttcgatagagctcttttgcttgctcaatttgaaaccaagtaaataaaatgttaaatacataataaaaagtctactatacaatgaaataaaatgatattgatcgtccaccttatcttgctcagaatatccacttggagaccttctttcgatttgagttaatgctccacaaaatttatttatagcaagttgaattgcagaccatctattcctaatagagcatgcagtacattcagagaatgtggatttttttgtttttctcataatattcatgaactctagcccaaaatctattttgattgatcaactccattgattgggtccaaactagtattaagccaagcaaaaactagtaagttgtcctcttctggactaaaatttcattttctagatttagtttttttagcactcccttcttcttggtttggtagagtatgtcaggattctaagtcattcaaagatgggagatactcatgatagctttcttccccctcttgtaatagtgtagtgaaggaattagctccatagaattgcgaatccatccttcaaaatctataaagatacattcatacattgttgtcaagtttattttaccaatttctaccataaattgaaaatttgtaataattattaactagacaaagacaaaaaaaaatactactttaacattgatgtgaagttatagt

SEQ ID NO: 53058 - DNA, 831 bp, Cannabis sativa
gtctggttccagttctggtgaggctattttttattgttaagtggctattggctgttgtttcatgcatgaattttaattccaaaatggtcaatttggtgggggaaaacatgtgttcttactcattgatactataagaaatgaatttgccaaaatttcattttgcaagtgtaatttacagtgtgttcaagcgactataaaaccagctcagagtgaaagatggtcatttgaacctatcgaaagatagcttcatggtcgttacttatacaaacaatagtattttaagcttgtatattgctggtggatttcttcacaggtgtgggagctatttcgatttggagtgtggcagtgggagttgcatgcatactcggttttgctggtgggtttgcactcaggccttatatccttcctcatgtaagtttcttcttgcatttcaatgcaatgataaattttctatttgcaattttgcatactggcataataaaaaccgtgttcgtttgtagacagggaggcatcaggatgcgcaatttcagcgggacatggaagctttgcctaacccatctggagaaacaagttcagatactctgcttcgccatcagaagcgcaactgctaactcctctttagtttgctcgctcttggaaaggctcttttggctaagcctatctcatatatctcttttatttagaatagattatctagtcccccaagtttccccaaaggaacacgtatctttgcttggtagcgacagtgtcgataatagtagcagcagtagcgagacaatgaagtcattaaagtatgacaatcaactgaaggatttgataagttttgacgaa

SEQ ID NO: 53059 - DNA, 553 bp, Cannabis sativa
tttgcattggatgtgtacgccactcactatatttaggttcaaccaagtatttatttattttgtaatcatcactctcacattgtgtttttttgtcatgtattggtgttggtcaagtcaataactatacttttacatacaataatatgcaagtaatatattgatggtttctcttgatgtcaacttaagtattcatataaaaaaaaacgtaattccctatttgtttaaataattgtcaatacctgatataagatgaattggtttatattacatatactttcctaccaatttcggtaattattctcaataaacattaatataaatatattttatgttcattaatttaaactttttcttatattttgaacatatatataatcttttttaataaaaaaaaaaaaaaatctttaccaaaatcaacaaaagaaaaaaaaaatatggtcataggaataagtggtgatttgaaactaagaagaggttcaagttttaatttctctcccctaatatcaaataaaaaaaaaaaagtataattattgattttcggacaatcatatag

SEQ ID NO: 53060 - DNA, 1116 bp, Cannabis sativa
attggacatggctcctagtcttggtctaagtctagtagagttccttcttgtagttggatataattgtaggatgtaaaagatgcatatatggagtttttaaactggatatcacattacatatgaattattggcatttatatataattgtgattttgggattggaataacatcttctattccgcttttgggatacctccctgacttatttttggattgagggacaagtactagcaatcaatctctgttacattaaaaaacaattcttttgagaaaaacaataataaattattttaatttgttcgaaataaggggaaaaaattattacaatcatatgatatatatagcttttaatttataatacttttaatgtaaataataacttagaaaatttacatccgttgaattaatatgatggtagaaacgagttaagaatcttttatttcagactagaaaacaaatcgcgctttgcatacggttgtattttgtttagtgataattaagtcatatatatcgtttaaataaattaaattagaattaagaaatatatatatgacaaatgataaatctatagaaaactaattatatgattttaaaacggttgttatcattatatttttattgtactcgttattacattcaaatctgatatcattaccgtatcttacttgtaattgtaaatattatttctaatagatttgtttagtacataaaataaattaaataatgagtttaactactcacttttatacataacttaagttgtaatttttttaacgtaattttttttctttataaatgaaatatatcaaataaaattcattaattaataatgaaaaaatagatagaattttatctaatgaactttttatttttttataatcatttaaccaaagagatatttttatttcaagaatgtagaagttcaatcttttcgagtgtcatttatcattttttttagggaatatactcatttagtatcctgtatttgctcgaaaaatatatttagtacttgtgttttcaataatacttatttagtactttgtattttgaaaatgtacatatttggtaccttaatgtatttgctcgaaaaacatatttagtacttgtgttttcaat

SEQ ID NO: 53061 - DNA, 2469 bp, Cannabis sativa
gccaatcttgctcacacaaaatcttaagctggtcgtggtcttttccttactcagcaaatccaacaggttatggatctggttaatctcaaagaggctctgccccacccttctctatgaacaatgctccaaatcctaggtactttcctcctggttcaagatctggtgcaccttccaatcgaggccaatttggaaatttttggggaggattatctcgaggtcgtggcgttaacactatctggggtcagaaaccacaatgccaactatgccacaagcttggacatatagtgcagcagtgtttctacaagttcgataagacctttatggacctgaatcttttcagaccactcaaggcaataacaacaccaacattgctgaagtccaagcctattattcttcacaagaagtggttaatgatctagattggtaccttgattcaggtgccacaaatcatcttacacctaatgaaacataggcacatagtagagaatggtttaaccctcctagcacaagctagcatgcctttaaaattttgggatgaaacatataggtcagttgtctttcttattaacagaattccctcaccccaactaaatcatctatcaccaatagagattctgtttaatgtcaaaccagcctattcatctaaaggtctttggatgcctatgttatcccaacttgagaccctataataaagtcaaattacaatataagtctcagccacgcacattcataggttatagtctttctcataaagcctacaaatgcctatccaaggaaggaagagtgtatagctctagagatgttctctttgatgaactcattttcccatatgctactgaggcagctcaaaattcaggtcaatacaacatgcctaaacatctttctgcagctattcccactgcaaattcatctcagagaaccactttacctttccctccttctggttttcatcatcctacacatactgcttctactcccgtttcacaagcacccctacccctacttctcaacctgtgctaactcagagcaatgatcctccaagtcatttacctgctgccattgctcctatcactagtgctacagttgcttcaaataactcttcacttgaacatgcaagcatcaacactacacatgcataattaaattcaaatgctctacaacttgctcacacaactacttctgttgtatttgattttgctgctgcagaaattccaattctacctgatgttgctcctactactagccatactgatgtagggacatctcaaacaactcctgttatttagcactcaatgacaactagaaaaaaatttggtgttcgaaaacccaaggtacttatggcttctctaactcatgcttctgtaaaaagttctttaaaagatgcaaaatggcttgttgttatgtctgtagagaacaatgcattgagaaaaaacaagacctatacccttgtcaatctgcctcccaacagagaacctataggctgcaaatgggtttttagagtgaaagaaaacaaagatggatcagttgacacgttaaaggctcgattagttgccaaggggtttcaccaacaagttggttttgattttcatgagactttcagcctagtgattaagcatgtaacaatccgtgttgtgctcacaatagctctatctaaaggatggactataagacaattggatgtcaataatgtattcctcaatggtgaccttaatgaggaaatttatatggtgcaaccaccagggtttgttgatcttgagcatccaaacaaagtttgcaagttacataaggctatctatggcctcaaacaagctcctcgagcttggtttgaaaagttatcatcagtcctactacaacttggattcacttcagcaaaaactgagcattccttattcaccttaatcacaccaacaagtgtcatctacattctcatctatgttgatgacatcctcataactggtagtgattcacaacaagtctcgaatctcatccaagctctcagctccaaattttccttaaaagatcttggtgtcatggattttttccttggaattcagataattcacacactagagggtatcattctgtctcaacaaaaatatatccaagatttactttgcaaagctgagggtgtcattttatactaatgcacatatataaccataaacactaattaaatcaccaataagctactaatatccatgtctaaatatgtgatcattacagatgccttcaagaaagtcatctatgcattgtaaattaatgctaaaatatagtaatgcattgtaaatttaacattatagaaatacggttagttaattaaatattagatcgatattgtgtcaaaattaattatgaaagaaaagtcccgttttaaatttcaccctaggcccctcaccagcttgagatgaccttgatctcagccatgctcaccaagtgaccatctcggccaagttcatgcaagcatcatct

SEQ ID NO: 53062 - DNA, 3990 bp, Cannabis sativa
taatcatttatgttatatataataaaaactaaaaaataaaaaataaaaaaataaaagccaaaatcgggttagtcgggttattcggtttgaatgggcgggttggacctatttttcaacccgcccaattaacagattggcagtttgtaattttttcgagttatttcagtttgtaatttttatcgattttttcggttcagtttggacggtttacaaatttttttgtacaaccatagtaggactttgccatatgatttagattctatatgtcctaataagaatatagattgaatttataatatgctatcacatgaaattaaagataactaaattttattttgtcataggaagttgaggcaattgaaattaaatgccttatatttctaaacattgttaattgcctttttgtttatttattttccttttattaatcattattcaaattatttgttgccaaatagaaattaagattcaattatttggtacttaactacaatttttgtgggatcaactttcacgtgagtttattacttgaaaacgatatgtatacttacgtgttggattttcacaacagcgtctacacatacagcgttggttacaccaatgaacacaagtagtgaatgtttttgcttaatacttcatagtaaatatatattttttgaaaaaaattatactatttatttaattatattatatatgataatttctattataacaattaaaattgatataactaattataggtgcaaattcagtaactttaatatagtatatataaaaagtacctaatatatacataatttttgggatggaagttccgtacgtacaacgaaaaatagggtcacgcggtccatttgtccgtacttagaaggtacataatgaaataattaagttgtgtctttgtatttactccctttattaatacttaatatcgtttttataagcccacgttttcctttgaacttttaataaataagtgggttattcctttagatgtttctatggtgtggtaagtataaattcgtctccaaagaaggaacaaatcaaatatatatctttagctaaaaaaaaagtacaagtttgtcaaagtgatgatcccatgaaataatgaataaagccccgcctaaaggtctcttggtcttgctagtggtccaatttgatgtgctatttattaggtaaggtttattgaatgattttataattactttttatttttatttttgagcacatttaaaatagccgagtagacctatgaaggttcccttgtacattaaagtgtcacataatatattatatatgagaaatgattagtagaactctgcaccgactgcccatctcaatttaatatatgttgcacttttcccttttcttcgtacgtaatttataaaaactcctattccaaaaaagtagaaaaatttatagagaggaaaatgaaagtaagttattccaattccaaaagtgaaattaaattaaaaaaggggaatttagaagaaggaaagtcaatatttttgaaaatctctagacaataatctttatgcaaagggagaaaaaaatgaaagaaagaagaaaattttcagacttgttgaccttattaatttttatgcaaattaatgatgattgctacatcccaacatccgtgagacgatatactttacaaattaattatatattgtataattataatttatgttcatatgtacaaagatacatatatatgtatattagttcttaaatttgaatgatgtaactaaaccctcatattctattagatacgctagctagggatgaagattttggagagtatatggattttgtaatatactcgctcgtgtggattcaattataaatcacagccgttctttttttataattttatattagatatgcaaaacaaacaatatcctttaacaaattattttcaaccaaaagaatttaaatttaattagtacacaaaccttagtttttgttcaaatgtccatttctttcaatgtcaatagaaaatttatcttcccaaagttcatttctaataaaatttaatcaattttctttctgaaacagtcttatcaaattagtgtgaccagtcttctaagatgttatctaaaatgaatatagaaaaaaaaaaattgaactactattaagaaatttaatttattagtgttgtcacttcaaccaataaatctctatcatatattgattttgtcttttttagtgttgataacccatgataccttctccactactacctagtgagtctagccaactcggtgtgctttgactcaccagaatatatctgatgattctcaaagtacgatcgaatatatttttcttcccttttggcttcgaattttttggttagacttttttggtattaatttctacaatataattaaacataatagctaagtgggaaattaaaggaaccaaccttttgacaacttgacacacatacacatatgtatgtatcttatcaaaaggacaaatgtatgcaggtttcctggggaataacatttcattaccgaccaataatttgacccattcgacttattataagtccaataattcggtggatatatatatatatatatatattacaataattacaaaaattttaacatttcaatattccaatataaatacaaagttatcaaactttaatttaatgcaattaacacgtgttgtagttcgatgagtttagttttcgatctcaaaaaattgatgggcatagacaataattatactgtgctgttcttgaactcgagggaatttatatttttgggacacatatattgattgcattacacctttacttgttttattttgtttccctaataattagaggaatgtggtcctttgttttggtcggtgattgagttggtttaaattcatctacccacatattaataaagagggttgttaatctcttcttctttttcttctggctaacttgattattattctagtgtagaaactaattaattgtaaggtttgttggtaacgtaaatgaaaatgatgtatccatcatattccatattttattttcgaaaataatattattggattgtgtagagttattaagggagtacttttgtttttatatcaattattttgagaaatattaaagccatctaacatggttttatgtgttaatattgttattagtctaactaaatatcaagtctcatataatttaatataataatttttaaggagtattgttagtcaatcacaaaataaaatgtctaaaaatactaactattagtgcttaatagcaatgttctttattctttatctactttgtataaatcagattcagatgcatatatggccagttgaatatggtatatgtagtagtgcaaacttttttttttaagtgtatcgtaatagtattttataatcaattaatagcttaaaaattttaaattcaaacccataatttctctattttttttatccctccattactactaagctagccccttgacactttaactttttatatcgtcaaaagagtttttgaattatgagaggatatttatctagatcatgataatgacgagctagctagatgacataagtaataagtgtataatttggttcatatttataaaagctatagcataaatattttttatttatttactttaatatttcattcggcagattaagtatgaaatgatatatttttgtcgcagttgttactactatttcattaacaattagtttagactatcaagatacacctgttactctattggtccagatatttttttaaaaaatattagataataaaatcaattaatattattttaagaataattactttatatatatttattttttaattttttttttaaatttacgaattagaattttaaaatgatttctccggtaacttaagttgttatacgatttttagttgcgatttaaattttcgctagttgtaatatgaatttatatgtagaattatgtaatatatatatattttaaaatata

SEQ ID NO: 53063 - DNA, 1666 bp, Cannabis sativa
gaataggcccctttgccaactatgtgggagaagtggccacactgtgacaaaatgctttcacaggtttgatatcaactatactggttctcagcccaactaaaatctctcctaatctcaaaccagtgatccctctccttaagccaatctcactcaaaccagtctcatgcctgatctgtccaatgcatggtatcttgacagtggagccacacatcatatgacaaatgattcacaaaatctcaccacctctgctgactacaatggaaaaaccaaagtggttgtaggtaatggtttctctttacctattcatcacataggcaatagttctgttcccactaaatttcctgcccattctctagtataacaagatatattgcatgtgcctagtctaaccaagaatctattaagcatatctcaatttactaaagacaatatattattcttgagtttgatgattcttcttgtgttataaaagataagaaaaccaagcaatctcttcttcacggtaatctcagtgatggcctgtacaaacttcaagtttcacatccaggccattccaagaaatctgtgcccaagtccctaccttgtgctctcaatcataccattacaagcaaccctgttcttaacaagtccaaagctgctacagtgtggcatcatcgacttagccacccctctcactcaattctcaataaagttctttctactgtttgtccaaatattagatgtaatgccaactcattttgtaatgcttgtcaaattggcaagctacattagttcagttttaaaaaaatattaaataaaactacaatgccttttgaattagtcttaactgatgtttggggcccttccttttacactttcaatgatggttataagtattatgttagtttcattgatgatttcactaggttcacttggttatttcccatgaaatccaaatctgaagtcaaatccatctttactcaatttaatgtctatgttgaaagggttttccatttaaaatcaaaagtgttcaatcctatttagggaaagaatatgaacctttgtacaatatgttcaaagtaatgggaatagttcaagaaactcttgtccccacactcatcaacaataaggtcgtcttaaaagaaaacacagacttgttgttgacatgggactcacacttcttgctcagaccaatatcctcttgcaatactggtgggaagccttcacttctacaacttatttaatcaataggctcccacccccatcctaaacctcctttcaccctatgaaaaattattttctcaaaagcctgattacaatcttttaaaagtctttggatgcttatcaccctttattaagaccatatgagcaccacaaagtgtcatttcaatccactaaatgtctattcatatggtgttgcctttcctccaaaggctataggtgcctacacccaagtggaagagtctatgtggcaagaagtgtcacattcaatgaaaccgaattcccttaccaagaattgttttctaaagcctccaacaatagtgcacaccatactcctagagtcatagaccatattgcctttcaagtccccactattgttcccataaatcgtgccaatactccaaccactcccactaacagcatcactgcctcaaactaatcaactataccacctcagttgtctcaa

SEQ ID NO: 53064 - DNA, 2025 bp, Cannabis sativa
  modified_base (689)..(697): a, c, t, g, unknown or other
tcaaagtttgaaggttcaaactttgaacggatttctcggccacctccggtgtccgtttgacgagtcgtcttcaccatcagacttagctcgtcgagaaaaaaaaatctacactaagtcatttcgcccaactcactattttgtccagtgatgtttttgtagctccgcccttttcgggcgactttccggcgatatcgtgtacttttttcacaaaacagttggcatgggtgtgatctactcgtttaggttgccattttaatatatactacccctatttttggcgacgtttctggtacactaattttaccgctaccaatagttaatatgcattgcttaagtgaggtttcagaactctaaactttaaatatagtcatattatatgtcgttggacttgatttagaatgtagaatgcaatgattacaattatttagctatagctatttgatggtatatgtgagattgatatctaagattggactaaacaattggatgtcgggacttgagagcttaaaattgccttttggacaaagtttaacaacttgggagaggtagggactcaactcgattattggacttgatttttatatgtgttgaataacattaaatattttctaatttttatgatttgcaaattgtttaaaaaattaaaaatttaatctgcacatttttctagactattctggggcactgannnnnnnnnatatttttgtacaaatatttatgcaggttataatttttgggtttattcaaaatacagctgttatgctgccaaattttttagaaaatgaaaaggaatatatttttttgttattcttattatttgtctgttttgtttatactgatgaaagtcatgttgatcatgatttgtgcataatgttgtttcacgacctagtctctatgtcatcataggtagattaggtgtgcactcacctgtaggtgaaagacctagaatctgtacagggagtgaattgaatctgagtcccactattatggtggttatcaagtgcgactacccgattttggatgtcattttctatgattggtattgagagcgaggggtctaatggacgctgtaatatgtatttgacgcttaattttgtgataatttgtgatctctctactttgtttatacattttgataatggtgataagatattttatttttaaaagctaaccatgcagtaattttattaaatcaatggtcctttgatattagttattttcctactgaactttataagctcaccccctattttctctcatttcaggaacggatcagttttatgctagtagaggaggatggtaccactgagtaagaaagtcgttattaatttagtcttattctacttattaaactttcaatgaaactaattttatatttaagcgggaatggatggtctagatgacttaaattagctaagtgtcagttaaaaatgaggaatgatggatgctagatattatttttgtattttatttacctattaaatctatctatttggcgattacataactatagagatattattgttcttttatattaatgagcggtcctcgttttattactaatattttttttatcgatataagagttaatctattatttttaaataagtattttgtgatattaattaaaggacgatttataagtattatctttctacaagggtcaaagtgtgacctttgaccacccaagttatagatattacatatctgccacgtcctaagactcgggttgtgacacccgtcgttgcccctacactatcagacaaagcccaatagccccagatacttctctcactctcatctctatctctttctagatctcacaccctccctctctctcatctcttcctcagttttggtggtctcggatctctctctcaagtggtctcggctccacaaaccttattttttattattattgtagcaaggaaatgttagtggttgtttgacttgaaactctggtggtgattcagggatggaaggggtgcggtggttttggtgctcttttaatttatgatgttgtgc

SEQ ID NO: 53065 - DNA, 1267 bp, Cannabis sativa
tagctactgttttgttagggtttcgattggaattagtttctgctagttaggtttgatattctaagcttgattaaactattattgttggctgattgtgagtttgagcaagcttgagttcttggaactcaacttggcttaactatggaataatgtgttttagtgtgttattcttgtttttttttttcagttggagtttgtcttggaatgatattacaggtctcctggagaatatggtagaatttgggattgaattggtggtattttcgtagagtttggtttttcctgcaggagaaccggttaatcggttttacagaactggttaaccgattcccaaggcaggccgaaaaaccggttcaccagtttgggaatttcagtctgtcgattcttgcagggccagaactctagtttccatatttttctcagagtttagtgtagtattaggttgtttttctttaaggttacccttggttataagtttaaggtttcgagaaaagtctactcaaagttatttactaatttacgtatatgtgactagggcatccattcaatgcgagattttccattcaggtcgaccaactcacttaaattcggagacaagataagattagcatagaacgtattatatatgcatgttgtgtttgtgattgtatatgttttgggtgatatcatagcgacacaaccattgtgtcggtttggcagtacaggtaccgtactggtttaagagtgataatcaccccagaaagtattaattggcgcaatcgtagcggcacaaccattgtgtcagttcgacagtacaaacaccgatcgtactggttaagagtgatatcttggccaattgaactttcgggtgctattgatcctatcatagcggtataaatatagtgtcggtcccgcagtgcaattatagtgctggtagtgagtgatatcatggtcaatagtaccaactgttaagaacgttcttaaatatctgatagccttgcaaataggtgtatgagcgcctagattcaaatcgatattatagtatctgttgtatgtttttcttactgggtcattttactcacatattctactttcatgtgtaggtaatgaaaatgaagaaactgaataggcgtgaggttctgagcttgggtgatgattgtacatgtcgagacggcgtgacttggagtgttcggtctcgagatatcttgagatatattttgtagttactgtgcgacaagtaggggtgttcataaaatagccgattcaatccaatccacacgatccaatc

SEQ ID NO: 53066 - DNA, 653 bp, Cannabis sativa
tggaggacgcgcaatgaactggtacacaataattccccccagatgtgatgaaatgtattgacaatatttgtacttcttttgcagagttacatgattctcttttgactacccgacaccgatcttgagggaaatttggaaccctcctccacaggattggataaaactgaattgtgatgttagagtgggcttagagagcatgtgcatagctggtgtagcaaggaatcatctgggaaaggtgattcgggttgacacgtctcgactggatttcttagatgcattatgtggagaaactgcgacctgctgtttggctgtttcgatggcaatggatttagggtataagtatattattgtggagagtgactcgaggctagctatcaatgcgctcaatgggaaggtaacccattgggctcttgagaactatgtatctttttgtattaagtcttcttgtgcttttaatagttgtaatttttctcatgccagtaggacttgtaactttgttgcctataatatggctaagtgggttttctcccactaactgtatggctctattctgatctcctcgctaccgatgaatctattttgtaacgaccacgaggtctaactgttttatttgtttaatgaatattatcaagcttatttaaaaaaaaaaaaaa

SEQ ID NO: 53067 - DNA, 953 bp, Cannabis sativa
ccatgagtcaaccatattgctctgttgcgttgtttccaaaagattttctccttagccagatgcccgttaagatctctttctttctctttcaggcaagaaaagacatgagttgtttggtctcgcgataacttttctacatcttttttcaactcttttattttagcttgattgtcccttctttgctttttattccattgttccagtaagttaccacatagatgaatcctctccccaaagtctgtagccgatccaataatagtgccttgttgccagttatctttgataatttggtgacattcatctttatccgcccaagccttttcgtagtggaacctatatccccatctttgattagtctcctccttattcggaatagaattaaaggtcatgaatagcggacaatgatcagaacaccacctacttaaatgtttcactttggctactgcatatatcttccaccacttgttattcaccatcacccggtcaagacgttcaaacaccatattcgttgtccttccattgcaccatgtgaacttgctgccctccacttctagttctcgaaaagcacacttgtctatggtattattaaaattcttcattatgtaccccagtttccctcctccgccaagtttctcatgaatgcctctaatttcgttgaagtcaccaccacaaagccatggcccagtgttgtttctagcaagtcttttcagaagtgtcaagagtgtctcctttgagatggatcagggtccccatagaatcccgtaaagcgccaattaagatcatcctccgtattgatccaagcatcaatatggtaatcgttatacgatgttaattgaaccgtcaaaggagccttcgaaaggagggccagccccccactttttcctttaacatccacacaaaaacacccctcaaaacccaatcgaatacggatcgactccatataatgacatttc

SEQ ID NO: 53068 - DNA, 706 bp, Cannabis sativa
attgcgaatggtacttaggacttaattaactaaccttcaagaaatatttgaaaaatatatatatatatatatttaatttgaaatattttattaaatatgtaattatatgaatattagagtaagattatagtcttactggagtcaattatgagataaatagtgacttctgagtaaatgaataattaagcgtaatttattaattacaaagattttattaaaatatataagtattatatatactacttttaaaataaatatttttgtttctggcgaccatagaaactcgataaaatagccaaggatgtcacgacggtaatagaatgagttttattgagattgtatcgaattgttttagtattcttgagttgtcagattattcagggtagatagcattgaccaaaatacccttagagtataaactaacaagtgtttaattgagggtaaaatagtcatagtgttaagatttattattttattgtatttgatattctagtaagccataagaaatagaatttaatttattaaagttttattagattactattattagaatagtaataaatgataaggttattagcaccacattgaatcgctcaaacctgatttatatttaatattaatttgtaaatagcggcataagtacctaaagttttatgtttgtaaacggcataaacccaatgtttatttttagcggcataagtatcca

SEQ ID NO: 53069 - DNA, 890 bp, Cannabis sativa
ctgtagaaaaattcaaagatataatttaatatatattaaaatttaaaaagtgaaaatcttaattaacctttttaaaaaatattactaattacttgcaaaacaccataacaatactcttccacctaaccaacccatattaaaaccttttcttctcttgggcaagaatctcagtacacatgtgtcagagccatgtaatataattgtaaaatattgtatatctaagctatttactacatttttagaaagaaaagggaagaagctatttactacatggaataatcaatcagagccgttggattcatctcaaaaaaagagtatgaatctattgctattaatatagagtcattacatggcaaagagtgattggttaattgggcgtgtggagtgagcatgggtccggaccacccgaaccactttattcgggtctgacacgtggtttgtggttctagtgcgtgtgttaggtaagtgttcaacatttgtacgagtgtgtccttcttgtgcccaaaacccttcatttcctatcatacaaaaataatcaaataaaattgtgtgttttgttagacaagaaaaaaaccactccaatggagttggggcattagggtttgtttggggtttacatcatttgtttttttctttttggcacaattgatccaagttcttaaaatttaagatacgtaacgcattactcttatttgtactgagaataacataatttttatttttttgaatttatttaaggatttagatcgtgtttttagtttttcagactcgaaatagataaaatattttgtttccactattaattaactttgtcttttaattcgttttctggtttataagaattttatttttcatgaaaaaagagagcatataattataaatttattcta

SEQ ID NO: 53070 - DNA, 1136 bp, Cannabis sativa
tttttttttttttttaaaggaactagtttttatgtttcaatttatattgttttaggttgtatcggtaactgatttccctatttagttattatttttgttattttacataattggctctaacaatctaattttcaattcggttgatttaaataattgatttctcagttatagttttaactagttgattattgtaactggcttcagtgtgttaaatgtctaacactagtcacaactccaatgtctaactctagtgactttttggtaatgaaaacaactctaacgtcttttttgatgatttttcgacgacgataacaacttcgacgaatattttaattctgcggcgaatattttattttaatggataatgactattttgtgtagtgtactgcattgatagttaagtcttggagctttattttaagaagtttgtaactagttttattttggtattgtatttaatttgttcaatattccatacaatatatagaatacaaacatgtaaaattaatatataatttttggcatctttaactatatttttttttcattaagatagcaactctagcagaatatgcccttattttattttctacttcttttgcgactaatattatgctttagtggacattgaatattttgatagtgagttgatggtctagtattggagtttctcaaattgtaattggttttaatattaatattatgttgatattagttttggtaataggttgatgattaagtttttaagcttataagaaacatataaaatttatatgaattttggtgtttgtatagctgaattttttcttaaaaaaatagttttgattatacaaaagaaattattttattaatttattgtcttactaaaagtatattgatattattttagtttttggatgtttgtttttaaataagcttttatagttataatatacttgtataaataactgattattttatatgataaaaaaaaatcacaattttataatttttatgtattcattatgattttttctatattttaagtttttttttttttaaaaaaatattagtataattaagttttgtatgttatatatatatatctttatatattaaaagtgcctatctaacgacatttcttggtttaacagaat

SEQ ID NO: 53071 - DNA, 1752 bp, Cannabis sativa
tcttttctctcagttcaatgaaattttcatctccttttatctatttcctttaattttgaactcaaaatctagcgatctgagctttggtaggagcgagataacaaatctttgaagatggaaagcttaaggtattgtttaatttcattttaagcttagaacgattagttttatataagggttacgtgaattatgaaaattctgactttatagaattgttctttcgtagctatgggactagtttcgatgtttacttgttgaatttgaggtgattttgagttagaaatcgagtttgaaactttttaaagcttagtccgaacattaatgacattttttatttaagggctcgattttaatttttgttatgtaaggatggcaatatttatggtatatatgtaacctgtgaagtttggagtaattttgataagttttggtagtgtttcggtgagtgtaaaatttgggatttttgagtttcaccgtttttagaaattcctaggagatcagaaatcatatttttgtcataacttttcactcggtgtccatttcagatgttctatataccgtttcgaagcttgacctcatccaaggaacaattggaagagagagtttttgtactactgagaatgcttgagacaccacactatttgaggtactagtctatctagtatgaaagcgacctgacattctcaaactaatggatctgatgaaattcaaaactgcagggaactcactataaatagggcctttgtggtaattataaaggcgacttttttttagaaaaaaagatcaatgagatagtattttttttatgagagtttaagagtctaagatcttttgttgattattcttccattaaaatctctaaatattacatttagattttaatattttgttgacgagttctcatcgtcaataaccacttatgtatatgactaaaattaaatccattttagaagtttgttcttattcttgtatctccgatataataattaaatatgtattttataatttatactataattaaaatgtataatttttcgttgattgttcttccattaaaatctttaaatattatatttggttttttaatatttcgctgataagttctcaccgttaataatcacttatgtatataactaaaattaaatcgattttagaagtttgttcttatttttgtatctccgatataataattaaatatatattttgcaatttgcactacaattaaaatgtaaaaattaatatatatatatatatttgacaattatttatgaaatagaaattaaacatataaaggtataaatgaaatgaagcaaaaagaattagacacatgtattatatgtgctagcctcacttaataattatataatatatatacatcttcttataaactatgattaatattttttataaaaaaaaaattaatatatataataaatattataattatatataatcttaattaattaattacataattaataattaaacattttatatattatatttaaattcgtattcaattcttaataattataaattaaaattttaaatataacaatttattaaatcgacaccaatttatcataattaacacataactctatatctctcttgttttctcagtttagccaaacttatcgaaaagttctcaaatatgacaaataatttttgaattttaattgattaaaaaaattaattaattgagagacattaaggtgatattatcctaagtattgagggaactatgggcat

SEQ ID NO: 53072 - DNA, 2382 bp, Cannabis sativa
cggaagtatctgtttggatcggcaacactttggctcacaacagatcacaaacggttttttggaccggtggcaatttgggctcacaacggatcacaagtggctctgagtggagctgaaatttgattattttgcttgtgctttatttttttacctttttagttttttttttaccaccttgaggacaaggtgattttgaaaaggtggagagtgttacataagaagatataaggggttaatagtaaattgtatagttagtattcttatttagagtttggcaatgattcttcacctgatacttttgtattagatttgatctaagctagagaaaatttgttgtgaaagcttgtttttgatcttctggtcagatggcttatggtcggaacatattgctttagttattaattggagcttgattgtacaaagattgagcttgatcaaatagtaaaataatttggtcatataaacaatgccctttaattagtgttatgaattttccatttaattggatgggaaggtatttttgttattactttagtgcattaaattaaatgtgtatcgaagtactaatatttgggttgcatgatgaactctttttcattgtaaagcaattaatggattttaaaagtggacatttctttgcaggctagaaattaagcatgtttggcaaacttataatgaagttcatgattgtgtgataaaatttaaaaatgtcttccggagttgccatttcagagaaataagtctttatgtaaactctttgatttttaaccacttgaggctaactcaagtagctataggagggtgtgtgtgtgttggaggtcctgggttcgagtttcagattatgcatggttgtaatatataaacgcttaaataataaaaaaaaaaaaaaacttgtttgatttttaatttatatatatgaaaagaaaaatttgttgtcccaactcgttcaacacaataaaaatgtgttctttcttgattacagggattgaagggagaagacaaatgtagttttatggtgccaattgctatgaatggattaatattatttaacaagcaatgaaaatcagaagtaagctcttgttaagagagtaatcctttaactactaggagtgagtctgtctcaatgaaatgcacaggtagttgaagttctcttagtcattggagattatgcataagagccaacgcttccatcacttgaggagagaaacaaccgcagtaacgagcagccatagtagccacaacatcaccataactattccgaagaacaactccaaacccagaggttttcaaaatagcatcaacggctgcatcagtattcaatttcagtcggcttgaaggaggatttagccaaggggcatctttagtagcagcagaagagcagatggtttcaacagttggtctaaattgtacgaaatttcgtataaaagtccagtagaagtctaactaatacaacagtttatattaaatatatatttcaaacatccatctattaatcaaacaaatgtgccatgtatctatatagtcaacaacatcgtctcattaccaaactggggaaacccatcgactcatcctagtttgcttctactaatctggaccgttaaacaatcggtagagccttgttacagatgatataaaccggttaactaatactatcacctcatcaataccaaatttgtaatgctatgctatattttagtatttttataaattaatgcttctctaataatttgtactagaaaaattaggtcaagtttagcattataatatatacattttcttttgtgtttataactatttagcataaccttagacctttttttcttctaatttttattattataaaattgtcattaatatttttaaaaagatattctaataattattaataataattaatttataacattacaaaatttgctaaatgtaacatttactatttttaaatcaaatttagcacagtttcttttaggaccgtgatgtactatccaccaacctcttatttatttattttcttttattttttattttttaattttatctccttattcctacccaccaaccccatttcctgtcaacattttaaaatgctgtttggatagcccaactttagtttaattttaaacccactcactccctcacccacctaaccgaaaagcccaaccaaacagaattgaccaaaactccaacaccgccattggcattgtcatctcgcatggccaattcggttcagagttgctcctcaatcgtcgctcgttccggttttagtaaccgatctctcgtggccgattcgggacctgatcagactcgctgcttcagatctttatcttttccttatcagctcgctggccttcctctcaagtaactttcttttcctcctcccct

SEQ ID NO: 53073 - DNA, 882 bp, Cannabis sativa
  modified_base (832)..(842): a, c, t, g, unknown or other
taagtatgatcttctgacttttttatttgttgagattgtaacatgtgcatatagtattgttcagttgagaccctgctaagttataagttatgtagaaaatcttgaattaaaattgcatttggataggtaaaacttgttattcccaaattcaagaaaaatttctctaggaattttggtaagaaggccataaatttgtcatcggattgacagtgagaaataaacactttcatcatattgtgctctcgaaagggcaactcttctcaaaatctcaaaaagtgctgagttggaatttcattttaagtaagaattattgttgtttccgatccaactactatctatgtatgattaatttagatctgaccaactatccatcctacctttaccttcttgacattcaatttttgtctttcgatcctctttcctattacttgaaaaatatgagtcgctagcttaaacttcttcaaaataacaaagaaaatatagtagaaataatttctatattttatttctttcactcaaaaaaaaaaaaaaaacttatattttatttctataaatagcttactccttatgtcaaggagcttaatgcctataattgtgccaagttgttgaataatttcacatcatttaaaaatataaaattatattctatctctcttgcatatcatttttgataatcttatttgtactaagtactttaataataaatactctataaataggatacccaaactaaattttagcatcaatgttactttttagtttatcatcgaaacgaatgttgtggtaaacaatagcataagggctcgtttggaacgccgtattaagtcgtatnnnnnnnnnnngtattatattgaattgaattataaatcatatttttatata

SEQ ID NO: 53074 - DNA, 580 bp, Cannabis sativa
ctggaaataaatattgtgtaaaatggacaattaatcattttctaaatgcaatatttgatctttggttttatcagatgatgtccctgggcagaaaacgatttcggaaacatttccagctcatgattagaattctcatggcacttttgtttcttggttttatttcagtcatgactgtcttatttgtagtatgtggccttactctttcagatttatttgctgctatcctttctttcttgcccacagggtaggccattgttcttgtaagtacctttttcatgtcatgtttttcaaattttaataaaggaaggaaccagtaagagtttatgaatacataatgggactcataatcttcattcctacagcaattttgtcatggttcctattgtatcagagttccagactcgcttgctctttaaccaagctttcagtagacgcctccaaatttttatgattcttgccggaagaaaagataaaacgaaaaccaaatagttttctacttttaaattttttttttatgatattccatataattattgtgtaaattatgttttcttcacacaatgttttcattctcctcttt

SEQ ID NO: 53075 - DNA, 796 bp, Cannabis sativa
ataaagtagcactaaaaccataagaaaagagcaacaagtgaccacggccattggaaatggcagtactctccagtcttggagtcctgtgccataggcaatggtagtgctctccggctttggagacctgtgccataggcaatggcagtgctctccgaccttggagacctgtgccatagaaaatggcagtgctctccagccttggagacatgtgccataggcaatggaagtgctctccagctttggagacctgtgccataggaaatggcagtgctctcaagccttggagacctgtgccctaggcaatggcagtgctctctagccttggagacctgtgccctaggcaatggcagtgctctccagctttggagacatgtgccataggaaatggcagtgatctccagttttggagaccttttccatgagaatggcacaggtcacttctcacaaactaagggatgaaaattgttcgagtgggtttccacgacattaaggagtaagaaaaaagtgaggaaagtcgtttccggcctaggagtcgccttgggtaaccagttccaagagaatggcagtgctctccaaattggtgaccagtgccatcgtgaaatggcacaggtcggttaccacaccaggaagaggaatttattgaccaagttatattttcaacaaccatgtaccaaatacgagagatatcacccatgacttctcacatgccatgggtgacctgtgccattatccggccccaactggtagcagtggtcaccttttagggtctcagacgtcaaaatgaggtttttgggtc

SEQ ID NO: 53076 - DNA, 774 bp, Cannabis sativa
taacctgctattacaggttaaaaaaaaatgtaaccatatggttacaataaaaatgtaaccactgaatagttaccctaaccgttattttcaaatttcatactacaaatctaacactttggatttgtcttaggcttttctcttttctctaataaggaaaagataagaaattaattaccaaaaaatgagaaagaatattaggagaataatgtgttagcccatattattgaaaaacaagcactcaaatgaaaatagcactgactagagatacgaggaatcatgaaagaatattcgttcatctacactatattatttaaagaaaaaaagtttttaccatacaaaacaaaaattactttcataaatcataactaaggaaaaaataaaacactcaattaaaataagatgatagtcatgtatacaaagatatcgataagaattatttaaataattaagatacgaaaagaaagaaaaaaataaataaccataacttattttttctacaatgagaatttacttcaaattatcaaaatgggtaagagttattttaaaatttaatattacatattctatcttttttttttttcctctccaatgaaaattgtactatataagacaaggaatacaaagaatcataagataatattcgggtttatagtagatataaatgatatttcctaaatttcaattatgttaataatgttttttttccaaaatttaagaccctataacagttggttttccttttttattttatatttttatgaatagaaccagttt

SEQ ID NO: 53077 - DNA, 973 bp, Cannabis sativa
  modified_base (914)..(917): a, c, t, g, unknown or other
aaaaagtaaattctactacattttccatatttatgaaaaaaccccttataattattagaaataatatacatctatttttagctttaaaaagtattctcatgattaggtatggccttgggtaaattaaaaaatacctcttttatttatcaattaaccaaatctacctctaaattatatttaattgagacatatctctttttatatgtactgtacccaaaataccatagcataagggaatcacatgtaaagtatcttgaagtgacagggaaaaaattgatatagtatttaaaaaaagaagcgaaaatgattaacttttaaaaagagggtaaaaataaaataggacaataaaaaaagagtatagagtctagtcgtgttaggcctatgtttagagcccacttagtccagagggccaaaaaaaatcttttccttttaaaatattagcgataagttgaataatacatttttttttttttttttgtattcattaatcaaaaataccatcatgttatattttattaaaatatacccacttttgtgagtgggttgcccaatatacattcaccatctactaaagtttagcatataatttaccttaatctaaagggtataatggagacatcatttataaaagtgggtatatcttaaaaaatataaaaataaaagtaaaaactaaaataagtaaaataaagtgggtatacaatgtaatttccttaaatatttatataatttttttttgctgattgtaaaaaataccacattttttaaataagggcccaaaaataattattttcctatgatccactaaattttagaaccgacctgctcttggtgtgataatagttatacgctaatagtttcatacttctcctcaagttcaaattctactttcccaatatatatatctattctatatnnnntgtgcctatataacagaattcttagtttttgataaattcatgggtgactttttatt

SEQ ID NO: 53078 - DNA, 1209 bp, Cannabis sativa
  modified_base (27)..(44): a, c, t, g, unknown or other
gggattgcacagcttacccggtatttnnnnnnnnnnnnnnnnnnactactgactgtcacaataaaataagcattgttatcagactctaaaatatttagaccactataaaattacatcctataaaattataaataattagtaattttctcaaatctttattcaagtaaaatcctcatttatttgtttaatcttggtacccattcctaccaaagccagctttgtcttttgtctatttctagctatggtagtaagtggatatgctacccttctagacctagtaatatcatcctttaataatgaaattgtctcattattaaaataataattattattataatggcaaatggttaaaacaaaatgttcaatttatattaaaagaaattaaagtttaacatgggtctaaatattataataatcacaaaattaataatattgaataaaattagataaaaatttctaaattcaacaatcttaataatttttttgaaaaattttgacaattaaaaaagttcaaaattataatttaatatatattaaaatttaaaattaaaaaaaaaaacacaacaaaggaaccatacaagaatatacacaaatcaaatcaatccatataaaaaataatgaacccatataccagaatcatgatatttgatatacaattagcttacaaacactaaacaaaatcaatatttctatcgattcaaaaataaaactaagctaagcatatatcaaatttacagtattgatcataatcagatttcgacattaattaatcataataaatttatagtcaaaatgaaaaaagaaaaaggtcaaactaagcagaagcttaattattattctggaatgctctgtagaacaggactccaagtagaagaaaacgaagaagaagaagaagaagaacttcggcgatttctcttcttcctcattagagtagtgagcctctgttcagccgaaaacgacgacgtattgttacgatgacgtggctcctcctctgcttcttcttctcctcccattacttgtaacatctgtttcagatcttgttttcgtaaaacgattttcatcttcacaactccgttttcctctgtctgcgaaacgacaccgtttgatgatttcgcaatagcttccaacagaatattgtttctcgtttgcatcgtaatattattctgttgatttcgttgagctctgtgccttgattgaacttgaacatgg

SEQ ID NO: 53079 - DNA, 1888 bp, Cannabis sativa
aaggcgtagaaggaactatatccattgtatcaaagaaacttcggatggcgactggatacgagatcaggataaaattgctcgttgctttcttaaccgatttaaggagaccttcacaaaagatcacccaagccccgttctgttgagtccaggcctgtttcagaaagtcttgacagatcaagacaacaccttcttgaatgaaattccgagtgaagatgaagtgaagagagtcattaatgatatgggaaaggacaaagcccctggccccgatggctatcccccaagcttctacatccaccactgggaaatagtaaatgaagatctcactgagatggtggttcattttttcacccatcttgaactcccacgctttattaatgacacttcactagtcctagtaccaaaaaaggactctccatccacagtcaacgactaccgacccatcgcgctatgcaatgtggcgtacaaaataatctccaagattattgctacaagattgagatacatactcccaaggatcatatctccaaaccaagcggcttttgttcgaggaaggcacattgctgaaaatacaatgatcacaagggaagtggttcattctatgaacaaaagacgaggcaaacgaggatacatgctcctgaaactagacttggaaaaggcctacgacaaactggatcgggattttctcatttccgtgcttcatcaaattggtttcggaagtcctttcatagattggatcaaagcttgcatctccgtagctgaaattaaacttctgttaaatggctcagttgttgggaaatttagtccggagagaggtctccggcaaggggacccgttatcgccatccctttacataatggcagctgaagccctttctcgccttctcatcaaaagggaaaatgaaggtgggctcaaaggcttcaaactagctagaaatggaactccaataacacatttaatgtttgctgacgacatcatactttttggtgaggcgactgcccgtgaagctagatccctcctagattgccttgaatcctattgtcgtagctcaggtcagaaaatcaacttattaaagtcctctgtttgcttctccaaaggtgtctcggccagaaaagcttagtcaattgcaacgattctgggtatgaggagaatgaaccgatcggccacctacttgggattgcctctattccggtcaaccaagaggacagaggatacaaaacatttggtcgaccgagtgatgcaaataatacaagggtggaaagtaaagcttctatcaaatgttggcaagagttgtttgatcaaggcagtaggttcgagtttggcaaattatgtggcctcatctgatgttattcctgcaactactgccaataagatcgacaaattattgagagacttttggtggggcgacacagaagacaagcgtaaacttcacacgatagcctgggagcgtctttgcaaaccaaaaactaacgggggattggggtttcgaacaacggagaatatgaacaaggcgttccttatgaagtgggcttggaaaattctaaccacagaccgatccttgtggagccaacttatgaacgaaaaatacatgaagaacgtgggcttatttgacatggaggctaaggcctccgatacaacactttggaaggccattcttcgcatccgcggtgacttgcaaaaaggaatttgtcggaaaattggaaatgggaacgcaacttccatatggttcgatccttgggttcccgacgagaatagacaaccaatgcctcgtctagatgcctctgaaggagtgagtttggtaagtaactttatctcgaaccaacaatggaatgaggagctagttcggaaatggttcccaagggatgacgctaaaagaatactcaacatatcc

SEQ ID NO: 53080 - DNA, 818 bp, Cannabis sativa
ttatgaagtcattggctctcaacctttcaacctcatctttaaaagcttgggcgtgctccttgtccagcagccaccacttttgctgagcaggtcaaatgctttgatcaatgttgagtgcatgtgtgatcatggagggatcggttccgaccatatctccatgtgaccatgcaaaaatgttcaggttcgcccttagaaattctaccagtattgatttaatttctgaagccaagccttttccaacttcagtcttcttgttggaaaagttggatcaacctccacttcttccaactcttctacaggcctaaagcttcttgcaggatccccaaagtgagaatctatgtttggggccccgccttaggctagattcattgttccttggtgggcttgttttctgggcttttggggggcattttctcctttttagccctagataggtccaagttgtaacagtaatgggcagattggtagtctcccctcacacatgccccatcatgcctttttggaaatttgaggcataggtggtagatagatgttaccgcctcaggtcattgagggctggtcagcctatcatggcattgaaagctgagggaacatcaataatgacaaactaagccatcaatcttctggtagttggattttcttcaactgtgagcggtaatctaatacacccgacagatgcaatgccttggttgcaaggtgccaggttggtgagttgaagccccatcttttctatagcctcattggtccattgcattgattctggacctaagtattttctttctctagtctcatcccaatgtacgtatcaccctgaccta

SEQ ID NO: 53081 - DNA, 1029 bp, Cannabis sativa
attattattattatctacaaaatcattggagaaagagattcttggatccattaattggaaatggaggaaatagtagaagtgttgttgaacatgttaaatgactcaaattgacttgtttctatttataattacattttgagaagtattattagacatctcatgttactttgatttgtctctttgtgattaaaattttcatgtttaactttttttttccctttttattataacataatattaatatatatatttatctatctctatatatatttatggttagtacttaatattattatcttgcctaagatagtggccatattctagtcacttacacatgaaaaataaaataaaaaagctataacaactaattgaaaaggttttcttccacattagtcaaatctgccagacaacttaaagattaaagtaaatatagctttgtctaggtaagtggtattcgtggcaatcacatggcctcaaatagagaaatgttaaggtggacatgcattgctattaagtatcagcataataccttttagatatgtcatcttgcgattagctagcgatactctctaaaagttattatattaaattatgtaggacccgatacttaattggaccaataatgatattgacatgtaagagaatactaggcactactggtatcctgtagcatttctcgacctgtagtatctaacacttttataaggtgtaatattgttattggtgtaatttaatattatatttatttaataaatattatagagaaccgctaactaataataagacgttatgccatagaaatgttaagtatctcggtgcttcattacaatgctaaaaggtaccaccagtgactagtcaccttttatgtatcatattgttattaatatcgatgttattaagtatcatatctcatataatttaatataataacttttaaagaataccactaattaattataacacatcacttttatttgtgtattgaatttctacttattctaactttcaattagtagaaaagagaaatga

SEQ ID NO: 53082 - DNA, 1075 bp, Cannabis sativa
tttttttttttaatttttgttaaacaattttatatttttatttaagataatattagtatgtattgttatagattattattactaatattataaataatatgtttgattttccctaatttaattagataaattagtaaataatatttatttaaaatgattattaaatttataaataattaaaataatttttttaatataatttatatttaataattattatttttttattaaaaaattattattacttgtggaactctcaaggggatccgacagtattgatttgttaactttaaatgatggcattttataccggtggattgctgctattaatccatcagtattaatattataattcgcgaggtcctatttttgttgctattaatattattagcgacacattaatatcggcaaatttcgctgttaatacccattatcggtaaattttcacattaatatcggcaaaactgtccacctctaaaaatcttaactgttttagtaaaaatggtacaaagaccatttcattagaatgatattctaatactttaatatacaaccaaataaaggaatgaaatgaaaattatttcatttccattcaatttcatttcattacttccaactaaaggccgcctaagtcttttctaactttaaatgtaataatactgactcgtgaactaaggtttgttaacgccccaaccacgtaaaaattctcgttgttattttatatctttgatcattttctatagctttcacatataataaatcagttttcaaaaatttcggtaaacagttatgtatattagtttttttttttttaaatgttattcaataaaaaatattatttttattaaaaaaatatttaatttatatgttatttataaaaagaaaatataataatagtcaaaatttattcttaattataattttaatttaactgtagtacttttaatttaataacaaattcatttttttaaaaaaatatcatactttttctattttttttttttaaatagtaataatttttttttgggtaactacaattggtaacggtattgcaatagtgattctttaagaaaca

SEQ ID NO: 53083 - DNA, 884 bp, Cannabis sativa
aactgttatgtcaaaaaaagtaagagtataaagtttttattcgatttttttctatgttttcatattttttatatttgctaatagcaatttttcattatagactgtatagtgtggttcattatctttgtttatggattaaagtcatttattttacataaagccattatttttatgtttattttcttgagtctttaattttataaaacacaactttaattctttgtgatgagttaattatcaagttaaaagtaatataaattaatatttcttctaagggatgttttaagtaattttggtttagcatcctttttgtcattgctttttctatgattttgctcttttcatttcagtgagcattaaagaattttatgattttaaaagtagtagatagaattttattatttatttgaataaattattaaatattatattttacttttttttttttattattattattggaaatgtctgcatgtatggatagatatatgcaatatagattggctgaacaagatgaagattgtgtagatttatttacagatttgttgacaaataataatagtaaaaagaatgctagaggtcaacacaaatgcgtgacatttgaggtaatcatgatggtaaaaagatacaaatcacatgtaataaatttaggcatccacattataaaaatacaagtaagcttacaaattttattgggacattagtacgagatagaaaaaaatcttccaattaactacaaaagttggcataaggtacctgacaaatgtaaagatagcatgtggaaaatcatacaggtaaaaaattattgttttttttttaaaaaaaaaaattaatttagcattttagatctgtagttaaagtaattttgaaatttctatttagta

SEQ ID NO: 53084 - DNA, 1344 bp, Cannabis sativa
tgttttgggttttcccgggctctattaaacaaatgatagtgagtaaggtggttgggtgcagacgcaaaacacattgtatttatcaataaggattcaacaacagtgacaaagtaattttagtacataaaatcatcagtgcattacttttaatcagataaaagggaaggaaacagattcatgaccaggttaaagagcgtgatgggtcggtcggtcctttaataatttggaataaaagctactaggaagaattcagtctattgataactcgggatatatcgagaaatggtctttgagcttaaaagaagaaagagaaactaaaaagatggagttacaagagatattctttttttttttgaaaaagagaagagatcctattgtttagacaggatgtttcccgataaatattaaaagcctcccttgtggtggaggaaaaccatggttacaattaataacagaacagaatttctaaggcaagggtactccccaactttgcctcgtaaggggaaaagaactaaatacaaccacctactgcccctatacaattgttttccattctctacacaaatctaaaaaggataggtcctcaaaatgtttagttctaaaaacccaagtagctgtccaaaatttaacttgctcccacacattctgatttagtagtcccaccatggttacaagagatattccttttaaaggaagggtacagaagtccaaatttttgttggctaaggaaggggaggagtctatcattccataaattatatctttactaagcgatatgcatgaaaaaaaggtggttttgaaggtttcgatagggtaaattgggctcctgttttagatactttgcaagaataattctcttgaggaagatgttggactgtgatgggattttcacatgagttggtcatacataattggaaggaaggagcttgaaaaggatactgtgaacgctattgtggaattctatagcaatggcatgatcataaaattttctatcaataaaaccaatgcatgtctatttcacttagcaaagttagcaatgtttgtcctcatatgcttgattaagagcatttacaaaattatttctaaagtcctttcggaaagattgaagtcagtgtttgtagaaacaatcttaaagccccaaggacttccagagctaggtgtcagattatgggtgccactttactttagcatatgaagttgtagaagaatacaggatgcttggaaggaaggggcagtgcagaaaataaacttttaaaaggtttatgataaggcagagtggtctgtgctagagaagaaagggcttagaatgaaatgggaacaggtttcttaatctcagttacatat

SEQ ID NO: 53085 - DNA, 1048 bp, Cannabis sativa
aaatacattttaatttatacatttttaaggatatcaacataccatatgtatggactattctatggtagacaaataactagtacgtagatggactatggagtataaagtatggactttatatttttagtcacaatttattttgacacttttaatttttattatcatgttcattcatgtttagcattcatgattttcatgaatatgaacataaatttgatgaatgatttgattaattttagattattggatttacgtttccactttggatttcaaatgtttttttttttttctatagagaatttgggtgaaaaaaaaagccgttctcgagaattaatcgagtcaacctgttgatctgactaacccgagcatgtggacccgcgaacccgaaaccatttcacgacccaggtccaggtataattttttgaatctgaaacccgtgaacccgaaactcaatcaacccgctcaatgttcaactctactttttatgtattttttattattttataaaacaccataaaaatgtaaaaaaaaaaaatcttttaaacctaaaaatatttaatttttacaaaaaaaaaataatgttttgtattttttttgacgtggtgaacagaattacatatgattaacaataacaaaccacaatcggcggtagatactcctcgaaccaagatatctcatcttttaaccgaagagtatattttgccaaactatggtggcgtttgataacacttttttaattagttttttatttttaaaattagaaagtgaaaatatttttcaaaaacatgttttataaaattgttttcacttttttaattttttagttgagaatcaaaatttttaaaaacacaaaaaaaaaaatcacttttaatattttttttaaatagttttttttttcttaatcaatatttggactccgacaagaccggacccaaatccctccatggcactagcgctaaacctggcccatgaccgaacccgaatctgaccccggacctagacctgacttaaataaaattaaaacataaaaataaaaataaactttaca

SEQ ID NO: 53086 - DNA, 959 bp, Cannabis sativa
  modified_base (697)..(703): a, c, t, g, unknown or other
ttaaacaaaaaccactagaacttacataaaactaatatttacgtggctcgccacgtaactctcatctagtctatatatatttataaaaaattattacacagaaaatataattgatattttatttacaaaaatacttccataaggtaaaagacaacatttatcttttatgtgattttaattaccaaaataccacttacacaatcagacgatggttgcatggtggttgctgcgtggttgcacgttgctgcgtggttgggcagtagttgcatcagacgaaggtttcaatcagacgatagttgtagggtggttgctaggtggttggccgaaggttgcatcagacgaaagtttcaattagacgaaaatttttgggtggttgttgggtagttggttaaaggttacatcagacaaaataactgttagcaaaatatttatgcaattgtaatgcaactgttgtgaaacattaaaaattagaacaatgttttcacgtgcgtaactttatctacatgtctctttatgttataatatgaacaaattcaccattagaaatttgaaaaacaacaaaaatacaccaggataaacattttactatagtattgatgtaattttttgggattatacttgagttggattgtttgggaactccagttcaactttttgagatctggcttacatggatctaaaaattgaagtcaggacnnnnnnnttatgcaaattaaactggattttcagttgaattttagtttcgtagtagtttttctacaatttttttatgaattcgaaacagctcctattttgattgattctggtcgtcttctcacgcgaagtcgccggaattaatggtggttctctgtctggttgaatttttgtttcggtttcgttgggttgttgtacagttgcgcgatggttgcccaggaagcatggatccttggttgaagggtgtgtgtaagtggtatttgtgt

SEQ ID NO: 53087 - DNA, 969 bp, Cannabis sativa
aaattaacaaattttcaaaatttcatattattttgcaaaaaattaattttagtaaaaaaaatatctaataagataaaatgtcaaaactaacatttttcgaatcttacaattgaatttattaaaatatatttcaaaaataataaattttgaaaatatgatatggttagcaaattttaaaatttaaagtagattatctttaatattatttatattttagtatcaaaataagatcattgaaattttagtaataaaataagtaatatatgatcttataattaaaatatctaaaatttcaaaattaaccataaggctatttttgtggaaaaaaactaattttcaaattcaaagcctactattatctaaaacttattttaattgattaaaaaattaataaaaattaatttcattatgataattatatttttaattaaatatttagattatacacaaaattataccaaaatttgaattttttttcaaagtaaaatgatttttgaatcaagagttatgacgaaaacaagtttggtggacaggggtatgcattgcatacccctgcgcgggcaaaagtgagcacctgaccgagacaggaggctgcatgcaacctctatggctaacaaaactcggcgtgaagcggcccaagcttcagacatgcccctttctgaagggattttttctgagcgagccgcactttgtcccccttgcgcgcacgtatgtgcaactgatttcacatagtttcatccaaattcaaaaaaaaaaaaaataactaattcataaaaaattcaaattgagttctgtaaaagcccgaattcattaattttttgtctactttctagtaaaaatatttgcagaacaaaacaaagaacattttacaacataaattgcgatttccatacaatcatcaaataagcacataaaccatcatgaaaccatccaaatcaacacaagcatcgttttgaatccatatttcat

SEQ ID NO: 53088 - DNA, 7444 bp, Cannabis sativa
  modified_base (2112)..(2116): a, c, t, g, unknown or other
  modified_base (3692)..(3692): a, c, t, g, unknown or other
  modified_base (7087)..(7087): a, c, t, g, unknown or other
tttttttataataaaatactctttttcacatattcaaaagtacttttcaaaaagaaaagatatgctgtcagtatgaaatcaccctgatatctgcaggttatcatcaatttaaccacactatttgatgtcatttcaaatcaaaatttacacttaccccaattatttatttatttgtctccaaaagtaaaattttagtcatcacaaccataatgaactctaattggaagaagacattttttgttgaatttcataaggtttaaaaaatttgataatagaaaacgtaattcccaataaaatgaaacaatactttgaaatattagttgtgagtcttgtgacactttggtgaacaagttgagtcatttcataatatgaatacatcacataatttcaaaaagtgacataattataatactgatgcccatagtaaaaaaaatataataaaataaccaaaaagattcgaatcaatatttttcacaatgaaccatcactttacagaaaacaacaaagagatcctctaaggtattcaccagtaattataactaaacaaacaaaaatatcaataaagaattcttctgtttttttttcctctctaaattcttgtttcattttttttttctttttacaacagaacacacaaaacaaaatataaaaaagaaaaacagagtcactcttcttctacttatatattatctctctttttctatgtaagctatgggttgtagttgttattcttaaaaacccagaaaatgatttcaattgttattatgacaacgatgaccgtcttcaatggagcttcttgctgaaaaatcatgagaagtctcactagcagagttggataatcggtacgagtctgagaaataaaatgaaattaaaaatgttagaactttggtcatgattatatcgaatataaaaaagaaagagttgtatgaatttatttaccgctagaacaagatttcatggacgaagaatcactggtcgatcgagataatgaaaaagaatctgaaacccaacaaaaaagaaggaaacttttaataattaatgaataaattgtaatgatttcaagctttcaaatttagtttaataaatacctctagacgagtggaatgatctcttgcaatgcataatagcgctttggattccatcatgttgttgcaacagagagtcatctctccgattaaccggcggttgggctccggtcaccgccgaagaagacgaagatttgctctttcccagatgcttacacaccgttcgaatcccagccggaagattcccgggcctatctttcggcgaagcaatggaagccgtcgttgccggagaagacgccggtgacgacatgaaaaagtcagcgacggtagatgggtttcctttttcattgtattttttcgaaacctttacgtaaagaggcttaacgagctttagatatttctgtataacgtctttagagaatctctgctcagttttggtgtcgtttaagctctgttcatgtcgttttgtacttctagaactgctgctgttatctctacataatttcgaaacgtttggaggttcatcaacgttgaatctcaccgtgaaaagctttccttcttgcttttgggtcttacaatggatatcttctgtttcagttttcttcttctctgttcctctggatttagactttttgaaggtgaacacccgaaaggttggagcagatttgagtagagcgattggagattgaggctttggattaatgggtggtccaagtggaaggacttttcttttggagatggaatcaataggaggggacaaagagaaagaaggtttgggataacagagctctctactgctgagagttttagctggttctctactactacaactatttctaaccatttcttgatcaagatcaaaacttttagtctctatagttgatttttcatctgggtttttgttgttgttgtcaaaatctggtgcagtgagctccaagtcgaagaatgagtcttcttcttcttctacttcgtcatcaacaagggtagtagtaaatgtggttgttggtttccagaacttgaggaagttaagagcttccatattggcagaatatgaattagagagtgagaaagagagagagagagagannnnnagagagagagagagagatggggtgtacttgatctagggtttaaagtggggttttatataagagagtgagagagaagggtaacgtgggttagttgagataaagagtgctttactcaaattgcacttcgttttatggttgtgtttgccaacatagaaaatggtgatttgggtaagcaaaaagaaaagagagaagaggctaaagcccaaagcttttcttttgcttttaagagagagagagagagggtttgtttttgttttaggattaggattagatggaattgaatttattaacattacgtgatttcaaataagtgagaaagaaagtacattaatgtatagacactgtcaatggaggattactaatattgaaaagcttcaaaactgtatagtctacgaattcagatactctcttacaaataatgccagatttcagagctgcagactttatattatacatcaatctcagtaatccaaccccacttgtggtcccctttaaaaactatatgaccatcacttggaattttcttttgttcatattattattattaaattttaaatttttatttgtgtttttatatttattaccaaccacaacaaatacataaatcatatatgtaactacaactaaaacccaagttctcattggacgtgttgactaataatattcaactaaaactagacccaattggttttaaacatttcccctctttctaagtcaaacaaacaccacaacaatttctcacaaaatcataactttattaatgtttagttttggcctcttttattagaataaatataagttcatggagggcctgaaagtggaaatagggtttagtcattctacttctttatgtacatgtatagttcttaagggaaaaaacaaaaagtctttgggttatgggtacagaaagaccgtaggggataggatggtgatgagaaacttccaaaaagaaagaaagaaagaagatttgaaaaataagaaataaaaagagccaaaaagaaagagaacactaaaaagagaaagtgagcaaagcaaaccaaaccaaactaaatatttatatgtaatatttattattatacatacacacacatgagtagatgaggtgttgtgagaaagaaggggaaagagagagaagcttttacttttacagagaggctttaaaaagatctggctaagtcagagaattgggttctttacaaggcaaggaattgggtgaagctgggcacgctcattcaacttttgggtccccctcttctctcttttaaagggttcattccaactctttgtttttcttttctcaaataaaaaaatttacaaaaaataaaatagtccaacccttgtgatgactcttatttggctttggctatgctatatttaatgtacacagaaaaggtttgacctggaaacatggggtttgagcgttgaatggggctctatataagataaagatagatagagtcatagagatacctcccaatttcatagtgcctacctacaaggctatattagtcaatagagaaaggtctccttttttattttttatttttcccattctttctttctttttttctttttntttttcttttcctttttttctccttttcattttatttttattaaactttggaggaatatatacttttgtatatagaaaaatatgtggagatgataaggtatcttaaaatacctttatacattacaatgatagaaaaaaaaaatttggcttaagggatagtagcaaaaaccttctttatgtttttaacaagaaaaattcacttttggattttataaaaataatatgctcctcttcaattaaatctaaatttttgaatcgaatattttcttaacttaaaggttaaatactcaattcggtactttatattttattaaaaatacagattttgtatctgatatatttttaacagtgtttatttggtattctatactttaatattgtacttactaaaataaaattttatcaatataataaaaaaaattcatagttatgtagtttaaattaaaatttaattaattatatatcttagtgcagtgtggctatgcttataaaattcgagatcaaagtatgaaatatatacaatttttagttacatattaataagtataattaatattgtatgatactaaatttgtattttttattatttaattgctaatggtttattagactttttttagtttaagctattgtttgatttttttttttttattttattgtaaatagctttataactatctttttgtttttgttaattttgcactataatttatatattcaaatttgtccaatatagagactcggttttctgagaaaaataaagtggagaaaaataaataagtatttacatataagagctaatttataggagttttttttttaatttttataattcaaaacagttatttttttttattattattatttttacataattttatataaaaatacttatggtaattaacggaataacttaaatcacaattaaaaatcgtataacaactcgtaaattactgagaaaccattttaaaaattcaaatcgtaaatttaaaaaaaaaatatatatatatatatagaataacttctctaatttatattattattaacttatcatgaacttattttagtagtttcacaatttaataatttattcacaaagagaagatcttaaattggagttggccttcctcaacatcaaaaaagaaaaaaaaacaacaatattgctataaggtatcagtgatgtctaacactatttataaatagtgtattatgattagttagtgatatttataaaaataattttattaaattatatgaaatataatattttaacatttaaaaaaaataatatatcataattaaaattaactatttttttcattattatttgtagtgtaatgcattgtattatctaacagataattaatatctcaaaaccctttatacattaaatagtccaaatcaattctgggttctcttatcactgtcttggctatctgtttgcccagaatagaaattaaaattaaaaaagattaaaggaaataatgaaaataacttgtcataattctgagtatttttgtcttgtatagagggcttcattaatcactgcaaatttgcttacattgatgttcaactacatacctttatatatctataaaatctattctagactgtaaaacaagccaaatcatatatatgctatcttatcatataaatatacaaatacaatgctgtcgttgtggtcctaaacaaactactctcacccttatgatcagtccttttatttagctttcagatctcccaaacccctgagcctcaccattattacatactgcttaatatatatatatatagggatataattttgctatgttattgtactttcatggattgtaatccgtgatgtacagcagccgttagataaggaagttatttgatctgacggttgagatttatctagtaattaaggttaaaaagtaaaaacgtactctgacactcatttaatgtaccttcagacacatctaatgtatcacagaatatattccgtgaaagtacattacggaacaaaatcatatccctatatatttatatgctaaatatattatagggtttcattcataaatagattatagggtttcattcattttctttctaacaagaaaagaatatattcatattccactgctaatgacatgcacgatattaattttagagactttattttaaaaataaaaaaagctgactttcttaaatttttttttcctttttcttttcttaattctttagggtacttaaaagtaaagataatacctggctcactctatagtagtcatttttgcatattgaaatatattttttaatcatgggtataaagaaaataaaaaaaaaattgacagtagctagaaatagtatatgacacatcttgtacgatacatttggtagagggaattctttaatagtctcatgaatgctctctgttgcttcttgtcctaacttgtataagataccacacatcccattctcatatgatatcatatttgattgataattacacatttaaaatgcctttcttcaattatttttttaagcaataaaaaataaataacattttagagggtgattataatcatttggaaagatatctagtacactcaaagtgttttggtggaccatttatttggttcaccatttagaaattttttttaacttttaattttgttttatgattgtgtactttgtatttatttagaaccatatataaaaatatttatctaattttttaaaaaaaatttcaaataattcatagtcttactataaaattcaaatagttgtttattactcgtacaacaaaatatttaaaccttattttcgacattataaattattcgaaattttatgaaaatttacaaataatcataaataactacaatatatatcatcataaaaaaaaattcttctaaataacaaaataaatagaggctctatcaaaatattcctttaggaaaatgtactactctacactgttaaaaattaaatctaaaaatatacatgaattttacaaactcatgtgagattattaagattattctatgaattaacactactacaaaaatagcttttaacttttattagtattttttaaatagagcattgttattgggtaccagtggtgcccaacactttttatatatgacgtctacaattggttagcgatattctttaaaagttatttttttctaataaaaatcataagatctattaattaataaattcgatcaaaacaatagaacgcacttcagaggaagagtcctccaactgaatcatacgacctgtagagaaataagagtctcttgccaagcaatgagccaacttatttgcagatcgttttacaaaatacaaatcaacaaatgataaagccaaaagcaaatttaaacatcttgaacaataagaccaanctgtgaaggcataaaaataccgccctgaatcgcttggacacacacaagctatctgttttcaacatgactctatcccacgaatgagttacaatccaactcaatgcttctttaatgcctattatctcagcaattttgggttgaacatatccaaactttcccttcttgaatacttctaccatagcaccatgatgattctgagctacacaacccatgccaaaagacaaggctcaaaccagaggaaaagactaagaacccatgttaaagacaagactaatgagaaaaactaaaagaaaaagactaaagaaccatgtcaaaaaacaagactaatgggaaaactaaattagtttcaacacataa

SEQ ID NO: 53089 - DNA, 800 bp, Cannabis sativa
  modified_base (357)..(361): a, c, t, g, unknown or other
atatcaatagcgtttactacttatttataggtaacatcttataattagttagcgatattctttaaaagttattatcttaaattatataagacccaatacttatttatagcaataagggcatgacaccactgaaaataaggctaaacaccaaaaatacatttaaacatttctctttctatgagtatatgtgttgactttttgttatgtgattataaataaacttttttttttggtaaagattataaattaacttaattacttatttagtatactcatttcccaattgataggctagagctacactataaaaaattaatatttgtagtgacaaccttttagtcacaacataattttttnnnnnctaaatgtaacttttagtcacaagaataagaggtgtagatggattctgactctcgacaactggcaactgaggatagcattatcaacgtggacaagttgggtctccaagacaggctcaactgaacctgaaacctcaccaacaacttgcacgggaggcgcctcatctgcactctgggcggaaagtgcttcagtagaagcctgctcggtctctttatctcgtcggcaagcatcttagaagaggcttggctagttctttcaatctggctggctggtagaggcctctgaagcgctatcctacgtggccttgctacaaacaactccttgcctcgagcaatcaggtcctcgcgaagagcaatatccatatacatgaagttgcccttgagattttttatgtagcactcataaaatgtctcgatggacaggtttgcatattgatcctt

SEQ ID NO: 53090 - DNA, 821 bp, Cannabis sativa
ttcccaatgcaatacttgtcatcaaagtcttcagttgcctctacaatttctccaaatgtaaattttgcttccttttcccatatcaatgactggtgtgtgtcatttttcttggaatcttttttgtgcttatccaacactttgaatttatgacacaatatgagagtgataacaaggacagtaacaaacagtattaagccacaaacaagagaaatgactaatataagaccattgctaattctgtttctttgccttttacagggattaagtccagtagcttttccacacaatccgagatttccatcataaaaactttttgaagcattttggaaaatggctccagttggtatcggacccgtcaagttgttgtaagaaaaatcgatgtaacgtatgcttattagattggaaaatgattgaggaatactacctaacaggtggttacgagagatgttgagaatttccagcattgtaagcttggacaagcttgcgggtatttttccaacaagtaaattgctgctaagatctaatacataacgtatagacaccaaatttccaagctcttgtggtatttcactagataacatattgtgactgaggtttaagcttgacaatcctacacaattacctaacgaatttggtatttcacctgttaaattatttctcgaaaaatcaagattcactagcttgctcaagtatgatagacttggagggattaccccggttagttgattattgctcagattaagttggtacaaaagtttaagatttcccaattgagtgggaatttcaccacttaactcgttggactctaggctcaaaacttt

SEQ ID NO: 53091 - DNA, 1772 bp, Cannabis sativa
  modified_base (1725)..(1726): a, c, t, g, unknown or other
tactagttgataaaaaggaaacccgtgctaagatctggaagaagttagaagaccagttccaacaaaaatcttttgaccaataagatctttctaaaagaaagaatctttggttataagatgagccactcaaagaccctggatcagaaccttgatgaattcctaaggttgcacatagagctagcaaactcagggcagaatgaggctttgagtgatgaaaatcaagccatcattatcttgaattcattaccagtcttatagagaagtcaaaactgctattaaatatggtaaaacctccattactctggaagaagtgatttctgcactaaagtcaaaagacttggagatgaggaatgaaaaattgggaaatcacaatggggaattgaatctaagtaggggcagacctaaataaagaaaaccatggcataatagagaaaggaacaacaaccagggacacaacaaaggacatcacagcaacaaaaaagggaaaaaaaagctctaaaggaaactctgacccaaatggttgttaacactgtggaaaaccaggacgttatagaagagattgctatttttggaagaagagcagtaaacacagggatggatcaagagaaagaccagaccacaacactagtaaacagaaacaagattttcacaatgccaacctaagtgatggatatgatagtggagaagtctacatgacaacaacatcacttaatggtgattggattctagacttaggttgcactttccacatgactaacaataaatatttactgtctaattacagggaaaccaaaggtggcaaagttatcctaggcaacaaccaaacatgtgaaatggaaggagcaggaactataagcttcaagatgtttgatggggtcattagatcacttactggtgtgaggtatgtccctaaattagcaagaaatttgatttctctaagtgtgcttgatgacatgaacatagaaagcaagatcaaagttggacaaatcaagctatgcaaaggctccatgatcattatgaaaagtgtaaaaaatgatggcctatactacctatgtggtgaaccagtggctagttgcaacaatgtagtagcacaggctccagaagataaaaatgcaacattgtggcataggaggctggggcatattagtgagaaggggctgcaaatagtaagtgagcagaatctacttggaaaagataaggtaacaaaggttgatttttgtgaatattgtattcttggaaagcaccataggctaaaatttaagactggaacacacaagtctaggcacatactagaatatgtacactctgatctttggggtcctgaaaaggttagcacacatgggggttgttcttatttttttatccatagtggatgattattctaggaaagtttgggtatatttactcaaacagaaaaatgatgcttttcagacgtttgttcactggaaactattgacggaaaatcaaacaggtagaaaacttaaggtcctaaggacagataacgggttagagttttgcaatgacttatttgatgcctactgtagagagaatggtttactaagacattgaactgtcaggctaacaccccaacagaatggggttgctgaaagaatgaataggactttattggataagtctagatgcatgatgtttaatgcaggtttgtctaaagggttttggggataagctgttgtcatagcagcttactgttgggttttgtgcccnnaataaaacccatttcaatataaccagatttacttattaataaagat

SEQ ID NO: 53092 - DNA, 3369 bp, Cannabis sativa
atgaccctccaaaatccatgacacaagctcgtaataggtcttcaagtatctgaatagttcgctcagattgcccatctattcgaggatgaaaggccgtgctgaacttcaaattagttcccatggccttctgcaaactcacccaaaacttcgaggtaaatttagggtctctatctgaaatgatacactttggtattccatgaaggcgaacaatctcctttacatacaaatcagcatactgatctattgtataagttactttgataggcaagaaatgtgctgactttgtaaagcgatccaccaggacccaaacagagtcatacattcctatagttctcgacaaaccaaccaccaaatccatcgcaatgtcttcccacttccattctggaagagatagtggttgaagtaatcattccataccaccagaaatagggttttagatcttgatacattttggtggttcctgggtgcagtgaataacgggtagtgtgagcttcatccaaaatctctttcttaagctcagtgttatcagggacacaccctcgtgctttgaacagtagcattccactgtcagagattgaaaagtccttagatttgcctgctaagacatcttctcgaatcttaaacagtttagggtcttctaattttgccactttaattctttccaacaagtctgactgaagtgtcagattatgtaatttttcaatcacgaattcaatgtttgccctagacatctcagaggctaattgaggagaaatcattaccatattgaatatctgatcaggtccttttcggcttaaggcatctgccacaacatttgcttttccaggatgatatagaatttcacagtcatagtccttcactagctctaatcatctcctttgtctcatattcagatccttttgagtgaaaaagtacttgagacttttgtggtcagtatagatctcacaccgttcaccatataagtagtgtcgccaaattttcaaggcaaacaccactactgcaagttctaagtcgtgagttgggtaacgctgctcataatctttcaattgtcgagaagcataagctatgactttatctacctgcattagcagaaaacccaaaccctgccttaatgcatcgcaatacaccacaaacttctcttgatccgatggcaaggctaaaacatgagctgtaataagtcgttgtttcagctcttggaaacttccctcacacttatctgaccatataaaccgttggttcttcctagttaactcggataacggcattgcgatcttagaaaagccttccacaaaacaccgataataacccgctaaaccgagaaaactccgaacttcagtaactgtttttgctctaggccaattcttcactacttcaatcttccttgggtctaccataatcccgtcttttccaacaatataccccagaaaagatacttgtgatagccaaaactcacacttttttagagtttatgatctctgagtcgttgcagaaccatacgaagatgttgttcgtgttttgcttctgactgagagttcacaagaatatcatcgataaatacaattataaaattatcgagaaaatccttgaatactctattcatgagatccataaaggctgctggagcatttgttaacccaaatgacataactaggaactcataatgcccgtacctagtacgaaaggctgtcttcggaatatcttcctctcggattctcagctgatgatatccagacctcaagtcaatcttagaaaatattgtcttgccctgaagttgatcgaacaaatcatcaattttaggcaaagggtatttgttcttaatggttaacttgttcagctcccgataatcaatacacattcgaagagttccatctttcttctttacatacagaaccggagctccccaaggtgacacacttggtcaagtgaaccctaaatcgagcattccttgaagttgtatcttcaattcttttagttctgcaggtgccattcggtaaggtgcttttgaaacaggctatgccccaggtattaagtcgataataaaatctatctcacgttgaggtggcaaccctggtaattcttcaggaaacacatccagaaactccttaaccactttaacctcttcaggtccaagtaactcaggtttactgaaatcaactacaaccgctaggaatcctacacaccgactgcgtaataaatccctagctttcaacactgagattcttggaacatgagaaccatgaactacaccaacaaagacaaatggttcctcatttttcggttggaaagttaccatttttcgtttacaatcaatactagcagagtatttggacaaaaagtccattccgagtataatatcgaactcggccaatggtaactccacaagatcaacactcaattctctgtcttcaattctaattaacactaatctaacctactttcttgaaataattaattccccattaggcaacagggttcccaatcccatttcaaaaatatcactaggcctatcaagctgattaagaactctcgatgatacatcagatcgagtagcacccgtatcaaataaaatagtaaaaacaaaatcgttgataagaagctgacctgtgaccactgaagggttggcggcagcatcagcctgagtgataacaaatacacgtgctggtgcaggcttaacttcaggcttaggttcctctttcttcaactaaggacggtctttcttaagatgtcccactgatccacactggaaacaagctctccagttacaagtcccggtatgacgtttcttacagcgcgagcactcaagataggaataattctcacgtccccctttattctgatttcctcggaaccttttactttgccctgaacttcccaaagatgggaaagttctcttcttttgctcaaaagtggaatcaccactctcttttccagggccaaaactagggagagtagtggtccctccagcaccagtagtctctcgagtttcttgtaagaacttgactgccccttcaactcgaagagtcttgtcaaccatttcagcataagttgtggtatcatttgttgtgataaccagatcatgcttaatctttacattcaaccttgccaaatacttctcctttttattgaagtctgttggtacaatccccaaggctaacttagccaagtgatcaaacttggttgtgtattcagtcactgacatattctcaccttgtacaaattccacaaactccttccgctttgcactgcggaccacctcattgtaatacttggcattaaaaaaatcacgtaattcttcccaagtcattctagctgtcggaaatattttacaaggatctagatttattaccaagtatgttttattaacatcct

SEQ ID NO: 53093 - DNA, 788 bp, Cannabis sativa
gtaaaataatttccaacagccatatgtgttggactcattgtagcagtccgaacaagtacatttgtttgtgctattatttttggctagttttagtgaaacgtgtctaatgtagcagtccctaaactttagatccgttgttgttgagttggagctgagtttggatttgccatggcggtggcctagagtgctctgataccaagtttaaaatctaacaaaaaaggaaaaataaatatctcagctcaaattagtgagacaacatttatttcatttataggctagtgacttcgaagaggacaaatacaatagccattcagtggcatacacatgtaaacatttgttaaagcaaaaggaatattacacaatctaatactaaccgaattggcacaaaaataaaggaaagattccatcatttttgcactttaaaaaaccagtggagaattcaagaaagactaaaatgccccagctatttttcaattctctaaactcctctcatttaggcattcgtgaagatcttataatcgacaaattgtaatcttatatctcgtcttctcaaatgttgatgttagtaataattttgtgaataaatttgtaagattgtcagatgattgaatttgttgaatatcagtcgatatcactagtctcttgaagatcgtgtgtaaagaagaatttaagtaaaaatatctttggttctatatctttcattatagctttagttgaggaatacattttgcgttatgttcatagagaattattgatattgcattattgagtgtaattcatatgtactc

SEQ ID NO: 53094 - DNA, 1056 bp, Cannabis sativa
atgctttagagtttggaggagatggtaagcactacgaactgaataaaagccattcttctcagcgacccaataccaagtgtctgcatcaattgaacttaagggaattccaagaataatagaagcatcttcaggagagaataagtcccttaccacatcgacatcccagcttctattgtttgtttggaagaggctgtttaccgtgaagtgatcaaggcctggaacaataggaattggagaagctcgatcaacaataggtagccatggatctgatgtaatattcacagacaatcccgcaccaatccttttcctcaaacccgctcgtacaacatcccgagccgcaaagatactactccaaacaaagcttggatttgacccgagctccgcagaaagaaagtcaccatgaggatagtatcttgctttgaatactttccccactatggattcatgacgaaacagtaatctccaaccctgcttaccaagcattgcaagattaaaatcccgcaagcaacgaaaacccataccaccttcgagtttgtgtttagtcaatctatcccaattcatccaaataataccacttccactacccgaagaattattagacttccaccagaaactggccatcatcttttcgagttctttacaagttccaaccgggagtaaaaagacattcatagcatatgagggaagagattgaaccactgattttatgagaatctctttcccagcccgagagagaaatttgccttcccaactattgatccttttcctcatcttctcttttagaaaccccaaaacagcatttttgttgcgacccacaatactggggagacccaaatacgaactatccaccccagcttcttggatacgcatcgagttgcaaatccttcttcttgtaaccgaactcgtgttagaactaaagaaggctgaagacttatggagattaactttctggcccgaggcgtcttcaaataaccggaggagggaaagaacacgacttgcttcttcatcagtggcctgacaataaatataactatcatctgcaaacaggaggtggga

SEQ ID NO: 53095 - DNA, 1352 bp, Cannabis sativa
ggaaaaaaaataatatattgtacacacttatcatatttatttaagaatatatttgggatcaaataaattatattctaattaaaaaattataactaataatagagttatactagaaaaaattaaaacaccaaaacataataatgtaacaataataccaataaataattcttaataataattctttttgagtacatataatatttatacatgtattataatttataataaaattataaattctatataaacaaatttataaaaatatatattatatattaagatgtaattattttttatatagaggtatactttattaatagactgtgagaaaattacgattaacagtgcagaatcaagttatcaaaattttaaacaaacaatcagcaatgacaagattaatatatcacggaacaataattggagaaaaagatggataaatagagcatggaaaaccagaaacaataaatacagaaaataaagaaattaaaaccaagatatatactagtttaagtctgatagatcgatgtaatctatgactctactccagttctgaaaaactattgaaaaatcttctttattgattgagtaagaataattacattacagtcaagacagattctctattgagttctttcaaagtgtttcaacttttacactcttacccaagaatcttcttcatctacataagattcttcatacaaaacccgaacccaatctctctcttttctcagtacctctctctatctctcaatctctttctctctcgtgctatgaaaaagacaagccaaggtagtatttataggcttaggatcaagatcctaaaatcggtggctgtaagaatcgacgttgttaagttagttagacaatgactaacttaaccaacttttctatgagcgagatctccacgtcaacattagtcttagtgtatatgagaacatatatgtgctttcaagatcatggaccaaagatacttgctgaagaagatcctagataggataaaaccagctggaatcgactatctagaactgccttccagggagaataaccttccaggaagaataactagctgttcggaactcctttccggaggaggactagctatcttgaagacttaacctggagtggatatgatagtcatccgggaaccccttctggactcaactatcattccacaagactcctttcgagatggacaagttagctgtccgagaacaacatttaggagacacctaacttttcaggaacgatttttaaagaccttttcatttagaagaactatactacagagacttagaaaatatataactaattacaatttagagactatttttatttataattggtttaaattg

SEQ ID NO: 53096 - DNA, 1829 bp, Cannabis sativa
aaaaaaaaaaaaaaacttaaaagacaaatctcaatacgaaattgtaaactgccacgtgcccttcgataacagactcaaacaagcaaacgaagattctgttctgcatgttttttctcttttcattttctcagccaccaaacaaacagaaggaatacaatattccagttaataaagcaattaccttatctgaagaaatcggtctcccaggattgttggctctaatggcgttaacaaggctagtgatcctagcgcttccatttccgctccatacaaaatcgacacaaggaagcttgacgtagtacttttcctcacatggcaagatcgggaaagagaactgagggtctgggtctgtgactctcttataagaagtagaggaagagaagcgtgctttaattgcctcctggatagcaaaaataagaaagatgaatatgaaagaagcgaatagctggacgaaagtagctctcttgttccgccatgagagcaagaaattcttcttcagtagtgccttgtattgttgaaacaacaatgcaacagcactccgtgaagccatggattctgggtttcagagctcaatttctctctgttctttcttctttcaaaataaaaaatacatattgtattaacttcttattagtgcgaaatttgaaaatgggatgtgaagcaatataaataaatttatatataataaataaatatatatatataagtagcaggctagcagcaagactcgttttttttttttcaaaaggcgcggataagagtagaataggtcatgatttttagtttaattacgattgtgccactgcattacaaaatggtcaacgcgtatttgtatttttcatgattcgtttttcgtatgaatgttgattaaaattatattggtttaacaataaaggttgtcctttttcgtttgtttgaaatgaataataaattattaagggtacctgtgctgtttagtattttcttatgtattaatatttttattgaatttggtacaattaagtatcgagtcctttataatttaatataataatttttaggaagtatcgctaactaatcacaacacgacatgtcgcaaaagtactagatactactaatacctaatagcaatgctcttaattattattattattatgttaaattgaggtgaatagatactggtaattataattaacaaatgtgtgtattttagaaagggatctttaactctagtttcaagagatttttgtagtgggaattaattgtatcttttttaattgatgggattgagaagattgatttgttctataaacttgaaaaaaaaaatgataaactattcaagcggactttgctgatgtacatataataaaaaaattatataagtattttactataagcttatgtattaatgatatttatgcatttgaagaataaaatgaataatttgttcaataaaaatgaagaattaaatgaataatgaaaaaatgccttcgtaatcatcccctgcatacaacttaagtttccaaacactaaaacttccatagttgttgtgatgtaaaacttgctaatatatacaaaataaggaaaacaagaaagatcaaccaaactgtcaacagccaaacaacaactattatgtaaattgctaatcatatgaaataaaaataataaaacttagaagtctcgtaaaggtagtaatgtcttgtaaaataagtcatatattaaaataatttttataaaataacaaattaaatatttgatttgatttataaaatataattaattaaaatattttaattgtggtcagatttaattataaaatattttagttatccgatttaattttttaaatt

SEQ ID NO: 53097 - DNA, 893 bp, Cannabis sativa
accagagtcagccctctacacctcttataccacctggttttgagcatataattccttctgctgtacctagagactcagatgtgtcatcctctcctgtaacaagtgtacctggtcctactacctcctcatcatccacagttccacataaccaacctactcctggtcctcctgtgcctacagctccaaacaaacacttaatgacaaccagatctaaatctggtatacacaaaccaaaggtcttcagtgtctcttctataccttccacagttgctcaagcacttcaaatgcctcactggaaatgtgttatggatgatgaaatcttggctcttgtaagaaacaaaacctatactattgttcctctacctcctgggagacaagcaatagggtgcaaatgggtctacaaagaaaaagagaacattgatggaacacttaacaagtacaaggctaggttggttgccaagggctttcaccaatagcctagctttgattttactgagacattcagtccagtggtaaagcctgtcactattagagttgtgttaactcttgcattgtctcaaaattggcacattcgacagttggatgtgaacaatgctttcctaaatggtgttcttcaggaggaggtatacatgcaccagccacctggttatgaagattctatagtgcctaacctagtttgtaaacttcataaagcactatatgggctcaagcaagctccacgagcttggtttaaacgattgcaactgtctttgcacaagtttggctttgtttcctcaaaatcagatcactctctgattgtgcaacattatcctaaggctacaacactgattttagtctatgttgatgatataatcatcactggcagcaacccattgttggaattattttaccag

SEQ ID NO: 53098 - DNA, 1141 bp, Cannabis sativa
aaattttgccaaacgacccctattagtttttaaaaactgttttcaattttaaaaaaacagaatacagtttttaaactgtaaagccaaacaacctctaactttttcttttttctatggttctttttatttgaaagttaatttttttttatggaattttcttttcctagaagtaatttagttctttttttttttttttaaaaaaaaaaagtaatttaatttcaattaattttttcttctatttattatttctttatatattaattttttatttctctcctatctttttttttttcttgtttcttgtttcttttttatttacttttttttttctcaatatttactttattttttctttatatatttctttcttattttctttttcttttttctagttattatttatctttcttttttatacatatatatttttaatatatttttttgctttgttatttttttttctctcatttactttctcaatttcttttttatttattttttggaaaacttacaaaaatactgaaatttggattaacttttacaaaaatactgtcacacggaaatcttttcaaaaatattgtgttgttataaaacaacagtagaacacaaaacagaacaactaaaaataatagtggaataactaaaaaacaaaagtgaaaacttaatacagtacacagtatttttgaaaaaaattctgcccctcagtataaaggtaaaaaaattagaaatttcagtatgtggtgtaattattcctattttttttttttattgttgcttcataatttttattcctttccttttcttttatatttttcagttttttgttattgttgttaatcttctaccctctttaatttttttttttcaaaatataatattacatacatagttatattaatatttatttttctcagagttactcaattttaattgggagtgcctttgtgactattcttaagatccactcatcatgagagcttcattatccaataaaagtagatggttacccaaaatataagtaatcaattacttaagatattataatcacctaaaatataagtatcttgttatccaaaatataagtacctagttacccaaaatattagtgttgggttttatgtgtatttggaagtaactgtgt

SEQ ID NO: 53099 - DNA, 2149 bp, Cannabis sativa
tatgccatcatcagtctatcattattgttttattttttgtagcaatctatcatatttattgttggttcactatatttagagaaagtttgacgcatgtatctctttaaagtacaagtttcattggattcaaagcatgaactgtcaattagaaaaattcaaaatagatgaacataaagtaatacgctacatgcctaaagtgagacccaaattagtagcagtaaacttatcctactcttttattattagaatatatcattacatataattgaaattacgtacattgctaagattgtttccctttccaaactagtatgttccatcttcaagctccgattctgaagtggaggacaatgaaaatgtatcagaaaaatttgcagaccttcttagtcgccttgtagaaccattttcgaagatgacaacccatgcaggtatacttattaattatatttatgggagtgcatgtttacaaagttagtttgtttatataatgtgtaagatgatgtttggattgtttgcaaatcaagtgtcaagcaattctgacaactggagatcagacctttcaaaatttgatatctggtatgcctctttcggatcaaatatgtggcaaccaagattcaactgctatattgagggtggacaggtaaaaaaagatgatttcaaatttgaacaagcaaaattagaaaagtcctttctaagcatatcacaagcttcaattatttaattaattttgaagttcaatgtacaaagatcttagttgttgactgacggcagtctctactgatttttactagtacctttactgattgcacatttcttgcgaatccattctcttgtcgacattttcaaattgattttcaggtagaaggtatgacaaagccatgttccggtgcagtagacaaaacattgccaaaagagattttatggaagactttccctcgtcgattattctttggtcgtgatttttcacaaacttggggtcctggaggggttgcgtttgttagtgtagaaagcaacatccaagaaaaagtttacatgtgcttgtacagaattacgtatgtcatttttcttcattgttccttctctttgttaccatgctatcgttttctttactttttccaatcttctattgattaaaacaactccttggacaaattctattctaaaaagtttaatctatattttgatattgattgaaatatataattggtaacactatgtgttcttttacagactcgagcaattcaatgatgttttgctccaggaaaattctaaaagtctaccaattagttccccactgtttgatttgtcagctttgaactccttcaccaatggagaatccaattctgcggaggttaacttggaggtatctcttgtttctgatgcattgttttcttttaggtgtattcatcaactataatgtaaatatttctttattcatactttgtgatcttcatgcagagtggttggtatcgtagagtcgtgtatttgggaaaggatcatgatattcctatactcagtatgacgtatgtattctaagaaagttgttagttttctttctagtttttcttggttatagtaacatttcttcaaacctcttttcattcattcatttcctttacttattttcatttttatgttgctatacatggcaggtgcaaacaatctgaatttgagagctttaaatccggagagcttacgctgcgagctccagctgagggatatgccaaaacattagtaagaggcttggtggaaggaaaacaactttcagaagctgaggctatggcatacatcaaaaatagttatacaaggccactataactgcctagtcttattttctcttgtatacaagtacaactctatcttctctaatgatgagaagctgttattattggttctgaaggcagaaccttgtggctgtagtatattttaagtaacttgtgtggattgtattatttcagtgggcaatggggattggattgttagtattttaagacttatgacttgaacttaatttggatatcattttatgagaacacaatgtggtcgatctaccttgtacgaaggtcaatttcctcaatgggaggtattcttgtctaaattaggaacaaaattgtgacactccgatcttgacttccgttttataaaagat

SEQ ID NO: 53100 - DNA, 1435 bp, Cannabis sativa
aattctattttagacactacatattgtagttatagcatattttttattaatttttcttcttaacaaaataaaaacaattgactatctctgaaaataaagttcaaatatgagatcataatttttttttttaagaaaatcgctaaaaaatatcagttgtctctacgtcaatatcgttattagtacaattaaatatcggtcttatatgatttataaaattgctaaaaggcattattgatgcctattattctttttagtatcatatttctattgatataattaagtagtgagtttaagaaaataatttttagagaatatcgctaaataattataaagtactacttataaaatgtattaggcactactaatatctaataacagtgctttattatttcatatattaactaataaaaaatattactaattaccaattacaaaacaataatacatctaaaaaaatatcattatatatatagtatctaataataatattcttcattaaatatataacatgaaacaaaaacattatatttttacggtatatatggagaaaagtaacacctataattatgtattggagaattattatcatctatctatatagtatatatatatatatatatctagagagagtattaagtggaaagtcttgtatgttgtttaattaataacttgaaggaataagccaccacgtgcctatgtgacccctcttctttggcatttcatattataaattatttgtatatggagcattgttaccgagtatcagtggtactcaactctttttataagtaccgtcttatgattaattagtgatattgcttaaaagttatttttttaagttatatacaactcaatacttaattcactacaagaaatatcacttttaccagcacagttcacttttaccagcgcattttacaaactgcactggcaaagagatcaaagttttaccaacatacatttgcagtggctaaaatctaacttttaccatcacatttatgcgttgggaaaagtcttttttgctagcgcttttcattttatgctggcaaaaattctaataccaacattgatttgtcaacctccttttgccaacacatcataggtaaattctattttaccagcgcaataccaatttttgtcagcacaaaaatgtgttggcaaaagtgacatttcttgtagtgattacactatatcatcattgttaatagggtttagtgctaatataataccgatatgatatattatcgcatttagtgttagacataaacaggttaaatttgtacctagaacctatttaacccaaaaaattatcctcatttagaaatacatatttttttattaatttttttttaataaaaaggcaaaaaatatttttttttatgtatatatatatatgaagagtatgtatatgtagatgataatatgtatgggctgt

SEQ ID NO: 53101 - DNA, 1784 bp, Cannabis sativa
aataaataaattccttcaaaaaataaattccttcaaaaaattccttcaaaaaaaaaaaataaaataaataaataaataaactaacaaacataaatatcttcactcgaatttcaaggctttaaattgagtttcattaactcacattcaatttatgcatcattatcttcacttcattaattaatgtaaatattattcataaccaatctcaatccttttacttctttcattgtatacaatgctgaacaatttaacatttaattaaatatgaattaaattgatcattagatttctctgatattaaatttgattaatttgttgttgttgttgtttctgttacagttcccaatccaatatggattcaataacaatatcatcaatgggtgatgacagattttcgaaattatccaattcattgatcattcacatcctatcgtttcttccaactaaagatgctgttacaacatgtcttctttcgaaacgatggaaacttatttggtactcagttcccacaatctttttctcgaataatattagtcatagacttattagtgcagttgaatggaaacataatcgaaaaaagttttataattatgttgaaaaatatttggaacaccgcaagaaaggtatgtattttatcgtcgattcagtcataactagttttaaccttaacatgaagggtacctatcaaagaagtaagactcacattttggataaatggttagcttttgcagttgagaataagattaaggaattgtatctatctataggtcgagcttataataatggtgataatattgagtctttttattgcttacctaagataatagacaatgcaagatatttgactattttggagttgaatgcagtgaggttggatactacttctcatttgtttagttttccatctttgaaaactttgtcattggaaagaattcaccaatcaaatacttcaaaagatcatgatgttgtgtttaagtttttgttgggttgtccttctcttgagaaattgcggttacataattatgaatttttgcgcgttgatgagaagcttccactacaaagtttaagcctcgaggtcttggaattgatagatacagaaaatgtaactgatttgctagttgaagctgtaaatcttgaatctttgatactaagtggtatttctatgtgtaatataaatctctctagttgtaagaaaattcgaaatctcttagttgatgatactagtgatgtttttcaattatcattaaatgctcttatttctaagattcctcaacttgagaattttactttgagcacttggtatgcatatgatccctatgacgatcctctcagaatctctggacaacagttgaaaagttttaattttaagaattgtcactttgaaccgtgcaatattacaattgaatcagctccgaaattagaatacttttgttacgaaggttgtctcgatctaagcatatcaatagagccatcgaattccttgagtggaaaaattgtgatttctaaggaagatgatggctatgatacaacttggtatattgatatgatgaattttcttttgaatctcaattgctcttggaatactcttaccctacatattaaagaatatgaggtacttgtattatgtttttatttttatttgattatgtggccttatatttcaatattttatagttgatctatttacattatgctaaatgatatgtttatgttttgtatgaaggctctcatttggccaaaaaagttgaagagggtatgccgatctccattgcttaattggaagc

SEQ ID NO: 53102 - DNA, 1132 bp, Cannabis sativa
gcagttattgtgtgtgctcattgcgcaatttgttgttcttgttgtggaactttttaaaagtgtccacgacattgggaagttctctcgtctcaagatgagcctatttttatacaataaaaaaaattaaaaatatattattgaaaaaatattaatttttagacaaatcaactgacaacatcataccgcgctgaagatgtgaccgactatggtattagaccccatccaccttgaatcttcatctatttacggttttttgcatattgttcagctcttgcctgtaattcaaagtaaatttattgttagcaaaaagagcaaaaaattataagttaatggatatttagttttactactttcattttatacctattgttttgggtctttcgagtgtgtgataacctctgcccacactttcggtgtgaccacatctgtacgtgatctcctagtcgcttctttctctccatatttttcaatattctcctccatgcctttttcatgttcgctctcgagtcacgtagccctttcgacattgattacattgagaaaatcatagacaagttctttatgaaggatgcaaaggttgttaagcaatatataacaagccagtatactctatccaaagaataatgccccaaaacaaagaaagaagttgaagctatgaaagatgtaccctattcaaatgcagtagggtttgtcatgtatcttatggtaagcacaagaccttatctaggttatgctatgagtgcgcttagtaaatacatggaaaatctaggaaaatttcactagtagatacttacttgggacaactaaagtaggcttggtctataagagacagaatgtaggtactataatagaagggtacattgattcagattatgctaggtggctttgcctctacaagactagaactcgaagttagttacaactgtttgtgtaactaacttccagcctgatcaactacttacactactctataaataagctacagaattaaaaggaaaatataatacaaaaaaaaagagaaagaaagaaaacctttggttcaaaacttcagctccaagatccaaagagaaaaggtctcaggcaaagagtaaaactctcgcggtgattaggttttgaagaaaggaagtacatg

SEQ ID NO: 53103 - DNA, 798 bp, Cannabis sativa
gcctaaaactagacctagcacccaggtttccaattagttttccaaaaaagtgttacgggtatttttgttgtcataaaaaataacaaagatacaagtaaactcaaggaaaaataacaatttcaggggcatcaaagctgagcccagcgcccagattgacaatcaacctagtatgctagtttcgatcactcaaatgaaaattttgttctaagcattctctccaaaatagtaaaaaatagggtaggagacctcgtcctctatttaaataactttggaagtatcaaaacaagaactccggaagctccgaaaagagcactcattgcccaggtttacatatgacctggtgtgttggttctgcttatccgattctgattctgtctcgatcattcgtctagtttttcatagtgactgagagttatgaagctagaagagtcaaattcataatttcatattttcacttttttggcaaagtgacttattcggaaatcgggtagtttcgagtcttctgttttagcgaaatagcaacatctccaagaatcggtggccaccttcatcagaacacataaactggctaagtgatgtaaaaatattacttaggcttcaaaaagtaaatcccagacactatttttccttggccaagtgtccaggttgacatcacatgtcaatctggatgttggatgtcaacttgggtactgggagtagaacagctttcggtaaaacgaccatagcacactcaatattgatctgattgacgcgattcaacttatatttcgaagatattttaatgctctatcaagtcat

SEQ ID NO: 53104 - DNA, 1007 bp, Cannabis sativa
ctttaataaattatatattgattagagggtccactctttttttttcttcctttttttctttcagttcaagatgattaaattatataaattaatcttagagatcgattctttctccaaaaaactacagagaaattatcagtcaataaatggagaatccagttgtatgtagatcgaaaacgaggaatgagtccaaagtacaatcaattcaccattcaaactgctgaaccgatggaagattaagataaagtttcactatgcttagttttatttgttatagggttttctattttaataccttttcctctattttaagatgacactttttcattaatttttgctacataatgttttcgttaaattttgcaaaacacagtttactttgataaaacaaatagttcaaataatcaatcaaaaatagttacaaaaatctaaaaaaatattaaaacttaaataaaactaacatttaggcacgtaatatccacctagtatatatatatattgaaaagaagcggtcacatataaaacaaaaagttagactataaggtctgtataaagagtgtgatatgggagccaactctacttaacaaaaccaggtacatcatatgtattaaagtccatttatcgacgttataggcagttgtgttacatgctttagcaatcttaaaaaaattacataaaataaaatttaaaatttcttgatatgttgaatactattaggtttaaaattttattaatttttattaacaatatgtaaaaaaaaaaaacaaaaatgtatttttttggagagaaaaatatattttttcacatattaaaatagttattttattatttatatgtgtaaaattctaaataattttttaataaagggttaattgtggcaaaaccctcaatagtttcattttacttgcaattaaccctcaaaatctaaattttagcagtaaaacccccaaaactacaattccgttagcaaattacaacttccatccaaatttagatgttaactgcca

SEQ ID NO: 53105 - DNA, 984 bp, Cannabis sativa
  modified_base (55)..(59): a, c, t, g, unknown or other
tgacaaatataccctctgtaatcatttaaaaagcactttttattaaaaagaactnnnnnaggggcaattgttatactcgaaattcggctggtgcttctgagaagaatacgtgtcaacttgggagaatatgaatcaacgaatataatggtaattatattaaagaatattaaaatggaataactcattgaatgatgaactgttagagtaaatctataacttgatgactataaagtcttaagcgagataaggatgtacaaattattaattcatgtattgacaagaaaatcattcgtatatgaagacaagatcataaggacaacatcagtaatacaaagcgaggtaccagcctctctaagtacgaagagatgtaaatgagacatgttgactgttataacacttagcatataatattcattatacaaactaagcatatcagttgaattaacttgaataacgattagcgagacatccatctcgctataggagggcatactcatggtaccttcactaattagcttcaaacatctttcaatgagattcagtacactgttgagttagctctttccgatagaagctgatattcaaatgatgttgactgctgaagttgatcttgtcaccaagaactgcgattgttagatgaggcgttatgtcttcaatcgtagaaacaacgagatttacattatcaatctcagaaagacatgggaaaagctcttgttcgcagctagggttattgttgctatgttcccaacgagatgtcctagcacgatacgatttgtagcatatttaatccacatatgcattaactgggtaaaaacagataaatcacagctgtgtgattttcaaataataaccgtatttattttacgtgggatgtaatcaaatcccacaattttatgggattattgttgtgggatatcagcctgattgtaattaactgccctcctatgtaactataaattagagcaggatacactgaaaaaggca

SEQ ID NO: 53106 - DNA, 1343 bp, Cannabis sativa
tgaaacacttcttgaacttggacaatatccctaccgtatcaagagacaacggtctatgatcagaagtactcgtctggatcgaacagagaatagctttgggaaacaggtgaagctaggcttcattcataatgtctttatccagggccgacttcacgtggctgtctcccgaacggtggttatcccacgtcatcatgtctccttgaatgcgcatatttattagaccacgggactccaccaggttagatatgatatctattccctatctaaccaatgaaaagagtacattacatgtcgttaaatgaattaacatcaatctaacttatatcatctttatattttaattcataataaatgagattgtttttatccaagttttttatttgttttctactgacaaaaagttccttattattattattcacaattctttttgaaaagggtcattgcttaactttgtacaatggtttatgcatacataatttaaataaataataaaagatataataattgaacaaaaaataatcatattaccataattaatttataacatcaattacctatataaacaaacaatatattgggaaaatttaatgtaggtgctgttgttttatccttttagtataacaaattaaaccagtgataagttagaaaagcatgatgcacttctgtttcaatggaagagttgtatataattttatttcattaatatttaatattgttcgatgagagtaggaatggaaatagagcaggtaatatgtgaggaacgcattcttcgcttccattcctactacccatttacggcccccatacctgccctatccctgtttaaaacccaacaaatttaagtaagggaatacctatcagttataagaaactcgttggatacccattaacgcaagatgaagaaaaaaacaaaaataaatggaaaaataaaaaattttaattttaaattaaacaaatattaattatactttataattcataaaaaataaaagatacaagcttcaactttcaagatgaaaggtaccattattaaagaacatttataacgaaataaaagaagatgaatagtcagtagaatcaatacacaacaatcaatatttttttcataatatatatatgttaaaactataaattatcggacaacacaacatagaaaaaccgtaattacttttattattgcaaaagtaattataccaagacttgaatacgttttactaaccacaatacttataatacactaaacactcacactcttatttagtactagacacctttacaatactcttgtactcttgtatgtaactcatacttttggcacactcttttgaatacttaaatta

SEQ ID NO: 53107 - DNA, 1087 bp, Cannabis sativa
aatcatcaaaaaataaaaactataacaacataataggagttcatgattactcaagatttagcctatctactattgatcatcattatgacatgaattatgtctttatagtaaaaggtaagtttgataaagacaacattattcatatcagtccttgtcatatataatctttattatatacaacacctttacttagatatcatactacatccgctatctatatcaagattgcttgcaccgaaaaacaagcattaatgaatcgtactagcaatcattgattaaagattctcaaactttaatatgttgttgattgttttatttatgactaattgatcttaattctctgtacagctacaagtcacagcctcatatttgaataaggaatttttcgatatttatatataaattattcaatattcaatattaataatttaacattcattcatacatcaaaatattcaattcttatttaataattagaaatggctttataagtttttcaaggtataaatcttaattattgggcttgcgagttgtgcaggacgtaccctataaaattgttgcacaacacgacacgactcatattttttatggtataacacgatatgacccgtattttaaaaaatccaaaataatatataacgggctaacacaacttatagtgccttgccatgtttagatttttcataaagtaattaagagatagtagtgaagatccaaaataataaataaaataaaatatatacgaacccaaaaagatactgattcatgaaactagctattagctaagatattattttaatgttcaatcattctcacattcacatatataaagccaccaatgtgccaacaatttcctatacgaagttcactttaatacttgatactaaatgttgctgttattattaaaaatggttaacttgaaaatatacatatttttaatacttgccgaggtaatcagtaagtagtaagtgtttttattttattttattatttctcatagaaaaaaaggggatttaaaacaaagtataaaacaaaatataagtatatataatataattatgtacaatagaaagaacgttcacccacg

SEQ ID NO: 53108 - DNA, 1495 bp, Cannabis sativa
  modified_base (858)..(861): a, c, t, g, unknown or other
  modified_base (953)..(956): a, c, t, g, unknown or other
  modified_base (1013)..(1022): a, c, t, g, unknown or other
taccttaatggatacctgatgggtttctcataaccgacagatattcccctaccccgaatccgttggttattagacggggatgggggtataaataggtagcggggatggaggcggggattgcattccccgtacattaaccgcccaatttccatctctaagagtgaatgagaattttttagtagtctatttcaataggttaaactcctttttatataaaaatatggaataaaaaattaagtgaatgaaataaaaggaaatacaatagtatttatggtaataaatgatttgggtgatttgaatatccatatatatatataatattttataacactctctcttgaatattcataataactgtttcattaaaaattttgccagaaaacttaataggataaaaactcgattaaggaaaaaagagtgtagtataaattaactcccctttatttaggcattcgtagagatattctcatcaatgaattccaatcttatgaactatcttctagaatatgttgacacttgattgaatatgttggatatcaatatgtattctcttgaaatgtattaagaaaaatttagtgaaaatatcttttgttctatctcctttattatagttttagttgagcaatgcatttcacgttatcttcatggagaattgctaatgttgatattatgggtgttaatcaaaccgcttaaactgcttaaactgcccgcaccacactgcactgcaaaaaaaatgtggtttgaaattctttaagatgcggtcgcgatttgaatttttcttaaactgcgcggtgcggtgcggtttgcggtttcgaattgttaatatgtggttcaaaccgcaccgcacattataaaaannnnaatttttatatttatttaagtccaatttgtgaatgtccaacccaaagcccactaattattgtattgttaaaacttaattttttttttatatnnnntttcaagccttatggtattttttacaagcgttgctcaaactttgttgtatttgtgannnnnnnnnnatttggtgatagtccaaaccgtaaaaactgcaaaaactacaccgttccgcaccattttttgcggggcgggttttgcggttttttaattttgcgatgtgggtgcagtttggaaaattaaaaaaatcgcatgtgcgggttggttagaaaaaatggtcaaaaacagcaccacctacatcgcgaacaccccgtgttgatgtatgtttttttcaaaatattatcgcaatgatctcactcccacacattctctacttgtttcataaagtacaagtatattagcatgatttaaagttgtctcgttaaaaaagcttgttaggaaaatccagtagaaaaaaaaaacctgagctatgaaaaaaagtgcaagacatattatgtcatattcataattatttgcaagttgcctcattaaaaatcttattaggaaaatccagtgggacaaaactgagctaagagaaaagagtgcaacatgcatatgt

SEQ ID NO: 53109 - DNA, 1895 bp, Cannabis sativa
agaaaccacttttgaaaccaaaatcaccaaactatattccaattatgttggtaaaacattgctgacattccatcaatcccaggacttttatcactccccattgtcttcaaggcctgaaatacttcatcacttcgaaattcctgtagaaggaagtcattatgagctgatgtaattgttgttggaatcgttgaaaggacatgagaaagtgcccagtggtcttcatcggcagcagtgaaaagttcttgaaaatatgatgtaacaatattacaaatgccatccttatttgaaaccatagttccattagcatcttgcaattgtttaattgagttgttggacttcctggctgatgcttttgcatgaaaaaactttgtatttcgatcaccagatttcatccaatcaatccttgatcgctgcttccaatattgctcctcagttgctaataactcatccaatatcatctcagccgagactaccttttgactgtgagcagagtcagttgcagccgaattattcaatattgttactgttttttgtgcttcttttttgtccttcttcatgctaccaaacttcttaacatgccattgttgaagattaacagcacattgatctaaacaagtctttagattttgagaaggatccattccatcagctacaaaccaattagcagaaatgatgtcagagcagtcgggttcattcaaccatatttgttcaaatctaaaccttgatcttctcctatttgtgtcctgtgttgaggactgatcattgaggataacatccactgagatagctctatggtctgacccaaagtagtctaaatgagtaatagttggaagtggaagatgatccttccacacattattaattagacaccaatcgagtctttcctttaaagcagcattgtttttcttgtttttggcccatgtataatcctccccagtatatggtaattcatttaaaaaacatctgtccattgttgtacgaaagtctctcatatgagcttcattcctcaacggtccaccatttttatgctcatttgaaaaaatttcattgagatctccaaccaacaaccaaggatcttgtggagcgacatccgcaagtctcttaataagagcccaagtcagttttttattttcagattcaggaaaaccataaaccgcagaaaaatgccatcttggtccattgtcaaacaacaagtaacaatcaaagtgatttgtattcattgaaagaagggttacatttacatcatctttccacaacaacataattcctccttttaatccaacacgagggacttcaagtccattattaaaatttaaagattgcttaaaacgagaaagagaattaaccagaacttttgtttccatgagaaacaacacatgaggaatttgctcttgaacaagcaaacgtaatcgacggaatgccctcgggttccccaaaccccgtgcattccaactaatgattttcatgaggacttgcgggattgcatagcaatctccgcagaattgtcaatctgatcattggaatccataacctttgcagaaaccgaatgatccaagtgaacttcagttgacatagctgaagcaacttcagtgtttgttgcacgacatctcttcagtgtttctctcatggaattaggatcaatttgacgcttgaaaacacgattaggattagcattttccttgactgaaagagatgtattatccttctcccttttcacaccaacagacaccccaggagcagaaaaagtcttcaaagaactcataccagcaaccggtccagtgattgaagtagtctttaatgaatttaaactgactgtcatgtcatgcagaggagtgttaactctggaagaagaaccagcagccatcagagcaattggagattggacagtagactgc

SEQ ID NO: 53110 - DNA, 1715 bp, Cannabis sativa
caattatgtccaaaataataaaaatacctacaatcaacaacgaaggcattaattctggccttggacataaatttggatcaaaaagagtaagtacagtacagttatgagcaataataataactctgtcacacaatttcctttgtaacaattttaccacttctaaataatgtaattaaaggctataaaaaagaactgttttccaaaaatgcagtgtattgaacatcaacctttacaacaattatatggatacctccaacatattaaaaattaaaaacaatggtaccaatctattcaacattaaacacatagttaaagtactgtacagtgatgagacataataactctgaatttcaccatttctaaataatgcaattaaaagctaccaaaaaaaataaaggttagtgtttttaaaaaatgcaatgtattgaacatcaacgtttgaaaatggtagcaatctattaaacattaaactttgaaaaaaaaagttgaagtatttttaaaatgcaaattagtgaaacacaacaatattgactaagttattatgacactttttggattatattgtgaaaattaccgatatttatctttaaatcctagtatttcacactagattaattactgtactacgcacatattgacattcacaatcaatgacgaaatagtaattaagaaatttttaatagaaccaacttaaatgcctacctttcctttgaattacgtccttaaaaaacataaaataaacatcataccacatacaatatctctaacgaaataaaagttggcaaatgatgaagaggcaaataaatataatgaaatataattttttaataatgttttcatggtgcatcttctctttctccaaactccttacttggtttcgcaaaccgagagtagtgtctgcaggttttttaggatgagcttgatcgatccaacaaaagtaatcacatcctcgactttcgttgttctcctgaatttaaaataagtacatcaccatatttacaaagcctagtttaaaatattattaaggcgttcgaagtcttacatagtgcggacatccaaagaagcgacgacccggatttgctctactgctagaagtccaaacataagctagatcaccacagtagcaatgggggtgtcccccaagtgaatttttccatgaagggaaatccctctcgaacccgtaggggtcctctccagaaccagccaccatgtttttttttttaacaaaccaaattagggtgttagtgaggcttgaaaaggagtgtttccgttgaccttatggtggaaataggttgtgaaaataaatttaggggggaaaccgaatttctttgaaaacgttagaaagtatattaaaattggggagcatatttcgtgcttcctctcaaatatttgcttcaaagtctttggtgcactatacttatatacaaaaaagtagtgtcaatcaatcacaagcagtccaatcaaattaaaataatattttatgttaactctatgaacagttaaaagtacaacacataaatatttctccccacatgaataaaccacatatacagccggtttagtttggtttaatggaattgtatgaactttcttatattttaattttatgtaggatgtattggaattctaatttccaataatcagttgacatgtgtaggatgtattaccttctttaataaaataaaaaatacttatttaaatatacaaacctttga

SEQ ID NO: 53111 - DNA, 871 bp, Cannabis sativa
ggtgtaattcattgattgacagaagatgagtacaagattcacagacgtgttggcattcagtgggccagcaccagagagaattaacggtagactggcaatggttgggttcatgggggctatggtagtggagctatcgaagggtcaggatgtgttttctcagataagcaacggtggagtgtcttggttcgtgggaacaagcatagttctgacactggcttcattggttccccttttcaaaggggtgagtgtggagtccaagtccggtggggttatgacttctgatgctgagctcttgaatggaagggttgccatgttgggcttggttgccttggctcttactgaattcgtcaagggtggagccattgtctagtctctaaactctttcacctttcattatttttttgtctagaaagaaaaatatgtaaagtttcatgtaatacataaatacatcaaacatttttgtctacaacatcagtttgttgtttttctgtatttgattttctaaggaaacaaccaaaatattcactttattagctcttgctattataagacaccagaacaagaacaagaacagccgtaactctcaaactacattataatgcaactgaccactcatgcagccatgtccacaagtacattatccacaccaaggtatgaggtttagacttgatggaaatgaaaatgtaaaatttaaattaaatttgaatgataagggatttgtgtttctcataaaaatttgatataatatttttgattgattaaataaatgttacaaaagttacaaatttgttactaaaaaaataatatttaatctagtgagagattgttatattatttgtaaataatataatatacatattaaatattgtaa

SEQ ID NO: 53112 - DNA, 760 bp, Cannabis sativa
tttttattctcatcgcttttccttaatcgacttttcgtacagtcagtactatttattaacattgcttttttgataaaaatagactttctcgaaaaattatgtaactgatgtaatagttttttaccaagttggggaatttttttctatacgactagtcaatgaccataggtagaaagaaaagtaaaataaaagaaaagataatccaaaggctatattaatatacaactcaggcttttttatatttatttttttatgtacctttctttcaagattccaaaggattcggtcactcaactactaataattaattacaagctcacaatttacaaactcaaactttcactttatacaaatgagctaccatcaaatttttatagccaaacattgtactactagcattcaccttgatactctagcatgtaccaatttgcacgcctcttatatttatatacaaaattagaagactaaatgggaaactactaaatacaaaatagaaaattactaaaaataagttaccctaatattctcctcctacaaaaaaatatattctaatactctccctcaagctggagcatagatattaatcatgcccagcttgttacaaataaatataatcaaccggcaccccattcaaagtatttgtaataatatctcctaatcgttctctgatcttcacatatcttgtggagatcagaccttgttgaattttgtcacgaaaaaaatgacaatcaatctcaatgtacttagttcgctcgtggaa

SEQ ID NO: 53113 - DNA, 501 bp, Cannabis sativa
tgtcaactaacttgccaaaaaatgactttacaggactcactatttgtctaagtagatgtacttaagacggtaattttctgatactcagccttgtacaatgtgattttcctagaaagtacccttgggtacggttgaccataactttatctgtggctttgccaagtttcacacctcccattgtctcttctatgaaggtgactttaagtgttgtcttggggaggtgacagtcgtcgtgtcataggtctcatcaacttttcttttgagagatagcctttagtctatccccctgctccttttgtgtgattttggattgatagtcatggccagaacaaaacgatcatgtcgtaatgcgccaccatatgatcctcatgttgccagggtggcaacgatgagcagagtcagagttgtagaggaggccacacaatctcgtgatgatgtagatccagaggtcgatcaggcagaggtgcttaaggtagtatcgtccaaactaggaactctaag

SEQ ID NO: 53114 - DNA, 714 bp, Cannabis sativa
aagtctgaggttcaggtctgaaatccgatccaaggtgggatgggttcacataataaatggtgtaaaatatgaatttttttcctaaatagttttaaaaaatccgaagtcaaatactattatatttttataatgatcacagaaaactgttttctattattatatttgaaaatgcaattacaaaaatttaaaatacagccaaataacattttttatttattttttatcgcaaaagacctcttttaaaatttatatacatgctttattcaaattacacataaaaatgtaagaggaagaagaaacatgtttcctcaaccctcgctaattatttttataataaataccttgctttggagaaattatttttttccattaaaagtaattgattgaatttttcaatttttttcataaattttttcgacattaatttgtaaatatatatatcttttggagatgactttttcccgtttgacattgttatatatagatatataatgtaacgtcaaaaaaaaattaattaagatataattttttagaaatcttttcatatgtatgaccctctcttcaaatcatttttgtttgacattttttttttcagagaaactaaaaaaccaattatatatatttaatacaacttccgatttttctaagtataacttgccactaataaaattaaaaataaaaaacatggctaaacacatacccaaaatatatatc

SEQ ID NO: 53115 - DNA, 1040 bp, Cannabis sativa
tggaaagaaataggaaaagctccaactagctatcaaggttatcgctgctctattcccagcgagacatcccaaaacgatacggtttacaacgtatttaatacacgtttattttgacataataaaagcagattaatcacatatgtgtgatattcaaataataatcgcatttattttacgtgatatgtaatcaaaccacatgattttaggggaaaatcgttgtaaaaatatcagtcaatcctgtaattaattgtctactatgtgattataaatagatgcaagatagactgaaaaaagggagacaaaaaaatgataaaaaaaaaggccctaaaataccatcagaaatctaataagattgagtcgtggactatgcagaattttaactgcaaaaccacgtaaaatatcctttctgttcattcttttttcttgctatctttatttttctgtgcaagtttatcagtttggtactttcattgagagccttcatgaaaagctcagaaaaaatcctccttccataaaaaataaatgcatcttatggctgacaatgaagaaattaatctgtatgaagaaaccactcatcatcctggaaaaaagccaatgagtccccaaggatcattcgatttatcatttgaacagactgccagctccgagaaaacccagaatctgggaaccaaacttgaagggccaagaatgaacagtggcatgtctcttcccaatctagttgatgaagatggcgcctatgatccaacaaagtatataccaattgtcgaattaaaaaactgccatttcaggcgtcgattggaagaggcaaactggcataatgctgaattagagcgtgaagtaactgcagccaggcggcacaagggaatagctcccaaaatcaacctgaccctagagagagaactgcgaggcaaacctcgagactcgcgaactacgggaaggaggcagcccaaatgaacccccaaaacgctcaggaaagacaacctaggaaactaggggataccttgaaggcgagatgtcgtatgatcagccaggaaccaagg

SEQ ID NO: 53116 - DNA, 524 bp, Cannabis sativa
aaactccaaggttggaaggtggggttattttctcaagccggaaaagaaatccttatcaaagcggtaatccaagccttaccttgctatgtcatgagttgttttcgaattacgaaaggaattctccatgagattgaaagtctaattgcccgattttggtggggttcaacgaaagataaacataagatacattgaggtaattggaagaaactttgcaaactaaaagaacaagggggaatgggttttcgaaacatggaagatttcaacaaagctctcttggctaaacaaggttggaaaatcctcacttatccggattgcctactgtccaaaatcctaaaagctctatacttcccaaaggaaagcttcttggttgctaaacttggtcattatggatcttcgatttggagcagcatcttatggggccgagaccttttacaacaaggtatgagatggtgtgtgggtgatggtagtcaaattcgaataaatgaagatccttggatcccaagaagctatccattcaagcttcg

SEQ ID NO: 53117 - DNA, 1636 bp, Cannabis sativa
  modified_base (397)..(404): a, c, t, g, unknown or other
gacgatgatttttccggcgacttttccggcgtcgataacttttccagcgacttctccggcactggtaactttttcggcaaaacttattattgtttacaaatataggatttccatctttttttataaaaatatggtataaaaaaaacttatataaatgtaaaagggagaagttgagaaatacctcttttttgtatccaataataaaaaatactctcatattaaattttattaaaatatacccactttatgaatgagttatccaatatatcctcaccctccacttatctagagcacataatttatattaacctaaggggtataataggaacatcatctataaaagtgagtatttttttaaagaatatgaatttgaaggtaaaaattaaaacaaataaannnnnnnnggtatacaatgtaattttctcaatgtaagaaaacaaaaaaatccataacccattagctttatttatttatgccataaaaaagtaaactcttaaaattttcctatatatagtgtaatttctacttttaataaataaaagttcattaaaaaaaaaattaatacccacactttatagatgtatttttataaagggataataccatttgggtcccctgttatttatctaaatactactttgaaccttctgttcccataaattctaaaaagaaccttgtaattattaaaatggtaaaaaagagtcccctaattatgattttggtcaaatttatttttccaaagaccaaaataccttttttttttattcatttcttccatttttaatttatttactataaattctttttttaaaaccattaaataagtaaaaaattaattaaaatataaactaaacagggaaatttgagcgtcaccctcactaaacttcttgaacaagattctctaaaaaaaacatctttagcaagaatatgtacgactccctcccatccaccacaacgaacaacttactctgtaccatttttgacaataaggaggtggtgaacgaacatcaaaggcgattttaaatcaaatcgggtttgtcttcttttcttagtattagttcggtatcttcatcgttaatgagagtttggtttttacaactatttaaatgcaaaaccacatgttctaccattgttgatatgggtatttattgggttgaaaatatctgggtagttagtgaaagtgttttttttttttttgaatgattttgtagtgattagtttgaataatatctcaaagtactttgataatgattgtatatcgtatatgtgtatattttttgtggtattgtgtgggtatttaatgagtttgatgtgatatctttttttgcttgtttgggattgcttctgtttgtgtgttgtaatgtggtttgtctttttctctcagtattgttgctaaataagatagaatgcataagctttaatattatgcaatcttctttattcctaataaattaagctttatattttgtatgttagtgtattcataccagtaaaagtatataataatttgattatgctaccttatttttagtataccagtatgtgtctctttctttttaacacttgagtatatatattctagtatatatattgtggaatatctaacaaattgctatagctagtaaaaattagtttt

SEQ ID NO: 53118 - DNA, 4849 bp, Cannabis sativa
tgatcaccaccttggcccccctttggaggaatacgcccaggatgatctggagggtgaacaataacagcaagcaaattctgaccaccctcagaatgcacaatatctgtgacatcaagagaatgccttctaaacatccctttggggaggacctttttgtgcccatttaaatatacctctgccgagtaattgattgcacggaaattcaaatccaggtgctgagaacctgactagaatatgagagcaagcggaagaaaaaggactaatgaataagataagaacaccatatattacacagaacaaagtaaatctttagtcagaatatgtcaaattcaaataatcttatatgagcaactgtaaataaacaggtttgtttgccagcattttacacccagaactgaaccaatagaaaaacctcaaaataacaacattgtagaatgaaattccattgtgttaatggcccatacagaaatcacacaatattatgagagtgacactcaaagatcatttgaactgtgtaaatatgtcacataccagcttagattgaaatgtagtaaagaaccagaacgtgtagtgttcccttccagaatcagcaatgtctataattgtctcattttccagtccatagaacggatcggggacaactttgttcttcactaaggttcccaaaacactgccaattaaatcactattaattgcgatcctaaaaaaccttactccgcagttgataatttatatatataaaaaaaaatccaatcccaacacatatagaacaatgcttattttttaattaaaaaacattaaataattaaataaacttcaagcaataatttaaaaacacaacacaacccaatcataatcatatattaaaaaactcgatatcaaacaaagtacaaaacaaaaaggcatgatttttttaagctaaacccgagatataaaatccaaagaagtgaatcgcacatgacattgacccaaaagttaagtcaaatgactgccaaacttcagaaccaagaaaaaaaagcacaaaatcgtacaaaatactcagttcaagagagggagattacgttccggggacttcggcgtcgatccaaggcgaattagggcctttggaaggaggatgtgtggtggtgagttgagtcccagtgaggtcaacctcagtagacctggcggcgagccacccagagtcaagcttcgtcttccctacggtcgccattaaagattaaaccctagaagtcgaccaggactgactagtttggtgttgagaatcagagcctactattattgtcactctccgtgactgtttgtcggtgtgagttagtgagtcagagcgagaaaatcgcctcggacaggatgataaaacttaagaaccatttatatattgggttaaagaattattttaatgcgttgatttctatatgattcagttataacagttgctgtgtttttagttttaccgcttaaccaaaacgcgtcgtcgtttaatatattgatggtggggtatcatttttctttttctccatgtactcgtctactactaccggcagatttagaaatcgaccattatgaatgtactccatctgtacatacatatcgtcgcatttatataattcttttttttggaatccatattactattagatgaaaattaaacatgctctttattactagtactagaaaacttacccccttaaaatagacaacaaaaaaaaaatagcataaaaaaaattcttccaaaaaaacttttgcacggttttgtaaatataagtttagatttagtgtattgtattttgtaagagtgattagttacactttttattttgttaaatgagagtatattactttctctattatcttaagacaaaatattgagtatgaatgtgacacggttttgctgcagggcggcacgttcgccattcaagcttctatgtagatgtgttgatcatcccgaaattggaacattttttttttaaaaaataaacttgtgctacaaagaagagaagaaacaaaaacagaacaaaagcacaagctacagggaaggtagagaaccattccagattaactcattatctaatcctagacccatcctagccactttatgcgctaagagattaaaatccctaccaacatgacaaacggttaggcctggactaaacgataataagttcttaatgctacaaattacatcatcgaaaacactgttattccatttacaagattaaagtttatctactattgatttacaatccgtcatcaacacatccaaccggaaaacgaagcaattaagcccattggatagcctgatgaacaactttggcttcagcaacagtaggaggaacaagcccagaaaaaggagagagaatcctgccttaaccctgttgcaaccatccaaaagaaccactcctatactatgcttgcttctatgagaatcagtggctgcatctgtgaaaattttgaaagtacttgaaacagatggttgaactcgtgttggtgttgtattgctaactggacaggatcttggcacctgactttgctgcacatccaaatattgaaaaaaaatatgcaaaactccaatcaaaaatatccttaggaggaattgagaactgtttgtgaaagatattattcctttgattccataaagctcacaaaaaataatataaaataccaagagtctctttatcttggtctacaacaagacccataaaaaaactcattcatatccaaatgtttattagtatcataataagaaacaaacctggaagatcgccaagcctttctggatttggagcaatctagcatagcatgcttaacattttcaggagcaagtttacataaaggacaaagaggagaatcaagcacttttctagtaaaaagagaggatgcaacaggaagaacattagacaacattctccaaacaaacaacttgaccttaggagggataacaggagaccaaactcgagaccaaaactttttagaggaagagaaagaagaagaagaaggaagatcctgagaggaaaaagccaaatgataagcagacttcacagaaaaaatatccgaacttgtcttctcccaaatcagagaatctctaccataacaccctgaaacaggtactttaagaatatcagcaatcatagaatcattaaaataagaacccaatttagcaacatcccaagcacccaagtcagaaataaaataggataaaaatttcgaaggaggatcaacattgctagtaaaagatttatatttatgattaggaagccaatgatcagttatagttcgaatttcactcccacttccaactttccaaatgagacccgaagccaacaagtctctaccccataaaatgcttctccaagtgaaagaagggttatgaccagggacagcagtaagaatagaggtctgagaaaaataacgagctttaaggatcctactgagaagagagttaggattttccagaatacgccaagcttgtttagctaacatagcctggttaaattgaacaagtgaacaaaaacccaagccaccacagaattttgatttacaaagaaacttccaggattttcaatgaattttcctagactccccattagaaccccaccagaatttggccatcgcagcctcaactcccttacaaagcttaacaggaagcctaaaacaagccatcacataagtagggatagcctgaattacagctttcaaaagaacctcctttccagctctagagaaacatttagaagaccaagttctaagaacagaggaaactttatccctaagaaaagaaaaagaatgaaatttagatcgagaaagacattggggaagacctaaatacttagacacaaaaggcctatcctccaaatgaaaagtgtcaaaaaaacatattaagaatctcctgaacagtgttaggagaaaaaaggatggaagatttagaaaaattaatagcttgacccgagtccctagaataaatatggaaaacttcatgaagcgctaaataagaatccctatcagcagagtaaaaaaggagactatcatctgcaaaaaacagatgagaaattgacggagcatgcctagaaacaaagattcctttaaggagttgagcatcttgcctagctcgaagaagggaagacaagccctcagcacaaagaataaaaagataaggggataaaggatccccttgtctgagacctcgagaaggcttaagagaacctttaacttctccaataacaagaaaagaaagagtagtagtagttatacatttcataattagagtaacaaaactaatagggaagttaaaatgatacatggcactttccaaaaaatgccattccacgcgatcaaaggctttaaccatatcgagctttaaagcatcccagcccctcttgccagattttcgagaattgatagcatgaacaagctcatgggcaataaggatattatcaaaaataacacgcccagaaacaaacgcactttgaaaaggggagagaatcttgtcaagaactacttttagccgattagcaataaccttagaaatgattttataaattgtggaacataaactaataggcctgaagtcctgcatagtattagcatgttgttttttagggatcaaaacaattaaggtattgttgagagtggagaaatcaatctggtcatttaaacactctaaaaccacagaaaccaactcatgaccaaaagtatcccaattcttctggtagaaaaaagcattaagaccatcaaggtctggagctttatcaccagaaaggctaaaaacaaccttcttcacttcctgggtagtaaaaggctgagccaaaaaatcatattcagactcctcaaggggggaccctaaacagtttaaaat

SEQ ID NO: 53119 - DNA, 1039 bp, Cannabis sativa
  modified_base (165)..(172): a, c, t, g, unknown or other
caagacagtataaaatatcaataaacataattatcacactatataaacattaatcccattctcatatgcctgtgtgacatagacctgcatgtgacgctcacatgcctacttatgtctatgtaacatagacctacattttgcgctcacacgtctaaatacaataannnnnnnnaatggttcatctcggttctagttaccgagtccaacctgattatgccttgaacacataaccctgaatctcaatatactcatatatctaacatggcgtagcatttacatgacatgtatcactagggtaataaccctaggctattaaactgctcaagttagggtaacaaccctaattccagttaccaattactcacatatatcatttctagtataagcactaccgtgcataactctatgtgctaagtattgtcttacctaatgtcccacaattatagaaattcaaaatccccgggtgctcctaaccaagtgctggtaatcctagtcataattctgggatttacacaataggtttaacccctgattccacatttataaagtatatatatatggcatacaaaatatagataatcacatagagctcagaacgagctttccaacgatatatagaactcccaaaatggagttcgaatcacaaagttatgcattttctaagtttgcattcgaatctgcccaaaaacactagggtgggccgcgacactcaaaagctatgttgtggcacctggggccaattcccaggtctcgaaatgcgggcaggccgcgacatgcaaaagcagtgctgcagcacctgggttcaaaatccagaaaaccagcagcaagaacttcaaatttcagcccctaaactcatccaattcaacccaatttacaaccaaaacctaaaaccatcaaacagatcttctactaattaaacacaaagtttagaattcaatttcatgaattaaaatccagctataaaactctcaaaactcagattgaagaagagctcaaaacttgagcataactcattaaaaatccatttttacaagaactt

SEQ ID NO: 53120 - DNA, 951 bp, Cannabis sativa
gcttattcaatagagtatacattgaaattcttgtatctttgagtcttcatcttctcttgatcaacataagtttgtattatctaacactttattaacaattcattggaaaccgtttcaatatatttagtctttttttgagaaataaattataaaagttagtattattatcatttatttaagtatatatttttgtactaaatggatgcatttcaattgtgaatgtattttttctatttaaaatatttgatataataatataaatattatttataagttttatgtatatatttacataaaatattatattacatattacgtaagtttaagttctatttcttcagattagatgtttaattatttaaaaatattacataaggttgttattctaatacttaaaatataatataataatataatttaatttattttaatagaagtctaaatttagtttatctaagttttttcttacctcttatcaatgagatatattttttggattctttttattccatatgttgttgttacatatcttttggtgacttaacttgtattgcaaccgctaatatattcgtattttgaatgttaaaatattttagatttaataagaaatttaaatagaaggaaaatattattagtatattaaaactaaattaccaattttttcttttgaagacatgtaggggtccaaataattataattgactattttgtactccggttgttagtttttgtcttccttttttgtcaatttttatatttttattgtagagattattatccattaatataaataatctctttatatttaaaatggtcatctctgatttagtaacatgtgcattactcatgtaataccattaatacatgaatatatctttccaagttctaaaaattgtagcttcgattttattttgatgtagtaaagtaagtacataattttagttaaattta

SEQ ID NO: 53121 - DNA, 1123 bp, Cannabis sativa
agtgttaccaaacgctaccttaacacgtcatcttttccattggggattaggtctgtctacatgtcagttttgtacgagcctgtacttgtgtttctaggcaaaaaattcatactattacacctttgttgatccaaagagaagaacacaaatagcagaagcgtaccttaatctatagataatggtgatcttaatccatctaataaagatgatctttgtggtattttaggtaataatcttccaagaaaataaaacttagagttttttaattggataaattgcggcataaatacctaatgttttagattttatacacttagataccttatctttatttttggggcaaaaatacccaatgttacaattctcttacactgttactgtcacttccgttaactcataaatatgaacacgtggaaggctcagatgcattatatttatttattttattttaaaatttaatattcttaatatcaaaaactaaatgttacttatttttttaaaaacaaataagagagatgcaataccatagttgagtatcagtgcagtatatggaacatgattatcgaattgaagtgccaatattatgtgaaaatttttatgagaattgatttttttttaaataagtagtatttagtttatgatattaagaatattcagttttaaaataataaaaaaataaatgcaatgcatctgatccttccacgtgtctatatttatgagttaacggaagtagtagtaacaatgtaagagaattgtaacattgagtatttttacctccaaaaataaagataaggtatttaagtgtataaaatctaaaatattaggtatttataccgtaatttaccttttctaattttctctcttgataggagaagataagagtagaattactcttgtttcttggagaccactaccattatataacttaataagttattaattttagtatttctaatttagtcactcaataaattactcaataaattagaaatatatcttaaagtatatctatacaattaacacataatattttaatactcaatgacccataattactaaaataatcattttatttgagtcaaattttatataacacaatacacacaaatacataagagtccac

SEQ ID NO: 53122 - DNA, 2802 bp, Cannabis sativa
tctattggccactaccttggaggcgactttgtaaaggacattacaaagcgagattggccggaggtcgcccatttgagagggatttttcttcttaggtataagaacaatatgagtatcatttatggaatccggaaactgacccgaatcaaagaaatcccgaacaaacttgaccacatctgtccccactatttcccaatgcttttggaagaaagctggtgtcataccatcgggaccaggagacttatcaggatgcatctgaaagagggcgcttctaacttcttcctcagagattgttctcaagagatcttcattttgctcacggcttacagttggccgaataccatccaaaaccgaacccaagttgacactagaagaagaaaacaaatcatggaaatagctagaaataacattagccaaaccagtctcccaagtaacccaatctccactgctatcttggagacgggaaatactattatttctcttcctagaattagcaattgaatgaaagtacttactgttcttatcacccgagttgagccagaattgcttcgatctttgcttccaaaatatttctttttgagccaggacttccgccaacttatccttcccttctttatgttgttggatggaaatcgggtctttaccccacttggaattacggatttgactcttgcattcgttgatgcgctttcgaaaatttccagtgatgtcccgaccccatctccccaaaacttcgccacaatgctgaattttctcttgaatggtgactgaagccgaactcttccaacaaccttcaacaagcttctcacacaaaggttcccggagccaagcattctcaaagcgaaaagtgcgaagagaagctagaggagtgttacctttaaagaataataacaaagggcaatggtcacttgttgagaattccaagttgagcagtgaagactgtgggaaaattgaaagccaagagttggtgacaagagctttatctagtctttcttcaatccactcggaactgtttcttcctttctcccaagtgaacgggtaaccaagaagaggcatatcgatcaaattacaatcgtctaaagccttaagaaatccctcaatgagtcggtctggatacttccttcctcctttcttctctaaatgcgaccccaagttgttcatatcgcccaaaagacaccatgggagaagactatcatttttgagtgaccgaaataggtcccaagtttgagaccgaagttctctttttggctccccgtaaatgccagtgagacgccaaggaggcagccccaccatatggaccgtggcatctatgtgattaaaagagaaaccttggatgacaacttcactagcttctttccaaagaagagcgagcccaccactatgaccacgggcttccaccacaaaacaaccttcaaaccccagttgggcttttaatctttccaaactagccttattacataaagtttcacaaagaaaaagtaaattgggcttcttttgagacacaaggtctcgtaagaattgtgaggcccgcaggttcccaagcccacggcaattccaacttaaacaactcattgctcctggcgggcctggaaaccagagcccaccatcccattttttgaaagcctcgaaccatcttgctccatgtcatcatctgtagccgaaactacattcatacgtggacccccaaagtttcctaaagtggaatcgggtcttcttctcttagagtcaaccattgtggtgattgtggaatcaaaaaagtttccattactattgacatttaaagtcaaatcttcctcaattattccttgtgtaatcttgctaggattccgcccctctcttggcacaatatcaggaagattatcattaccatgattcttgcctatcaaatccccaattctctccactgatctaggacaaggaaaaccaccctgtacagagctgcttcccggagtttcacgcaccaccgcacctgacctgagccattgagcaccaatagtcgactgtcgcctctgcaactgtgccttctgatccaaaccgtaaggtttgtcgtgtaagtgtaaaggcttcaagaacaatctggggcaaaacttctctgagtgaccgattatcccacaaatgaagcaaaaagttgggattctttcatacttgaaattggcccaataccaggaagagttgtcgatgctaatcttcattcgtcgcttgataggtttgttgacatccaagcggactctcacacgtaggtaatctcgccaaactcccacgaagttgttaggatccgagtctatgaacgtaccaatgaaattcccaagtgccataacaacactaagagtcatgtttcccgtttgtagattgtgtatttgcacccacatatcaaggttgttgatttctatcatcctcgggttatctccttccttcaaccttgtaaaaataaatggcttacgatcgtatgtccatgggcttccgtcaatgactctttgtatatcaatctcgtgatagaattgaaagagaaacagattcggattaagctccttgacgtacattcccattcccggctgccaaaggaatgccatcatgttttggaacacattaaaatctgagactctgcccgtcaaaagcttgcccactaagcaccatctggtgtcaatcgacacttcctctgtattgataccttgaagctgtagaacctccgtctcttcctcatccaaagagatcgtttctctccctgcatcaagccctctttcctcgctgctactggacgccattgaagaccttcgaaccaaccagaattgaacaaaaacaaaa

SEQ ID NO: 53123 - DNA, 1102 bp, Cannabis sativa
ttgaaattgcccatatgtacttacaaatgccagcttgattccaatgttcaatgttcttgattcccaatccacccgaggcttttaattgacacacattgttccaagctacagaacctccttggaaaagggcttgtcctttccacaggaaatccctacaaatggcttcaatagacctcagtactttctttggcaatatcatcatttgactccaataagcctgtatagcagttaaaacagagtttatcaaggtgattcttgtagcaaatgagagattcctggagctaacttttaattctagcagtcattccctcagctaacagatcacattctttcccatatatctttttcccagaaattggaattcccaagtaggtaaaaggcatgtcctgctttatgaaacctgaaagttggataatatgattcacagtcccattctgcatgttgctacaataaatggcagttttgcttgcattaggttgcaagccagatgtaagtgaaaaagtttttagggcctgtaacatgtagaggatgctcctaaagtcaccatgacaaaataatagaacatcgtcagcaaaggctagatgattaagtttcagctcagagcatctatcatggaacctgaagtcctctttttccccaattttcaacatcagtctagacaaatactccatgccaagtacaaataacaagggagacatagggtccccttgtcttatccccctcttaccttccaaaaaccatgaggagtgccattgaacatcaaggagaatcgaggagtagtaatgcaattcattactaatcgtatgaactttttagggaatttcagacctgttaacatctctgcaataagcccccgctcaattgtatcataagctttttgtagatccaattttatcatgcaacaaggcttatttgccttctccataatgcctcaccaaatcttgacaaattaagatattgtgccctataaaccttcctttaacaaagccaccttgtgaatgtgaaattatttcaggaaggatgttattgattttagaactcaaaagcttagttgcaatcttgtaaattacattacaacaagctattggtctaaaatctttaa

SEQ ID NO: 53124 - DNA, 675 bp, Cannabis sativa
cccaacccttgagtgttttggttaaagtagcttcaaattaagtcggcagcctctgatgtgcaacaatcttggtcgtcttggtgcctcctcatttcacgagtatgatcatccagccaagattggaattctctttgttggttagcaacactttcggtcaaggctgctgagcttgagtttgctcttggtgaataatctggaactggccttgcattcggcctatcgcatctcgtaattgatccatctcggggttgattccctcgatatccacatggggttcactccgcggcctaaagataccagggcctcagccagtttgagcatggcctgtgccttcagtaggtggaacaaaatttctagtactaccccttctggtagcgctgtcagtagcactgcctcgcgcggcagtcgcgttggtggtatgcccagcagttgtctgcccaatggcagcagtttggccagttactccatggccagcagtcttagcggtggtggctatcccgctgttccccggacgcgggggtctttctccattgttcaattgagattgcttgctgatggaacttgctcgacactatccatctcttcgtcaggtcgctcttgatatctttgggttaacaccattttttctagtgaaaaacttcaagattttgggtaaagctctcaatgaaagcacca

SEQ ID NO: 53125 - DNA, 637 bp, Cannabis sativa
cttgcctccagcattagtcttatcaatctgtgcgactctgcctctggaattagtctagtcaccctaccctgaagcatggtttcttttctttttctattgaggttggttgacaattttagacttcttttgttgtttagttgaaggagtcttcttcaaagtttcaccaactatccttttccctttatccttgcgaggatttgaggttccaagatcttttagattaactcttccaggagcatcaattgttggaggtgtttgcacattagggttccctttggtcaaggctttcatcaccacctccattcttgtcatcttcctaagcaatacctcgttgaactggtcttgacgggatagcctggtttcagttaattgaaattttttggccatggcgaccatgagatctgactcatcaggagagtccttttctccagcaccaccttcaataatcttatcctgacgatcatccttcggtgtgtcttgaggattatcttttggtctctcttgaagatcatcattatcatcattagaactgttctcttttgagtcatcctctccaaatataggagtgttgtctttggcaacttgatctttgtgacgactagttgcctcattctgataatatataacatacttgtta

SEQ ID NO: 53126 - DNA, 747 bp, Cannabis sativa
ctcctcttccttcataaacaaaaaaccctaaattttctaaacatataaccgcacgcacccttctcttctctcttctcagcaggcagccgcacttttcttctctcttctcaaccagccgtgcgcacttctcttctcagccatccgcagccgcacctcctctcatctcagccacagccacaaccgcacctcctctcgtctcagccgcacccgcactcgcacccgcaccttctctcttcccagcaccagtggaactctaaccaccgtcaaccacctttctctctacagtcagtcgccttctctctctctcattctcctttcgcgcacaaacctctgccagaccaaaattttgagatcttcgtaagctagccagacagctatccatctcagcaaagatgccctcgcacaagagtttcatgatcaagaagaagctggagaagaagatgtactagaacaggctgattcctcactggatccggttgaggaccgacaacaccatttggtacaatgccaagcgtaggcactggcgtcgtaccaagcttggattctaaggtggatggcctttcaattttaagcctattttagtttttagttcatttggagaagaaagacatggaaccatttatgtagttaatgtgtttactccagcggagtcctttaacaagattttggtcctattgttgtttgttttacagtttattttatatttaaagttatggatttgatttatatttgtgttaatctgaaatt

SEQ ID NO: 53127 - DNA, 985 bp, Cannabis sativa
gtggtttaccacttaaaaataacacaaatactaacttagcccatcatgatttatgaacacttaaccttcttattctattacattgaaagaaaagaaaaagaaagtacactttaccaatttaattgttattttaatgcatatagtggtacaataaagatgaattttgcccggttaccagttttatcaaaatgactacccttacttttagatatacatatgttagccttaggataccaaaaaaatgaatctctttatcaatccaatggctcaaaatatttgtggttttacattcctcacaatactaactgagattttatataattagcctaaatataaaagagaagattgtaagatgccacttttaggcattcttacttggtacacatttttaatctaaggtaagtgttgaaggtgagaactcatcaactacattgttgtggaaaatcttgagtaatgattgataaaaatggtgaaataattttaacataaaaatttcagagagagagagagagagagagatgtgagatgcttttttattaaaaaaagtctcttcaaaattaccgagttctaactctccctctaagagagtggagaagtatttatagttgagctttattggccttgtttacaaatgagttgtaagtggttcctatgggaatcatatactattatgatggcatgtggtattgggatggaggcatagttggtcaggtgatattgacacaagcacacctccacttcttgtacccaatgtatgtccactactcttttctcagcttttgcatgtgttgtgattgtaccatttgaccttttttgattctttttaaaatttctcatcgtatcaaaaggtgcttgttttttccagtagcttccatctctagtggtgataatgtcacttggcaaagatagtgataatgtcgattgactaaaatggtgacaataactctccttttatggggaaggagcgacttcctttatgttgaaa

SEQ ID NO: 53128 - DNA, 1260 bp, Cannabis sativa
  modified_base (1200)..(1217): a, c, t, g, unknown or other
agctcaatactataattatattttaatagttgccgaaaatctcggtcaacagcttcgaaataggaaatcgtgcttccaatctctctctaaatagaatttgttgtttttacagaatgagtaaaaagttcgaaaactaagaccttatatttataagtgagatacactatcagtatctgtgtcacattaattgtcataatattttgacaattaatttaaaaaatcaaatcaaataataaatatctatatatagaatatcaactaattaactgtattcagattcagtaaatataaaatatttatttataaataaataatattctaatacatcgttcacatttaatgtatatatcatattataaaataatataacattataatttatttattttttaaaaaaacaacttactacaaataaagaaaaaaaaatattgaaaaacagggtctatgactctatcttatctacctcttcgggggtttaataattactaattaggaagaagaggcaagagagaaaaaaagttgggagtgggttctcttgtgggcacacaataaaataaatgatgtgtggaatgtaccttaatgcatacttatctctagtcataaataaaaattcacttgtctactctaccttatacatttggggtggacctgtctatgaaataaatcattgaacctaattaaactaatttagttgacactaattgagttacaaatgactaatgaactaactcttacatattaacttcatctaagtctcaatcatgataaataacaataaataaactatacctaaattcccattatttatttgtcaaagttgtttttaactaaagagcacttggtagtagtagtagtagtaggcagcttcactaactcctttaactaataaaagtaaataaatacaaggaggaggaaacatcatcattttcaaggatcttttgttatattttcttttttaaaaatgttagaaggtattgtgaggtgtaatatagttattggtttaatttaatattagatctcacttattttagtttaataaaaattataaaaacgtaacaatgatcatttttttttttttagaaatgctaaaagatatcagtggtgcctagcacctttttatgtgacaatatcgttattagtccaactaaatatcatatttcatagaatttaggaataggaatgagaatgggaatgggaatnnnnnnnnnnnnnnnnnnaatttaaaatgcataaaaataattgataaaaaaataattaaat

SEQ ID NO: 53129 - DNA, 1239 bp, Cannabis sativa
tatatggcaaaacattcttgaggcccggaagaccattctcgagggttcgtgtaccattattgccaacggggaagatacagatatttggcggcaaccatggatcccttggttgagttacgaagaattccgtaagaccatggaaggcatacgagacaaggccccaagcctcagatcggtttctgatctcatcatccataatcaagggaggtggaacaagagttatgtttgctatctctttggtgtggatctgggtttgcaaatttcttcaattgatattgtgggagatctggggaaggatcggttggtgtggaaaagaactccttcggggtgcttctcagccaaagaggcttactgggcaaacttgcaatacaggctggggggtgatcataaaatatggaaacggatttggtcgtgtaagattcatccgagagcaagcctattcttgtggagaatatgtagcggagtgttaccaactcgggacaagctgggcaacattgatgatgatagatgcctcctgtgtaatggtgcggttgagagtaccaaacatatactctttgaatgtagcctaactcgatctctctggtttggaggccccattcctctcagaatcgaaagggtgcagggcgagaatgttatgtccttggttattgaactgtgtggtgatttggaagaggaggaagcttcaaagttgcttgtgtgtggatatgtcatatgggatactatttggaattacaggaactctattcggctgggtgggagatgtcgggattgcttgagtttgctgacagaagtgaggaaaaggtttgaggaattagaaggtatcgtcgatttgccagcgtttgaggcttccactagaactgtccatttggtgcaaagggcccccttcaattcaaaaattcttgtctcggatggatccttcaaagatgggaaatgcggtttggctgctgtcggatttgacagaaattcatctacttggatctcaatatgtaagagctctgaaggctactcggctcttgattctgaacttcaggccatatacatggctcttcaatgggccaaggagcagggatggtcgtccatcttccttttctcggattgcttggtggctgtcaatgcgttggttaaaacgagtgcgccggattggaagatcgcaggtgttttctttaagatactgaagttagtaaagtcttttgagtattgtaattttgcttttgttaaccgtgagtttatctcgggagt

SEQ ID NO: 53130 - DNA, 834 bp, Cannabis sativa
aaactcttatgtgtttaagttcatcgtattagaaaattcatatttaaggtgttaatcaacatacatgttagtaaatctaaatcctaataaaataagttctaacatttaaatcatccaaccctatcattaactcagagtttgacagtttgttttttaaatagatcttagatgagggtaattgtgatttatgtcgtgttctcgcggaggtggaggtaagtaaggtggttttgcatatctctaccctttgaaagctttcggacttgatgactttgcaagaattttctacaaaataaaattgaggtactatagacaccaagtggttggaactatttaagaattttttatagcatggtaactttgtgaatcagttgaactaatcctttactttcttgataccaatgattaagactgcctcgaattttgaccattttcatcctatcaatctttgcaactttgctataaaattcaaaagcaaaaataattgataaaatttgaaaaaattatttttatttaaaataaaaatagtcaaaatttggtgtttttatactattttaaagtgcaaataaaactcccctaaaactattacaaaaaatattattttaaatacataaatttatttcaccaataatcaacataatatacaaaattatgttaggtaatataataatttttttttttttgagaaataatataatatttatttgagaaccacatatttcacaaaccaaagggtaatattgtgtttaaatgtacattttttttatgggaacttttatttgtaccccataaaattataaatacaccccattattaaaaaaaaaatataaagttaaa

SEQ ID NO: 53131 - DNA, 876 bp, Cannabis sativa
aaacatcatagtttttatattttttaaaacaccatagccattcttacttctgtactcttctctacatgctccaattgatcaactgtacaatgaggtagaattcgatcaaggagatccaaatctgtttcaccaacatctccaaggtacctcacattatctatagctgtataaacacacagatcaaccaaagaagtaggttgtcttttcccaatgaccatggttttactatcctcagctgtatccccctaaacaattctcttctgggttactccctgaaaagttaagttaaaagaaaccaaattaactcagctcaactcaacaaaaatcaaaattttcaatggttgaacatgaaatcaaggctaagaaccacacaaaatgtagtaaacacaatacaaattaaaaagtagccaaaattaatcaaaacagatcgttaaataaattctaataaactgaaacagcaaccgcatcttggataaacataaaataaataagatcaaatcaaataaaaatattggtgatatcaaaatcagaatcgacaggatccaaattcaataatgaaagaacaacgcatacacaaattattatttttattatatttccataaataaagaaatgtatatataataggtaagaggactcaccagggaattggcgatcggagacggagaagagagcgtaagcgatagggaaataatcggagacaaaagacaaatgaatgaagttgctaacgtgcgccagggtgaggaggcgtgcgcttacctcagcttcccttcttcacggttacgaaacaacttaggcgacgtgtgttttttatcataaaaaaaggtcttccggctatgctatcttgcgctgtttcttaattatttttatttatta

SEQ ID NO: 53132 - DNA, 1225 bp, Cannabis sativa
aacatatatttataattaaaagtaataaatataaacataatattaactttgacatgatggttaagttattttacaagagttaatcctatcagaaatatttttatttttaatatttagtttattttttcccctctcacaaaacaaagtatgcactgcatcggtatggtattgaacaccataaagtgcctaatagcattgctcttatttaattttaaatattttaatttaataattatgatgaaaattataaattattttcaaattaatgtcattttaaggtagttttaagtaaattaatgataaaaggtactagcagtgcctaatactttttaagatgaaatattattattagtataataattattggatatcatataatttaatgtaatgatgtttaagagatatttctaactaatcacaaaataacatttataaaatgtacaaaatatcattagtgtctaataacaatattgttttaagtattattagtgtctggtagcattgctaattttttagcactagtgatgcttacagtatcatttttaggtgatgggttgtaaatagttatcgatattttataataattgttatattaaattatataaaattcaatatttaattacactaataataatataactcattaaatagtactaaaactactgttactttttaagtattccccatatatagtatatggaagccgaagacccgttgtagatcatgccttcttctacccaattaatatcaaactaaggaaaaataatatatacttagtttcactcaagcttcatcctagcttcatcctggtcatggatagatcacctaagttcgggtccataagcagtggcaattgccttataaagacttgctttcgctacggctccggtgggttctcttaaccaagccactgcctataagttgcaggctcattcttcaacaggcacgcggtctgagccctaaacttctcccactgcttgggatatatataaatattaaaatatatatatctaaaaatagagaaatagatatgagatagattctatatagagtaagaatagagttagtaaaaaaataatgtagatgataaaatattaaaaaatgggggtttaatggggttgtagatgccttaattaataaggaaatttacatatataaagtactaattttgataaaaaaaaaattacatttttacattgtgaagttttttttttttttttacttt

SEQ ID NO: 53133 - DNA, 1966 bp, Cannabis sativa
tgtaattgtgaataaatatatgatatggacttaacagattttgtgtataaacatatcaaacataagcatgtaacattcatgcaaacataaaacacttcaaatttcttgtattgataactaatcagattgtagtgggttttatttaggacacaaaacccaacatgctcacttatagcaagtcaagtactcaatcatagtgcgaaaggctgtaaagaatcctacacttgaaggagaatccggctcaaatcttaacaatactttacgatagagaagaacaagggttagagatctgagtggaatgagacatattattctgctgccaccaatataaggttttcttaacattatacgtgtttaattccattgctttagagaatttatatttagagtgttaaacaacaaacatgttcgtaaatttagatccatccaaaataatccccaacacatacaagctcaccctggccagcctataggcttctcttggcgaaccagacctgttggtatagctccttcatggctcacttcactcttttcggttgttgcttgatggttttgccatatattgtatggagaccttgacttgctactggaaaagctgtattcgacatgtactatgtcttcgcttacgtgtatatgccacgtcaggtggaaaaaaaatgggatatcagtttctttacacaatgattggtctgaatttcaaatcatgtttgatgactcgacagggagtcgcatgtcctatgttgtcaacacataagacgtctttctatgcgattcaagatgaatgcatacatccaagcgatatgcccattagccatttaacagatatatatcgcacctaaagcctgggagcttgtgcgagaatatgaaaagataacttgtgctcgataaattacatacgttgctacacttaaacacaagaatggattaaacttttcttcatttactcttttacgtttattcgatttaatactattattttttgtaaaaacgattctaaaaccgatcagccatgtataactaataaaggagtgatccaaattaaacgattctaaaatcggtagcttattgttcaatactcgctattttaagtgagtatttgcacttttttttgggtgacttatttattatttgcacgaattgtggtgttgtgaaaatttttccgactacactatataaataattaattttgtaaattatagaaatttgtacgcttatccatttcttttgtgatactctcacaaaccataggagctaaagtaacaatgaaaatcatataaaaaaaaaataattagtatttttgttaactaaacttttggcattacctgatttgccccctaaaatatacgacttgttacaaattttccttaaaatataacagttacatatgtctcttctgttaggttccatttcttttaacgtcaaaaattaacattttcaccccctcaactttgaccaataccaaattttgtccccttttataaaaaaaaattaattttcaaaattataatattctattaattctggggaaaaaattaataaaaagtattaaaaaccctaatataaaattaaatgaattacaaaatattaattttacttaaaaaaattaaattattcctaaaaaaatattttcaaacttagttttatttatcacgtatcttaaaaaatgaaaccaaaattattgagaacctaataaataatttaaataaactaaaattttttgaaaaaaaaaaatcaaacttatttatattcataaacttatatcttaaaaagtaaagaaaaattgaaaatttaataaaaatataaaattattttgacaaaaagttagaaattaaagtaaaaaaaatgttatgtttacttaaacaaatctatattttcttcagaaaaataaaatagagtcaagtttgttcccgtaaaatttagattttataaaaattgaatttttaatatctaatgaattttttaaatc

SEQ ID NO: 53134 - DNA, 946 bp, Cannabis sativa
  modified_base (75)..(85): a, c, t, g, unknown or other
atagaaacccctattgaaactagccctgcaaccactttagaaacccaaacagtaaatttaaaaaaaaaattaaannnnnnnnnnnaaatagtatatagaataatttcccattataatattacaataaaactctactattttatacacattaaacttttaccccttttaaaataattttttgaataattaatcactaagttcgagaatactgcaaaatactaaaatatggaacttcatggttaatacatcatatctaaactcccaattgcgtctatatatcttcaagttatatatttgagagataacctgaaaaataaccaacttcatatatgtatattttattagtaccacatattcgagatcaataaccactaaatgatgtacaaactttgttaacgacacagtcaaaatcaagaaccaataatattctatagcatcaattgctaagtttatcaagaacacatgttcaaaatcaataaccaataacaattaataactttaaattttcaataatacatattaaaaatcaataaccaataacaatgattaactttcaaactttttcaataacacgtattcaagatcaataaccgataacaattagtgactttcaaacttttcaataatatatattatcaataaccaatactaatcaataattttcaaacttttgtaatgttttcttttttttttttttatgattccactccaatcaattaatacatatacaatatatttaaatctgcaaagaagaaagaacaaacaactttgtctctatgagaaaatagaattatataacagaaagtagaatgaagtacaaatgtgtcgagtagtacgacaaaaaaaaatcatctttaatattataattgttattagatttaattttatattttttatttgaaaaaaagtaataaaaaaaaaagagaattacctcatatactatttt

SEQ ID NO: 53135 - DNA, 567 bp, Cannabis sativa
aaaatctctaacaatcaaaagcttattcattttcaatagaagaggagataaatcaagattttgagaatacaaggataagaaattttgtgtgaaagccattcatgagtgaacatgatggtatattaaattccttagcaaaaggtaaaatgaactattatttgtatattaaattagtaaaatacaaataacaaaaatgcccctcaaaaatagatatctgccctctattttcgtgggctattaaggaccaattcgtaatttggcttactgtcgacgtgtgaagttgtacaccaaaatcttgccagaccagtttttggctggccatggacctgcatgatgcatgctggctagccataggatgtgcaagacctagccagcctatgctttccataggactagcccctttgaggtggccagtttgtcactttgtcatcccgcttgagtattcgggctcctcatttgttgtagtgctgattaggtgacttggccttcttattagtgagttgtactaccacttggcgctaatgttagccacgtagacatgccacttcatgtggacaaaaattggga

SEQ ID NO: 53136 - DNA, 978 bp, Cannabis sativa
tctctcctgaaattgaggcaaagtttgatgcttggattggtgaaggcttgcttaaacatcctaggtgactatttttattatttttgtattttcattctgttttatttttcaattttttttttttttttacaaatttcattttaatattgtttttttgttgtttgtttgttcttttaggcattacaattgttatgttgatggtgcaaagaaattttccccagggtttagattaggtgttgattatgctgaggataaaaccgggttttatcatttggctacctgtaacatgtttatcaatgactcggtaaagtttctattttccattatagtttatgatagttggttttcaggtgctttttaaatgtctttaagtttagctactgtatcaaagtttttaaatagttgtttaaccttttgatttgtgtttctgtattgtttttgtttcagcatatgaacactatattctattaccttaggaaaaaaggtatatattcttctgctgttacattgaattttgcgacaactgattgtctttttgatgattccattcaagcgttgtaccacaagttcaacaaagctaaggcaatgaaaactaagatatcggacatacatgctgcccacccaatagcgcattacatccgaggtttgcgaattccgtgttctaagccttggtatgaagtcgatcatgtgttattcatcataaatcataggaaggaaagtcattggatgtttggtcgtcttgacttgaatgaggggattttgtttctttataattctttgaggactaccaaaatgaatgttgcagctaggaatgcaatgaaggcttattctgtgttgctccctttgttttttgatctttttggattttggaataataggtcacatgctcttgatttaggttctgaccctaaagctcctctaagagttgtggagattagtggtcttccgtctcagcagaaaaagtgagttgtttctttt

SEQ ID NO: 53137 - DNA, 1473 bp, Cannabis sativa
gaaactaaagtactgaattttcccatcttagtgatatttgggttagagttagaacagggtttttttgattagagagaaaaacacactcaaaagacaaagcttaattagaacttaagacaaagactcaaactttatatattgaaggggaaatgacacgtggcaaagatttgagggagtataggattcttccttaagcgtgtcgaactaaattatcaccgcccaagaggcagtgatctaggcccaaagcaaggcaacagaccgctttctacgctggctacctattttcttgagcttaatttagagtttaattaatttcacattagtggcaacttgggtgccttgccccatgcacaagccacgtgttcatgttttttagtgtaagaaggtcggtcacacgtggcacccaatggagggtaccaagttttacgtctatagtgatggaattacctaatataaattagttacaacaatggataatgttgtttgatatgtatgggaccaaaatagtgattagtgtgtcactttaattgtcattattagataattagatatctctaactggaccgtccaggctttgtgtatggcttttttgtgttatcaaacatgaaattgccatttgccattcgctttcaattcatattctcttgtttagatattccatgtacacaaatctaatgatttgaccctcttaaaatttaatttgttttgtaaaaatccaatcataaaaataaaaaacaaaacaagtaactttgtaaagaattgaattgttatagttgcgacactaactaagtgttggagttaattgaagctgcctaactcttacattgtaccatcctatataataaaattaatattatgaggttttaccacatagatagctgcctaactcttaaaattaattaaacaaaaatatttaaattgtttctgaaataatttgcggcgtaaatatttaaatttaatttttagttacagataattactttaagtttaatttttgatagtaataatacttaaattatatttatatagaatttccgtaagtatttatctgttaagtgttaagtcatattatttacgtatcatttttcattttttatggtatattaaattaatttctaaataacaaataaaattttaatgatcttaacctattaggaatgttatgtggtcgttaacttgaaacttaacatccttataaaagtttataaatataattaagtattattatcgtaaaaaattaaacttaaatatttatactgtaaattaatttaattgtaattttatcatagactcatttaggaaagagaaattcttaagacaaactgacatttcacaagtgggcccttttcttgggccaacactctactcctagatcagggtcgtaagttaaaaaataccacttttattaattaattaatcaaatttatctctaattttatatttaattgaaacatacctctttttatatgtatt

SEQ ID NO: 53138 - DNA, 908 bp, Cannabis sativa
atacataagtataacaagtattagggtggggtagaaaaaattaatatcatgatgtttaattgctgtgatacttgatccacgacacgaggaaaggtttctcaatttttcgattagataattgtgtaacaatgaagaagaaaagattgttgagatgaaaaagaagattagattagttttggataagatgtttgaagagtactctttaatttccaacaaaagtgttctagactcaagtgttacaaattcattacaagcgacaactatgaaagtggatggtcatagtggtgatgtggatgcttaccaattatactccttacagtataagaaacttgttagagaagaagaaaatacagagaaagaaactgaggttggatagatatttgatggagcaatgtgtggatgttgatgatgttgattttgatcttttaacttggtggaaattaaatgcatcaagatttaaaattctttccatgattgctcaagatgttttagctattttggtctctactatttcctctgaatctgcattctctacaggagtacgtgtagttgatccttttagatcttcattgacaccaaagacagtggaaacacttatcggcactcaaaattggattcattctaaaccaataatagacatttgaaattcattagaagaattggaaagtctacaagaaggtaatatttataaattatacttattttttgtattaatctcataacaattgagtctattgtgatggtgttttatatatatatatatatatatatatatgtagcaatcttgaagggtgctgaaattaaacttgattgagtgaaaatgaattcttggatacaagaacatgaggtaatatttaaggactattatgttattatacttttactattttagtaagttgatgatagta

SEQ ID NO: 53139 - DNA, 1448 bp, Cannabis sativa
  modified_base (486)..(486): a, c, t, g, unknown or other
ccacttgatcttccccaagcgatgcacaacttatccagtatgtccctttacggatcacatgactactgactatcacatattttttattatttttatagataaataactttttgtaaggcttttttatatataagtataaattaaatacatatattaaaaaaatttaattatttaattgttaaaaattaaaaaaagaaataattttggtgtaatctacgttgtcccactaataataattagatattgtagataatcctatatataagatttttagtgttaggttggattaatgtcttttggcattttttcgttataaaatgaaaaactttttaaattttagaaaattactttatatattattttttaatttactgtttaagtttctttaaaatagtttttatatgaattggtatgtgaattttagttaatccatcatttactatgtgaatttttacttgaatttccataaaaatataattttttttnaaaaataaaaaaataaaaaaattcctaaaatttattataatttgaaataaatacttcaaaaacaaacagctttatatatataaaattaataaataaataatataaaaaaaatcagacaaattttcttcttcttcttcctcagcttcttcttttaacaagttctgaaaatccaaagcaaagtttgtctaactcaccatacacatacatacacatattatattgatatatataattatatgcacacacagtctcccaatatagtactttttttttgtttctttaatggaaaagaaaccctaaaatggtaaaacaagaaaaagtctctaatggttgaatttgaattttcatctgaggcaactcaaactcaacaactcaaaaatccaacaaaccaaaccaaaacattttctcacatttcatcatgattgattcttatcatgctcaccatgcatcatcaccatcaccacaacaccaacaacaaccaacagccctcttccggcgccaccaccaccactgccgccgccaccaccaccaccaccgccactacaaccggtatcatcatcaacaacagcagcagcaacaacaattccggctctcttaggtctccaactcccactccgactccgacccctctctctctcgctcctctctccactcccaccgtcctacgcaacccttctgaccatgcaatttgtgacaccatggctgctgttgctgttgcctcttcgtcgccttgcttggccagggttaggctttcggagattgctctttacgacggtgttcctgttgctccttatttgagggctgtggaagccctctctggctccttgatgaggcataatgcggcggtgattgaattgggaagcgatgatgctgctgttatgcgatgtggcttggaagctgctaggttgtattttaggagtaaggctcagctgagtggcgggaagggaggtcgtagtgtttac

SEQ ID NO: 53140 - DNA, 1261 bp, Cannabis sativa
aggtcaaagccatacccagctacaccctttagagaggtaagtgttttgtatgcctcggcaggaacatcagcaaaatatgattcaattataacattcaaaccagacaaagatgactctagttctgagtaggcatgagtaaatgcttgtaattggtgagaatcaagatccttcacaagggtgggctcatcaaactgaatccaagtggcacctgcagcctttagttcagccacaacctccctgcatagcatagaccatttttggttgacaagatttaatacaagataacattgaaaaaggtaacgtctgataaaaatataatattcttacttgtagactgaaagaatatttccaatgagggaaagaagagagaaggacttctcaacaccttttgctggttttgatagcaacaagtaagacactggaccaacaagaactggtacagtatctaatcctagctgcaaggcaagtattatgagaagaaattaagcatcttatacaaattattaaattgaaaaactttaccaagcttggttagatcttagaatcaaatgcaatatagagtattctttagtttaatatttctaaaaggaaaataaaaaaactcagtccttttctccttttaaacttctctctaatgtctccacatttctagaattaagaatccataattgatcttgatagtactttcagtttcagctggaaaaattaaaagaaactgacttgatcattgaactcaagctttaagataaggaacaacaatgaaaattacaatacacatatttacaagcaacaatgttttctatgaacatgtgacatgggtttccagaaattcatcttgtattctcacaaggcaagggaaaaaaattcaacacagaaatatacacacatatatatagagattgaaagcaatgatatgtgcacacaagtaatttaccaagattttactcacaatgacatggcataccttcttaacatagtggattctaccttcaaataattatggctggatgaaaaacatgccatatgttgtgtaaaaaattagtgcacatatcatcaatattcaacagttgtgaattgcgagagtagaagtatctctgaattctgtaaataatttgtagagcaaataaaaaataacttttaataatgaactaccaacaaacaaacaaaagatattattgaggaacttccccccctcatgttatcgaattcttagacaagttgatggcataaaagattggagaaattgtaaaactcttatact

SEQ ID NO: 53141 - DNA, 721 bp, Cannabis sativa
  modified_base (270)..(271): a, c, t, g, unknown or other
tgcactgcaatcaagttcgcagtagcaccaccctctccctctttcttaggttcaaaacacaaggtcttttatttgttcaccctattacgattctttggacataactgattcaaatgattttgtaaaagtactagttccataatttttagggtgagcagcataaaccttcccacaaaaattacatgctgccctaggatcctcaggattaccaccctcaattctggtaaaaaactgtcgaatatctgacttccccttaggcttcttattttnntcattccccatttcctctttatcatttttcctttcctcttccacttcaatattaggcatatcattatcttctgaaaccacatcttgtatttctgtattaatattcataactccacctaaataattaaattgattttagactattataaaataaatttcatacacaaaaattgtaataaacaagatcaaaaataaaaaaataaaaacaaaaactttaagaactaaattttatataaatataattataatactactgattataatatatattacataaaataaaataaaagattaaaatgtaattatataaaaaaatatatcaatataatctatataaaatgatactaggcctaaattaaaggagatcgactacgctgtggagtcatggaccgtcgttctggctggatgaaggtctagcgttgtgactctgtgtctctggctggatgaaggt

SEQ ID NO: 53142 - DNA, 1111 bp, Cannabis sativa
attatatatattaattgctaaaatagatcttactaaaatatttaaattaaaattagttatattaagaaaattattaattatggttaatttaattctaaaaaaataattttaacctattaataatctactattacaagtcaaaaaaaaaatatataattacaacaaaaatgtatccattaaataatcacctatttatataattacttaccaacaaaaataaaaagcatacacaatcataaatttatatgaagaaatataaatgatgaaaaggccaggtagagggtcacttctttttcttctatcacaatcatccatgattgtgagtgcacatacatatatttatttattattactaaacttgagtcattcctaatttaggtggccataatttatattattatttatttactagaaatcgagtatgagctcaagattaggctagagttatctaaagtggaaacccatcatcgaagtgatgatgatgacctaattaattgtcctttcttttcaattgaaatatatgtagtaaatgttttggagaactaataattaattattagagagtttttattaatctctatagataattaacgtcatcttattggaggatgagatctcgtatagtgtatatatataaagagtattattataaattataatatgtgtgtatatatatgtgtgccaaaatatatagctaatattttaaacaatgtggccattggtattgattattgactccaatatctccaaaatttgctatctggagaagataatggatttttttttggacggtgtttgtgggctctgattcacaagatgagtttatgctttaattttatttttttcttttttggtgtcaaaattagttgatatgactttgatttgatgtaatgtggtattaattacattaataatcacattacagccacaaatagttaattatctgttttttttttaaaaaaaaggttttgtatagactatagaatactcttcttaggtggatgtttgaaagtatgattattttggatgaaaaaaagaaaaagtatgaaaaatatagaaaaataaataaataaatattgtggggaaaaaaatgtttttttttaatatattt

SEQ ID NO: 53143 - DNA, 618 bp, Cannabis sativa
tgggtgcaattcaaatacgaaaagctgccccatatttgtttcaactgcggcaagcttgctcactgggagaagctttgttcatcccagacggctatggtgattcctcgcattggttcagcagtgcagatgtatgggacatggttaaagagtgacacaggcagaagtaattgcttcaatatggctggaaagggcaccataaaatctttcgtggagtttgaagatgttccagaatgggattttgcgaaacaaaatcgcaggaatacgtggaggagattaaagaacacagtagctgagaagatttcggtggccggagattcgaacctcgacaaggaagaaggaaagcgcaacaaacgaaaagttgtgcatggtgaatcctccactaccactgtacgatctgacaaggtgtgtacgaatttggttgatcatgcaaaggggaatgaggaggcgtgtgaagttggtcccactgtggaaaacgtgggaattgaaacaaatggaccgttggtgaatattcagcaggattttgggccgaatatgttccacctacctacccctgatttctctttgaatgctgaaggattggacattattcctgatgttgggccctctattgcccaaagc

SEQ ID NO: 53144 - DNA, 1139 bp, Cannabis sativa
ggaacatgaagttttgttaagtctgttaaatagacttattaaaaaaatttcctttcttgtccttgtaatagaaatcttttggttactccatatgaatggtttcaaccatagttctcttggctttgcttcttagttccttattctgactatccattacttggctaaactaaagttgggtttcactttcttaagatgttttatgggaccacgtgagttgaagccaaatgttgaccgagtccaacacactaattttctccatcagcaaatggtgcctcttaccatgaatgtgatattgaaacttgaccaactattcccacattctccatcagttgttaatgcgcggatccatgttctccttttgccgagaaatccatgccactaacccaataaatcatacacgaaaaatatcaactttgagaggaggctctcactataaataggacctgaaaattaatgtaaaagaaaaaaaaaatcagattttagagtagagaaatacactttctcatcttgttctctcttatttctattttattttccttattttagtgacaaaaatgagtaaactattttagaaatattggcgaggttagagtgtagaatttgtattccttatttctattgttgatattgattcttttgtgcttcatctccatatttcatttattaaattttttttcatcttctaatttttcttccaaaattaatagtatcttttatataagttcagccatgttttttttttatgtaaggtaggctattaatattttggtatatttattatattgtatgtcgtaaactgcattctgccaataatggtattttgtcgatttatgatatataatatgatatgctgtgaaattagaagtaagattcaatttatttaagattatttaatttgcgcttttattatcaacatcttctagttgtaattaatggtgtagaattgcaactgtgttttggattaatatcggtattagaataagatttgcataactacatttctaccttaccaagctctttatctgatcacaccctttcactcatcattatattatttttacttcattataaattctacaattttctatttatactaatttttagtagtattttgtctctctgtggatacgacatatagc

SEQ ID NO: 53145 - DNA, 1939 bp, Cannabis sativa
atgatatataatatgatatgctgttaagttagaggtaagattcaatttatttaagattatttaatttgcgcttttattatatacatcttctagttgtaattaatggggtagaattaagactgtgttttgaattaatatcggtattagaataggatttgcatgactatatttctaccttaccaagttttttatctgataacaccctttcacttattattttcttatttttaatttatttatatttttaccatattctatttatactaatcttaagtggtacattacctccctgtggatacgacatataatctgtttactatcgtgaccgaagtataactaattgggcgacatcacacctatatcccacaaactagctactatagtcaatttcttgtttttttttccaatagccaattttaaatgatgccaaactattcaatgtataatgtacatttattttaaataagggcttcacctaacaaatgtgcctaattttagttaatttatttttttatcgcatcttactatttaaaggaactatcaaattataaaatatttatgtcaattcatttgccccaactccaatatataatattataaataggatagttctctattcataataattcaaaatatcattaggactgaagaaaaatgaattgctcaacattctccttttggtttgtttgcaaaataatatttttctttctctcattcaatatccaaatttcaatagctaatcctcaagaaaacttccttaaatgcttctcggaatatattcctaacaatccagcaaatccaaaattcatatacactcaacacgaccaattgtatatgtctgtcctgaattcgacaatacaaaatcttagattcacctctgatacaaccccaaaaccactcgttattgtcactccttcaaatgtctcccatatccaggccagtattctctgctccaagaaagttggtttgcagattcgaactcgaagcggtggccatgatgctgagggtttgtcctacatatctcaagtcccatttgctatagtagacttgagaaacatccatacggtcaaagtagatattcatagccaaactgcgtgggttgaagccggagctacccttggagaagtttattattggatcaatgagatgaatgagaattttagttttcctggtgggtattgccctactgttggcgtaggtggacactttagtggaggaggctatggagcattgatgcgaaattatggccttgcggctgataatatcattgatgcacacttagtcaatgttgatggaaaagttctagatcgaaaatccatgggagaagatctattttgggctatacgtggtggaggaggagaaaactttggaatcattgcagcatggaaaatcaaacttgttgttgtcccatcaaaggctactatattcagtgttaaaaagaacatggagatacatgggcttgtcaagttatttaacaaatggcaaaatattgcttacaagtatgacaaagatttaatgctcacgactcacttcagaactaggaatattacagataatcatgggaagaataagactacagtacatggttacttctcttccatttttcttggtggagtggatagtctagttgacttgatgaacaagagctttcctgagttgggtattaaaaaaactgattgcaaagaattgagctggattgatacaaccatcttctacagtggtgttgtaaattacaacactgctaattttaaaaaggaaattttgcttgatagatcagctgggaagaagacggctttctcaattaagttagactatgttaagaaactaatacctgaaactgcaatggtcaaaattttggaaaaattatatgaagaagaggtaggagttgggatgtatgtgttgtacccttacggtggtataatggatgagatttcagaat

SEQ ID NO: 53146 - DNA, 3421 bp, Cannabis sativa
taatcaaattaatccatctaccattagcccattctttcaagcatagcccgaagatatccccattcaagtcagtcgtaagccttgcttatgtcaagcttaactgccataacaccatcatggcctcttctcttcctcttcaaataatgcattatctcataagaaatcataatattatccgatattaaacaaccttgaagaaacgcactttgagtgtccgatataattgaaggcataacaactttgagttgattagcaatgacctttgaaacaatcttatagagaatgttacaaagggcaataggtcttaagtctcccatgtccattggttgtttcttcttaggaattaacactaaattagtgttatttaaacgtctatgaagctgccccatttgaaagaaatctcgaaccaaagtaattacatcactactcaaaaccgacctccatttttgaaaaaatgctggtgtcattctgtcaggtccggagccttgttagggtgcatctgacacaaagccttgcgaacctcttcatccgtgaccggttgtaccaagttgacattttggtcagctgaaactcgattatccacaacactcgtaacttccagccaagaattagttgaagaagaaaaaattgcaaaaaaataatcaaccattaacttgaggcaaacctgaactccaatcaacccaattaccattatcatctttgagtttagcaataaagtcattatgacgtcgattagtagcataagcatgaaaatatttactattattatcaccttcttggagccacaattgcttcgatctttgacgccaaaaaacttctcgttgtacataagcttcaaccaactccttcttagcttgtttatacttggtaaccgaagcctcatcgcgacccaatttccactgttgctcttcacttttacacttctttatcgtgtccttaaagttccctgtaacctccttcccccaagaactcagctgttgcccacaaatcttgattttttcttgcacatcagttacaccacttccatcccagctatctttgactatttggtaacacagaggctctcaaagccacgcattctcaaaatgaaaccgagttactctcctttgcgtagcagtattaacgagttcaagcaatatgggagaatgatccgaagtcgaaagctcaaggttatataatttagcaaatgaaaaagcttgcagccaagaaagattttccaaacatctatctaatcgaacttcaacccaatgagaagtgcctctgcctctttcccatgtgaaaggacaaccacaaagctccatatcttgcaaaccactgtcattcaaagcttgttgaaagccttgaattaaaaatttaggatagcggttccctccccttttatcttcgtgagagcaaacattattcaaatctcccatgactcaccaaggcaagttttaattagtagcgagcaaacgtaaaagattccaggtagcaatcctgcggcttctatttggctccccatacatactagtaaacctccatacaaccatgccttcaactgaaacattcacgtcaatgtaatttgttgagaactccagaatcgaaacttcatcttcttcttttcatagtaatgtaattcctctgatcctcccctgaacatagacaacaatcatcccatcgtctaccaacgaaacatgagccctttccatctgagaacgattactaagcgtttcacaaaaaaatataattttgggttgcttttggatcacaatatccttaaggaattgaaaagcccatgggttcccaagcccatggcaattccatgataataatttcataattgacggtgggcctggataccaaaactcacgaaactcatatttttcaaacccattacagctttgttaatctttccatcttcatccaattcattcggcctattggaaaagcgcgattccatccttcttctcttcatgtccacccccaacaaacaatcattatctatagtaatattctcaataaattcttgatcagtggcagcctccataaaatcagtttccatattaatagggatatcacgttgaccaatataatcttccacaatcataggagatttagaaaaaccaactgtacccgcaccagcgccgactattggtgaccgtcgaacctcactggtggtcgtgtttacaggagcagcaggtaccccctccatagccaccatgaattgttttagtcacttttctcctacggtgtgattcttacgcataggccgcactctcatccattctccaaaaggcttgactatctttccttctagatcatcaaatcgacgaggacaaatcttatcggagggccccattatcccacaaatgaaacagaacgtaggtagatagtcatatttgaagttaacctagaactcaatcccatctgtattctgcagtttcatccgcctcttcaatggcttggtgacatcaatagttactcggacgcgtaaataatctcgccataatcccataaaatttctttcattcgattcgataaacttctcaacataattggctatatcttttacaatcgtagtcgttttaaatcccaatcgaagatcatgcagttggacccacatatcaacttcattcaacactatctgtctaggatcttcccccctttttcagtcttttaaaaatcagcaagaacttattaaaagtccaaggactacaatccatcatactttgaatatctagttcatgatagaattgaaataagtatctattagaatccaattctttaaagaacatactcttccctggttgccaaagagaagccaacatatgctatatcgcgtcgaaatttatagatctcacaatcaagaatctaccaacaatacacgaacgatcatcataatcattaccagtagtgacactcgcatcataggataatactactgcatcctcttccttaataataacagcatccatatcctcttcatccatcctctgattactactagaagccattaccaaacacacgaaagacaagacttgcaatctcaaacaaggaccgacaggccgaaccaaactagaaaaccataaacaatcttataccagaaaatttagaccctcaaacaagaaaaaaatagcaaaaccaagaacaatctcaaactagaaaataagaaacaatttcagactagaaaacaatcacaccatgtcacaaaagacaagacctgcagatggtggccgtctgacggcgatgccggctgacgatgtacacaagtgaggcgaggaacaacgctcatgtagctgttgtcttcgttcttgtagggttcctgtagcgagagagacgtgaagcacttcatggaaaaaatctgacgtggctgattgacaagtatattaattaatttattagtaaaaattaaataggggttttttattttacacttcaaaat

SEQ ID NO: 53147 - DNA, 772 bp, Cannabis sativa
tatatgtacatgaatactagaaaaaaaaattattattgattataaagcaaaattataatctaattaatgattattatatatgtctctctctcttattaatttgttttttattaatctttctaatatataattataaagtaataattaacatgatgatatttgattttaggtatggaaattggggaatttgtttcacatatgggacatggtttgcaattaaaggattagctgttgttgggaagacttacaataatagtgaaaccattcgtaaagcacttaagttcttactaagaacacaaaacaaggatggtggttggggtgaaagttatctttcatgtccaaataaggtaattaattaaattaatgatgatattataattacaagtaattaattgaataacttgttcattgatttcatgatgtaggaatatgtatctcttgaagaatatggatcaaatttggtacaaacttcttgggctatgatgggtctaatttatggaggacaagcagaaagagatccaacacctcttcacaaggcagcaaaattaataatcaattctcaattggatgatggtgatttccctcagcaagaaataacaggagtttttatgaagaactgtatgctacattatgcaatgtatagaaacattttcccgctctgggctcttgcagaatatcgtaaacgagttctatgctaattcaaggtgatgatggagactatttactgagattttcgaaaactgaattaaaagaaagattagagctaaagaaa

SEQ ID NO: 53148 - DNA, 2864 bp, Cannabis sativa
  modified_base (524)..(533): a, c, t, g, unknown or other
aaataaaatatcagaaacaaataacatttaattttttcttttctttttttttttttaaaaaaaaaaaagcatttaattctttcttacattcataattttttaagagaattgctaaaaagcaccactggtgcctaatttcttcctcggtgtcatactgctattggtgtaattaagtatcagatcctaaataatttaagaaaataaattttaggcaatatcgctaaccaatcatgagacgccacttatggaaggtgctggacaccactggtgtttaatagcaatgctctttttttaatattaagataatatgtttggttggagataatgaaattgaatggaatggaaagaaaataatttttattccattcgtttgtttgattgcattttaaagtgttggaatgtcattccaatagaatgctctttctaccattttagtggaatgactattccattttgaaataccaagaaagaccattctaatgtaacatgagaaaaaattttatgatttttttatcaattttttnnnnnnnnnnaaattttattccattccattccattcttattcctatttatatttccattctcatttttattcttatgttttcattccttccaaccaaacatcacctaattattatttttaaataatttgtgtgccataatataatatatatattccagattgatttgaatcactaataaatttatgagatgaaaccctctttcggccaaaataactaattatttaaccaaaaatattatttacaatactaaaaaaacctcttcatgtctattaaattttgacatgataagttttgctctcaattttatgttggacatgatatctagaaagataaaaagaaatatttttcatattcatcaatgaaaaaatattcattcaatgggactcacaaggaataatattttattattattattattatatctagtaatttttaaaataaaattaaataaaaaatattttaaatattataaaatttaatttattttataattatttattaattaattgcacaataatttatatactactttttatcaaaattgtaaataatgagttctatgaattttttttatttttttttgaaaaataactgataaataattcaaagatctgaccatgagaaacccaactcttggcgagaacccgccccaaaaaaccctccaacgacacaccccctcgaaaaatcccaaccccagcaagaccccaccccgagaaaccccatatacaaaagaatcagtaaaaaactaaataaaaaaagaataacaatacacaaatccataaaacacaccctataatcataataaaaaattcctaaacaaaccctcatcacaatacacaatacaatgagattggatccgagagaacaagatggagagagtgaaatcaggaaagggaggacttaccatgtcctacttgattacaatgattttctaattgttgtgcacacttttgctaatcaaagtgttattttttaaaaaaaaaaaattaccaaagttaaacttttgatttaactttaaacttgtataaatatataaccatacataaaagtcgggatcccgtcttaaaagttacaacattattcaaaatatattttacaaaagtgtcgctccgagactataaaatgaaggtccaagtcgtccaagtcgtcactggtgcacaactttcgtctttcctttacctacacatgtatataatatatgtgagtcgacaaactcagtaagaaaaacacaaaatatataacataatattgatttgtatctaggcccgcatacacctatttacaaggcttcagatgaatcaagaatgttcttaacagaagtacaaatcatgtatcacatgcattaagtactcatcccatactagtgttggtagggctgaacgacacctcgagtaccacaaaatgttgtaccacatgcactctgtactcttcttgtactagtattggtaacattgtgtcatatcctttaatatcatatactgtaccaatgcacttcgtaccgcaaccgtgatagtgttggtagcatacaaatcacataatacatcatgcatataacacacatacacatatacgcatacacattttatactaatcttacattgtttctagattcaagagtgtcaatcaatctgaatgaaaactcacgcgctgaacggaggtcgtacgtcagaatcatgcaaaacgggtaaacaacttgctaaaacctttttggagaccttaactcaaaacaagaaaatttttctatcaataaatagcatgaaaatactgtaaatattgagcaaacacgaaaaaacgagactgaaaaaactgcttgaaaaaaggtagatcgtctccttagaaatgatctgtcatttctaccgcagaaaaacaccaagtctcatttcgagctcaaattaatcccaaacttggtaaaattctccatattacctagacgaggtccaataaacaaattctaagcaatggaatcgtctaaaactcagaatctcaaaatccaccactcagctccacacacaaccagcaaattgacctcaaactagtcttaaataactcaaatacagctcaaaaataacccaaaacaaaacatagcttggacataacctaattcaagaaattgcatggttgactcaaaaactaaacttccaaaactttaagaggaaggccatccccacttggccaaaaaggcctgattcatttctctagatttctagaatcaaggccccctagatttgggaaggcacactttatcctaagcctttaagtggacctcatgatttccttttttgaacccccactagaagtcacggaccatgccatcaatcttagaagtaagatgatttgaca

SEQ ID NO: 53149 - DNA, 847 bp, Cannabis sativa
tttaacaaaacagggggtccaattgataacttttacaaaacataaggtccaaaataatatttacccaataaaatattaactttatataaaagatcttataaaaaaactctacataaatgatcttattaaaaaaaaactttacataaatgatcttataaaaaaaaaaaactttacataaaaaaaaaaaacaaaatctatttattgaactatatctaatgtttttaggcctatccagactcgatccgatttatttcagtcatccaatcgatctagcatacattagatgttgaattggatcgattttattcattagatatatttcatgtatatctatcagtgattctggtttactaaattgttcattcaaactaaataaaaagcactttgattagatattgaatgtattagatttttggacatttcattcgacatatgatctaatctaattagatatttaaaaataacatctaatctgatcacaataaaatattaaatttttaacgatgaattataactgaatcagttagttattattaaattagattaatttatacacacgcacatagatgcaaataaaatttggccaagaaaatgtagattgaaacctaataaagagggaaagtgtaaaatgtggtgaatcaaaatcctttatgctatgagaataggaaattatgctacgtgtatcttggaagagtagacactaaaataaattaaaaataaaaaataataataaaaaaacggtgaaagtggatctattatctattatctattatctattctctattctctgttctctatttcctatcatcgcctaaccgtaaataataccttctttaattcctctctt

SEQ ID NO: 53150 - DNA, 962 bp, Cannabis sativa
ccatgtgaatggtctttgagaagtggcaggtgctccataaaaacccaagaaatgaaaaacaggaccatcagtagtcgaaacataacaatcaataaagtttataccataattcagaacatttacatttacatcagctttccatagtaacagtaaactcccactaagaccaactctaggaacttctaacccattagaaaaattaaacttagtacgaaatttagaaatagcacctatattaagcttagattccataataaatagtacatcaggtaactgcttagagatgagcaaacgaagctgtcttaatgcacgggggctggccaaacctcgtgcattccaactaatgagattcatgatgattggcgaggctgtgaaccagccttcgccaagagagcaccatcatcctcctccactagtgagagtgtagataagtcagaaatgggttctggttgttggtgcagagttgtgttggtaacatccgtgagtgtagagtccctggttcgacatctttttaacacttgccttatgttcccaccttgattgaccatttgacgttttgtgaaagtggaaggtagttttgctgcattggttaagttagcatccagagatgttgctgcagaattgcaatgtatgtatgcaggaggggttgccactggtacaataattgctttttgtggtaaataaccagggggaaattccttagaacgatcaatagctggtaatgcagtaaaagggttgctagattgcccaatatcttaattgattggtgtattagttttgcctaaattaagatcatcaacatcaatacctttacccttgaaatcaatagtccaatttgcaccaggcacatccaaatttgctcttgaatctgcagtggaaagtgttttggcatgtggtgaaccagaagtagcaatcgcaacattgagagttggcattcactgatgttgaagttgagtaacaga

SEQ ID NO: 53151 - DNA, 1622 bp, Cannabis sativa
acaatacacgaaaaatgcaatgcaacactcaagacgctagtaaaccttcattacattggcagtcaccgcctctaggccagcttaagctcaatgttgacgccatccaaaatattcaaacaaagagaatgggctttggcttgatagttcgaaatcatacctcagatattgtcggatccttagctacaccttgaaaatgcgtccaccaaccacttatgatacaagcgcattctctccaactcgcccttgaatgatgtcaaaagcactcacttatgatccaccaaattccaaggaagacgaaaaagacatattctataataacaataattacatattatatataacaacaattagaatctcattgtcaaattcttgtcgatgttgtaattaaaggtcactcgaataatatccacctacatgaatttataaccaaaattaatagcttgttgtcttcacttcctcaagcttcaattagctatgttcctcgaaaggctaattatgtcgctcatcgactagctaagcaagctttaggcttagaacatgaggctattctcttatttgagcaaatgtttcactttcttgtatcctatattttcaaaatttatattaatggatacaaattttcttaaaaaaaataacaataataataatatatatatatatatattactaatatatatgtatactatacgaaccaaattagttaccacaattaaaatatatataccatgacaataaaattatataccatcattgtatataataaaatagaaactaattaaaacaaataatatatcatacaattaaaatatataaaaataattaaatatattagcatgctaataaaattatatacacattaaaatatttgtattatactaacaaaattatataacacttatacgtagcaaaataaaaaataaatatcatttaagaatgataatatatcatacaacaaaataaaaatatattgtacaacaatatctatataccaacaatccacaataacccataaaaaattaaaaaaaatcgacataactctaaaataaaaaaaaaattatcaaaactaatatagatatatcataatctttaagtaattttcttctaattctaaaaaaaaaatatgaaagaaatattgattttatgtggcaaaatacaatataaataataaatagtataaaaggatcatttctctacaaattttaaaataaaaatatttattcacatagtgctatgatttggagtcattcgctataatttccccataaggaatccaaaaatttgtatttcaaactcttacaaaaccacatagagacaattaaattaattaatcaacgaaaaactaaataaaacaaattcaaaacttaaaaaatttaattaaactaagtaaaatatactaaattaatttttattcaaaactaactaaaaagttattaaaataaaataaaataaaaatacttgaaatcaaatcaatctaatgcacaaaaagagtttaataactctatttttataattatcgtgggatttatagagtaaaacgtaaaatctattggtgtaaatcgtatgtgctttgcaaattcaaggagaagggtgagttggggttttgagatctgtatttttttaat

SEQ ID NO: 53152 - DNA, 975 bp, Cannabis sativa
gaacctaaccatatcataattaagatctcttgatctaagatcaactggtgatattgacatagaaagatacctgttaggtattttgtattacattttcatgtctggtacaaaagtatgcacataatatgaacagctggtatttttttatgggaaaggagattatatcaaaacaaagatgactacatttcatactctttcattaatcatcagtgatactttgtgttttcagttacacatcattgttaatgatttgaaaaaataaaataaaatacatattgcaatacatattataaaatatctaatatttctactcctttgacattcacaggtttgccttgcatttggatagccatcaatggtgggagtgctgtcatgacaactctccacacattcagtttgttcattgttgttaatatggttctccactaattcatgtccttctttgctgttaaaagtttcagataaattggaaacgtccatctccaaatttcgaatcttccttagcagttcgggaatgacaatcgaggatcgttcacacatgggtgggtcataccacatccaaaaactacaccttgcacttgctgccacaactaaaaaataaattctgaccagaagaaaaaaagaagaagaaagaataacacaaaaaatagggcaaataatcaagccaataagatctcacctgatggaatgggcatctaacaaaccttcatccaggattcttattcgtccaatatgttttcatctctacaaccccagggggatcacattggcagaggtgaggcctcgtggacatgttcactagctttgttcttccccctcgacaatggagaatgaatcaggaaggagacccgaacccttcaaactttatattcttactattcttctttgaatttgaccccccttctctcgatttcctttgatttaaaacgaaaatgggtgtgagatttgggtttgagattcttattctggttttgt

SEQ ID NO: 53153 - DNA, 1928 bp, Cannabis sativa
  modified_base (1149)..(1150): a, c, t, g, unknown or other
catgacttcatacttgggaatattcttgaccatccgatggaaaatctgaaagagtccaaaccaactttcttcatcaatttgatgtcatcctgttgaattaaaaatttacaatattttgtgagaaattaagttctgtatacttgttgtgaatttaagctgtaaagctagcatgttatactgaactgaaagaaaatgttaggttgacttccaaaatagttatttttaccttataacgatgataaaaatccacagctacatctccattacttcgatcccatattttctctgcaatttatatttattctgaaaaaattaataaataccaaacactgcttttacattggctacctatttgggttaattgtttttgctttctatctgaataacactgtgtaatttatcaaataataaataaaaaaaaaagtaaatatcatgcggacattgacttccgtaattcttcatattaattatttgggcatataatttctctccatatatatatttgggcatgtatatattttcaatttaaaattctaaaagatgtcacgtgaaattatatataccatatataatgtttttatatatataattgctatataataatagcagtagactaaccataccattgaccttcaccaatcaaccagtaaaataatgtagaagtgacgtgacaatctaaatataaattaggcattataccataacaatttaataaatttgtacgtgttgttgccacaaaattatttgtctattacctaagttatcttttgagatgattttatttaatttaatctatgtactcttcaaaagaatagaaaaatattaatattatactagattaataatatatttaaaggcatacaaatatataacgttattaattaatgtatttccttttggtattaattgcgtccaagaagaaaaaaaaattagagtttaaatactcatcagaaataattatcaagtcttttttcgttttgctgaaaaaaaaaataaaaaactatcaagacttttatcaaagtaataattagatgccatcaaagtataaaacaaaaataaaaaaaggttcagtgtaacgtacaaagcacatgtataccgaatatataatatttatacatatatctaattatgaagaaatatatatatatnnatatatatatatatatactgaaatatatcgtaattagtaataatatgatatcttatgatttagaacaatggaattaatactggcctggatgttcacgagtaaaagcatcccatatattcggaccccttccatctaaggatgctgctccttcagactgaacatgagaaagttatcttaaataataaagaataaaaaggactgaattcttatatatttgtataaaagtagcaaatatatattaacctggtaagaagctgtcccagctccaaaaatgaagccttttggaaaacttgtcttattgaaaggttgggcataagggacaggttttattgtagctgaagatgtggcttgggagagagccaatgagaaaacaataagcagaagttgagtaaatgccattctagctagctaatggctattgtacctcaacttgcttctcttttactatcgtcctctactactccctttaaatagaaaaacgatagatgacaactgttttattatttattaaataatagaatgtatacataaattaaatatttaataatgtaacaaaataattaagtgtgaagttaagcatgatatttctcaaatattttgaaacatataagtgcagttacttaccattttaatatcactaattaagtgtgtaaggaaaaataagggataattacataaaatataatttttttacacttacgttttaagatttttttttacatttttacggtttttttaaaaaaataacacgaaaacaataagaaaattacataaaaat

SEQ ID NO: 53154 - DNA, 906 bp, Cannabis sativa
ctattgtcccaattatggctgtgtttttattccatgaaaagatgaatgggatcaaggctatgtctatggttatggctgtttggggctttgtttcatatgcttatcaaaactatcttgacaataaaagttccaagaatgacaatccaataaccaatggttgaatttatgaactagtttagcttgtttcctaagagggctatacatgtaaatgtaaaagaataaattaaaatgaaagattgtatctagttactcacaaggtaaaatcactctttagtatacaatatttattgtcttagggctcatttagtacgccgtattgtattatattgtattgtgttgaattgtattttattgtattataatagtattatttaatacaacattatgtttggtattgacttgtattaataaactgtgttgtattatattgtattagtattatttaattcgagtctcggtccggggtccgggttcgggtccaagttcagatttggattcgggtcggggtcggagtccgggtcgaggtccggatctagggttcgggatcgggtctgggtcggggtccaggtccgggtcgggttcggatcaaggtcagggtctgggttcgggtccaggtccggggtctggggccgagtcttgggtcctgggtccatccagggtccgggtcggagtccgaggtccggggtccgggtcggagtctgatgtccgcggtccggggtctaggatctgggtccggggcctggtttcggggccggagccgggtccaggtccagtgtccgggtcggtgtccaattccaaatttgggtcccaagtttggattagagattggtgttgactccgaatcctttataaatattataatacaagctaatacggactatatattaaataatacaacatacattg

SEQ ID NO: 53155 - DNA, 4153 bp, Cannabis sativa
attaaattaattcaatcgattactataataataaggtgtgatcgagtattttagctttccatgttttctttctttgtcttcaatcttgataagacaataaacgtatggaatggattctatgttaatatgttttctttaatctgaaatattcgattaatagattatacctcttactagatttattacatttttgtaagagtttaattgatattttttttcactagaggctattgcctacatattgtatatgggtccatccatgcaattaagtaataatttgaaatttttaatttttatttttactttaggtgtaaattttatactgtgtactttattaagtttttagtgctgctatacggttgtttttttgttgtttcaatattgtttttagttgttctttttcgtgttccactgttatttatttttataaaagctcagtatttttgaaaaaaaaattccgtgtcatagtatttttataaaagttaactcaaatttcagtatttttgtaaatttctctaatttgcctagtaatttattgtttattttatgacaaaaatattattttatttgtagaaaatatataattataatttcaaaaggaaaaaaaatatatgtttttagaattactatcgaaacataattagctgaaaatatccccactcttcgtttctatttttattttcacttcctcaagtgttttccgcacaagtataaataccacacacacttgcatgatcacattcatgtaaaatgattctattttcaaaaaagaaaaacaatgaacaatgattagactcttattttcgagtatttatagtactaaaagttaaatgactcgataacctctccaaacaagctatacttattttagactttttagtaatatttcagctatttatagaccaatcatataaaatgtatttccttcaaaaatgaaattgaaaaaaatgaaacctattgttagctctagctactgggcttgtatggtattaaataatgttccacgttcaagcaccagtttagctactaaacaattctatttccagctgtttacagaaaagtcagatttctataaggcttgagtcagatgaacattagctccaagcggaccaagcccaaaaatctccatctaaatgggctctaagcggcccctttattagagactcgagcatcttaggcacactggtggtccatctccactaaacacagtccactccacctccaaaagagccatcaaaatgagggatattttgattaacactataacaaagaatcttaatcaaagaaaataatttaggtgcacctacatacacgattagtaaaaggataatacccaaagaaatagaagataacagccactttcttaaagagatcatggtgctcctcctcatgataatgacacattaaccactttctttggtttttaaacacacctctgagccacaaactccttgtgaccagaacaagtcaaaaagatgtcaatgataacccgactgcagcacaacagattaaaaaaaaaacaaaaagagaaagattaaaacaaaaatatgagcaacaccctattctcagatccagtggacgaatcatgtgtgaccattaaatttcccaagtatccaaatcttgtatttacaagtgcagtgtaatagattagtggtgagtcaatcaatatgatgtgcaaatttgacaactaatagtccgaatgagctaaaacagtcttcatgctgtagataaatgtctcctttgggatgttaacatccactactatgacactaacgacatttttgtgttctgtgagttcaccttggcagctatgctttggggaacaagtttgtaaggtatatacaagttgactccatcttgcatcatatatgttcctcaatgaaatatcacatattaggtatgaccatgaaaactcactcgtctacttctagaactaggcatgagctcctctgttgcaccaaaaaaaaaaaagaataaaaggaaatcaaagtcacgacacatatgtgagtgcaatttaacaatgcaagacatagaagatctcaatgttgctatgtttggtcagcagaagatcttgaactagaaaaagaagggagccagattttaccgtgatcttcgtctccattttgacttgtgaagaatggggtaaggtagttgcgatccaatgctgaaaacgatgttgtgctgaaaaaatagaatggagggagaaaagagagaaagagaaaatcatataaaaatgagttgagtagcacataaattaaaatgaagcaacgacaacaaatatctggccctcgtgctacatacctcttgtgaagctctttaagtctcatctttagcttgctcccagaggacggttcttcatcttcctcgtcataggaaggagcatgatacccatggttcccttcaaaacttcgggtagatgggacactatacccgtgactttcttcaaaactctgggtaaaggaacaaacatccaaacaagtgatgaataagtatcacattttttcatgtaacttcttataaacagtattaactataaactcttccagagtacaatcagcaaaacttgaccactatgacatttttttatgagaaatacccacccaatataaatcagttgcagttatccagaaatttgaattttatattttttgaaaacgatagacttttgttcgcatacaatgccaccacaaaggcaatctataatccagctattgagcaataaaaaaaatgtgcagcatgaaaaaataaaaaaataaaaatcaagataattttcttctattgtccatttattaaaaaaatactataatgtgaaacacatagaacgacctcttagctggtcattcattttccagataattggtgaaataatactatcaaagttgtgattaaaatccataatatattactcattttactggtcatggcttttaagtaatcaagatccaattttttcagtttcggaacacttacttcacccaatggaccatcatggtcatcaccaacaacttctaatgcttcaagcatggtgccagttgagcctccaatcagtaatacctgaaacaatataggacgatatctgaaaaccacagtattaagtttcacaatgcgtttaactagacaaactcaaaactccatcacttgccgtcaaaacaactatggcagtggttgcagtaaatatagtctggccatgtccatctggaagatcgtgaacagattgcaaagcaagagcaaaagccatagctcctcgaagtcctactcaaacaaataacaataataaggaaatatcaccagttaagaattccaaatttccaaataataaattccactatatcttaccactgtaccaaagggccttttgatgttttagtggtatttttctattcgcgggtctaaccaaattgaccaaatatccacatgagaaaacatttgcagccctacaaacaatgattacacaaacttgtttatttcacaatcaaaaaggctactttgacgtaaatattaataataattatcatgggaattttatcggcgaagtctagtaattttgtgaatgcactacacttaccttgcaactacaataaatatctaggatgtgaagaggccagttaaaggaaacataaagcttctataaacataaaataaaaagaacatgagatatataaatctatgcaaggatacaatcgagaagaaaatgaatccgacatgtgaccagctatgctgttccatagcaatatcaaaacccatgtatataaacctggcaatgaaacagtaaactcagggcaagctttcataaaggttgtgagtggaaaatttacaataacttgacaagtgatagaagacaacataagctctcttacacaaatgtctctgctagtgatgatatcaaatggaaaaaggaagatacaaatcgttgggaattttctgacaaattagagtacgtgtaatgcttcatgacctaagacagatcaagaataatatttttacaaaccccaacataaagtaggtaattagacttgaaaactatgtgagattctactcacaattcctgtgaataatattgacacgataccagagaggccaagaccttctgcaagcatatacctaaagaagatagtttatgttaaaatcaaacaattccagtgaaaactgcaaa

SEQ ID NO: 53156 - DNA, 1272 bp, Cannabis sativa
accaacttattacctgaagaatcaattcagagtatatagactaatcggtagccacttcacttaaccattttacatttcacataactacatatccaacgtatgactatcatatcatgcatagtctctctctttatcatcactaaattattcacttttttttttcaatcctcctcgcttcacaggtaaatgttaattctgatgatttaattttttattttcttcttactttttatttactttgatggtacctttatgaccgtaagcagcaataatataataattattcagaattcttatcaacttaaatgctaattataaatgttatgggcttttatattttttttgtgtacaatttatgatttttcttaaaaaaaatattttatgaaaaagaataatcaagaaaaagctgaaggtaacgagaggactaaacaattaccttatttcctatacattttaactttcttcaaaaaatttctataaaataactttttttagaaaaaattatatttttgaaaatttatatcttaaaaaccatatatatataaaatcccccattattttctcttttttattacttggaaacatgggtaatttctattaccttcaattccttttttacttttgaggcatttatattatgggaaattttatttgtatcccacaaaataattacacactaatatttaaaaaaaattaaacctaaaataatttttgaaaattaattttaatatattttttaaatttttatcatattattttgtcttaattttaatattcattttaattttatttttacaattttttttttaaaatcatgtataattttttttattttcttctaataaaagttcacatgttattttatatgatatatttttttaaaaaataaattgaaagaaaaaaattataaaaaaaaactatcataattaaagagaataatgacctcttgtttttttttttttttttggaggggggaggaattaatagctcggtgagaataatggcttcttttttctcacaaaaaaaataaataaataatggcttcggttgtcaatacatgtgctcactaaccacaatataaacttcacatagttttattttattattatttggaaaaaaaaaccaagtgttcgattccgcagaactactactactcaaacccaaaaacaccccaaaggatcaacttttttcttttttcttttttcttttttttaagacttttgcagcttatttattcgccacgttctcgcttacttcaaaagcttttgggcc

SEQ ID NO: 53157 - DNA, 1153 bp, Cannabis sativa
ctctatgttataacaataacagttagctttttttctctgattttaatttgggtttctggctataggctttatttcatgatatagattttcagatttgtgattttgttttagctttagtataaatgtcatgactttccttacgactgaaaataaattatttcttttctccaagtattatatgcttgcattttcagaagatctcttttctgacttcaaattcagagtgatcaaaacagtgcaaaatcaaacctttactgaaaaaaagggggatattgtggaaggattggataaaacttgcctgtgcatattgtttttagaggtataacttttctttctggatccacaatgttccagttcatagagttactaacattgaatgaaagtaatagtttaggatgtaatattataattatatacggagttggaaagatacctcataaactttcatttcgaattaggaaaatctttgtgcttgtaaccaatttgaagttaaaagaaactttaaattaggcaattaatttatttttttccctttttccaaagagtaatttgattcttagctttaactatgctgttctaatgtgtggattttgcctccctatattttattgtaaaattattttaccctaacttaaaccatttataaatggttgcgggaatttataatttaaaggttgtcatgattttgtcatttttataatgtgttgttaacaaaattaaaaacattaataaaaaaaatatgtggtgttattaaactagtatgctttgaattggtgtggtatagtggtgatgctttgcatcacggctgtgttattattttattttttggtaacaggaaactcatcccttactaatattacagtcaaactttgcaataatcagattgatatataaaattagagtttattgagttgcttaattgttatttttttagatatggttatgtatgttcagctcaaccttatctttgttgcaattgcaaccttacatagcttaatatgcagaatgagaatgtcttttaactatgccagagcttttaacctaattttttatcgctttattttaatttatttttggtcaagcctttcatcaaaaagagatttagttgtttattatattctttcctgaatgaaacagattaaggggaaaaaaa

SEQ ID NO: 53158 - DNA, 769 bp, Cannabis sativa
atttgtgcaagggtctataggcgggttcgtggtggttgacggggttccttgtttagatttgaaaattttataatagataaatctaggtatttctttttaaggtctaggtatcttttagatttgcatatttttatgatttgtattgtattttttacagttacagttgatctggtttttttttggtggtttaagctttaagaaagaagaaaaaaaataaaaaggaaaaaacaaagagaaaaaaataattatttttcaaatatattggtgggtggtggtggttgtgttatgatggtggtagtgggaagaatataattttggaattttttacataaaatgccattttttttttattttttaaacatttatatggttccatagtttcatttttcaattttaccattttgtttaaacttttatacggtttctttaaaactttttacatcatatacggttttgattacatcacccaactgcttacacgtttccttcaaatctatcaattttcaatcacttctcttgcccattaccacactctaacccactccttcgttattatcaatattttttgaatttctcattcttcatcattctcaatttgctcttcttcttcattctgttcatcgagttcctctttttttttttctctgttttgttttctttttgttgtttatgttgggttttgtgccctaaataaaacccatttaaatataatcagatttacttattaataaagatcacaaataacattttatgttagatcggaagagcg

SEQ ID NO: 53159 - DNA, 1862 bp, Cannabis sativa
attaaaaaattaaactcaaaattgtatttatcaaacctttcaataaaaaaataaatatatctattggtcattgtaatattttgctagttagagtatttttaaccacaaaattatcattgtcaatttctactgacattccaaaatatactcagatacatatttaagctaaaactaaacaatctttaaactctatttttgaaaaaacacggtacacttgtgattagatattcaccaaatttaaatcttaccaatggtgattcatatattagaaaattaaaataatttttcacattgaatctagatcttacttctgttgactcatatattagaaaagtaaaataatttttcatattgaaatatcaagagaaataaactcaattatcatatgaggaaagggattcataccattatttttagagttgatttttgttgcggaacaaatatgccaacaacatacttttgtatgtacaaaacttatgctagaactcctttttcctgaagtgagctaccataccatttacttaaccaaaccatcattcttgcttttttgtacatgtatatggatcaaccattttgaatgctatccttgcgagcataaaataaatacttcggtgtaaaaaataaagggttaaaatataaattctgctacaaaacaaaaatgatgttcatataatattgttgttattataataaaatctaaaaaaaaatctactacaaaaaaatgctagttgaacaaagtcaattactaatggcatatatatagtttgaatgtaaaattaaaagcctctctggttataaattgtatacacatgcaaaaaaatcattcataaatattgtgacctttcatttttttatggtaaattttattttttgtgatatatgtaagggtggtggttaggtaaggttataattgaaataaatttattatatatcttttaacttttaattattattactataacataaataaaaataagaggaatttattaaagaaagaaaaatacttaaaactggaacattaaaggtgaataattaactataggaagatggagaggtaaaataagttatgaagttaatctttgaataaaaaataatgtaataagtgaaaacaaataattttaaaatttataagagtttttactatattattaaatttaaaaaataataatgaataaaaaattagaatatgtgttgacacttagtgtaaattaattgaaaagaagaaaaaatgtttgaagtcttggtgagtatgtgcttaagtatttgttagcactaaatcaaaaattaattccccctctccaaaaaaaaaaattaatttaattaattaaaggtaatgaaagaaattaaaaaataataataattaaatgaaattttaagaagcaaaaaattgataaaagaactcatatgagttgccacataatcttgtttatgctttcctttatatattgatatattgatattgatatattgattaagttgagttgaatataataataaaaaatcagaaaaattacaaaagagcaaaaaaatataatgttgaaaaaatagtaatttagaattgctagagttgagttagatgatttttttttattcttcctttcttttccttattatttttttattttatcttttttatgtagtatactacatacccgaaaatcaattgtttaatagagagataatgtaaataattctttcaatttataataattactttcatatatatcataaagtaataaattatttttatattaatatgtcataaattagtgattaaatgtagttataagttacatcattattaattaataataatagatgtgaatttaagttattctattgataatagtaataataataat

SEQ ID NO: 53160 - DNA, 756 bp, Cannabis sativa
cataaaatgtgatttctgatcatttactaattactaaatctgattgtattaaaatgagttttatttagcacataaaacccaatattgtgaataggtgtcttctgaatggttatgttgttttgtataattattgtgaatgaattctttttagttgtgtatgtaaatgtttgttaaagttaacttattttgagtatattctattaaatagacaacaaactgttaaaaagacataacaaaaaatgttacataatcattttatatattaggtaagatatatttataggattagagttttattttattattattattgtgagttagttatggatattcatttttttttatatatatatttgtttatttttaattatttattaatcttataaggtattatgttactaagtgttcggtatattttttttttctttcatttatcaataataaatgatggtaaaattattaaaaaaatgaataaatagatacaatgcatatataaaaataaaaatgatttaaatatataaataaaagatttaatcaaaatttaaagtagtttaagtaaaaaatttcttaattagttaacattaatatttattaatgaaataaaaaattaagaaaaaaaaaggaattaaagaaaaaataaataatactaatcagaaatttttaaagtgtatgtacttggtttaacgatactttttgggtttctacgttagctttaacagaatattctattaattaacagaatattttttattaatt

SEQ ID NO: 53161 - DNA, 961 bp, Cannabis sativa
aatttttaggttatgtaagtataggaattcaaatttcccttaatttaattataaaataaaatttaatcataattaaaattaaaattttataaaaaaataaaatattacgttattatgaggttgtaaattatttattatttatttttattttttaaattaatcaaaacaatttaacaataaatgttaccattattattacatatttaagataaatattaaagtatcttctcatataataatatttaaataaataactttatctttgagagcttgcgtaacaacttccatataaatatgattagttgtgtgcttgcatcgattcctgaaagtttccatcatattcaaacgattgcattgtgtcttatatataaataaatattaataaagttgacataaatggcaaattaataaatgagagagagagagaagggggcaatggattaggttggtaagcaagaaagtttggcaattaattaggctgattacatagttaataagtttttagaatagaatgaatggagaatttaaggcaatagccggctgattatgctgttcaatgattgtgtttatacatcacatataatacaatggacaaatattggccatcagtttgtaatgttcgaatccatgaagacaatcaatgaccaaaaagccgccgtttgatgctttgactaagtaccccttcgttataatgaattaaaagtgtctatatcctattggccatcttaattcctcgctgacacgtacttgtaaattataacctaattaaacatgtaatatccattccaccaatgaaagaaaaaaacagtaataatagcctctattacactagaaaaaaaaatatatataacagtaattttttgtttaacgattttttttaacatttcttttttttttaataattaatatatctagttatacacttaatttttctttaaggttgagtttagaattttgaata

SEQ ID NO: 53162 - DNA, 576 bp, Cannabis sativa
tgctaaagatgcctggataattcttcaaacttagtttcaatgaactagagatgtaaaaagatcttgatttgtcatgttacaaactagatttgatgatcttaggatgtctgactctgaaacactatatgagttttatgaaaggttatttgataattctaatgaatattttgctcttggtaagaaacttgatgattatgttctggttagaaaaattatttgagtgcttcctgataggttcaacactaagctcactgctatggaagaggtaaatgatttcaattctatgaaagtagaagaattgatgggctctcttcataccttcgaattgaatcaaaagattagtcaaaaggaaaaactgagggcttccaaagaaaaagagaagaccattgctttcaaaagtactgaaaaaagaagcatcagatgatgaaaatggtgataatgaaatggtaatgcttgcaaagaattttcaaagatatattaagaaaattgaaaataagaaatttaatggcaaggcatcaaaagataactcttctcctcttataccttttcaaactaataaaaagagtattcagtaca

SEQ ID NO: 53163 - DNA, 1832 bp, Cannabis sativa
attgatattgattgataattattattttattataataatttgttgcgacacgttagcagcagaaatctctgagatggagatggtttctttgtaattatctgaccgttatttgtcgtttcatacctgattggctcatggctactactaccacctacacataacaaaactaattcaacatgtacacactacacccatctatatacacatggacaataaaataaaatataataatatctttttattaactataattttttgttcttttatgtatactaggtggaagttacgtgtaaatgcacgtatgtttgtatatctcattaaaggaaaacttaaaattgaaattgattcaataaataatcatatgcaattggtctctgcacctgttgggattgtaggttgaaccagattcagaaaaagtgtaatacaagtaaaaatcttcatgctatagaagttatctatgactatgaaaaacttaataatagactaaaaatttaggccaaccaagaccaaataagaacaaaaaaaaatttcatccaacaatcatgatattcaccgacttctttcgaaccaaagtattggaagaagacactaacacatccaaactttagtttatatatatatatacataaattatggctttaccatcacttctagggccttcttaaacagtggcacattaaaatattaaacatcagtaaattaatatagacaagtaattttcacaatattaacttaacatcaaataaaaaatttaatattcacttatattaccactgtacaagaaatatgaatgatggacttcttcagtgtgtcactcaagccaaaggtcctctgcaaatcaaaaccctccaagatctctgttttataacagttgcataaaatgaaaaatagataagagaataaataaataaaaaaaaagtgatattttgcaacattaataacattgacagatggatatatagaagtctaaaaaatgagagagagatttactacttgtctgtgattgtaaatgagcaaagaatatataacaaacaattactacttatgcagttttgatactctggcgcttcagaaagtttgggttgccttccccgagatgtatcaacttcttagagtccgcatctctcccaatatgcgaaaagtatgaccaaataatgtcagaataacatattacaaaacgtaaacataagctaaatttgggaacaacatattaaatatattaatatatgtatgcatatatgaactttatacgtacactgtagtgttaatttaataaatgatgcagagctagtttatgatttcaattatctaaaaatggtatcaaatgttctgccgtcaatatgagagagagaatgttttcgatttaaacactgaagtttcagttcgtcttttagttttttctgaattaaaaaatagctgcaacaaaattagtgatgatactttcataacatcatacctgaaatataagaacacattttgaaaattacacagataataaagcaaacaaaatggtgagtttggaaggggacagtccatagcgacctccaccaggaagcttcaacattttttccgattcaaaaaaagctttggctatgatgattatgaagatgatgatcttgatctcgtctgaccttaacaagtcaaggttagacatttggaaggggaccgtccatagcggagatggtgagtttttggaggatgatcgaatgcgacacaatgctcgatcaggatttgtaatctgctatcttttctaccaatactttttttgtagggtgccaacaaagactaaaagatgcagataggaagataataggaatgaacggtgttgtggg

SEQ ID NO: 53164 - DNA, 2601 bp, Cannabis sativa
gtatcacaaactcttctatacaaagacaaacagcagatacacaacaatgatacagtacattggttaaaaccacatttgctaagtatttgaaataaaaatatacaatgaagattcattcaccataaacaccaccattaatttttaattcaatgcaactcagagcagagtttagcttaccctcttgtgtaaccatgaaacactgccgaatcgcaccaacatcgctgaaagtttcctccaactgattaaccaaataaaaaaaatgtaatctaaattagccaaaatctagctccattaagcattcaatactgattaattcctaaaatacagcttagaatcctgaattttgtatacatataaattagttcaagtgttttgcaatggtttctcgagaaacaaaaatagataaatcacatagctaagataatgtttttttaggaaaattgcattcaccactggaattaacaccaaaatgaaagaacaatttaaaactttgactccacatgaacaatacaccccttaccttttcgaaaaggctcaagaaaagatgaaaacttctttcactcaccgacaactcagatccaagcaaaataaaaaaaaaatgattaaaaattcatgaagcgagaactcactccctaccaaacatatctaaccagtacaaaacattaagcagaaaaaaaaaagtttgtaaagactaaccccacagggtgtcgaatggcgaaaaagagaggtcttaatgagagagaggttgaacctgtacagtgccgacttcagagagaagaaataataaacagaggggagagattgactgggggtgagaggcgcacagagaaaggggaatgacgggggagatgaggaccactcgtcgttgattaagggaaaagaaggtcgaaaatcagcaaagcaacctgatttggaaagagaatgaatagtggtagctgattttgcgagttaggtttaaaggaaataggccatttcgtgagtcatactcgaccattaaaaactgacgctgaacatcaataaatttttaagttttctttttctcctcgattatcttattagcgtctaatataccacaaacacaaataatggttttttagtgtcagttttaaacactcacataaatacatgacctactattcacgtcggtcaaaaaaatgaacagtagagttgaccgacgtgaatagtgtaatttgtagtagtgaaatcgagaagcttctgccacgtcaccacgtaataccaaggagagagaaacttacaggcgagtcaacgagttgaggggcgagaaggcgagaagctttgcgataaccgtacaggcgagtctaggagcgtcgctggcatgtagatgagtctaggtgcgtcgctggcgtgtagacgagtccaggagtgtcgccagcgcatcgacgagtctaggatcattgcctgcgtgtcgacgagtccaggagtgtcgttttttcgtctaggagtttctacgataactgttcaggagtgtcgttcggcctaggagagtttcgttgttgatcgacgacagatgactctgcttccgtgatcttgaatgatttggagtgttctttgttatttactgtttactgttattagttttgactttcgtttttttgtttaatttactgtttttagtttttggtttcatttattaatttactgttattagtttaagtccaattattatttttatggggttaaaattattagttttatgtgttgaaactaattaggttttcccattagtcttgtcttttaacatggttcttttgtttttccttttagttttttctggttcgatttttgttggttcttgttttatttgtcactttcgggattctgctggttgtagtacgattatggaagacggtataggggtgcatattcctattgtggaggaggaggaggctatcttgtcttctgatgctagtgctatggatggtaatgactatgatgacaggtggtgtatcgttggaaagttcttgactgaaagacaaattgattttgaggctatgcaacatatgatggcttcattgtggcagccgaggaagggaatgtttatcaaggaattggatagtaatcgctatctctttcaattttatcatgagattgacatccaaagtatgatgaatcgaagcccttggacttttaataggttcttattaatttttaaaaggttgcagcgaggggaaaatccaagattggttaccttgaatgaagttgatatgtgggtgcaattgcatgatcttagaccggagtttaaaactgctacggttgttaaggatgtcgcaaactatattgggaagtttgttcaattggataaaaggaattttatgggcttatggcgggattatcttcatgttcgtgtgactttgaatgttacaaagccattaaaaagacgtaagaagcttcgcaataccgtgggatcgagttctggactaactttaagtatgaatatctctccactttctgctttatttgtggaattatgggacattccgaaagcttttgtccacggtgtttcgaggttggagagggttagataatcaagccatatggggaatggatacgagtgagacctatacgtagaaaccacatgat

SEQ ID NO: 53165 - DNA, 758 bp, Cannabis sativa
tttaaaatctataccatattatcacttttttttattattttattcaattattttatgtttactcaattatatttatcttatattaaagttcttaaaattcatttaaactatagcattttttaatttgaaatatacataatatatttttatttttttaaatttaattacttgaattctagaaactaacaataacaattataaaaaaaaataaaaaaggaaagaagaacggtttggacggttaacccgaccaaaccgacaaaattattgggcgggttgaattttttctaaattttcattattgggcggcttactatactaaatatttgcaacgcaatatttatatttggaacccctaatatcagttgcctccagtgaaataaacgaattgtcgaaatgtattttattatttactgctttgacatgtatatttattgttacttttgctatttattgcttttggccaaaacatttatttattttaacaagtacatacataaatattaatcagattagagaagctgaacttgggaagctcatcagggaaggctaaggtgttgggaacattagttggaatagggggagcaatgcttctaactttgtacaaaggagtggaaatcaatatttggtcaacgcacgttaactttcttaaccatggtcaacataatctgaaccacgtggtatcaacgaatgagtatggtaatcgtgttttagggtgctttttttctgtggccagtagtacgtgctactctatatggctc

SEQ ID NO: 53166 - DNA, 972 bp, Cannabis sativa
gtatctattgttcttattagatttagttgcttacattttcattttatgtttatttattcatttgtctttgtgggtctgagataatatagtatattttacagtatattttttttttttcaaaaaaatagtatattttataaggacatcaaaaacattcctttgatatattagtttttgaaaacagaacaatatttgagatttttcaatatatatttatttctgtattattattattttttttaaaaaaaaaaaaaactacaaaacagaacaatatttgagatttttcagtatctaatttatttggagtcaatttcaaaatatcattcttataagattactaatagtcatataagaattaaatataatctttaaaattgattttttttatgataaatgtattttatttttttgaaatggtagtaaatgtaatatttgaaaattaaaaattatttttttttagaaaaatataaatattatatttcattattttataaaaaaaattataaattataaaaaaatttaaaattagaactatatattatatgttgctaattgtgacatcttatattatcataatgtattcaacagtcaaacgatttcttcaaattaatattattaacatattacaattattatatttatatttataatattatttatattataattttttataaaataatgaaatattatatttatgtttttctaaaaaaaaatggacaatccaattcaatttatcaactaaggacagtccaattatatacggatccgactagaatgaaaagtgcaatgtacaaaaattacattattgtctcagtcgaagcaaaggaagattaaactccacccatgagtatcattagttttcttacctacaatttttagacaaatattatcttcaattaagttatgtttccttaagtattggaatatcaattttagtttatttttggattaacttaagaacatatttaa

SEQ ID NO: 53167 - DNA, 1046 bp, Cannabis sativa
taaatacaacaacgtatacgacttctatggtgcaaatagtctgttcattttcttgctcaagcttgcaggcttgagatgcgttttatcattctatagagggctaaacgagcctcgtattaaggtatcagtgttctaatcgagtcgcatatatggacaccttattaataagcgttgataacataagacatgcgagtccttatcgagttatcgaatacgctgagtcatttggaccaattcatctagtaaagaaacaatctttactagttcgcaggtgaaggatacttaatcattgcatatacctagggatacgcacgacttatataaacccttcttggtcctgtttatttcataatacgcgaggcataataatgcaactagactctgtcacagtcacattatctctcgagtttagtttaggagaggtttattcttaaggagtcccttcttgacagcttaggaatgcttaagggatgtgagtccacgtgtcactcttatgggagcctggtctcgagtttttaggcaaaaaaatcgcactataacacatgcccctactttcgcgcgcgattgacagctatgtcattagggaaactatgagagagaggcaggcgagttgctatcatgagatggtgattcttggttgtcttgttgagtgtttcgaaaagacggctttaattattgctttaattttcctccgagattccacgtcatcaaaacccttcagggtatgtgaaggcgtgttctttggagacagttggatatgaagatcttaggcattcccttgccacgtgtctatatcccactaaatgaggaatatcggtatttaaaaccttcagatacaaaatgattctcattcatttttcctcacattttcgacttttccttcccttactcaaaatttcaaatttctgaaatttttctgaagcatcaaatttctccaaactgaggatgatctcgtaggtttgatcacgtacaaaataatcgtaggaagaatcatattgaaggtagttagtaattttcctctctgtaatcattttcttttccttgaa

SEQ ID NO: 53168 - DNA, 1700 bp, Cannabis sativa
atagtacttgaaggagtatgaaaagtttgtgttgatgatgtagaacgatcaagatttttttgacgtgttgttgttgatgctgttattgttatcgtggttgcttgtatggtttccattagttagtaggagttggatttggagttggaggatggtgttcaagtatagtaattcaaatcacttcaacttagtagtaaaataatgaaagagagaaaactaagccaaataaggagtgttataaaaatagcgtgcacgtttgagaaataataaaaacaatttatagagtgtcaggattctctttagatgagagaggagtgcttcaatgtgtcatgtgtggtaggattatgatgcatcatcaagtaaaagacaattattctaaaacatctcttagccattagatcttcaattcaattttttttttttttttaaaaaaaacaagggttatgatgaaatattacattctccctaggtcgtggactgggcgggacatcatcgctgtcctttagtcatgttagaaatgcaaatatatatataaattataagttttgataaaattaataaaagagagttaatttaaaaattgaataattattaggacaaaaaattaaaccaattaatattataaatagttagtctagtttgatgaagactaattttttttttatttaatttaattgtgaagagaaaaacaatataatatattttgtctttctcgacaaaagtagacaagtgcagataataaagaaaaaagatgaacaaattaccttaaattagaaaagtcttttctgttcatcttgatctctaaagccctaattaataaattggagtagacaaaaaatatcagaggaaagtggaatgaaaagttaccctaaattaaaaaagaaaaacgtttacccatctttttctaattcattcctttccctctccctttctctctctcctcgccactaagaaccattggtgtttgcaggaagaagaagaaagggaagaaaggaaagagcaattttaggttttagggatttttttttgggacaaaataagtattattattattattgaaggcttcgaaatcccaattacatatacacagccacaggctttcttttcttccatttatacacacatcaggctttggttttttaaaaaattattaaattgtggaggaggatacattattaattttagaaaaaggcataatcataatttttacactgtttacaatgtcttactcaagtaattagttgtacatggatgttgctttattatatcattatgggatttttacactacatactgaaattttatatatagtttcttttttattgtgggacgaattttttttcaaaaatactgtgtaagtttcatactgtgtattgtgttaagttttttctgttattttatagttattttttagttgttctactgtaatttttaattgttctattttgttgttttacagttttttttaggttgttttataaaaaaacggtatttttgtaaaaatctcatacattattgtgaaatattataatcaaacatactatatacatactttgtcagaaattagagtactaatttataaaatattttaattgtgacaaactcattattagcttaactgttttaccgtttaataggttaattagttttgtcagttaggttcgttatgttagtttctttccctcctgctgttgttctgaact

SEQ ID NO: 53169 - DNA, 1044 bp, Cannabis sativa
  modified_base (370)..(371): a, c, t, g, unknown or other
ttctaaatatgtaatatatgttcttaccaactatagacattgtaagcaaaagggaaaaccttcccttaagcattaagcccgatatatagtgatccattctcactagtaaaggggtcgaaagaattactttagagatttctaagagagcatactcagagatttcattgtgagagctttaagagaggaaacactgtatctttgttcttgagttaatacaaatcaaggggagtaggctattaccaaactaacgaggtcgaacctctttaaaatcatgtgttctttattgcttattagttcatactttactttgattatattttttatcgcttactatttgactcattctcgttggctaaaagcgaggtcaacnntttggtgctttcattgagagcaataatccaagtttgctctttgcgttaagtttgatcagacacaaaagatggtggtacaaacttacaaaggcgtggtcgatcaggtggacccactgacgacagatccaacactgcatactccagggaatgcaagggtcccaccagtcacctatcttgagcaaccaaacacgcaaccacctaccgcgggtcaggtgtgacatctcttttggctggaatcacacccggtgcgccagagactggaaacaccagttcagcagccgaactgggtactcccagtactagaatcccttcagcaacaaatgtttagacgaccattggagatgacactgagatctagaacctccataattatcttgggctcatgcaaggtcatactaataccttgcatcataattaggaagagctccgtgttgcagtgaaccttgcattcaaagagcaaaggccccagttcgccgaatggaaggatagagatggaaatattgaaggctcaataggcagccatcgacaaccgaacaagataggccaccatactgatacgaagagcctaccaagttgctaaccagaaacctgcgtctagcatcccactgggcagctcgaaagaaattcctacttggcatactgcccaaactctgaacggtcagccgtccaatcc

SEQ ID NO: 53170 - DNA, 684 bp, Cannabis sativa
tagagtaactagttaccttatactgttacctttctgttttctcatattttttaactttttattttattttatttttcgtaaaataacttttttgataataatctatatttttataaatttataccttaaaacccataaaaataaaaattcctcccaaaaaattgatcttgaacaactagaagactttacgaaattacgaatttacacatttttttgggatatgatcctaaacaactagaagactttacaaatttacaaaaatactgtttttttttttatatttttacaaaaaaaaaaaaaaaaaattcttacaggccattttttagattgtattaaaaaagactattatttacacgttgcggaaatatgatacaacattacagcaacatgaaagcagtattctttctctctacgaaaatttgtaataaagtaaaaaaaaaaaaaaatgcaattttaggtacttaatttgtgtaatttcttcttttttaaataaaaacttgaacctctaatggtaaatattttttggaacataactttttattttcatttagaagagcatcttttaagtatatatgggcctaaacttagcaccaattgcaatgtattcacaacttggcacaatgggggaaaagctagtggctttgagagggtcatgttgatttggattatttgctagatatggtt

SEQ ID NO: 53171 - DNA, 2523 bp, Cannabis sativa
gaaggaaggttggccgctatactgtggggcattgagccacttggagaactgtggaaggatattaagaggctgatcgtgggatcaatggctgaatttttggaccgagcagaaggatttattaagtttgaagaagttgttcggcgtgtagacattgtcagacaaaagaagatccaactacgtaccacctcggcatgagcatccgctaacagtccacaatatcctggcagttcgaattcgaatgggaagaggtgtaataacaatggtaggcagggcaacagaaagaaaggcaagttcattggtaataccgaacagcaccccagggaaaatgccttaaattttactgccttttctatcctaacagacgacctagagacaatatatgcaacaactcagtctatggtcccatgcaagaaaccctctcccatgaagaaggacataagtaaaagagatacatccaagttctgccatttccatacggattacagccatgacataaacaagtgcaataacctgaagcgggaaattgaatttttgatttgaaagaataacccgcacttgtaaaagtatgtcaaggctgaccagaatcaaagggccgcccaaacagacaataactagaaccaattgatgcctccaccagtgaatgggcatttacaagttattattgggagtccacatcctactggagactcgggcaaagctcgagaaaagtatgcccaagccttgcagtatgaacaaaaggaaacagttttggccatagaggagagaaagccaaaaataccacgggtaggggaacccacaataactttcactgaagtagatgataatcatgtccacttcccacacaacgatcccttggtcgttgaagtatagattgcgaataagacagtggcatgaaccatgatagagaatggagcctcttcaaacattttgtttaaaaacctatgagaagatggggcttctgcttaaagatccaatcccatgtacccaacttgtatatggtttatctggccagagcgttgcacctctagggcaaatccatctacccctcactgttggacaagatccgaggagcataactgtgatggcacaattttcgataattgatatcccattagctttcaatatcatgctagaccgaccagtcctatgtgacttaaaagttgtcacgttagttttccatttgtgcgtcaagttcccaacaaacaatggggtagggtgcctcagagggaaccaaagaatagcacgggaatgttataaccttacccttactaaggtcagaaaggaaagtacctccggccagagttcgggcaagagaaaaagtattgcccaataggaggttgcccaaggcggggacgaggacatggatccctgacttggggaaccaaacacaaatgaagggccggtggaagaattggaagaggttgaaatcgacctaaatatcttgactaggaaactcaaaattggcaaagttttgttgctcgaaataaattagctttaataaaatttctaagagcaaacctagaaaatttttcctagtcacatgagtatatggccagtattgacctttctataatgtctcacgtcctaaatattgacccaaactttcgacccattcaacaaaaagaagattgttggacaaagaatgggctcaagcattgaaagaggaggtagaaagactgcgcaaaaacaagttcatcattgaaggcttgggtggctaaccccgtactagtacccaagcctaacaaaaaatggcgagtatgtattgatttcacttaccttaacaaggcgtgccctaaggattattttccacttccaagaattgatcagctcatggatgcaacaactgggcacgaaatcctgagcttcatggatgcctattcggggtataatcaaatcagaatgcatccaccagaccaagaacatataagtttttgaacatatatgggtctgtaatgttacaagattatgttgttcagtctgaagaatgctggagctacctaccagaggctagtaaataaaatgtttaaagaccaaatcagataaaatatggaggtatatgtggatgatatactcatcaaatccaggaaagctagggggcagatagaggatctggatgaatgcttcaaaatcatcagaaaatacgatatgaaactcaatcccttaaagtgatcctttggagtcagctcgggtaagtttcttggttttattgttaatgctcggggtatagaagtcaatccagaaaaaatacaagccctcctaaatatgaaatcgccaataacaactaaggaaatccaaagcttaactggtcggatagctgcactcagtagattcatctcgaagtcaatagacatgtgtgttcctttcttcaacatccttcgaggtaacaaaaaatttgaatggacggaggaatgtgagaatgtttttcaggaattaaaaagacaacttgcaaaacctcccgtactctcaaaacccctggacggagaagaattaggaatatacttggttgtcaccgaatatgctgta

SEQ ID NO: 53172 - DNA, 553 bp, Cannabis sativa
aggcaatttaaaaagatttattgtttaaattgagataaatggccaaactgcaccttatgaatttttttaccttatgaaatatagtacttatgttaatttttgtaatttaaattaaaattaatttgaattttaagaaatatttctcattatcaatatataattaataataaactaaaaacaaaattttgaatatataacgttaatgtaataaacaatcgtatcaatattttgttaacacttacgataaaacttagcagaaataaaaattcatagaacctagttagagtctgtttgactgtatttttagttttcagtttttaaaattgtatttttaaaagtgagaataaaaataattttttgtcattttaaaaatttaatggtgtttagcacacatttttaaaaatattttttaaattttttcttactaaaaaaattaatattttaacatcataccatgacatgatcgcatccggattcggattcgggtatgatttcgggtctagaatcccgtatgcaagcaaaaatataaaatataatatgttagaccaaaaaa

SEQ ID NO: 53173 - DNA, 755 bp, Cannabis sativa
actgtagcgtgccttagcattagggcgttacatttcaacatcaaaaaatatcaagcatatatgaaacacacaaagtattaaattgaacttttgccgtttgtatagaacttttctcattatccctaaaaatttgacgaaactaaaattcgcggagcacttttcaccaaaaaagatgagtgagcatcaacgaattcaatttcgaatatgtacctaggtgcccaatgcatgccctgaggccataatgggcgcccaggttgacgtatctcaactgagggcactccaggacttctttctagagaagttgtttgggaatttcccttattttcatccacaagggagatacaagtacttttgggaagcaaacgaagccatctagaccctcgataaaaatttgggtgcccaagttaacatcacccaattactgggcgcccaggttgacgtagccacgggtttggtggtttcgtcgatccgattgaaattttgtctcaagcattctttttgttttgctccaaaaataagatatgagaattagaatcaagagaaaatatagttcgagtaacaacttagcccctaggcatcactaggtgccagtgtgcaagcacattaggcacccagattgacattggcctagggctcggtgttctatccttcaaacaacaatttcgttccgggcatcgatcttattttgttcccaagtcttgggcgcctagattgacataaacgtcaacctgggcacccaaaagtcaggttgttct

SEQ ID NO: 53174 - DNA, 807 bp, Cannabis sativa
  modified_base (265)..(266): a, c, t, g, unknown or other
ttacagagggggcattttttcgaagatatcttttcttggaaaaaatgcatcctttgattctggcggttgtacggtttcgagggtcattatgaatcggcttttcatattcgacacttctctcaaccgttggatttttcaaagcttagctttcttgtcactggactttgggtataaaagggcgactcgagcttgtcatttttcataaacctttggctcttttgtgagatccactttcagaatggatcatctctttcctgccaaaatnncccttctgagttcagaagttcatcctcccaacctcataatacccagacacaccaagccatttccatttgtttccaaggacttcaaacctctatcggtgacgacaataatgtattcaaaggctgtggagcttccgaccaatccaaaccaagggaaccccgtagcccgccatgggcgatcctcacaagtgatcataaatcttgtgagcaatttaaaaggtcctcctcgagctgataaagaattctagaggaaggttggcatggttgcagatgaatctgggtaggaagttggggtggattctatcagagaatccagccaacccaagacccaaacctgtgccagaagacctttgcatcaaccactttttgatatcgaggaatttcctaaggctgggaaagagatctcggcttcaagtttatcttgaaaatttttcattaaactaagtgtgtttttcttaaaataatttcaaaataatctgatgaaaaattaatttcatatatttcgaaattaattatgttactagtcaattttattaggttaaac

SEQ ID NO: 53175 - DNA, 1047 bp, Cannabis sativa
cagaaacaagattcaccattgaaggttcaagattgagttcaaaaactcaaaacttgactaacccttcaaacaaccaccaaatcatgcataattcaacctatttcaatataatttaaccacagaaaataccactaaataataacaacaaccacagcaacgaaaatcatcattttaccttgaaaatcatagtttttgagccaaaattctaaacttgaataaccacaactaaggatcaccacaacctgctctaatccattcatctaaacataatcaagcccaagaaaacaatgacaaacatacacagcaggtataacatcaaattcatcaagcatgcaaaagttctacttccttaaacttcaagaaactaagagaaaggttgatagaagcttacccacaataaggaatcactaaactttgagaaaatagcttgaaataccaaagaaaacaccaaggtttctgctactcaaggagggccgaaagagagagggctagagagaaaatagaatttttctttttctttgattttttccaattttgaaacataaaagatgaaatggtttttcactaagtaaatcagccaaaataacataacatacatcacataatcaccaaattttaagtccactaaaagacaaaggcttatggaggaaaatgactattttgctcctcccacactaaaagggttaaaaagcactaaaggggtagtttgggaaattctaaattcctgatcaatcccgacattcccaatgtctaaataaactgccccaataaactaacatactaattttttattctactgagccatacaccgcgttccatgttaccgggcaccaaaaatgtaaaattatgaaatttcactatatggcataaaatgcattcagaattcaaatataaccacataaataattatataaatatctataaacaatttccataagtaaatcttaattaactgctaattttccaaattaagctaggcggtctgcactggctgttcttcatatgtcatgtctggctgcagctcaagactctcataactaagtatat

SEQ ID NO: 53176 - DNA, 511 bp, Cannabis sativa
gactattcctcataggacaagtccaacaactgctctaaggcttcctagcccaagacatgggttggatcaagtacatacttcctcaacattgatgcatgaaaaacatcatacactgctgacaatgttgaaggtaaagctaagtggtatgctacttgaccgatcctcttgagaatctcaaatggccctgtaaatcttgggcttaatttaactttcttaccaaagcacttcacacctttcataggcaaaacccgtaggaaaatatgatctcctacttgaaattctatatacctgtgctttggatctgcataacttttttgcatgctttgagaagcaagcatctaagccttgatcttttctatagcatcactggtcctctgaactgattctagatctagatactttctttccccgatttcatcccaatgaattggagaatggcacttcctatcatacaacatctttataggaagtcagccctattgtagtatgataattgttgttataggagaat

SEQ ID NO: 53177 - DNA, 1734 bp, Cannabis sativa
gaatatgaccggcattatttttgggcaatctttatgtttttcattgcagactcatgagcaaagcacctctattattgagctctaaaagtacatatatacatatggaaaaagttgaaaataattaaagtaattaatttaattcaattcaattcaatttattgtttaattaatttttggtgacttgtgagttgtgattaaaaaaatgtaaaataaaataattgtgatgagatgtgttaattataacaaacaatggagaatgattacatgcatttttttctttttctgttcaaactagactaaagagacagaaatagataatatggatttagtagggtacacgaacaatttcttccaaaaaaaaagggtacacgagcaatagttatgagcattgttattggatataccagtatagtgcttaatacttctagacatgtcgcttgcgattgactaacgatatttcttaaaaattattacattaaattatatgggacctgatacttaattagactaatagtgataatcacacatagaagaatactaaataccactggtattttttagtatttcacaatagttatatagtgttgaactatataacgaatttagattggtgggagatttgaaaattaattggatgatgatcatcaaatagataaataaataaataaataaatagtcacaataaaatttgtctcctattgtgatttaaaaattattattttacctattttaattattctataaatttgagattaaaagtattgtaattaaagatacagtagaacctctattcaagaatatatttgggaccataaaaaatatattctaatttagaggttataactaaatagaggtacatacaaaaaaacccaaaatatcaattgtaactacaataattataataaacaatcctctgcttgaacttttccaaccatccatttgaaaatacaaatgaggtagcttcaggataaagtttttttaggaaaaaatttcccttctcttttaataaatcaccactcatattgacatgctcttggtagcatacaaaccattcataaagagcagattccatggctgggtacttcacaatctttggatgttttgcatttggattgatcaatacatcttcttgaaggaggtcacttgagcgtttaagtgtcttagatattgttgcttgtgtcactttgagaccatgagttttttccaaccattcagctagatctttttgactccaagtgggatttgatttctttgttcggcataatttaacacgaatactttcagtgagatgaacacgtattttggctatgggaggaatggttgaatatttacagagaaagactgaataatatcactactggaaattgacatcttagagaagagatatagggttggtccaattattttatagaaaaagaaaagatacaatattgataaatgtaataggcaccatgggaagaggaaacgatagatgtaataagcatcatgggaagaggaaacgatacaatatcaattgatatcttttgtctaaatgtccaatttttttgttgggaattgttgaataattaatgcttaattaatatagtactagcattttttaattgtatgattattggatttatacgtacataacatatgataatatacttatttttgaataaatgtaattataatttagaataaatttataaattatatatattttttgttaagatatgtaattattcttatata

SEQ ID NO: 53178 - DNA, 2328 bp, Cannabis sativa
gaagcattagttagttatcggcctcgaagttgcacttgaaatgaaaatacagtcattagatgtatatggcgattctcttttggttattaaacaaatgagtggtgaatttgcggtcaagcatgagaatttagtcccttatcatgaaaaggctacatattttcttggccaatttcaagatataactctaaatcacatccccagatcaaaaaatggtaaagctgatgcattagctaatttatctccatcactaacacttcctgaataaagggatatccaaattaccataggtgtaacaccttcactattaggcacgctacccaagataattaagaaaccctatcccctaacgggattactaaacagaaaagcgcgggaaatttaaactttaaatgcaaatggaatgaaaataaacttgtaataattttaactttacaaacaaacaaaagttacatgtctcgggatcccaaaaacaatttataaaatattacaagtctatttctaataaccgatttaagcggcaaaacagagttacaaaaaaaaaatcatcactggtagaccccaacccgcttggtctagtgtggcccgaacatgtacatacatcgcccaactcccctactcatggctgataagaagtagatttaccctttcctgcacagtagagcacccgtgagccaagtccagcaagacagtaaaatttatcaataatcatatataactcatcacataaataataatgccatttcatatttgtctgtatgacacagacccgcgtgttaccctcacacgcctatttatgtctatgtggtatagatctacatgttacgctcacacgtctaattacaataaggccttagaacgattcatctcgactctagttactgagtccaacccgattatgccttgaacacataacccttaatttcaatatacatctatatacatcatggcataacaattacatattgacaatttactagggtaacgggtaacaaccctaagccaataaaacgctaaacgctcactttagagtaataactctaatcccggtttctagtctttcatatatatcatattccatataagcgtcattgcgcatatctctacgtgctaactactgtcttacttgatgtcctgcaaatatggagattccaaatcccccggtgctcctgaccaagtgtcggtaatcctagtcataattctgggatacacaacaagtatagggttaatccctaaatttatttccacatattataaaccgggcatttaaattccagatcttcacatagagcttcgaaagaactttctaacgacataaagaacgtcccaagcggagtcccgagtcaaaagttatgaccaaagcaaaaacccaaaaaaaacacactatgctgccgtaaaatggtcgcagctactgggtttagaaacccacgaaacccattttccggccacgaaaatgcatccaaaaatactaattttcatgctatatcaacctaaaataataccaaactttcacctagcataaaccaagtaattagagaggaattatacctaattcactctccaacaacaccaaaaaccagcaacctaaaaatcagcattcaacaatgaatttcagtccctaaactcatccatttcaactcaattcacaaccaaaacttaaatccatgaaattaattttccaataattaaatcaagagcttaaaacacaattcatgcataaaaaatccaatggtaaaaacccccaaaattcagattaaacaacataaaattcaaagctccaacttgagcaaaatcaccaagaacttcaagcccaagaacttgaacttcaacaactaatttcaaagttaattaatagaataaaaacacaataaaattccttttgaattctgtctaattctaacccaacataaattcaaaagatccaagtacaaacatgctcatatcaataggaaaacatcaacatgcatctaaagaccatccaaacctatttcatgcttttcaaccataaaatcacagcagcaaattcattaaatttcggaaatagaaaaactacctcaagcttcaatgcaatgatcaagccacaactcctcaaacaattcttcaatttcaagcttgaacaccaaggaaatcaccaatttttcaacaaaatacaaagagggatagagagagaggcggaagggggttgtttcagggttaaggtaaatgctgaaaatgaatttcatttattttttacaaagaatgcctttagttgaaaataaatctaaaaatacatatttaccattttgcccctagggccatttctcacatactcaaacaattaagggcattgaa

SEQ ID NO: 53179 - DNA, 3397 bp, Cannabis sativa
  modified_base (2308)..(2339): a, c, t, g, unknown or other
cttaacggggatggggacggggagagcactccccgctaattccccgccccgtgtgcatcccacctctaataaataattgatgtgaaatgctaaagaacaccaaaggttttctcgttaccatttcaagttgttatactgccattaatagagtaattaattattgtgtccaatatattttaacttaataattattataaaaatctctgactatttgtaaagtgtcactttatgttgggtcttaaaaaaaaaattattcagcttttgttcttagtatatatgtggtatttttgaaaattaccaattttttgggtatttttcaaagaacgatggggcttagataaaagcttgacctacttaaacccaaagtctaccctaacactactaatatctaataacgatatccaattacaagataattatttttaatatacgtataatattgaaaattccctctaacctttcattatttcccacatatattctatccaaccaagcaatgaattgtttctctcgttccatctcttttcctctacacttattgagctttcgttcaaagtaggggtgttcatcaaactgctcaaattactcaaactgcccacaccgtaaaagaaaatgcggtttaaaatttttgcggtgcagtcgcggtttgaattttttctaaactgcacggtgcagtacggtttgcggttttgaattgttaatatgcggttcaaaccgcaccgtatcacacattataaaaataccaatttttatatttatttaggtctaatttgtgaatgtccaacccaaagtccacttattattgtattattgaaactgattttttttttatatttattttcaagcattatggtatttttgataagtgttgctcaagctttgttgtatttgtgatagtttaattattggtgatagtccaaactgcgaaaatcgcacagttttttaatttcgcggtgcgggtgcagtttgggaaattaaaaaaaccgcatgcacggattggtttgaaaaaaatggtcaaaagccgcactacccgcaccgcgaacacccttaattctaagtatatgtggtattttgagagttataccgaaattatttgttttgagaatcctggactgggtgaatcttaaatgtagtttgacccgccttaactcaagaccgttgctaacatctctagtattagtatctaataataatactcaattattgtaataattaatttgttattatttttttttatcatggttaaaataattacctcatgaaaagggcaagatggtgtttaagtttggttccttgaagaatgtcaagataaagagttgggaaaaaatcagggccagaaagtgttgtgaatggttgaacaaatatcaaagctgaggcattgattcccaaagcagcttcttgtgcttcttccaattcaactggaccaactcttgaaaagcacaacactactcttccactacctgattttgtattcttcctataatccaacttgcaaaccctaatatttacccaaaaaaaaaaaatataaagaaaattaaaaagaaaatatatctatgaatgaagagagaatattgttgttatgatcattattagtacccatttgtaaaatatgtaattggatcaactagttttgctgtaattggttctgtgataaagctttctccctgtaataataaattaaattgagtgtaaatttaagagaaaattacatatacattaatatatttttacggtattttataaaaatattagaaaataattataaaaaatcacatgaaagtaatagaaaataacatcaaaataataataaaataacacacaaataacaaaaaattaacaataaaataataagagtataacataaaaatacataaaaaattgtattttatgaaaataaaaatatttaaaatttcgcataattgtatttttgtaattcttttttttaaataatcacaatttaatagtagtactaattataagatggttagttggtgtataatataatgatgaaaaagaaccataaaaaataaaataaaaaagcaaatgatatttggtataagaaaatgctaaattataatcatctcatcattatatatgaatatcatatgcaatgtagtgtaataaaactatgtggatgttgggacttgtcatattcttaatttgttactcccaaagtaacataattcttaaaattgataaattcaatcattataaatcattatacatgatccatatataaataaaatcaacattgtaagtgccatttaatattttttaaaaagtgtgtcataataataataataataannnnnnnnnnnnnnnnnnnnnnnnnnnnnnnnataataataataatataattaaaactattaatttttccatttttcaatatttttattcttaatgcatgaaaacattataattatgagagagtactacatatattatatatagtggtaagtatataacaaaattgatagtaggacactatatgaaatatttgtagatataaaagaaatgctaaattatataaatgaatacatatttaagactccattacaaatgctcttaacacttaataatgaaagtatatgcatagaaaaaaattatattgttacataccgtaacagaaaagttgccttgcacaatcacattggttgaaaacattcgatcgactgaagaagcagcaacacaaagagaccatggctcgacgttggtgacaaggcctagattcggtccatcatttccagcagcaaaaacaacactaactccaagttgcatggcatggaatgagccaatggaattacttgattcaaatagctcaggcaacggcggagatgccccaattgaggctgagatcacgtgcacaccatcatgcaaagcgtcatcgaaggctgccaaaacgtcagcctcagtgcattgtccaacatagtcctttccccaacatgccttgtagatagccaaacgtgccctaggggcaccacctcttgctgtgcctaagcctaaacctaataaactcgcttcttcaactatggaccccacagcggtggatgctgtgtgggtcccatgtccaagaaaatctctagctgagcggtactcagggtttccactcttatttaaagagccataggtgttttcaaagccttggagatagtaacgagctccgataagcttgttgttacatgctttttcaggattaaactgttctcctttaacacattttcctttccatgttaaagggattggattcattctagtctcctcttggaaacttttagattctggccatatacctgtctctcagaacaattagtaaaggagttagagtgagggtaaactatgaaaaccattagaataggtaaggagaggtttcttttccatcagtttagcatcgacagaa

SEQ ID NO: 53180 - DNA, 830 bp, Cannabis sativa
ttcttccaaaaatcaaagagaaaaagcttttagggtttatacctcaagtctagtcttccaatcctccttcaattctagctgattttcttagggccgaaatggagacatagatatcaatggaaaagttttgattttttctaacttatccttatttttatttatttggttttatattaatgataataatcagcatatttttaaggaaagttctactatttcaactaaaatacaaagtcaataatttcgctcttacttcaggtttaagtaagtttaaagcttaggggtaaattggttaaataccacaatctcgcctaaactcgatattccagatatcaaatatttttttctctctaaataaaaggttcgaaaccaaattatgtgactttaatggccaaatcgtcgtatttctatcattgacgagcaaaaaatataaaagtataacatctatcatatataatacaactatatataatttaatttaataaaatctttaaaattgaaaattataaccctaatataaaaaataggacctacattataaaataatcacatataattatacaatatagttaattaatgttaattggtatatgtactgcttgcccatgtataggtttttgtcaaaaaattgatataaagattgaatatgttgatcattttaacagaaaaattaataaaaactaaggtatatagtttataaatacagagagaaagagggagagagagtatatagtagccatatgcatacataatttcagatgaatttgagccgaatgaatatgcccaaatatagtttcttttttttggctctccatgcttaatcggctcaa

SEQ ID NO: 53181 - DNA, 1362 bp, Cannabis sativa
gatttatttgtaccgtaggtccttcaattatataagttttgaattgattcccaaattttattttgagaaaattacattgtataattactttacttaatttgttttaatttttacctctatttttaaatttttttagatatacccacttttatggatgatgttcccattagaccccttaaattatgtaaattatatgctagacttaatgtctctttctctctctctctctcttcttttctttttgtttttgtttttctattttaacatacataaatgtctcttttatatatcttagaaaagaattatcttttttttttcaataccaaaaacattgttgaatattggagacattataagtgataaatagtttttcttttatattatttattaattaaattaaaattgataaactgctttttaatatattatttattaaaagtgcatttggtaatattttttaatcacttttctatttttttaattagtaaagtaaaaatatttttcaaaaatatgttctataaatttgtttcacttttcaattttttaattgagaattgaaattttaaaaattttaaaaataaaaaaaaaactttcaatttttttaatcaatattcttgattccgatcgaaacgtgaaccttgggactcgaactccagcctcactcccagtcccagactcggatcacgaccccggtcctagatccgaacttaaacctgacttaaatcaaatcaaataataaaaatgaaagtgaaagttatagaacacagaaaatatttttattttttaaaaataaaattttaaagacacagattttacttttttttggtgattaaaaattaaaaaaaaaaccaaacactcctagttaaattaaattgatagtatctaatgttgaaaaacactacttttagacattggtgtaatggtgcttagtaccatctaaatattacaccttataaataagtaataataaataagtaataatattctattaataatattctataataattattaaattaaattatataagatccaatccattattacaataataagtaataacaatattaataagtttcacgataaattttattttttagtctgttttattaaatatttattttttattagctactgttggtggtggtttttgtaataccattccgcgattggcgaatagtgttgcccacatactgacaacctctattactaatttaaggaattgtgtttgaacagatacttatctacaatttttaaatttttctgtaataataaatttatcttgatgaattatgtttttctcaaaatattatatctcgtacatgttccacaagtgtatcttttagcatttataattgtaat

SEQ ID NO: 53182 - DNA, 2207 bp, Cannabis sativa
ccagttgaacctcatgcttgacctggacatctgcaggagcagaactcgagcttgcaccagcttaacaccaccaccaactttaggtcgcttgggaaaagctccatcaaaatactccgagagttggaaaacggtaccagtgaagcgaggctcaagtgtctcatgagaatatgctacatccttcgagaggaaagaatcttgaagattaaattaggaaaaacaagcttatgagtacgctttttacctcgtccaaatgacacaatctaatccaagatataggaagccaaattgatggatgctcccgaggtgatacgaaagagaaaataggccacatcttgaaacacgacaattttgttggaattgggaagccaattgctaagtgcaaacctcatgagtgatgcgtggacataagtgaaatatgtaatacgaagacttttcccagatttccattcaacccgtgcaccagtgagttcagtgagcatcagatggcgatccatggacattatagcatttgtcacatctttaggtagttgcaaagccttggattttttttttcagcaaatgaaaaccaatgtcctctaacatacactttacgaaagaattcaaaattctcatcaaaaaaatcatcagacaagttagcataaaattctttgacaaatccataaatatatccctcaaaaccagtaacagtattttcccagtgatgatattgaacaaacttaacaataccatacaccctatgagcatgcaaatcataattgctctcactttcaaactttcgggtagcataaagattccaatcacattgattatcacggtaataaaatatggaattgacagcttgagaatgagagatattactaggagatgaactctacataggctgcttgcctttggcagcaacagtggctttggttgcagaagaaacacgagggggtgctggagtagatttggtcaatggtggctcaaattcaagttcagtttcctcactatcagaggagactccaaagtcttctagaagctgtttttttagaagagatagtcatggatttagtctcggaatcatcagatgggacctccattggtttttcttcttaagaacttgaagaagctaaagggggattaagcttcagcttcttggcagaaggaactggtctgtcatggcttcgtttagagtgaagctccttctcgatagacgcctgctgggcacgagtgcgagtggaagggcctgctggagttgaggcagtaatgcccttacttgatgcagcaggaggagatgcagtagcacgaggaggagaccccttcgacgaagaaaacgatgaagtgaaaaatttgtggggacgcacagatttcctagcaacttgtttgagaattcatttcggcttgggcttcacaggctgagattcacgctaaggaagcgatgaatctcttgggtttgatgcagttgcagcagcagggagcaagattggagcagcaagaggagcattcgagggggcaggatcggattcttccatcctttttgggtgccctagattctttgtcttagccataggaatctgaaagatagaaaggcaaacaaagaagtagagaacaaaagaataggaatcgggtaggttgggagaataaataacaaaaaaactaccagccaacgaacacaaagaaattgccccactctttttcctaaattattattttcttaaaaaaaaatagaaggaaactagaataaccaagatactttccaaaaataggcaatttaagaaaatccttcaagattaaagacaaaatacaatgaatatgatatcaaactttaaaatgtaacatgtcaaaataaattaatttagattaaatgttgatacttaccaaataaagcacaaaattttcttagcccacaagccaagtcaccaacgcctccctctttttttttttttttattttttttatttttgaaaaaccagattaaatacacaaaaaaatttaaaatatcacaataattataaggtattctagagcaagcatttaaacaaatttcataacaactgacaaaaatacaagtatggtttttaagagaatagctaattagtatgtcaagaaccaaccatacttaattaatagatgttgaggaaaaagatatgcatgttacaaataatgtgaaccaggatttttttttattttagtagaggagacttacaaacttgtacacacttgttaga

SEQ ID NO: 53183 - DNA, 2554 bp, Cannabis sativa
ctccccaaatctcatcaagttaacattgactaagctcaaacttaaggatgatccaatgccaacattagaaaagctaccaaaattaagagtccttagaattgactcttaatagttttttaggaaaagagatggtgtgctcaagaggaggtttccctcaacttgaatctcttcagcttgagtttctatttgagttgaaagagtggaaagtggaggagagtgcattgcctacacttgcctatttgcatattcaaggatgcaggggattgagaagagttccagatggactaagaaatattgttacactcaatgagatggtcataacttatatgcctaagaaatttaaagaaaggatggaggaaggaggagacgatttccacaaagtcaaccacgtgccatcacatgtctttatcaaatgtgatgaaggtacatatctatcttttgttgttaattcctttctgtttcttttctatcattatttttatctatattacacattatttgcttatgcattttctgtattggcattgctatgaatgcagattggccgaatgactacaaatgaatttaagtgggacaataatatgatatcaagatttgggggatgtgtttgccactgccaatcaccaatgtctgtttattcaataattaatatttggaatataatgtgtaatattccaattgtattgtgttgtttgtgttttaattaaattagtgagtgttttaaattttaatgtttcatatgttattatgtaatatatatacttaaattgttgtcacataaaatttgatttgacaagatggcaatagcaagaaaagctcatgtgcagtgttgagtttcagcttttgtttttgtgttcttctgttgatgttttgtaattgtcttctccttcttcttcttcttcttatgttttttttttttgttttttctatgaagaattaatgttgagtacaaataatgcttcaaggattaaagagtttgagacggtgatcaaactttgttgttggctgcattctcctctttttgataagttgtagtctaccattggacagaacatcttgatgaaatgtagccttacatcgatgtgctttatcctttcgtgaaagactgtgttcttactgaggtgcatagcactttcacatagcctgattgagactttctactgtctagatcccctgcatagtcagaatcaacaaatcctactacattggttgcagaaggacttagtccatagactgtgttctttttctttttcattctaacctttctttttatttattttaaaaatatattattcaatttgttaacacataattatataataaattaattttttatgagatttttgtttactaggaaatacaggtgtaccattgcacaagtcatatatgagtttttgttttttcttttctttttttgtcttggaaagactttggggtcaaggtcaactgagtttgtctatgtttgtcttactcatattttattgataggaaaaagtgggtgattgaaagaaggtcagagtcaaattgaatattcaacttaacttctcacactgtagattttgtgactggactcaattgtggtggttccatttttcttggtactgttagtaatatttattaatatatagaaaaagtgttacctgtatggaaaaagatgtgagaaagaaagaattcccttcattaattacaattaataaaacaaaactatacttttcaaaaagaaaaggaaaattgaggcaaaaacagcagccattattgaataacaacaccacttgggatagaatgcttaaatgaatatctgttttgctgttagatcataccatacaattcaactcagttcaattcatttagcgaacaagatcatcaaatggcagatgctgttgtttcgtttgtgattgaaaggcttggagacttgctaattgatgaggctgaattcttgcatggagttgaaggccaagtggggaatgcacaaatcaagcttcaatgtatgagtgctttcttaaaagatgctgatgctttggtaacaaatggtgatgagagagttcgcgttttggttgtccaagtcagagaaaatgctcttgacttggaggatgttattgagacttatgtcttcaaagtggcttctaatgagagtgcactgaaatggtgtgttggcactattgatgtgtataaagttggatcaaagataaagaagatctcatccaatattgatacttggacttcacaattagaagcatttggagtacaaagatcaatacacaaagcagatgaagcttcttcaagcagctatgtccaacagcaaagacagttgaggcaagcttattcttatgttgaagacaaccatgttgtcggatttgggaaagatatagaagagttggttgcccttttgactgaaaaagagaaccctcataagcgtaataaggtgatttcaatatgtgggatggggggtttggggaagactactcttgcaagaaaggtctatcagcattctcaagtcaggactcactttgattgttatgcttgggcctcaatatctcagcagtgtaatacacgc

SEQ ID NO: 53184 - DNA, 1330 bp, Cannabis sativa
  modified_base (769)..(770): a, c, t, g, unknown or other
gggaagttcatattccccttgactggcgacactatcgcctgtaaatccacaaagatttaccacacaaggttttaactttgcattttctaatcccattttcttcattgtgtccttataaaggatattcactaaacatctggtatccaccaacaccctttttatccttttgttggcgagctaaattgtaatcactagtgggtcgacatgaggatatctcacatgctttgcctcttcctccgagaacataattggaggttcctcagtcttagctttcttagacgattctagagcaaagactaactgctcattcttaacttccttgacatatctcttttcggcattgctactttctccagcgagatgtggccctgccaagataactagaatgtcttctcctttaagaggaggaggttgcaatctctaatttcctgggttattgggcggatttggctggttttgtccattgccttgtcgcttcacatattgttgaaagtaactacgcgagataaggctttctatcttgtctttcaattgaagacattcttctgtcatatgccctatgtccttgtgaaataaaaaattttgttgcatctcttttgtgtctcgcatgtctcatgggctcaggttcgcagaatgcgaccctgtgctcatgtgcaaggtagatattttgtcgagtttcattatgctcggtataaatagtgtagattggcatgtacttgtcgtgattcttctgttttttcttatctttggctgattccttagagtcatnnttcctctttgtactagagcctcctggattgtgagcctttgtcaagacggtacttgttaagacagtgctgggtttactccccgagctagtctttaacaacttcatctctttccttgctttctctttttgaacaaacacctgagctttctcattgaactcgctgatgttttttactgggtgaccctgtaaatcatcccacagtttgcctccagctgtcgagagatcagtcatgatccctgcttgaagagcagtaagctagatactatcgtttaagtttctaacccttgcagcagctgtactgaaatgacttaggtaggccttaagcgtctcgcccgattgttgctttatgttagtaagtgaagaagcttctggccgcttgtctcttgctgcctgaaatgtttcttgaagtcttttgacaactattcccaagaggtgattgagtgacgggtgaatttgttgaactagttgctcgctgccccagttagcgaggtggggaataaaatacagcataagttattcgtaacattggaggctcgcatgatggtattaaagttatttagg

SEQ ID NO: 53185 - DNA, 1426 bp, Cannabis sativa
  modified_base (87)..(87): a, c, t, g, unknown or other
  modified_base (1154)..(1156): a, c, t, g, unknown or other
  modified_base (1202)..(1209): a, c, t, g, unknown or other
actatagtaaaatatttatccttgcatatttttgttgttttccgaatttctgatggtgaatttgttcatattaaatcataaagaganatgtagatagagttacgtacgtggaaatattattttgatttttaataattcacaatagttgcattacagctgtataaatattttgctaacagttatttcttctgatgcaatcttcggccaaccacccagaaactttcgtctaattaaaaccttcgtctgatgcaaccttcggccaaccacccttcaaccatcgtctgattaaaacttttatctaatgcaaccacacagcaaccaccctgcaactatcgtctgattgtgtaagtgatagtgtaagtggtattttggtaattaaaatcacataaaaagtataaatattatttttaccttatggaagtatttttgtaaatatagtgtcaatttatattttctatgtaataatttatttttttattttgtcttaaaaatgttttacattttatatttttaatattaacattctacatctacctagagaattttatatatttgagtttctaatttttttttacatgtgataaaaatataatttaattatttttatcaaatgcatattaaaaatttatatagcataagtttttatataacaaaataaattataacattatcgttatcattataatagaatcttaacaactaacatcactttaatatttataatttaccaaacactctgctcatttttttttcacagttctattgcagttattttttttcacaatacggctacaattgtttatttccacaacacagttgtgccaaactagctcatagtgcgtcacattagtatggtattggcatcttaaaatgcctaatccaaaatttgagtggaagtgtgttttctaatatcgcatgagcttcttaagtctacggttcgttgggcaataggttaaagtgtgaaggttgatatttttcatcagccatgtcttttggatgatgtgtgtcattttgttacttcaaatgcccaagctttggtcggtctgttaggaatattttatcaggatctacatttactaacaaatatgttgaattaacatcctaaatatgaattctctaaaataatgagattaaacacataagggtttaagaannncttacattgattgcagctgaatataatgactccttctgttcaagannnnnnnnccttgattcctttctgtaataactttagactatacactcaaaagtgacataattcgagatcccaaaaatattttacaaaatagtacaagtcttttcactagccttcctaagcagcaaaattagagttacaaaagtacatcgctggtagaccctaactcgcttggtctagtgtggcccgaacatgtacaagcaccgccaagctcttgcactcatggct

SEQ ID NO: 53186 - DNA, 1355 bp, Cannabis sativa
acattttaaacatacgaaacaacagtgaaacaacccaaaaacaatatcagaaaaaccatgcagctctagtattattatatgtttaagaatttaaagtgctcaaaaaccaggttaaaagaattatgagatctatgtttgagcatcatttgtaatttcagatttaaaagaacttaagtgggtttaagcttctaacctttttgatccgttaatttattttattgacgaagcttttgggagttgattttaatgtttcttcttcatctagccgaaattaatggttattttttagttgttctaccgttgctctggtggttcggtccgtaggtgttgaagatggatgtttcatatgtgttttggggtgtgtacagtataaaagaaaaaaatttaggtgagaggacaatatttttgtaaaaatttccgtgtggcaataaaaataaaaaactgtccccaaaatctagtattatttgtacgtacctttatttacagatgagcattactatttggcaccagtggtgccaagcaccttctatatgtaacgtcttacaattggttagcgatgttttctaaaatttatttttttaagttatgtaggactcgatacttaattacaacaataacgatatgacatcgaggaggatgctaggaacctataatgctttttagtaattctctttacaaatataagggcgtgttctcttggcttctatctgggtccgctacgtgtataacatatgatatcttgatggaacattactagtatatcaaatagcttgaaagaagtgcataataagagtattttcaattgtggcattctttaaaagttttaaatatcttcacatcattcaaagatatactattgaactttttcttctatattatttttgacatccttacttgttaagtctattctacattgtatagaagacaagaacagagagaaggaaagagatagaaagaacagagaaagagtgaaaaagaatagagaaagattgaaattgaaaagaatgatttcattgaattgttagtactgtaaacagtatttatttatacaacatcagatgcatacattagcaaccaacagattataacaacctgtaacaaactaacagactaacgactctaactaccatcattagctgtctcaatacccgtccctcaaactcataattgtaacatcctcaattttgagtttggtttaaaaatcagcaaagcgtgtgcttgaactagctttaatcagaccgtctgcaagttgatctactgctggaacatgtttcacttctacgaagccctgttgcactttttctctcagaaaatacaaatccaactcaatatgtttggttctagcatgtagcacg

SEQ ID NO: 53187 - DNA, 1495 bp, Cannabis sativa
gtgtcttcatatacaaaatggtttctcgtcaatatgtgaattaatagtttgtacattcgtgtctcgctcaagactttacagtcaatgagttatagatgtactctatcagctctgcagttaatgagttattctattttaatattctttaatataattaccattgtatttgttgaatcgtattctcccaggttgacacgtgtcctctgaagtgccagccgaatttcggggtataacaatagccccttaaaaagttctcttttatgaaaagtgctttttaaatgattacagagggtatatttgtcataattccttttgaaaaaatgcatgtcctctgattttggtaggtttgtggttttgaggtacatcagcatttaatgaccatcttttccacttatttttcaaattttacttgttggatcaattgtctccttgatctaatggagattaacccaagagtataaaatgttaaaaggaaccacctttgcactacctttgccattttagaaactctgaaaatttttcaagcttttctactgaaaaaacaattcccagagttgcctgacaccttgaatgccatctttatcattatcatttttcctacgagttacttttcaacttcaagcatccgtagggatcttcacgccgttcatttttttgtaaattgcataaacgctcattgtcccaaaaacaaactccaaacagtaagtgatttttgcccttattttcttacattcttttaatgttgtgttttctaggtttgactactgatttcttagttatcacctttgttacctcatttaattttagcaattttagggctgaattgtatctgggtaaatgttagggtttagacagaatgtacgtttcgagattctccaatttaccaacttctcgtttgataaatttcttccaggaattgagaatcctttgtccttgcagcaatgtcccaatccagttcacaagtttattgtccagaagatttagaaatatagtatcctactgaacttgccatcccatacaaacccagaatttcagaaccaaaattcaaattagagataaatgaagggaatacttagtgaaaattcaccaagaagatattgctagtcaccacagatgcttcttgcaagaaattacataaggcagacgtcgttgcttggcctgaatcccccagtttatcttctattcctttggctaagcctttgtttttacccaaggtcccaattacttttgaaccaggtgacttggactttgaaattatgtcttctaagccacgtaaatcaaagactcctcaggaccctgccgtcactttcaaggtcgagctaatagagtcaaaggtgcaagccatcggagactatgtaggtattaccttgaggacttgtagggtcgaatataagctagactgccgggttagatcggtagttcctgccgagttcagttttcatccaccagtgcgacttacatgcaaaacatcttaggggccagtggcgagaccagt

SEQ ID NO: 53188 - DNA, 1643 bp, Cannabis sativa
tatatatatagatttatagattgactatatatagatatatataaataaatatatatatatatactttatatgcttgtatatcactaattgtgaaacataaaaactaaagcttttgattcttaaaattatagttatatgaggttgtcttttttcttctgctaggctcattggccttctttgggtataagtgtggcttagtcggggttgtattttgcttttgtgattcaattttactaccgcgattagttttgtctttgtgacatgattttgagtgttttagtcttgtctatgtgacatgattttattttattttgtttcgttgttggttttttttgttcttcaatgactcgccattaaattgttgttagtagttgggaataacaagttatttgggaccgaatgagttgttaatagtgcagttacttaccttgcacaatagttgagtgctcaagctacgagattgaatgaatttgctacaatagtttctattattttgtcttctaagtggtatataaaactgaatgtatgtgttgttaagattaactgtgatggatagttacttgtactgccaagcttccattgaagaagctagccgtgttatggagctactccgaatgtttgaattggcttctggtcaagtggttaacaaggcgaaatcctccgttttctttagctcaaacacaaggggggatgtccgacatcacatatgttcggctttgggtatgattgaaggagatgaaaatagctcttacttgggtcttccaaacactatggggaggaataagaatgtcgtgttggggtttcttaagaaaaaggtgctaaagcgaatcaagagttgggacaccaaatttctttctcgtgcgggtaaggaagtgttgatcaaaacggttgtacaatcgttacctacttatgcaatgaatgttttccttctcccagttggagtgtgtaaggaaattgagagtctaatggcaagattttggtggaagtcctcttggaatcaaaataagggtattagttggatgagttggtctcggttggtgaagcataagtttgatggtggaatggattttagaagtcttcgtgagtttaatatcgctatgttgggtaagcaagggtggcgtcttatcactaatccttcttccttggtgagtcgtgtgtatcgagcgagatattatgctcaaggggattttttgactgctgaaataggctctaacccgagctttatttggagaagtttaatggaagctcaagatgttctcaaggctgggttaagaatgagggttggggatggtttatctattcggtttgctatggatccatggcttcctagtgatgagtctccaataccaacttctgatttaagtgcttataatgatctaatagtccatagtttgttcaaggttggagctaaagagtgggatgaggaggtggttcgggatatttttaatgaaagggaagttgaaattattctgggcattcctttagctattaatgatgctagtgattcttggtattggttgaaggagaaattgggttgttactcagtaaaatcagcttaccaactgcttatgaatcgtgacaccaacgttgatgaaagggctgggaattcaaagttttgaaaagagttatgggatgtcaaagtg

SEQ ID NO: 53189 - DNA, 652 bp, Cannabis sativa
ttgcccacttggtatactcgatttggtatgtaagaaatgataatttgtggaacaaacacatagaaaacaaagatgtaactatacaaagaattaagaatagtgtcaagcatagagtagaattagtttggtcaagaagatagagattagtttcaaaagttgtaaaagttgcacaaaattagctttgagatctttttttattaaaagatgctctctcattgtaatagaatgtaaaagtttgtggatcaatacttgttgatttatcaaaaaaaaatatttatttttgtccattgcatgaaatttatactaagtacctcgatatgttttgacttaatttttttttttttgacttggacatatcagtgggagcgaaaatgcaaaacattcagatacttattggatcttagatcagatctgcttcgccccgcctgatttttttctggatcggatctgatccgactcgattttaatttatttaaaaaaaaaattaattcaagaatcgaatcccttgagacttggactcagacccgaatccagactcggacccagacccggaccgggacccaggacccagacctagaccgtgacccggacccaaactcagactcgggccgtgacccggcctcgaacacgggacccgggacccagacccgga

SEQ ID NO: 53190 - DNA, 844 bp, Cannabis sativa
gtaatcaatggaattaatttgtacaaattagtggaaggtctaaattttgatattaggagttttattaagggcaaaaaatgaaatttccctttagaaattggctggggttagaatgagaatgagtatgtgttggggtttatatggcgtttgatatatgatttaaaaatattatttttatttgtaattttttataatattttaataatccattataataccaaatttagtattgtataaaagtagtactatacaactcaatacaatatgccattcaaacatgtgttgagggactactttttctctctaattcctgttcttgttcaggcgttctaacttggtacaacaaatttgtgtgaaacagaatttgaagaaagaggttgatcgataggagaagcaatggaaactacagagcataaaggaggagaagaagataaacaagcaactagtactaatgatgtgggctggagtggaatgttggtgaatcagtatcggaaaattaaagagaatgcagaaacatacccttatgtttggggttcctacattgttgtctatgggggttttactctttatatggcttatagatggaggaagctaagaaagaccgaagacagagttcgagttcttcaggaaagattgcgcaagattgttgcagctgaggagtcctcaaccttaaccactgcaggtgcctcctccaccgaaaatgttcgaccacctgtaaagccttcaaatgagtgaattggggagttcaaaacaagggtcctcacttcttgataatttattattatattttttttaagaaagtttgaatagatttgagaaaagtaaagcccatcgattttgtcag

SEQ ID NO: 53191 - DNA, 1084 bp, Cannabis sativa
cacatgctttttcatccttactacctgtaaccctccccttaatttttaaaaaatttatacatatgaacattgctattgaaatatgttttactattaatgatattctctaaaaaattattttttaaattatatgagactcaatatttaattatactaatagcgatatgatactgaaaagaatgctaagcacgtgctttttattagtataattaagtattaaattttataaaatttaatatattaatttttataaaatatcgttaatcaatcataaggtgccacataaacaccgctattaccttataataatactatttcttttttttatattggaggagggaaaattgaacttgggacatctccttcggagaaaaaatgtggaaccactaaactatgcctatgactacagacaatactcttttaatttgataattattataaaaaattactaattattagcaaaactctgttcctaatggtattaaataccattgatagtcaatactctttatgatatcttcaatgaaatacaaccttttttttttcatatccctcctcacttttaaattgtgaccttaatttttttctaaactatagaaaactactaaaaatagatacaatatcaatatccaaaaacataacaaaagagcttacatagctgctaaacatttacacttaatgttttcacatttttttaacttattttagcaatagtttacactttttttttcctttacaaaatgatttgaattacaataagataatcacaagaaaacattgataatcatatctcttcaaaccagcataacaagcattatacttttagattattatttcgaaagtgtttaaaaaattaaagggtacaatttaatgaaaataataatttagggacaatttaatttatatattttattgttttaggaaaacttaggtactctatatactcaaatgttttgatccattaatggactaaacctctgttgacttgaatattacatgatcaaagtgaatgttgagactgttgttttttgaggaagatcatcgatttgggatggggtttgtggttaaagactcttcatctcat

SEQ ID NO: 53192 - DNA, 2164 bp, Cannabis sativa
tggcgtcggttattaaagtatatagcatcagttatatgggtatatgacatcgcttaatagtatataattgacgccataagtatcctgtggcggttattataaaagaaccgacgtcatagggtactatttagcgtgagttgttttagaccctacaacatcacttaaattactctcggtaagccaaaatcaacgttgaaaggtcttaaaaatcgcttttaaagcttaaatttgtagtagtgtgatgaaatactatctaagtgatacttttggaaaattcataaactaaagagatggaaatgttatgaaacaaaatttggaaacttataaagtaatgttgttgagagaaaaaaaaatgttgaaagctgaaatataaatctaaaacataattaataaattaagtcgaattaagattttatttggtattttcttttgataaaataacatcatatatatttaaattttatgtttgtaagcgacataaattttatttgtattttagcagcatatgtacctaacgtttgtaaaactgtaatttttctccagtttcgtcagtacagactctgttttgaatttattaaaagaacatttaaaagtaacgatactacatatttctacatagacactactacaaaaaaaaagtattttcgtcggtttctaagtgacatatatagtttttgcgtcactctataaaactgacgtatatgccatacttgcgaataaattttatttgcgtcgttttttaagtgacacaaataacaattctctttattttgaaaccgacacaaaatgtacaatgttctttttgatattctgtgtcagtttaaaatggcgcaaaattatttgtgccatttaaaaactgtcactaaaaacttatactgtcagtttttaaatgacacataagttgctcaaatatttttttttacctattgcgttagttataaaacgaagtataaatgtaaggtaaagaaaattacagattttcatgcaattttctctacctgtatttttaaattttaaaataattttatataacagtaaatatataatacaaaaaaacttaaatacataatagttttatataacagtaaataaaatgtattccatgcggctgttgtcaataaatgtttacataacataatatcattttgtataacaatatttttatgcactaacaagaaatcaaattagtatcaaattaaaagaaacctctcatatcataatcataattttacaaaattagaaaatagagaaaaaaaataaatatgaattataaataattatatataagaagaaaacaaatttagagaaaattaaacaaggaagaagaaacattaggtaaggcagaccgcaccacagctcttttcggatcatggactcgaccctctcgtcaatctcgatcactttctaattctccaacgttgagtgttacattatgttacttataaacttaaaactttgagtaattatgttgctacttatcgatttctttttctttcttaaaagaataatactaagaaaaattattgaaaattaaataaccaataatgtgttggatacgtggtgatatatgacgccaaacgattgttaatgctttgttatggaccacaaagaattaatcatatactcatttaacaaatatatagctagtaaatatatttaataaataatgatttttatttaagagagagaagaaattaatctaaatttcccaacttggtcggctgtgtgaattttcaaacatgaaatattcatcttgttcctaacttgatagtatagctaaaccatgttctaagtgctttatttaatgttgctgtaacatataaatggtatcaaagtcatacacttttatatatatataaataatagtattaagaagagtatgttataagacatttttatgtgtatatagcattaacatatattattatgactaattactagaaaaaagacaaacagtaccaccaatatatgatcgtcaataaaattaaagcatatacattgactttaggtatgtagagttaaaagttatataaataatgttatatagataggttactttggtgcaaaaatatgaagaaacgtggtttgattggtttccttttagtcaaaccaagtttaattaatgatgggacacacattagagaaactaagaatatatattaat

SEQ ID NO: 53193 - DNA, 1864 bp, Cannabis sativa
ttattttcaatttttgttggttttgcccagtttcactctttgttcatcctatgttcttgtctttcagtttcagtaactgcaacttcaaatctacattttttttgtttttattgttctcttttgggttctttgttttgtctattccttcactgctccttttaagtatggttccccttgttgatcaaatgaaatcaacaatcaacttaactgatactgaacgcagtgtagtagctatctctaatgatggtacttctgttgatgcttaatctttggaccttgttcttgttgtacgcattttatcaccaaggaaagtttggctcaccacccttcagcatcaaatggctgaacattgggatgggcggttcaaggcagatattttttaacatcattcggggttgtttttgatcacgttatgttgtattggagacaaacttagagctcttcggaaggagccatggcactttcaagatcatcatattgttttgtatacacctactgttctgcaaaatgtcacccccgaatctatggttttctcacctttttgggttcaggcatataggctccctttcttaagtaaaacacgatccttggctaaatctttgggcaatattattggtgaatttcttgaagtccatgaagattctagttatgaaggttggggtccttttcttcggtttcaagttcgcatggatattaggaaaccattgttaagaggatgtatgattactctaccaaaagttagagatgaattttggatggaatttcggtatgaacgtcttcctgaatattgtatggagtgtggcataatcgatcattcttttaacaagtgccctgttcatcttgaaaatatggacaatggaactgaatctgaacttgcttacgacccaagtttaaagggatctgcccttccatcatctaactacaacagatatcgaactgatttttcgaaaggacatgcctggccacttatcactcatttggccaggaacactctaactgctatgttgccacaacttaatgcacgacctctcccaagcccaacaactctattatttggggaatcctctactgagaatgtctctcgtggttctcggactgaatctataatggtcgagactcccactccttcgaatactataatttcaacacatcaaccactcctttgactgcacaaatagatcgttcagtcaaaaaagatcccccaacaattcacttggctaatgtttatacccttgacattggagattcctatatatctcatccatttgcaacttatccacctgatccatcatcaataaccaccacctttgggtctcacttaatttcacccatctctactgtggcttattcaacaatgactgctcctattactgctacttcttttcaatatggaagtatgtcaagttctgcatagttggacaatcaagagaacctacacctaaatcaccaattcaagcgccattttgacaatatctccttacggcaaacactcaaatgttgtcgtgctactgatccttccataaagtttatggaaactacccaaaaccagaatgtttctgctgagatcttggattcatctggttgtgaagacgatccagcggtgattgctttgcaatcctagcaaatcccgctcctcatcatgaaaattgtcagttggaatgcacgggatttgggtaatttgagtgcattctgtcgtctccgttcgcttgttcgtgagcaaactccccaagttttgtttcttatggaaacaaaaacaactgctggtgtacttacttgttttaagcaaactttaaatttcaataacagtttagaagttcctcgtgtgggtatgaaaggggggctgatgttgttatggcatgataat

SEQ ID NO: 53194 - DNA, 1354 bp, Cannabis sativa
  modified_base (608)..(615): a, c, t, g, unknown or other
taataatgtgatgtattatgcatatgatatatgggctcaccggattaggtgatgcgatatacctagcaacataccgagcgtaggtacgagtgttagtgatatatgataagtaccgagcgtaggtacgagctcacctgattaggttatgcgattctcctggtgatgtgtagatacgggcgtcagtgacatatgataagtactaggcgtaggtacgagatcttctgattaggcgattactcctggcaacatgtagatacggtgtcagtgatacaaatattgccaagttatggcatagaatgaaaccgttatagggattcctcctgacaacgtgtagatacgggcgtcaatgacatatgataggtaccaagcgtatgtacgacttgtctaattaggcgattactcttggcgacatgtagatatggtgtcaatgatatgaaaattgccaacttgtggcatagaatgaaaacgttgtagggtttcctcgtggcgacgtgtagatacgggcgtcagtgagatatgataagtaccgagtgtaggtacaggctcgtctgattaggcgatgcgatatattggtgctaagttatggtacaggctcacctgattaggtnnnnnnnntatatgatatatgggtgtaggtttttggcatgggctcacctgattaggtgatgcagttatgcaatatatggtgttaggctatgacacgggcttgcctgattaggcaatgcaatacaagattatcatattaaagcatcgacttgcctaattaggccatttgatgtactgtagatggttactttatgaagtaacatatatataatttatatttttaaatgaatatgattcctattattggtataatagttttgtattaccagaaatctgtatactgatgcttattaatggcagatgccagtagtgatttggattacatcttatgaacaatgcgtaatggtttgattctgattgtgtataaatgataatatttgaataataaactatatgatcattatttttgcttttcttgttgaatccttgtgactcacaggtgagtaagggcaaagaaaagttagaggtaccatgaggtgactgccttctccagtaatgtacatattgaccccactagcctgcgtgtcgagttgccaagagttgttttgggctgtatctattgtgtatttttgttttaatatttttgagctgtcatcgtatatagttctattgtaaaacattctataacaaggatccctgtaatatgctttttatgccgttataatgtctgttttcaatcttttatttttgccaagttttaaatattatctagatttttaataattaattaatctattagtattaaatt

SEQ ID NO: 53195 - DNA, 710 bp, Cannabis sativa
taaactttatgagatttttatacaagacattctcatattcatatataccaattaaacataattttttgaattatcattttttaaataaattatagaattttattaatataacaattagttacaataatagtttacaatcaagatataaaaaaatgagccaaataattattcacataatttctaaatcacttgacaaaagattaaaataaatcatatataaaaaaaaattacaacattataattaactttaagacctatattttgtttcatctaccgctaagaagacacgacagtaaaaattgttgcagcaagttcattcaatctcgtagcttgagcactcaactattgtgtaagatacgcaacttcaatattaacaattctttcagtcgtagagaatttattattcccaactactaattacgatttgatggcgagtcatcgaagaaccaagaagaactaataacgaaacaaaactatatcacacaaacaaaattaaaacactcaaaatcatgtcacagagacaagactaaaacacttattaccatatcacacagacaagacaaacactacacaccatgttacaaaaacaagactaatcgcagtagcaaaaatcgaatagcaaaatacaattttgaccatgccgcacctaaatctaaagaagactggcgggactggcgggcctggctggagacattctccaatagctatag

SEQ ID NO: 53196 - DNA, 1603 bp, Cannabis sativa
tttcctgtgtaggcggacggaggcggtgggcttatggccaaggttggtggtttggggttcgtggttgactgtggtggttcaaggttcatcgtcgagggcagttgaatattggatcaattttgtttttattttttttagttttgaatttatgtatattaatttcaactattgtaaaatattgtttttgattttttttgaaggttaaattaatgtcatatccactattttgtgattaatatgaatttttttagttcaaaaatttatattgaatatgttgataactaatttctgaatagagttatgatataagttttataatttatatttttcttaaatttgttttcattagatctgattaatggaattgttgttaaaatattttgttaattactatttttaaaaaataatatatcacgttaataacataaattattaatataaattattatttataatatttaaaatttaaattaaaacaataaaatattatttttttttaaaaaaatattaataaaaaaaaagaaagaaagggatatagtgacactctatgtgtgttgctgttactttttcagtctgacaaaacctgactttatacgcctatagtgacgcgcagagattgaatgtaaaagggttcagtgacatgtgtggagtgtcactaaaaactgcatttccagtcaccttcattagtgacgcgcgttgaagtgtcactaaatagttttagagttactcgatgtgtgtcactaaaacccatttttctagtagtgatataattaacttgttatttctatctacatgatatacacgacagcatacataatattatttcattatttgattaaagataaaaaaaaaacacatgataaaaagtacatagttatactcatatacccatatgtagatataacttataatgcatgcatgcatacatataacatgcatgcattataacctatctcattaatagactaccaacactcgtcataaaaatgccctttgaaattgttcattccaaaaatccaaatttcaagtttctcaaggcctttagggtagcttgctttccctatcttaggccatataagaaccattggttccgatttcactccacaaagtgtgtaaaacctagggtataatgaatctcacaaaggctataagtgtttaagctcaaaaggtaggctatatatagcaaataatgtagtgttcaatgaggaagaatttccctgcagaactggcttcttaaatacaaaccaaaaagagtcaactatattgaagttcaaactccacactcctggacatatcttcttattttccaaccaaaaaatgagtaaccaaccaacacaaacactacctcccatagtcaaaaaagtcttttcagcccgaaactcactcttaatctgatgcaaatcatgcaacaaatgaacttgtaacattaccatacattgttacaggcatagattaggttgatctcacaccaaatctctttgtaggtcttgatttcactgaccatgatgccactaatctgatacaatcagagtcaaaagatttatctacatcatcaccagttgcatctgcaagcaaaaataaagaatagtcaacaactcaggtt

SEQ ID NO: 53197 - DNA, 1931 bp, Cannabis sativa
tgtccaaaaaaactttgaagtgggcaataacattgccattgtagcttgcaacaataatgtcgtcaacgtagatgaggatagcaagaagcatagtgctagttctcttaatgaagaggaaattattagataaagattggtggaagccatctttaaggagtgtggaactatgcttagagtaccactgtcgagaggcttatttcaaaccgtaaatgctcttttttaagaggcaaaccgaattggggggagctttgcaacctggtgggaatttcatgtacacttcttcatggagatcaccgtgaagaaatacattgttaatgtctaattgctgaatgttccaattatacaagatagcaagagctaacaggatttttatggtgttgaactttgctaagagtacaaatatttgggaatagtcaataccttgtctttggttgtagcctttggcaactaacctctctttgactctatcaataactccttctttggtatatttaactttgtatacccatttgcatccgatagccttttgtcctggtggtaacttggttattatccaagttttgttttttttttccaaggcttgagtctcaatgtccacggccttgagccaatgaatgaattgggatacctcagctttgaggcttgatttcagaataggctgctaacacagcaactctaaatcctaggtgaagcttgatgtaaaaaagaaaaggttcaataggatgcacagtggaggctttgtgacaaacataaccatccaagtgagagggtttctttatgagttgaccatgtttggtctggtgtgtaggatcagttggagcaggtggtatggtcattggagcctttgtatgttgtgtaggctctgttgtagcaggtgttgtattgacagtggattctgtctgttgcatgttctctgttggagaaagtgttttgttgacagggggtattgtctttcgtatatgctcaattggagcagatggaatattaacagtgggttgtatgttgtaaagtgagggaatcactgcttgaaaacaaaaatcaacatcagtgttaggtttatgtgaaaaaaagagaatatgttttcatggaatgtgacatccctagaatggtaaatgaggttggtttctatgtctaataaagtataggctttcatacaatatagatatccaattaaaatggagtcacgactacgaggagtgaacttgtgtctttttgagactaatgtggagccataagccaagcagccgcaggtcctcaaatggtcatattgggggggtttggtgtatagaatttcataggatggtaagcccttttagtaaggcaacaaagggtgtcctatttaacaaataggttacagttcggatgatatatgaccaatagactagaggtagattagattgaaaacatagagcttgagctatgtttaagatatgttcgtgttttctttctaatactgagttttgttgtggtctttccacacaagaatgatagtgaatgatacctttagaggcaaaaaaaagaggccaagtttaattctttggcattgtccgatcgaactactttgattggagtggaaaattgagtgcaaatcaagttgtaaaagttcattagaaccgtgggagaatcaactttagtttttaggatgtatgtccatgtgaatgttgatttgtcatctacaatggtaagaaaatacctataaccttcaacactaatgatgttgaaaggggcccatatatccgtgtgggttaagtcaaagatattatcgaaaaattattgttagatatgaagggaagtcgtttttgtttagctaaagtgcatatttagcaatgctgatcagaatttgcagaaaaagaagagtcaatctttttattaaaaacattggaaatgtacattgaagggtgaccaaggcgattatgccattggtctacatt

SEQ ID NO: 53198 - DNA, 932 bp, Cannabis sativa
tttgtacaatttatttctgtttctgaagtcattacagtcacattttatttacagtttttaaaaaagtatatcggcatatgcaaaaacatgatatttcaaatgacaagatagtcattctcttacatttgtccttactttattaaaattaaaaaagggtgaacttgattaaataagggataaaagaaaaagaatagttttcccactaatttttttaaggaatgccattaaagttaatgacttttatttatttttattttatttttaaatgttaaatatataatgacaattttattctttaaaatacatattataaaataaatatcatatattatagtttaattcaaaagattaatttagttaattcaagcattctgattatatttcttgataaaataaacaagataaatcattattattctattttcaaaaaatcctaataaacaacatattacaaatattaattgcgattattcttcatttattctaatatatttctctattattttattctcaattatgaatattgtgtagtaaacatgtcaaagtaaaaaaaattaccaagaaataatgttattccatcatttatatcttctctttcttattttttttattattattttgtggtaaaataagaaaatctaattatttaatatatatatatatatgctaaataataatatagtattattttaataatttttagaggtttttactataggaatattttagagcaaaaagtaccaaaattaatgtggaaaagagataaaatacaatattatatttttaggtgatgtgcaactgtgtcaaccaccacaagagatggcataccactattggtacaatttaatatcagatctcacatattttaatttaataaaaaatataaaaaatcgctgaccactcacaatgtgtcatataagtatgaagttagg

SEQ ID NO: 53199 - DNA, 2584 bp, Cannabis sativa
tggcacgattaaattagtgccaacaaattcattgtttagtatccatctgttgattggcacgacatgtaggtattttttaaaactaaattggcacgactttatcatgtccattgggccacatgtcgtgcccacatacctccaaaattaaaaaaaaaaatatataggggcacgactatagtagtgtcggcccaaagtataccaaaatatgggcaccactttaagtcgtgccctaattgaatgtgccaatatcctatttttcttgtagtggttattcatattattttattaaattaaaatgtgtacaattattcaatattacaatgcatcaacaaaaatattttactacttatgcttaaagtcccgtaatatatatttttcttttatttaggtgagtatttaaatattttttctattaccgacaaaagtacatatataagggaaggactgaagaatttgctatatatagaatatatacaaattaaatacgactaaaaaaaaaatctacatatatcaatatcatcaattagtcaactacttttgtattgtattgatcgtactttataattaaattgagtacttatatagttgcatttgtgtgattgaataaagttatgaatatatatttaactataattttaactagttgaatgtatataagatttagttaattaaaatttaaattcacaaaattatttaatatcgaaaatagttctgaaaaaaataacaaatttagaaggaaccatatagcatatatacatctatgaaatattccattttataagagttgaaaaacacaatatctctttatcatcatatatatagctaagtgtacattttgttcaagatttcaaagttaatttatatgattatataataattaacaagttgatcaacaataatatactaatttcttcttattttaattgatcaaccaagctgttttttttttttttttttataatatatagaccaacatagttgaagagaaagatttaattaaggccctttcacttttgactcttttattattttttttacatataatttataattaaaacaacattttatggtcatcctttatgggctctttgtttactctcggttgggatacactaaaattgatgtggaatcaggttgtcaaagagtcatcctcactttgttgaaaaaagaaaagaaaaaaaaaaagaaaaaaagaaaaattgactgagtttggttctgtaaattctttctatgtgtttcaatgttaaaagatgttaatttcttgtattttaaacgaactgagagcaccatggcacattttcttgtttagatggttgggtttttgaaatttttaatatatattttttttttttaatgtgggacgaaattttttcaaaaataatgcattctgtattagttttatactgtgcactgtgttaagttttcaatgttgttttacggttgttttttagttgtttaactgttatttttaattgttctgttttgttgttttacatgtgtttttagaaagacagtatttttgtaaaaaattctgtgtggaagtaaagttgtaatttttttatttaaaattcagtatttttgtaaaaactcttctttttttagactatatatatatatatatattatggtcagagtcggttcaaatattttgagggcgttgtttaaaagtttaaaattagatcatttattaaaaaaaaaattatttatgtacattagaccataattttattactagcttttatttttaagatacaattataattttttttatttatgtatgtataatagaaagaaaataaaattggttaaaaaaaatgaaaaaaattgaaccttaaaaaatgtaaacctttatacaatggcctaaactatctaatatttgggccgcgaccctggttatggtattggtggcggagtttacatgattgtgtttgagtcattgtattcgggtttttggtagatgccttcaatgataatttctccatttcttaaaaaaaaatacaaaaattgggtcttaaaaaataagagtcttgtgcaataattcaagctacttaatgtttgagccgattctgattatagtttggtgaacgaatttactaaatttgtattcgaatttttgacaaatgccttcaatgagaatttctccatttctaaaaaaaataataatgtatatgtatgtactatatagactaacttttcatttatcttatccaatacatatttaatgtaatccaataatggctaggtataaataattaataattacctatatatatatccttttaagataagctttttgtgagtttataagataagcagccagagagcatgtgactcagcatgattccaacatggttaattattaattctagtgtaataataattaagattaccttaccaaaaaaatattaagattacacattttttaaatttttgtttgaccactaatttagccgatcctctaaattttaaaatttaattttacatatatatacaacaatattaattgtttttagggaaatttacacccactactgatttttcccattttattacatttatactgtgccacgctggaaacaacatt

SEQ ID NO: 53200 - DNA, 719 bp, Cannabis sativa
gaacacttgaaggtattcagatgtatctcttatgcacacatcaggcaagacaaacttgaggcaaggaccttaaagtgcattttctcgggatatctagaaggagtcaaaggttatatactgtggtgtttagagcccaaaatgagaaaatgtataattagtagggatgtgacctttaatgaatctattatgggattcattgacaaacctgttggaagtcaagccaatactgactgagaagaaattgaagctccaggaactgtgcttgaggtggagcctccagaaagagtggagactgaaaaacctatagatcatggaagtgattattcaaaagataatttcagaagtgataatctaaaaagctataaactagcaagagacagaacatggagagaagtaaaggctccagatagatatggacatgctgattaaattacattcgcatttcatgttgctaatcaaattgtgcatgaagagcttactagctatgcataggcaatgaagggaaaagatcgaaagaaatagaatagagctatgtcagaagagatgcactccctaaagaagaatcaaatttgagatgtaataccgatgtcgaaagatggtaaagtcatcagatgcaaatgagtgtacaaatgggaaggcattctaggtgtacaagaggcacgtataaagcaaggttagttgcgaagggattctctcagactgaaggagtcgattataat

SEQ ID NO: 53201 - DNA, 948 bp, Cannabis sativa
ttcacttcgtcttcaaccaccgaatcctctcctccgctctggcgattacgatttatcctcacttcgccttcgatctgtccaaccccaacgagattcgacgaaaaccccatcagtaagtctttccccctttctcttcttttctttcatgggtttcgacgaaaaaccccaacaaattctattttctttgaattctatgggtttcttgtttctctctaagatctctcttcttttggctttacaccgatgtgtcgacggtgcctctggtgcgtctggattttcagataaattctctttctttatttactatgttcagtagaataagattctctttctttcgcactgaattgagataaattcttattagtgcatagcactgagaaacgaagagcttgattgatctgaaattgtcttttacattggggctaatgtatgtatagggagctagagatatggctataattacaattaacaaaatacaataaactcaggttaaatgtgaccatgtattatgccaaatatttttggtctagattatcgatgatgtttgatattttcatagacaataatacatagtaacctgaagttctttcagttttgggtgtgctgataagtttcattgtttatctagtttgtacctgcgagtaaagttatagaaaaagccagtcgactgagacgctccttcaatgacgatatcttctctggtgctacaataagcactgataaattcattgcagattggaactcatctgggttttcggtatccggcgaaaaccgtggaatgggtggtgtagttagtggaataagcttgccttgcactccaattgtttattgaaattatgaggagagtttattgcaggaaaagaatgaacattgattttgggagatatccacttgatgttagcccgtgaaaaactgtgtttttgcaaatgtcagttgtatataagaaaa

SEQ ID NO: 53202 - DNA, 1323 bp, Cannabis sativa
gggtaaaaaaatagggcctagcgcttgtcaacctgggccacaaaaaatggagttttcttagaattcttttgagcatcatctccgtcttcagaaaatattgagaatcagctagttctgaggaccaaaaggaacttctaaaggggcagaagagggacccagcgcgcaagttgacacttgggactaggccttgcgccattgtcaacttgggctatttccaaatcagtttagcaaaaagtgctctggacgtcttcaccgtcattagaaataacaaagattcaagtaaactcggggataaagccacaaactcgagtccctttaaaacagggcccaacaccaaggttgacacttaggactgggcccaacgcccagattggcaattaacctgggatgctccctttaagtgctagaatgccaaattcgatgcaaccattgactctggcatggtcaaaaatggggggagagaccatgttctcaagtttagaagccttgaaagccttgaaagtatcaaaattaggatcccgaagctcaggttagaaggcctcaacgcccaggtcaacataaatcctggttcactagattctgcttgtttgaattcatttggtttttcacaagtgcaatgatccatgaagttagatcaaccgagttaacaacttatattttggcacatccagaagccggaagtttcgagtctccgttttcgcaaaacaacaacatctccgagaatgagtgactagctttaccataacatataaaaggactaaggggtgtcaaaccatcacttaggcatctcaaaggactccccttggacgttttcacagttataccacctccagtttgacgtcaggtgtcaactagggcgctggaatgtcaaccttggcgctggatgtcaacttgggcgctggaacctgaactgcctttagtaaaacaaccataactcactcaattttatttcgattgatgcgattcaacttgagttttgaagctatttaagccctctatcaagtcatgtctcacacaccaggcaaaattatgaagttatcatcctcaaaattaacccccaaaagagttacgaaaataagttttcaatatttcgcaaagggacctgtcagacaccaaaaattaactatctttaccataagctatttttcactgttagatcatcatcaacgacggaaaacactttatttgtaatttatctcatatttttgtgggcctccttcacctataaaaggagagctcccttaagttatttttgatattcagaaactacccataaggtcagagcttttttttttctaaaattcgaagcttcagattcttaaa

SEQ ID NO: 53203 - DNA, 1205 bp, Cannabis sativa
cattccgtgaaagtacaatcacgggacaaaatcatatccttatattttatactcatgtaatctaaaatataatattttaaacagagtaatagtattaaaattagaaacaaattttcaatttttaaaatacaaagaaagatgacgattttgtgacaaatattagaaatagattaacaaaaaaaaaattgcatgtgtttttataagaaaataaatgaaaaaaatgatagtttctaattagttttttgaaacactatttagactcaattttttaataaaaagaaacaattcaagtccactctctaatttattaaaaaaaaaatatatcatttaagaaatccaagtagcaaatcactaacttttgttatatatgtcaatatatgtcaatttacttcaatgaatgtaatatttaatgtatctcaaagacacctcattactttgtatgaaaaatgaagcagtcctaactttagttattctgatactacttaacgatcctgaaacaaatacaatgcaaagtcttattcggactacgagacatactttaggcttctaaaaaaagaagcaaattaatgttcttaatttattttcattccagatcattttacaaatgctggtttgagttgaatttatcacagttaaagataaaagtaacatgagatgaataatacataattttaattaatcagatgatgtggtcactctctaattaattaaaattatatatgttatttatattctttatctgaaaataataatttgagatatgaattatttcaccttatacagatgaaacttttatcatcacttgtaagtatcatattgtctatatataaaataaatattactctcactgaccttctggtatataaattcaaaccaaaaaaaaaaaagatgacataatgaaaataacattttgtgagatgtttgttttaatctataggtagacttcttaagcttgcatatgtagttcaccactattagtggaaaatctatatatagtaatctgtataccttctcctctagttcattgttttgaattgattaatgaattgaaacgagcaataaatgccaatgttactataatagaatcttatataaagacaagtgagaatgtaaatctcccttgttattgattcgtagttcaaaataaacttcttagcaatgaatcttgttttatatctttatatttctctatgttgcctaatgag

SEQ ID NO: 53204 - DNA, 3867 bp, Cannabis sativa
aacgaaattttcatgaagttgtctaggaaatagtgttgtacattcgtgcgtgttgtgctggtctgactcatatatattttttttatattttattttaaagtatgagtcatgtcgtgtcctgccctaaaaaaatatagatcgtgtcgtaccttgctaacatttttaaaggatagggcgatattttttgtgccgtgctcgaattcattttgtgctttgctgaattcatactttatttttccatattattttttacaattaataaattaattactcaactatatgtatattttataatttcaattatatttatgtaattttttaataatattttatagacagccatataaaaaaataatttaaattattagaatttgagtatttttttacaagtacttaaatttttttatcaaattttataaataaattaatatataattttaattttataattgtcaataattttaattatatttaagttttattattatttataattaagaaatacatattattatatctattaaattataggcatttgtaatgttttttattgtgatttttgaacttatcgtgtgcctttcagattagtttaattatatatgttgtgtaatttaatcacattttatatggtgtcctgttaatttataatatcatgccatattatagccaaatccatgttttttcgtggccgcttgtgccgtatcaaaaagcaaagtttgactcataattataggtaagaaaagcctctggagccaattgggttgtacagcatatttgaaaattatttcctcgaactttaactactgaacaagctagccaagccgtcggcttcaccttagccgactcacgccgagttaattttgccggtagggcacatgccttcatggtttagcatggccccacgtgtaagccaatttgggtgtaaagtcaaaatagggttcggatgatcccgtcatctctttttttatgatttcttttgtcaaaaagcaactctcttatttttactaaatcggaaaaataaaaactcttattttattttatttatgactccctctcccctggtatagcctctataattcaggatgacaaccgaggagtgagtgaagagatattaacaactatacattaaaacaaaaatatacattaaagaaaatgcaatttgagacattttgacattatgatatgatatttatttcgttttttttttttgaaagaaatgcataatttattaagaaaaaatgattgttaaagaagaacttaaaaatcgagagcaaatatctttgcaaacacaatttcttaatacaggttgtcagtatatagacaatactgttcgttgatcgtagtatgcaataactactaccaagagtaataaagaataaatatctaataaaatgaactaaaaataaaaattaatataaaacttattaatctaatcaattaccacaatacaattactaataataatttgggaatttttacattatgatatgatattatcaggtcaaagaagtcaatttttgaggttgagattagtttgcatgagagtggagaccaaagctatgaattgaccatattgtttacgcaacccagacgaaagaaaatgcgtcatatacttattaataattttttatgtttattaaaaaattatagaaaagaattattattattgttttttatgtttatttgtttcttgtgggggcaaaatctaaaagcagttcttggattaaaaatgggatcgttggtaccaactcattgactcataaataaatgagtatgattataaatatcaagtgtacaacaagtacaagagtacatgtgtacatatagatcacgggcgtgtttggtatcagatttatagccaaactcacgttttgtttccctttctgttaaattgttgtggtgtagcgaaattaattgtgttttcaaatgaaattgacagagaggatgagggagtatctaatctaccagaagaagagaagaaggaaaaaggaaaagcaaaatcatcacgggcttccaaacaagtcataaaggagaggagacaagaagacataaattgaattttcaatccattaatgccacaaaaattatttagtttattcttaaaaatatttatgtatcactaataatatgaggcctatatctccttgtgatcatgaaattactacgaactttctattactccttatattcactgctacaaaaatcaatttcgctctcagttatagtaataccggctaattacaaaaaccaacacctaaagtcaacctaattattaagtgtcggattataacggataggaaagagtattcaatggtgttgattagtagactgacactaaacaaaaaattgagactaagcttaagtacaagtgaagttatagttgaaaaagtttaactgaaaaaaaaaaacttttatttcattactaaaaaaatctatcaacatttcaagcaaatattatgatgataatttatatatgttcattcagaagaaaaaaacatatttatattttacatatttatattatataaataaaattaatggaatagctagttgattatgcaatgtataattaacaaagaaaatatagaattaagtatataaattgatataatcgtatttgactaatttttttttacctttgtattgcatactttatgtttgtcaataattttatttattcaattgaaaaagagaataacaatttcttaaacttaaaaagttctttctttcttaaaaaaaacaaaattgaaactcgaaacttgaaaatttgccaattggtggatataatttataattaaattatattgtagtgtgcacactactacaaaaagtacaattctcgtcagattaagtgtcatttaaataatttgggttggtttaaaaaatcaacgtatatactatagtcacaaataattttttattagcgtcgttgttcaaattaatgacgcaaaacataattatcttcatttaaaaacggtcaaaatatatatttttttttttaatcttttgcgtcaatttgaaaatgagctatagctatattattatatcaatataaaagataagctacccaaaatccattagccaaagcatttaagaaaaatataataataataataatagttttataaatgtcaatacaatatgatcatagcaaagttattaatatatataaatatatatacaagagcttatcattcaaaatatacaagtctaaccttcgtaagtttgattcacaaatgaatagctttcatagttttaaccttcataactcttaatatcatctaaattaacattacttctattctccatcatcttttctgtaaaattgttgcctcaagttttataatcaattttctacaatcaagaaaatttattggtataagttaacacacaactcaaaaatttaaatacaaaatcacctcaaatatttgaaaaatatttccatgaacaagttcctaaaaatatataaaagagagagagagagagagagaaattaaatattttttttactaattccttagctttatgcctaattatgaaaatgaaattttatctagcaacaaataaaatttaacttagttaaaatatattatcctataaaaaaaatttttatcaatacatcacaatttttatttgtactactcactactataggcattctaatattttatttacactagtgaatattacacgtgcatataaaatattcattgaccatatatataaatatttaaaaaaaatactactcatacttaatactattataagatattatattcactacaccaaaaatgctatttaataacacttataaatgtcacaattatatatttttagtaacatttgtaggaagtgtaagatatgccc

SEQ ID NO: 53205 - DNA, 1970 bp, Cannabis sativa
  modified_base (586)..(588): a, c, t, g, unknown or other
  modified_base (887)..(890): a, c, t, g, unknown or other
caatccaattcatatatatttataaaaattttaaaaaaattatatatacaattaaaattttaatgtaaaaaaatagcaatttaaaaatctaatacataaaatacatctatatatttcaaaatttaatagatcaaatatatatttcatttttatatataatttttttttacatacagtttaaacaaaattaaatattttcttatacatacaattttttttctttctttaaatttgtcatttgttattttatttattttaatttgttgttgagatataaaataacaataacttgttttattttgctagttatgtgatttttttttttttgttttttataaataatattaggggtgtgatcataaaatagcagatctaatccaattcgcacgatccaatctaattcaatctgcaaagtacggatatccgcacttgtgcggattggattagattagaaaattcaaaatttgcacttgtgcggactggatgttgattgacatgtaaaattaatcgattcaatccaatccacacatttttataaaaaaaaaattaaaaaaattatatatataaatagtattttaatgtaaannnaataataatttaaaagtctaatgcatataatacaattatattttaaaacttaataaatcaaacgtatattctattcttatatataatttcttttttcaaatacaatttaaaataaaagtaaacatatctttatatatatacatatatatatatatatttttttttttcttcttttaaatttgttatttgttattttattattttaacgtgttgttggagacataaaataattataatttgttttattttgttgctagttatatgaaaaaaaaaatatattttttttcataaatattaannnntttaatattaaaaaataaccaatccaaaataaccgatccaatctgtacttttgcggattggattggatttgagctattgtgcggattggattggatccaaaaaataaaatctgcacttagtgcgaatcggatgcactatgagcaaaatagtgcggattggattggatgaacaccccttctaaatattaaataatttaatattgaaaagtaaccaaatctaaaataatcgatccaatctgtacttttgtggattgaattggattgaatttaaactattgtgcggattggattggatctaaaatatgaaattcgcacttagtgcggatcgaatgtactatgaaaaaaatagtacggattggattggatgaacaccctttaataataataataaaaaaagttctatttttatttttattttccatttacattcataacaatcgctcaacctctccctttaattaatttacttccattacattcttcccatattggggtcccttctcatttattataacccaaaaactacaatgcttgtcactaaaggttttgatttggatctatagtagttattattgtcatggttggtaaccatgcatatatgcaattatgcattgatttttatttatatataaaaaagttagatttgcaggttgtctttatgtgatcaaaaacccatggttgattgttttcctatctaattcaattataaaatattattttgaacaaaagctgcaaactttcattaatctaaatcacctaacaaagcaagtaagcaaattagttagaatctctctctctctctctctctctctctctctctaaaacattaagattgaacatttttttcaaatggttcagcaaaaaattaattgaatattatttagataagaaagagtgtctttgcaattactgataataacaccgagaaaacagttataaagagtgcaaactacgaataagcactatgatgagaccattcgactcagaaatatagggtgtactagactttcattttgatcatttaatctaactcaatacttctttgatctctacagtttgagctacttcattattagatat

SEQ ID NO: 53206 - DNA, 724 bp, Cannabis sativa
  modified_base (697)..(699): a, c, t, g, unknown or other
gatttctgatcttaattaattagtaaatctgattatattgaaatgggttttatttaggatacaaaacccaacatatgtaagttatatatgtatgtgtatatatgtcatattattatagtgatgtataatatgttatttaaatatgttacatgttgatatgtatatgtgagatatataatatataacttgtatatgagctatatatatatgttgaagatatgatgatatatgagtaactaatcatatttagtgtatatgatattaataataatgatgacgatggaaaagatgtgttcattattttttgagagtaaagagttttggaattaattttctattagtggtttttatcttattttatgagatgagaaagtgaactatgagagttacacttatgagatttgtcttgtgatagcaagaataaatcaaagtaaatcatggtggattcaaaaattatgaaaagataacaaaattggagaagttattttgaatcttaatactcaaagtggtgaacaaaattgatgagatttttgctaactttggtgtaatatttgggttaacctcaatgaggagataacctaaaaatatgggtataaataatcacattattttttaagtagtgatttgagtttgatattttagttttattgaaaaactaaaaatgtcaaatggtgtttttgttggaaatattttaccnnnatctagatttactatcatgtatgtt

SEQ ID NO: 53207 - DNA, 686 bp, Cannabis sativa
acattgtgtaaaaaattctttttgtgaagactataatccttatgtgtgtgagtggctccgtcagtagtaccagaagatatttttcctctcagattttttactcatgtagtaaattgtaactgaaagttatactgtaaattattttttattttaatttaaatttgttttatttttattttttctgaaaggaatttaatttttttttatataagtatttaattacaaacaaatatattatttagcctcgtttagaacgccgtattagatcgtattgtattgtattttatgtaatatttttatgtaaaattatatgtggtattaactcctatggacacttaaatatataatattttagtgtaaattaaagtttaatataatattatataaaaatataatatataatctaattaaatgtaataaaatataatagaacctaatacgatattacaaacgagtcctaagtaattaattgtaacaaaattcacagcttaaatatttttgacaccaagaaactgcaacaaattaaacaaattgtaacaaaattcacagcttaaatatttttgacacaaaaaaactgcaacaaataaaactacaatatcctttcaaaaaaaatatataataaaattttgacataattatcccatttaataataactttttttaaagaagaaagtagctagcgagtg

SEQ ID NO: 53208 - DNA, 709 bp, Cannabis sativa
accccagcctttgctagataccatccatcgccgtagcatttaattttgtctcgatgagaaaaagaatgtcaaggtcgtccaaacaaaccaaaccccagagggccttgactgaacgagattgtcccgaaccccgacagttctaggataagaccttcatgaggttttgggggtatgatacgacacgcatccttggccaataaaactccttttgttgcaataatctcattttggacaattctaccatttcacatattagcatctgaaaagaagagaaatggaacctgaatattccacgagatgttcacatgtagggaaatgagttgtagatggatgatccaacagaagagaaatcgagtcagaatcctcaaagaggccataatcttgtgaacctaaaattatacatcttcgggtggatctcttgaagatgccaccaaagatggacgttccacatacctgatagaatagaccgtagacgtccattacaaacctttcttttcacgaatagtttagccaccaccgatctctggataaggttcttaacatcatcatcatcaggagtgaggtctagagagaaatcatgacattaacattttccacaagattaaccacctcttctaggaccaattctagagcatcattgtttaaagcaaaatccacattacaagaactggaatttcggtataaaaagtaacaggaaacagggcaatac

SEQ ID NO: 53209 - DNA, 1424 bp, Cannabis sativa
  modified_base (27)..(36): a, c, t, g, unknown or other
  modified_base (618)..(620): a, c, t, g, unknown or other
  modified_base (795)..(801): a, c, t, g, unknown or other
ttctgcgctattttaattagtaatccnnnnnnnnnnattagggtttcataagtattttgagtagcgtgcctgattatttagggcgttacaccatgattctcaacttcttgaaagtaactagcaatctggagtaggtgatcacgcacgttttgatgagacttcatatgtgcgttgataaaattcttggttgcctcaaaacaagcttgagagtgttggcaaaccttattttcaaggtatcaaccatgctagacagcataaagtatcgagctttattgttagcattctagcaacgctcaaacttttccttaactaccttggttatattctcacctggttgcttaggagcatctttggttaacacaaacatagagttttcacctatgagagcaatattaatattctctttccatttgacaaagttagcttcagagagcttgttgtcagtcaatagtgaaacaattgggttgttcatagtcatattgggaactacaaatattaataaatagaaatcaaataaggttcaatacaaaataatcatacacatttagaatttattaagcatttagcaagtacgaatgacatgtgaaaatacaaaaacaaacaatcctaaataatttnnnaggtttccaacaaactgatacattctcccgtttaggcaagagtcaaagatatcattcattgaatagagcagtcggctcgtctaaaatagataccattctagcaaccttttattcgatcaagatgagaatccaacattctcccatttaggcaagtcaaggccattctatcttatgnnnnnnnaccattgtttcatactttgtaagcactactcttagcagccactattcgggcggacgttactaagaataaaagacttacaataatacttattattatcccattttttgcactgtgacgtggcaacacatgctggtgacacgtggacctgattccccatatttgtctgagagagatgctccgagtagggcgcagcatacacttgcacggacagtgccttcaaagccaatcagtagataatccaagcagcgcatccacacttagcatttttagaattttcatcgtgaagtacaagattaatccctatcaatttaggatcgtatcacaaagatatggcaagctgtccaaatcccacaatttgtgtattctaaatatataatatatgttcttaccaattatagacattgtaagcaaaagggaaaccttccctcaagcacttagccctataaatagtgatccattctcactagtaaaggggtcgaaagaattactttagagaaatctaagagagcatactcagagatttcattgtgagagtactaagagaggaaatgttgggtttgtgccctaaataaagccctttacaatctgattaatgtcaatataagaaatttgaagtgatttat

SEQ ID NO: 53210 - DNA, 894 bp, Cannabis sativa
tactaaaattccactaattaactcctaattagcttaagtaagattataatcttactctaatatccacataactacatatttaataaaatatggccaaataaatatcaataaaatttctgggatattacactaagtctccatctctctcacttgtgattggcctattgattctcactaatgtaatcttaagagagccacttcaaaatccactagaggtgttatttgagtggtattatctttagtattaatacaaccaaaaggggagtatgtcattacccactaactaatgggggccactctataaaaataatttgtccctttactttcttgttcttattgtgttcatgtagtgatatcaatcataaatatgactctgctattggttggccaaaattcaggtcaacagagataataccattcagataacaagtattgtggattctatagtggctctctttagattacattagtgagaatcaagaatcaaatttcaagtaagtgagatgagggagacctagtctcttctacacaactaagggcatgtagtagagagattaggtttagtttagtgctctttatataggagagcttacaagagatgataggttgatatcccttaaaatgaggagatatcacctatttgcacacatagaaataattaagtaaataacatgttatttagtccccaagaataggtaaataattgaagtttatctcctatttttgtgggttgttgaagcccaacatgtaaccaaaagtgttgtctaggttgaaagctccaaaggcacaaaaagtgctttctagggccaaagctagctgacccttcctttgctggaggctggccagcttatgctggcagtagggccagccggggggtcttgccagaccccttat

SEQ ID NO: 53211 - DNA, 662 bp, Cannabis sativa
aggcttacctaagtcgcttcagtatggtcgctactaaagtgagaaacttgaatgacaatattcaagttactgctcttcaagtagggatcacgactgacctctcaacagctggaggtaagctgtgggatgaattacaaggtcgcctagtaagaaatataaatgaattcaacgaaagagcgcaagtatttttgcgcaaagaggaagtaagaaatgagataaagctgctgaagattggctcgagaaacaaacccaacactgccatagcaagtaccgtctcgacaaaggctgacaatccaagtagtttgaacaccaaaagaaaagatgattccagggaatcatctaaaaataagaagaaacagaaaaagaacggtaaatatgagccaatttacaccgtatacaccgagcttaatgaaactcgagaaaacatctttctcgcaaatgagcacaagattgcattttgcaaacctaaaccaatgagacatgcgagacacaaacgtgacccgaatatattttgtcaatttcataaagatatagggcatacaactaaagagtgttggaaactaaaagatgagatagaatgcttcattgctcgtggatattttggacaatatgtgaagcaccaaggaagtgaacaaaatcgggctattcagcccaacagctta

SEQ ID NO: 53212 - DNA, 990 bp, Cannabis sativa
atcatcaactaaaccaaaaactgatctagaataatcattaaaaaaacacttgtttctgttaagccaaatattgtagattacagcctccaagatagtgatattgagttgatgtattcttgcttgacctgtcaaaataacccaatgataccaaccaatgtaagctgtcggccaagccctgtaacccatctaagaaaagattgagtctaggactttttgagacaacaaacatctaaaaaagagatgctcatgggtttcctcattctcctcacaaaccagacataagttcgaattaagagctatgtggaatcgagataacttatctctagttaggagatgagtgttcatcacttgccataagatgaatctgtgtttaggcacagttataaagctccaaacagccttgtaataattgactggacctttgatcagtcttttgttgtacaaccagttggttctaaaccaccctaaagaaccagctttcactatctcattcagattgaacttctgtcttagatgacaaatactccaaccactactctttttaatacactctaacataatcaaatttgaaaagcagaaatttaatagtagaaaaaataattttatttcttcatatttttatttgggtattttgaaaaatacaaagtattgaaaagattaaaaagcttcattttcaataaaacaataaataagaaaaagctatctaactagtctttatttatttatttttcaaagtcttatatttctatttatagaacatggttccctattggtgacaattattaagaagccatagcatctccaatggtaatattttggagaatgcttgatgaggtggaaagcttatgtggcaaaatataggaatgctataccattagagataaaagaatgctattcttgaaatttgcacatgatgccacacaatgacattgatgctatgttttttttatacaataaaaaataaaagtgcaatatatatataatagttta

SEQ ID NO: 53213 - DNA, 1025 bp, Cannabis sativa
  modified_base (425)..(429): a, c, t, g, unknown or other
  modified_base (494)..(510): a, c, t, g, unknown or other
agcaaagaactatccaatcaacccaagttttaataaaaccaataaaatttaatgtaagcccaaataaaagtctaacaacatatgcttattgatttagaagggtggtttatagcaatgctcaaactaaattagcaacaatagtacaagtactcaatgaaagatgtaatcaaatgccacaaagtttggggtttacccttcgccctttaatgaaactcctgttacccaacctctcattattgtacgtgtcgtttgttgtattattatcttattatatagaacattgttaaagacactaaaatgtctagcatggcatactttttaataattgattaaaagttttctataatttctagcatgcactacaaaaaaaatagttcttttagtgataattttttagttagaacataaattttttgtgactaaannnnncttttagtcacaacaaaaacttatttgtaactaaaatatagtatttagacacaagttgtcactannnnnnnnnnnnnnnnnacaagtattgtgactaaaaacacatttagtcacaaaaatttgtacttttagccacaacttttttaatcacaacataagaatgataatttgtaattagtcataaattttattgttaaaagtaaaattttttgtattatcaaagtaaaataaataagactattaaattgtatattatatctcatgttaaactgggtttcctttagtcccattaacaatatagaaagaaaaaaggggattattcataaataaaaaaaaggttaatagagtttatttttatatagcataaataaataatttaaaaaacatatgagattaaaaaataattaatatttaaaattaattgaaaaccttgtcccacatggattaaatgtaaaagtattgagtcatatataaaaacatggactactccactcattactaatttattttgagatggaacccatatatgattcttataaaaaatatggaaaactttaaaaaaagacgatacgtaaatttgataaaatttttaataa

SEQ ID NO: 53214 - DNA, 1316 bp, Cannabis sativa
aatctccaaaattattgctaacagttattgctaacagagttagagcgatcctcccgagactgatttgtcctacccaagctgcttttgccctgggaaggagcattcaggataataatgtcttaatccaggagattatccactccttcaagaaaaaaaaagggaaggagggctttttcgcaattaaaattgacttggttaaagcgtatgataagttaagctggttttttatcgatcacgttctttgcagcttcagggcccctgagacgtttcacctctgggttcgacagtgccttacgacgacatatttcaacgttttcctcaatggtagaaagattagtagttttatcactgagtgtggcattcgacaaggggaccccctttccccttacatttttatctggcccgcaaaaattctttcacgtattcttgagaatgccttgagttgtggaaccattaaaggtatcaagttgagcaaagatggcccaagtttgtcccaccttttctttgcagatgatctgattctggtgggcagggcaaatctgaatgaagctaaggagatgtggcagtgtttcgagaaattctgcgattggtctggtcaaagaattaataagctcaaaacatccatcttcttctccggtaatacaagtaacaaaatgaagaggggtatcaaacaggctctggggctcaactgtgggatggggaacataaattatctgggactcccatcatttagatctcgccaaaaggatgtcgacttcaactttattcttgataatcttgttaagaagttgcatgggtggaaattaaaattgctttctaaagcaggtcatgccacgttgatcaaatctgcaggccttgctttgcctgtttatacgatgcaaacgacgaggctctcgaaaaaacttgctacaaggattgacgagatggtaagagacttctggtggggttgtgaacaaggtaacagagggatctgtttaaaggcttgagatcacctatgtttgcccaagtctcatggtgggcttggttttaaaaaatccttagaaatgaaccaagctctcttagccaagtggggttgggatcttctcaatgaggagcagtcgttgtgctgtaagttgcttagagctaaataccttcggggtagacaattctttgattgtgcggttaagagttcggactcctagttttggaggaatgtggtgcgtactaaagagattttgaagaaaggggcatgcaaacttatagccaatgggagggatacaagtatttggaatgacccatggattatccatgggagagatttctaccctagaccaaag

SEQ ID NO: 53215 - DNA, 1337 bp, Cannabis sativa
atttaaaaataattatttaattgactaatagttataaagatttcaaaacataaaacaattatctatatagatattaataaattattttattgtatgataaataagttatgtatacttattttttattttgagcttaattttaaggggttttattaaatttgataatctaattaattatttattataattaaaatttactctttatacacataatgtattttataaaaaagtttaaatttattaagcacattaattacgtgattttattaataattttatacttgactatattattactattatatttattttctttcctttatttttatattaaattataatagtctttatatttatttctattattattttcctaattgtatgtacttcttattatttttgagatgaaatatcaacttcattgaataatttagcattttgaatacaaaaatgtaagagttcaccagaaatagaaatatcagaaatgctacgatcagattgatattgagaatgtctagcaacataatgtactgctcggtttgctaatcgtctaattaaaaataaactaacatttgggagggtagataacaaaagttggcagtctttgattaaaaggccttgcttggttgatcgtctaatgtaattcttattattattagtcaaatatttaatgaattaatacttttatatattgtgaggatttgttgcgccataattttgttggctttaatgtcttttaaggctgttgcgtctattttttttgcttgcctctaattacttagggtaatttaattaattattccattatttttttatgagaaattaaagttttcaaataaaataaaagttaacaatttattcataattttactttttaatatatttaaatcaagttaatttagtttttttattcttaaagataaaaagaaatttaagaattagtgttataacataaaaattcttaaggtttttaatacaatagtaattggattaatataaagaaattttagtataatttaaattaaaagatactggttaattttagaattattagatattcttattaaacgtgttttgattttcagcagtttttgaattaatggggtgttagtgaattgctactagctagccaaagcgtaatatctttggctaattacaataataataataataataataataagtttttagttttgtatagtaaagttgaattaggaattcaattgtgtattaattttgagtttgtatattaatttagtttggaggttaccatcctagttgcaatgtttcaggtggtaattgagttttgtgtactgtttgaagatgttataacttta

SEQ ID NO: 53216 - DNA, 884 bp, Cannabis sativa
  modified_base (809)..(830): a, c, t, g, unknown or other
aggtcttcttcgatgttgattgggccacttgtcctgacactcgaagattcgtcacaggctattgcattttcttgagacagtctctcatctcgtggaaatcaaagaaacaaaacataatctctcactcctctattgaagtagagtatcatgccatggccaacactacttgggagctcatatggcttctagatctcctcaaagattttggtatccaacacatggcacctgcccttatgtactgcgactacaaggctgccatccacttatctaaaaatactatcttccatgaacggacaaaacacgttgacattgattgccacattgttcgagaacgagttcaaagtggtcagctcaaacttctccacatcaacactaagcacaaccttgccaatctactgaccaagcctcttttctctcccaattcaaggagttactctccaagatgaaagttacaaatacgtatcttctatcttgagggggcatattagaaccaattgatctgtttggctataggattagctatccctgcttggttatatgtttattcaggtataagggttttaccctacgtgtaccatatctatagaataatattgtaagagctgaccataacacacattttcttaatttcttttggtaataaagaacttttctctttctttcttaagaatactttataaattcagtttttatttttttttaaaaaaatatatgcataaattttgaaagctaattaggatttttttcccccgaactttgacatgtaccaaagcatgtccggcctgaacttttttggccattaaaaattnnnnnnnnnnnnnnnnnnnnnntagatttaaggacttttgtgtaatttcattcaattttactatttcattgattgt

SEQ ID NO: 53217 - DNA, 1434 bp, Cannabis sativa
ataaataaattgatgctgactagagacaaaaattataatttagggataaatctcgggagaaacaaagaaagaaaaatttgcaagcaaagaaagaaaagcagttgcatgagcaacctcgaaagcccagcaaaagttcaaatgctgaacctagtgcaatgaggaagaaaacagctaaacagagacgtgctgtgcagacagttgaagatgacgatgagttgacacgagattaccgcctcctgaagaagctgaaaaaggggactattgatgaaagtgagtttgcaaaattatcagggattgaagacttgctttgaaattcatgatacatgatagaggtattttgcaaatacattcagagcccaccaaaagagctccaaagatgaaatgaatcataaccaatggttgcaaaatttacacaaattaaagaaatactttgatgtttacgggatgagtataagaagttttcggaggatattaaaccttggatcttcatagttttgaaggctaaccagctacaacgaaccaccatattctattctgctgggtaccttgctgctggtgatgaagaattataaatttataatttgtccctctctgctcatgcataggtttttgatattgccttttggctttgtaattcagtttttttcccttccttatttaattcgttgtttttccgttgatgaattgatattttgcttagcttgacaaacaaaaaaagaagagacatttagagaattgtattctgatacagtggtagtggaaaaaaaaataacatatttaaagttttactatatggttagcactggagaagttcactgtatatggaaccttaaatttgttagctgaaatttctgtgtatatttaaagcatcaccccacatttttttttctccttatattcaacttgaaattcataatctgccactcgagtaacttcagcaaatctagcatttttaagtagttgattcactttaagatgcactgcaggtgttagtttggttttgcatctttcagctattactttcctcgcatacatcatgttcattaatttagttctgagacattccaataactccatgggaggcttgtaacgtacttcatcaatccaaccattaaaggactccacatggttgtttgtaagatgttcaaccttggcattagggtcaaaacagctcaaattccaatgttttgcatcaatattagatagccatacatatgcatctctgtttaaaagttgaatttgcttcattacatattggaaatgttgaaagttcgccgtctcagccgctgcccaaaaaagattttgtaaattggatgtaccgaaatgtttcgtcatgttgttttcaatatggaaacaacaataacgatggaaagctcttgagatagtttggacaccctctatcagtccctaaatttaattagaatcagttaaaac

SEQ ID NO: 53218 - DNA, 1359 bp, Cannabis sativa
tgatacccagttgaacgcgacctaccactcccccaattctctctccctcatagcctcacttcagtctagattggatggccttctccttaaggacgaaatatactggaaacaacgttccagggttgattggctgcgtgctggagacaaaaacacaaaattctttcaccaccgtgcctccaccagaaaaaagaacaactttattcgcctcattacccttcctgatggatctatatctcatgatacagccactataactacccaatttcttcactttttcaactctctcttcacctcccaaggagtttgtgaagttgctgtcaatgttcttctccaagggattcccaataggctctcaactcatcaagctgattttcttgctgagccttatacagaagtggaagttaaaaatgcattatttagcctctctgtagacaaagctccgggacccgatggcctcaactcgctcttttacaagcgtaactggtccactattggcactgatttcacaaaggccatgcttcatattcttaatcatcagggggatatctcttccatcaatcaaaccatcattgtcctcatccctaaaaagaagaatccaaagaatgtccgtgattttcgctcgattagtctttgcaacactttctataaatgtctttccaaaattattgcgaatcggttaaagcttgtgcttcactccattatcagtattaatcaaagtgcttttctcaaaggccgccaaacaaatcaatcactcactgacaataaatattattctctctccttccttgccaaccaatgaatgaaagaaattaattattcacgccattcattctaggagatccgggaaggttggttgggcagctattaagcttaatatggaaaaggcttttgacagagtggaatggccttttctaaatcatttgctcaatcatgttggcttcccgtgccagttttcttccctgataatgcgttgtctttccacggttcaatttcgtctttccattaatggctctcttactgacccctttcattcaacgcgtggtatcaggcaaggggatcccctctctccctatcttttccttcttattgccgagggcctctctgcagcaattcgtttacaagaaactcaggctctgttttctggtattcggatttgcaggggagcccctcctttgtctcatctcctgtttgctgatgatagcatggtcttctctccggtccatcctcaagctagtgcttccctaaatggtattcttgatctctacaataaggctacaggccaattggtgaatagagagaaatcctccattctcttctcccccaacacctctgctcaggcccagtatcaatttcgtcaag

SEQ ID NO: 53219 - DNA, 678 bp, Cannabis sativa
ggagtaactcgacttattacttgatgaaagaaatctagtgtatttttgcatacttcatgaatatgttgtgcactaaattaaatatgtacttagcatgtaataattaggggaaaaaaacaattaactcttatcaacaagtccaagtaactgacaaattaactcttattaaaaagtataagtaactgtttgctttttcttttttcaactcttctacgagaacaaatgtttagtcttattaagcaaaaaaacatagttacaaaaataaaaactttgagaacaataaaatgttactttttattttagcaaataattattttttgtgatattgttttttaatttctcttacatcactttttttttatattattttctcatattattttttctctcctcgtcattttctctctccattctctcacatcactttctctcactattttctctattatctagcatatcatttttacagtttgggggtttgggttcggcatttgggtagggttgagatcgagtctgaggtcgagtttagggaaagtgccaggtttggggcctgattcgaggctgacactgcatttggggccagggttgagaatcgaggttaggcctggagccggaattggagctatgtatgtccaggtttcatccgagctctagtgtctaggtttaggatcgggttgg

SEQ ID NO: 53220 - DNA, 785 bp, Cannabis sativa
cagacttaggttcagagggaatcaaagcttcaggtagtggatgtttagtggcaaggtaagcttttggctttgtaatgccactttgggaccttgtcttcataacatgagtcatgtgtgatgtactgggtaatgtgggttttgataaactagagaactaacatgagtttgtttaggatgttgtgtggagggtagttcttttgtggtggtgtctggtgtgatgtctatagaggttggtggggctagtggtgttgtaggtctttgtgtatcatgaggtaatgactgatgtataggtggttcaacaataggttgggtaatatttaatgatgcagatcctgttggagtgggtggtggagatgatgaggttgtctcaatagccccagatgttgtaattgtagtcacaccatgaacaaaactagaattaatagtgttggtattgaaactagcagtaggcaaagtaaatgtgttatggtgagagtgtacctaaccattagaggaggcctgagtagtgtgagttccagggtaaaatgattcattaaacaccacattttgtgctatataaaccctgccttgactactttccacacaggtaacctttatggtatgaggaataccctaaaaataggcactgttgggatctcatatccattttgtgagagttataaggcctcaagtgagggaagcaagcacaaccaaagggtgttaagattgtatagtaaggttgttgcccaaaaagactcaaaaggattgatgttagatagaacgggtgtaggttacttgtttattgt

SEQ ID NO: 53221 - DNA, 1604 bp, Cannabis sativa
  modified_base (137)..(171): a, c, t, g, unknown or other
caaaatagaaggtttaattagtaatttttgcaaaacacaagatttaaaatggtatttacctaaatttttattttgaaattaagctttgagatacactaaaaattcatatattaccccaaaataataataataataannnnnnnnnnnnnnnnnnnnnnnnnnnnnnnnnnnataataataataataagattttagtctcaatggagaagaataatattgtgtaagaaaggtataaactttttataattgttaaaaaaagaaaaattatagcgatgtaatcaaaggaaaaaagttaattaatacaaaacatgtcacattctttcaattttattttatctataaataattttttgctccaaactacatgttcatgtcgtatatagatttttttttttgagaagaacaaaaaactttacttattatttagtgacttggaaataaaacaattttcagttttgtttgttagttgtctcaaaagaattatgtgaaactttatttatttaaatttgagtaatttgtgaatttccaaattattattattacttttgctatgttaaatcaactactttttcagtttttcaggagccaaagaaaaaaaagagaagcacttttcagtcaatgaagtatgaacaatagaatatttttcactgggttcaataattgatttgttttggtatttaaaataattttttattttaattttttttatattcatatatattataattatttaaataaaataatttaaaatataaaaaataatatttaaacaatttatttcacacatatataaaataaaataattatgcgtataacattatttgaactcttttttaccgttccaaatttaaataactattacgtatataatcatagcaaaaaaattaactaaagattagtttaaatactaaaataaatgtatacatttcttttaaataattattacaaaaaacacaaagtgtgtaaacggtaaagccaattcaaattttttagaagtctttatttttcatttttttagaatattctttttcaattattcaattatgtaatctaaattaccacatttaaataagagaaaaaaaataatattaaaacactgacaaaaccatttaattaccaaacaaatattaaagatggtagttagctttggattttttttttattttctttcttaacaaagtaaaaaaaaaaattgaataacttttgacaaggacagacaataataaagaaataagttaataattttctttagatgaaaagatgatccaacggctaggattaaaactttcacaaatggaattttcatatatggctgtaacgttagcctttatattcaatttatatataaactctttctcttaaaaccttttaaaaccaaaattcatcaaaaaacgtttcaacctctctttctctctctctcttttattattattatttttttaatttttatttatttataaaattaatattattattatttatttttaaatattgaaatttccagtcaccggagccgtcgttagaagcttcgagttctcctccgttgatgatttgactttttgactcagtgaagatcaacgatgggacaatgctgtacaaagcaa

SEQ ID NO: 53222 - DNA, 1554 bp, Cannabis sativa
tcatttttatcttttttctttcccaattctctctttctctctctttcaatttttttcatactaatcttttttttttatctttatataaatatatataataagtgtaaatttttatatcattttttttttctaacactgttttagtccctcaaaaatttttattttattattatattttaaaaaatacaaatacttattatatttcttttttcattttttacactttcttactattgaacactcaaacaatttcatactattttatttaaataatcacattttatatatataaaaatcttaattaagttcttctaacctttactaaaatatgatttttttactttcacagtttttttcataatttttttaacactctttctctatcttaaaaaaaattaagagcatgcctcatatatctttctttcttctacatgattaatcaaaagctaattaagatttttgccccctgaactttgacatgtaccaaattatgcgtcctgaacttttcaggtcatcaaaaattccacctgaactattaaaattattggatttaaggattttttttttttctaatttcatttaattttgttaatgtggtgattatccatttactaaattgtgccataaattttgatatataccaaatcatacctcctgaactttaacatgtatcaaattgtgctcctctaatttttatctgcagactttctttagtaaaattggataaaattccttaaatctaacaatctcaatagttcgagggaaatttttaacgataaaaaatattcagggagcatgatttgatgtgttaaatatgagggagaaaaaatccaaattagcgttaataaaaatagtattttttttggatgttttgtagtttattctgagttgatttatgattgatttgcatattttaacaaagttgatgtctttttatttttctattaatttatagctatctttgtgttgttttacagttattttttatgttgttgtttaggttttttatagttgttttgtagttatttttatgtatttttattccacacacttttttatgggttaattgcggcacaacccccaatactgtcactttgctagcacttaacccccaaaattcaaatttttactgtaaaactctcgaaactaagaaaccgttaacaatttacagttgccatctattttaggtgttaaatgccacgttggattgtccatgtgtacatctacgtggacacgtatacacatggcacaattttattaggccacgtagaaaaatatctaaaaaatttaaacaaataatttaaaattaaaaaataaattttgtttgaagggtattaattataaatgataaaaccctaattccctttctcttccttcctcagtcgacaccctctctctcttctctctacatttgtgcagtgaccactggcacgacgggactgccgtgctctgatcaaccacgccctaagaggaccacgcatcaccgtcctcaggcccagaaaaccccaagggcacacaactcgggatcatggggttaaggcctcgaagtgacgg

SEQ ID NO: 53223 - DNA, 1688 bp, Cannabis sativa
aatttatgcttaaattgacatttagtattgtcaaaattttgaccctagctagccattttattaagtcatacacactactattcgtacgccgcgaagaatatttcaatatatatctatgataaaatgtatatctttgtatagattttggaaaattcgaatatcatttttggtattataatagactattattattttatctgttgttaactttatgaagaagaaaaaaaaagtgaaactattttattaaattaattgacgttgttgatgtttaacttcttcaataaaatgttaatgttttgcaaaataactaaataaataaaaatagctaaaattgagaatacatcatacagtgtgtattgattattacttagattaataaaccaaagaaagattaaagtaaaaggttacttttaagagactatactgcttctttgtttgctttaaacacatgtacactatacacagatctatacgtgcagataaatgtacaacaaattattatttttatgaatatacgtgtatatactacaattgttatacagattgttactaaaaataaactagaaatgatattattgaataaattttttggattgagttacaaattgctctctttgagacgttcttgctcaggattatgcaaggagtcagaaattgcaggtcatttccaggataaaatcgtccaatttcatacactgtatcaaaataccactgtactaacgaactatcgaatacacccttaaaataagtatcacagatggaattttatatagtaaaaactaagttttttaccacaccaaccagtttaattaactcggacagcacacgcgtgtgtggtggataaagtgtatgtgttcacccattcatataaaattcaagtaccaaagttattcttgtaaacaaatgctcatatatcccgtgtcaaactcattctatttcacatataataggacactctcattttatcagaaatttattaactttcaaaaaagttccaacaacaattatattattacatatgataattgaatgggttggaaaatactggatattttattggtggatccatagaatatcatttagccgccggagagagaatgattgagtaaaattgtttaagaactctctatttcctgtccctattaaataacacatatttttatattttctttctgtcgtaacatacatatttataaatagtaataatacaacaattgaagaattaaacaagctggtattcagtctcgttttgaaataaattattattaaaattctgagtggatctaatcaattagtctttagtcgtactctactctgtatatgatgatgatgtaacaaacatataaacaaaatgtatgtatttacgcatgcacacgtccccacatacataaatttttacagctatatatagataccctcatacccatatataattatatatatatatatatatacaatattatattatccggagatgcatgcatgtgctagttttcaattataaataacaatattgttcccttcaaattattagttcaataactcgccattgatcttcgatctgatttttagagtaactatttaaagtctaattagcatatagactaataaatttgagtaatttttaattaattatacgattgatagtgtaagatagtttgatcatgttttgttctttgttcagtgct

SEQ ID NO: 53224 - DNA, 1941 bp, Cannabis sativa
ttttgtgagctaattttgaattgatatatcatccaaaagtaatagagatctcagaaaatagtcatcttataatagtaaacagaatatgtaatcttcgaatcagccaaactcctttaagaaattcctaatttcttttattttcatttataattaaccttacatattatagtacattatgacaatcctatcatatttctcataatgtaatatttacggtatgtttgggtgtaactgtatgattattagggagtgtaattatttgatggtaattacacaatttagtaattacgctatatttttaaatacaaagtgtttttacatatgagatggtaattacatataaatttataatatcttatttgataaaataattaactattatacatgaaaataatatttttttaatagttaattatttaaaattgaatttttttttaataattacacagtataagtatagttacacttaatttttatggaaattatgagaattagaaagtataattgtaactatcaattacctcaaatcatacttatagtgtaattacagtcaaataaacatacaaaatttaattacttttaattatacacaaatctaattacacgtatgaacttcactcacttaacaaaattgtttttaatttttaaatatattcatctatcagtaaatatgatttatccaaagtaataaagttttacatttatctccatctataatactttccacttacattcgaacacacgttattgtcaatcttatcaccatatctaaatcttaatatttaaaatctaaaatacttacacaaaaataaaataaattaaaaattctaatctaatctaaaaaaatagttcatttagatgagtaatcatattccaataccaaacacacattggtgatttggtccacccactttttttttagcaaaaaatagtttattcaataaaaaacattcagcttcaacaacagatataagttcaagaggaacatttcgctcactaaaaatacaatctgaagataaacaagacgctcgtgcaacacaatgagcagccctattaaccgtttaataaaatttaaagacacatgatttaaacatgaaagtaaagagcgacaatcttgaaccgacaagccaaattgagacgacatttgaactgagcttggaacagatgcaccaccaccaacgcatctgtctcaatctccacatcagtccaccctttgcgcttgatccaactcaatgcttctttcacccctataacctcagcaatctcaggccctacaacctcaaaccgactacccgagactgcctcaattaacttcccatcagcacctcgagccatacaactaaagctaaacttgtactccgtcgcaaagatagcaccatccacgtttaccttaatcaagttaggcaaaggaaatattaaggaaatatttgatggcgtgactcgcttctaattgtttaatgctttttgctgataattcattttgatttctattaattgaacaattatttacagcaaaaaaaaaaagataattagataattgaattgcttggcttgaaatgttcaaggtcttgggaatgaccggacgttccaaattcttagttcccatgtcaaagagttttagccaaacattattttttttgtcggaaacgcttgtgactcacttggttcttgaagtgatgcgagttagattgggctttgttggaaagttagtggttgagaaaatcggtagaagtggtgggttgtgtctattctggagtagtaatgttactgtggtgcttaagggttattctcgcaaccatatcgacgttatggtgtgctcgcatggtgatttatggtggctctatactgggttctatggccaaccggaggcgcaccttaggtcccagttttggtgtcttcttgagcggttggctgatgggtattctggaccttggtttgggg

SEQ ID NO: 53225 - DNA, 1940 bp, Cannabis sativa
ttttttttttttttttgtaagattcaagagttagaactgaactcagagccaaaacaacctaaatcaatctagatcgtgacgtcgagcttcgcatccaacttatattacatattagggcttgagaatttccaaatcctcaaccccttgtgatcgagaatttcaagccaaaaaaagttatgactctggattcaacacagagatggtttgttgattgcctttgccactcatcttcacgaaatgtgtgttcaacttcctcaactgaacccaacaacaattagtttggtcccttctcttccattatcaggtatgttttggttttttttttttttttttgtcttttgactgtgtttttcggatttactgctacatgttatagttgcatgttttgttctgaatgaaattgggatttcttgattttgcaattaatattgttgttagatttaggcattgtaaatagtattgtctttagatttccatgttagacatttctaggattagtcgttttgcagcataagtgttgaaatttttttcatgtgcacaaaatccttctgattttgggtaccctatcaatttctttttcattcttcctcttgacatttttgactttccatctagaacgaataaccccgaaggtttaggccatctcaaataagcaagagagtttaaggttaaggtgggtgcatagtgtttatatcaaaaagcaggaatggtggagctactctacttctgtcaattcgagctggtattggaagaagatggtagctcgcagaatttcagaggcaaaaatacaccattacagctggatacagcaaatatacttacaaataacagccttgttccactcctctagcttcttaactcccaagccacctgcaattttaggctggcaaacactctcccaagctacagctccagcaccatgaaataaaacttgtcttttccataaaaaagttctacatatagcttctatggatttaagaattttctttggtataatcatcatctgactccgaaaagtctggatagcaattaaaactgagttgattagtgtaattcttccttcagaagaaaggttccttgagctccaactcttgatcttggctgtcattctttcagccaacaattcacattctttactaaaattttaatattatggttatattcgttatagttttacttataaatttttttaaataatttaatgtgttgataataaaatttaaatatttttatagtcatatatgctataattttatctataaataattatttaaattttattttttcataatataaattattgagagttttttataaaagtttgtatgagaacttaaacaagtacaacatatacctgaaaacaaaaattaaacaaagggtgaaagaaactttatgaatgaaacgtatgtattataaacttgtaaaagatttttagtaaggttattttgagagaagacagtagagaagctgatctagatgaaggaacgaaagggttaaatatctgtaccataacagcaggtgtcagcaggatgtagcgagtttaaagcaaggtagcaaaagtagagtgcgcataaaactcttcacaacagacagaaaaaataaaaacgtctcctagttaaggtctcaatttgtagagatagagagatagagacacacgtatatataataatattataatatttgcttcaactcgaagagagtgagtgagagagagagagagagacgtagtgtagaaatacacatttttctttacattttatttagaaattccaaatatatattgattgattattgaactgcttggctgtactgtttattctgacaagtaatgaagtcatgcacttaaaattgaactcagctcttcaaacaaaaataaatgaaaaatctctgttttcaagctaaactacacaaatatgtgttaactctctctctctctctct

SEQ ID NO: 53226 - DNA, 800 bp, Cannabis sativa
ggcttacattgagctaggttttctaggatatagataaagacattatataagaagcctaaaatcctaatttacacttaaaaccttagatgttattatatttaattaattaattagaaaagaacaaaatgcaattgaacttagatattattcaactattctattgggcttttagggcctaattcacaactcaaatggtgttgtccacgtgtagaagtgcataggaaaccctgtagagctcctcttggccggccagacccctgtgggaagcaggttggccgaccatggtgcactctaaaggctagctggccacagggttaggcagctccagtgagggagttggtttgtcacttgatgcccgtttgagtgttagagtctctgtttgcttaggtgttgacttggccttcttattggtgagttgtactgccacgtagtaatggttttttccacataagcacaaccatgtcataaggaaaaaaattgggataatatttgcccccaagtccctgtgcggggacgtttgtacagatagggacttacgaaccatgttggtgcggtcaggactgttgtaacctttgctgaaataaaagttgttgcatgtttagccttttgatgccctttaccttgactgtttgatctcattagctgtagaaaaataaatactttagctgtctttttgatgtgtaggtgaagtaagtgaagaaagggtccaacatgtactatataagtactttttttttttagggaaaggcctttttgcacttttcatttttcacatcttactttctctcactaaaaattca

SEQ ID NO: 53227 - DNA, 562 bp, Cannabis sativa
aaaagaaaaattgagtcaaatcagatgaaaaagcatctaataaattagactaataataattacattgtttaagaaagttaattagcatatcaatgacgttaaagtttggttagtaatattttttaatattattatttaaagttatttaagatttaatatttaattgcaataataattagaagatatggggaaatttaggcacattagtacattttagcatttttgtaaataaaaaggaaaggctaattagaattttgtctcttaaattttgatatgtactaagttatgtttttaaattttatttatcgttaaaaatttctcctgaattattaagattgttagatttaaatacttctgtctaattttttttaattttactaattcggcaattgtttatgtactaaattatgctcgctagactttaatatttattaaattatattttttgaattttaacatgtagtaaattatgtctcttaaactttcatttatattatagttttttttattaaaatagataaaagaatttaaatataataatctctataatttagaaaaaaaa

SEQ ID NO: 53228 - DNA, 3525 bp, Cannabis sativa
tttcataattaagcctaagccctaattatcagctagttccaattccaaattaaagctaagtggtctttacaaatggttgactaaagcttctacgatagagcttgtcggcataaatgacatactgagcggcttgacatcgcagttttttggcttaagttttatcttaaggaagtgttccagttttcaagtagtcaactatcggggtcatccacgtgacctttttggctgtatcaacttccatcatctcatatcgattgattgttggatgagttaatacatctacaggaattacgtcgagtaatcctacttctcttgtcgaggccaattgggccatagcagctgcatgagaattataagcacgaggttatctacatacaacaatctttttaaacttttgtaataactcacaagtataagaaagatatttggctaagcgacctcctcttgctaggtactctctattgacttggcaaaccacgatctgcgagttactaaaagcttgaagatactcgactctcgactttcactttcatctcaagagtgagttttaatcctacgattagagccttatatttggcttcgttgttagatgcaagaaactcaaatataaaggcagcctgtaccttgaatttgttaggaattatgaggattattccaccccctgatccttcactgttgggggccccatcaacatacaaagtccacccctccctcgttggtatgtcaggatcaactcgctcttatgtgattatagccacttcgtcatttggaaactcgagtatgaaatctgcaagggcctgtcccttgattgctgatcttggtttgtacctgatgtcgaactggctcagctctactgaccatttgagtaatcatcttgaggcttctggtttggccaaaacttgtcgtaagggataatttgttaaaacctcaatgttgtgtgcttgaaagtaaggtcgtaactttcttgaagcgatcaccaatgcaaatgctagtcgttccgtttatggataacaagtttcaacgtctaagagatgcttgctcacatagtataccaaccagttgtctaccttggtcttcgcggattaataccgaactaatcgcgtattcggacactgcaaggtagattgataagacttcttcaggcatcggcttggaaagtatcgggggttgccccaagtttattttgagggcttaaaaagcttattcacacttttcagtccattaaaactttttatttccttttataatctgaaaaaactctttacatttatcagaggaacgtgatatgaagcgatttgatgcaacgactttacctgtaaggctttggacttctttcagtttggttggagatcgcatctccaccaaggcttttatttttgcgggattagcttcgattcctcgttgatttaccataaagccgaggaattttcctgaccccactccaaagacacatttgagggggttgagttgcattttatattgtcgtagaatcttcatggcctcaaggtgagtgacatggtccttcacatgttaagattttatgagcatatcgtcaacatacacctccatagtctcaccaattaaatctacgaacatcatgttaaccagcctctgatacgttgcccctgcgtttactaaactaaaaggcattaccttataacaatacaaacctcaatctgtaatgaaggaggtatgctcctgatctggttcaaacatcgaaatctggttatatcctgagtatgtatccataaagctaagaagctcatgactaatttgggtagaatgactcccttatgaagccacatgccaaaagacgatctacttcttatttaagcgcttggtacctcgcggggtccatttagcggtgcttttgttggacacctcgcacttcggggtcaatgttcaattgatgacacatgacctgtggtgatatttcgaccatatctgagtgttttcacgcaaaaacatttagattttgtttgagaaaagtgataagcttttctatctgtcgaaaggttagcttagaaccaattttcaaaactgtattatgatcagagggatcgattggtacctcaattgtctcttctgcagtgtgtgtagtattagtgtaatcgaggatccttagatccagatcaagtttttcttcatgcaatatctccttgattctggaaacttcctctcgaggaggcggtgcttccagtaggtatatcatgtttattgactttttcttctctgtgagttttagtgctgtgttatagcactctcttgaatccgattggactcctcgacagatcctatacccgtgggggtagggaatttcatcgtgagatgatagatagaggtcactatcttcatttctttcagaatggggccacctattactgcattgtatgccaaatattgatcgatgactgcaaaattggccatcgatttggcagtgacaggagcggttcctaaggtgattggcagcttaatcattccttcaatgcaatcgcaaatcttttttctgtaaccccatttttttaaaggcttgaaagttgagaaggttaactgaactcccattgcccactaagattcggtggaaattatctcctccaatattagcgacgattacaagcgcgtctgcgtgtgggtgatgaactcacctagcgtcactctccatgaagattatgtcgtcgcattctttcttgaaaagcttctaaggtgctcacttaaattgttcacgttggtgagcggtctctcttttgtttccttagcatatcgttcatgtgatttcttggagtctccagcaatatggggtcctccgataattgtcaagatattgcaaggagttcttaaaccactcgcattgtttgtattgtcattatcatccacttggggatgactttcaccatgtttctcatacttgccaaatttttcttgtctgattagtttctcaatctcatcctgtaagaaccaacattctagagtggtatggtcgatgtccttgtgatatttgcagaacttttttggatcccttttgtcgcgattacctctaattgggagaggttttctgaagaccccattcttttcctcaatcgcgtaaatatgatcacgagggactgccagctttgtatagttaacgaatcgcggtcctcctttcctctttggagatgtttccttcatttagggagacttggccagcttcggacttcgctgcctctgagggttgcatcttctcgggcttcttcctctagaactctttcctctaggacttcgagatcgtgaccgtggtacaggtgactcgagtttatccttccctctttctagctcaaccagagaattttttattctcttatgtggctcggccatagcgaagaattctaccaccgattctggtattcgagcctgcaactctttctagaagtcagtccttggtaaggcacctgtaattaacatacaaactaatgaagactcaagggccttcttgactttagttactttagcattaaaacgtttaaaataatcctgtaaggactcaccgac

SEQ ID NO: 53229 - DNA, 2115 bp, Cannabis sativa
attataattataactggattgtgtgttaaattttaaatttatatataatttttatttaaaaattgtcattctaatataattgtatttttttggtttggtttgggtttggtttgttggtacaaaatggtagaaatatttcataaaggtccatttactggtcagggccataaaagcctatataagatcctaacaacgtcatggcatgctcaattatctcttaacttgctatgttgggctctttaaccattgttatagctcatcatatgtattcgatgtcctcttatctatatctagccactgactttttattctttttatgtaatacttttttacaatttattggtagattatttacacaaaaaaattcaaaaattcggtttttgatttttatggttataatccgaaaatcgactgaccattttataaatgtaaaaaaaattgattgttttaatttatagtttggtcggtttaaaccgaccaaatcgagcttcttttttttaaaaaaaaatataagtttttaaatttgctataattatttaaaaactacaaaaattatagtattgtatcaaatatcatataatttaagaacataattttttagttaaataaataatgtaaaataattttttttagatttgctcaaattattttgtgctactagttggtaatgagatattaaaaacttgtattattatatgaatgtgtgtatataatacgtaaatacatcaaattataataaaataaagcaatgaataattgagattttaaattaaaaaaataacaactaaaactagtttaataaaattgtatattaaatatgtacaaaaataattatattatatatgtatagtatataatatatatatatatgtttggtcggttcttggttaatcggtcggtttaccattaacactaaaaccaactgtgcaaatgcgattttaaccgaaggtggatttttcagtttttaattttttcaatgtcggttttttcgatgtttggacggtcggtgaactcaatttgatcagtttcttggattttttgctcaccctagtatttttcaagaaggtgagttatgtaagatttaattagcaaaaatactctctttactagggactaatttggtaaataatgaataaaataaggacatttaagttaaaaatgttataatataaatattattaagatttaagagagagagatagttttggctaaaattatggaaagggaaagaaagagcgccgaaagctgcacatacagagactctctctgtttttagtcaaacctggaaaacaagactcatccaaattatttatatatataattttaattattattattaattttgataattaataaaaatttgattattataaatgaataggtttttgtctcttgcaaaaaatacaactccaggagtaactcaatagtatacggcgtggactcatttggttttttttttttaaaaaaataatttttcgacataaatttttaagtttaagagtacttaaatttaatttaactgtaaataaatatataagtttaatttttaacggttataatacttaaattataattcaataacttctgtagctacttggatgttttttttacgtggtagctacttagatgttaagtgttaagtaaattgtcacgtggtaattcctgattggttcaagtcactaaatttttatttaaaaacaaaaatagtttaaatataccaataaaaaaattacatgtagataataatttaacatttaacgatcaggtacctaaagtatttcaaaatataacttaggaattattactgtaaaaaattaaacataaatttttatttacaactagaagttaaacttaagtatttatgtttatgtcgcaaataacttgagtattgatgattaattatctttgccattttgagtttttatcttcagaaaaatatattaaaagttgtttcaaaattaataacactaaatctattttaaaattttcctttataattacatttaatttaaaaatcatatgtcaaaagacaaaaattaaaaaggaaaatttcactttttggccttaataatacaagccatatcaaaattgataccctcctttaatttgtacaaa

SEQ ID NO: 53230 - DNA, 2278 bp, Cannabis sativa
  modified_base (958)..(963): a, c, t, g, unknown or other
  modified_base (1078)..(1084): a, c, t, g, unknown or other
acataatgttgatctcaacatatttctaattttcaaatagaaagcatctttaccgtatcgtgacttaccattacatgaagtttagaaggaaatggattactacaacatattcatgggaaatcttgatttctgcaaagaagtaatgttttattgctgagtcttttctttttacatcctaatcctattcctattgcatatattttatttgttgtaattctaaacgttcttgtagatatacattccgattttatcgtcaagccactattgccttgcttgagttattatatttctaaagaaggtagaagtgtgggactcacttgctgatgaaaaatctccagttcgacaatcttataagattaaagaaatagtaagtattgaattcattgtatggaaaacgagagatttataattttattgcttaatttttgtattgtaaacaattttgcagttgcgcaatctagatttggcaatggcgaaccagattaaaaaaagaccgtcaacttttagcttcgctagtttttgcatcaatcgtgctcaaaacgttccaagacaaccaaatttctttgattgtggagtgtttgttgcattgtttatgatacataggtgtagacttgataaaagatcttttgacgtagttcatatttttaattaatagtgtaaatttaattatattttattacatatcatattgaccaaattcctttcaacagtttaattctaaagaataacgttgtcacttagcacagtggattgcatgttccaactacaataaacatataagcaaattgatgaataacgttgtagaatatttttataattaattttttttatttaattgaaaaaattatttttacattatatgggttaggattagtccattagctgaaagaaaataataataaaaaagtttttataaaaaagttaaaattaacttaaatatttttttatataaatatannnnnnaatagtgtaaaaagaggtattttttatatatattttctttaattaagtagctaaataaaggatagaaattcaaatttctcgctatcgaactaaaatttaatggtttaatattttnnnnnnnaatatttatagttaaatttatttattatatatgaactagtaaacaacccgcgcttcgtggcggatatttaaattttttaaaattatattataaaaaattataaattttatttaatgataattaactaataaattgtatcgaattttaattttattaattataataatatgctaggcttgacccttattttgagggtgaattgtcataagaatacataaatttataaaaaaaaaaactcatcatatgattttaaaaccgttctcattatcgtatcttacttctagtcaacatatagtgttattatatatcgtcatatctaacttgtagttaattattcttcccaacatatttttctgtatacaaaacaaatcaaacaataaattaactactcatttttatacttaaatgaatttaaaatgttattatagaagaaatataccaaataaaatccataaattaataatgagaaaaagaaagaattgtaactaattagatattaagttattcattaaaggttacagtgaagaaaatattagaaattaaagaatcatcatacaaaatagagatctatattaaaaaaaattgataaatttagaaaattatatgattcaaaaccgctatcatcaccgtatctcacttatagtcgtcagttgatcatattcaaagatgttctcatcatcctaatttcacttgtagtcatcaattatcccttccaaataggttttctctctaaataaaacaaaccaaattactttattatagaagaaacataccaaataaaatccattaattaataatgagaacaaagaaagaattgtaactaattagatattaagttatttattaaaggttatagtgaagaaaatattagaaattgaagaataatcacacaaaatagagatccatacaaaaaaaaaattgagaaatttagaaaattatatgattcaaaactactatcatcaccgtatgtcacatatagtcgtcacttaatcatattcaaagacaattcatcatcctatttcacttgtagtcatcactatcccttccaataggttttctctctaaataaaacaaactaaattactgccataacaacatacaataatgaaaaatatgatgaatttataattatttaatatgacatgatactaagtactgcaataacaacaataataatttgtaaataatatgata

SEQ ID NO: 53231 - DNA, 989 bp, Cannabis sativa
  modified_base (56)..(64): a, c, t, g, unknown or other
ttgggattaaagatgtttggagggtattatttttacatttttttaagaagcatatnnnnnnnnnttatgttttttttaagtatataatgtcaaattatgtatttatagagttagcgaagggacttaactacataatcctagttagattgagcctgctcatcaaaagtttcagttaactaaaaaatctcacatttcttcttcaactagactttatacacacggatgttaagtccattaactattaatcactaacaatacgagctaacacatcacagaactatccaatcaacccgagtatcaataaaactaataaaagttaatgtaatcctaaataaaaattttaaaacaagaagcttatggatggacccactatttttgtgataccatattctccacaaaaacaccaatagtaactcaatttcttattttactaagacagccataaaatcaaccaacttcacaatatacagaaggctagagcaaccctaaagagcatggaacgatgtcttcaatcccacaaacaagacaagtaattgtcatggggactttatgagtggcgagattgagagtggttaggaaccaatctaagcaaggtttttaaacaaacactttaactttaggagggatatatagaaaggctctaaaaatacttccaccaagaggaaggaccagaagaggaatcatgttcctgttccttttctgaatagtctaataacattctagtaacgactcttcacagtgtacccacttgaagagttatagtgccaaagcaactattcaacccattgttgggaccgaggtaacgatagcatctggcgagcttcatccacaagaaataaatcatcaataagctttcgtccaaatcaccattagagagtttgagctcactcaccatagagataagaggttggggttgaaatgaataagagagtgcaacaaacctttttagaatccatatatgagacttaatattcacagtagtatcatca

SEQ ID NO: 53232 - DNA, 962 bp, Cannabis sativa
aaatatgcttgaaaatggttacaatactcggacatcaataaccctcaagctaaccatcttgatataagagccttgtatctcatgggacataaaaaaaatagcactcaacatcaccatcaaaatgatcacattgctagaaaagaataataacatggcaattagccattagtaaacgaaacatgctttaaattataagaaatgtactaaagcttactagaccagcttcaccgttacctcagcaaatctgaagagccatagaattttttttatgagcagtataacacatcatccgtcataaaaaatcacagaagtgttgcctgaataaccactcaaaactaaaaacatttataatactggaaaattgaaaaaccaaatgtatcagcctcattatgcatccactaaaaataaaaaaacaatagcgaacattagtgaaaggatgaaatatataatctagggaacttcattcatctctaaagcactgtaattcaacagctaaagagtcaaactcaagccccatcaaaaactcacaaagaaaaatcattaaaaaaaaacaaagtgtttgtctcatggccggccgaataggtaaatgcagcgaagccactacccaagacaatggaatatgagaccacccgaaacggaggaactcccaaaaatgggagaaccgtcaacgttatcgagattttttatacgacgcttacttgggattatacaaacattaaaatagttcgctcccatatataaagcaggagacttcctcgcagaaatctcacgtcgaatgattaatacaaaattctgctcagggaaagtgaattgtctatctcattgattttctttcgaaaatctccgaagtctgacatgtgttaattaattcaaaattcctcactgcagaatgtttaatgaaagagcaacaaaagagaattgatatttgtagctctcattgaaatataaattttctactcata

SEQ ID NO: 53233 - DNA, 1177 bp, Cannabis sativa
tctttttcagcctatggtggtgctgaaggtattctgcttaaaattttacctcatgttgtatttcaattgtaaattccacaataggatacaatgctcttttgtttttagcatgagaaaaaagaaaaatgaagttatatatttatacacatttggttttatttaatttggtgatttatatttaccaattatttgctttattttgttttcagggtggattgagctctggttataaaaaaaatgttgcagagaaaggtttgacagatgaaacttacacagcagacagtatcgctttgattaggatttctggaacttccattcataaaaataaagtggtccaagttgatgcggtatgttttctttccagtagaagtttcatggtgttgcctatccctgtgataatctagactattttgtctttaggatttgatgatcccatatctatagagattgttggcctcaggtgggttgtgagaattaacttcccaaaactgtcatttagttagaatccttactgaaagttttcaatgacagagtaccataaaatatttttctggtttctcaataagataagaaactataaccttacctttatcagtagtgtattgcatcgcaagagcctatccttaattgtactattcgggatattacatttgatatggatctcttctttctcttatcaaagtgcacacaaattcacttccatctgcatatgttcacaaagttcagcttacaggaagtcaaaccgaaaagcttagagaacagaagagaaatgatacacttacctttcaaaatttaagtttcagaagttcatgaaacctactgctctttcattttgcaaaatatgtggatattttcatctatgtccagcaagtaactataaattgtggtctctgcttaatatatctgtcatttttctttaggtagcagcatcactgaactctgctgagtgtttcctcctacaatctggctcttcatttttcacttggcatggaaaccaatgcacgtttgaacagcaacagttggcctcgaaagttgcagagtttatgaaggtatacttctaggcaaatgttaatgacatgaattaaataatttagcagatatctatttgattggagtcatacaattgtaggtcctcttaaagcttgagcattactgaaacataagtttctagagtttc

SEQ ID NO: 53234 - DNA, 3287 bp, Cannabis sativa
aaaactacagggtaaattttaagagacttcaaaaaagttaagctacaaaatatagtgagagcaaactctgtagttatgtaatatattaggtatatatgcaaatatttcataccgaatcagacataagggcacggtcagggtcatctactatgggagagagagtcccatcatagtcaagaaaaatagctattctcttgttctttgctttcttcataatttgactaaaacaacttagtgcagatggatacgttagctgcaaacacacaaaacaaccttattattattattatggttgcgtacaatattatcatatataccttaaacaatctagaacaaagattttccttaagatttataagtcaaataagcatctagactgagttttgattcaacacaaataagtgttcaaagtcaaacaatcatctagacaagaaatttaactagttcaaaattggtactatttttttctacaaaaaaaaaaaaacacaaaaaaatcccacatcgataagacatagagagaaatcagataattaccatccatgatgagtcagagtcatcatgatgatgatgatcaagtgatgatgagaaatccttcatgaacttcttccttggaggtgaagaggatttcatggcatcaagccagccattggagcgaacatcgtcgagcatagccgaaggcttcttcctcggaatcaaaatacatttgggaggagagaaagaggctccttgctgctggtgatgatggtgatggtgatggtgatgatgatacaagcttgaatggccgaggcctaatcttgacttgttgttcacagaagatggtgccgggtcagttagcacaggagaagaatgacttgatttcaactccatattttgtgtataaatgtttgttaatttaataactatttgatctggatccagtaatattaatagaatgagttttgatcgatcacccaactcttttgtctatgaaaaaccacctcttcaatgttttcttgtcactgctgctaggtgagcaatcggccattaaaaactatattcacaacaacaacaaaaaaaacacactcaataataaacccaaccaaccaatcaataataaaaaaatatatatgtatatatgtatatgtaccttctcatcccaagaactacaatgcatttatagcaagtaacccatggtggtgacgacgatgatataataagcttttggggactgagtaaaacagcacctataagaataatagttagtaatgaaagatctatagaagtttcaaaatatgttgccaaaaatggtttttctagaaaatggcttcataatatttaagagaatgaaagtagaaattgtttacaagcccatacgacattaattccaataagtccaaacaagcacaacatatatataaatatatatacattattataaataatatacatatgtttgtgctatttctcatttcatccacgtatactttacatcacccacgattacacttacacaaagatataataataataacaataatatagtttcgatttcctcttctctggtagatttgcacttaaaatataaatataatatatatgtggactatatatatttacatagatatagaacatagaaaaacagaagtaaaaaaataaaactaatgcaatgcaactcatattgtgggccaagaaaaatacatatatatattatatatatgtacactgattcgtgtagatctgaacatgagttctcgacatcaaaattgcattatttcaaaaacttaaaaagaaaaaggtcaattgataatatatatattttctgtgtggtgacaagacattacaaccaccaccgaattaaacaaacatgccccaaaacattttttttaatgaagaaaagaaaacaaatatatacaatgaaagaagtgagagtactacaaactcatatcaaaaggacaaattagtagagtaccctctacataggtggttgaactttatatatatatataagaggtaatattatgagtagctgcaaagaaagaaaaatgtaaactttacccaatcaacaaacaatgaagaaaattatatttgattctagcttcaatcaatcaatatacatataatcatagcttaataaataattaatgaaagactaaatttttaaccagaaaaacaatcccatcagatatatatatatatagtataaaccagacaaacatgacaacctccacgtttgcgacgttttatatatttatgtatatatatataaattatacaaaagctataaatcttccaatatatatatgagagaaaaagaaaaaaataaaaaggtaagaagcttttggtataggaagtttgaaataataaggaaaagattttggtaataataattacctgataaacaaaacgtagaaatgaagaaagcggcgggatcgagtttgagttattgggaaatgaatgaagaaaatataactacccaaactgaaacaccagaaaatgatggagtttttatattttatattttataataataataagaagaagaaagagaggaggaggagaagaggaaggatctaaaaccgaaatgcttgagctatttatagactttcttcttcttacagagacgtctttcacaaggaaactccttcctttccgggtttttttagtccccaaaaaaacacttcaaccactttattcaactttatttatcattttcttcaaaaaaaaaaaaaaaaaaaaaactttatttatcatttggggaattttattagacctcttgaaactttaagtactctcaaatataaaaaaaacaatagtaatttcatcaagttgcctactattattatgtagtattagttagtattttttttttatataatttttattaaaataaaataaataagacttaatattaaattactttaataacgttattttaacttacaacaccattataagaatatctcagagcaacacctatagttatcaaaatacaaacattatcttaaaatatatatatttttttattttctctcatatatataaaatttaacacatttttctacaaaatttactctagtggacaactccaaatcgcacatagcactttgaaaaaagtaactttaattaataaatgtcacatagtcattgttcattttggacaatatttttaaaattagtttgaaatgtggaccaaaatgtacctatggcaaaaatcactttatggacaaccctcattctttatttctttttttaacaagacggacaaccatggtttttttttttttttttgaagaaaagcgtgcatatat

SEQ ID NO: 53235 - DNA, 833 bp, Cannabis sativa
  modified_base (776)..(779): a, c, t, g, unknown or other
atcttcgctattgatgacaacagagaaaatgtttgggataattctttggaaaatgcttggaattggctcaggttgatgaaatgtcaacctaggcgttggggccctagccccaagtcatcctgggtgctaagtccttattctggccactagatgtccttatttgtttctagaaagcactcgtatcttaattgttgatgaaaataaagaatatgaccagaagacttgttagaattgttgttggaaacgacccaggtcgacaaaatgtcaaccttggcactagtgaccatgcccaatgtcaacctaggcactacgtcacttgtttggcctccgagttgatttgtttgtatctcgaaagaatttgtttcctcatttttgatgaagatgaagatgaagaaaattctcgggagacatattcaaaaacgtggttggaagcaccccaggttgacaatatgtcaacttggacgatgggtgcccaggtgcctcaaatgggaagtgttctaattctgattctagtacctctatcatgtttatgacatgtcttattcatgtctaagtacaaggtttgagaaatctgtactaagacaaagctaaaaactaaaaccataggtccaaatattaacctaggcgctgattgaaaccctaggcgcccgagttggcttctaggatgccaaattgacatcttctagttctcaggctatatagtggcaaaattgtactagagatttgcttactttaagtgtacaaccatagttgtttttttgcccaatattttattnnnntttaatccatataattcaaccctaagccttagttgaaacactataaaatgaaca

SEQ ID NO: 53236 - DNA, 834 bp, Cannabis sativa
cttatagcttatcattgtggtgttgtctggttgttatgttttcaggtagtatctctgtattacaagcggagaccttggcccttttggttggacctaattgggctctctcatgcagaatccacgttaaagaggttttttccgattctttgtctctagtcacagctataaacaaaggaagggtctttttcaacgagctgggtgttctactagtggatgtcatagctttattgtcccatgtggctcgggatgcgaattctgcagcacatggtttggcaaaacatgctcttcggttagacaatgagctatcctggttcgaggaggtgccgccgccaattgtggattgctgatttgttaatcatgtgtgattttgatcaccgcgtcaaaaaaaaaatcaaagctttaattaagttaaaaatcactttttctttattaaaattaagtaagggtagtaatatgggtcaaacacgataacacaattcaaaactcacacgaaataaatgggtttagatttacctttaatgagtttgatcgtttttcagattacatatctaacctatttattaaaatagtaattttcgggttgattcacctcattcgaaaatgacacaacaacttaaaatatacattattttgtttattatagtttgttacatattaattatattaagttaattaaataggacataactatgttaaatgatttgtaaatgtatcataaacatgttaaactaatgggttgataagttaaccaaaatgtagcatattcctttataaaaatggatataaatatgttacacatattggtcttcaaattcatgcagtttattcagattc

SEQ ID NO: 53237 - DNA, 962 bp, Cannabis sativa
aaggtgctcctgtaatgctccttaaaactttaaaccaaattgaaggactctgcaatggcacaagattgattatcactcgacttgggaaatggtcagttagagctgacatcatttatggaaaaaatattggtcaaaacgtaacaattccaagaattatcatgtctccaaatgaatcaagatggccattcaagctaaacagacgataacttcctttggcaccatgttttgctatgacaatcaataaaagccaaggacaatctcttaaatatgtgggcttatatctacctaagcaagtattcacccatggtcaactatatgtagctgtgtctcgagttaccataagggaaggattggccatactgaaccttgatgatgaggaggaagacaaatccttcatcaaaaatattgtttacaaagaaatatttcaaaatattcaatcctcaacccactgaataaaggtaaattgcttaagttatatattttattataatacattacaagtttatcttagaaaagaaataataaaatcgattttaacttattttaacagaaaaatcaatggatcaagcactcaaattattttacaaattcatatttggctagattattcacaaatcacaagacatcgttaccaataaggtaaaatattatggtcttacaatttattttttaacaaaataaaaaccccattgtcaaaattatacatatttttatacaatttctaactctttctcatttttaatttggtagcctcaatttgaatcattctacctaccacacaaagtaagttacaagaaataatagcaacaaaataaggagcaatattatgaaattctaatattatcaaatttatcatatttattttgctgtaaactaaattaatttaatactattccatgctttatttctttcgtatatcacgttttatattattattcaaggaagaggttttaatggttaca

SEQ ID NO: 53238 - DNA, 652 bp, Cannabis sativa
gataaaagtgatagctcccacctaaaaatctatatataatatatatgatataatatgatatatgtgtatatatagggttgtgatggatcgattttgctggatggagatggtagtgagaaagaaggagctgggaataagaactcagcaagagggtttgatgtgattgacacaataaaaacagctgtggagaatgaatgtgctggagttgtctcttgtgctgatattcttgctattgcagccagagactctgtcctattagtaattaataataattattaatctcaacttaattctttctttctttttgttcatacatacataatggggttttaatatatatgattaattaataatatgtatgtatatagagtggaggacgttcatggagggttttggttggaagaagagatggattagtaccaaacaagacaggagctgataatcttcctgctccatttgaatctcactctgtaattaccaccaagtttgccaatctaggccttgatctcactgatcttgtatctttatcaggtatatatatatatacacaatttattggttaattaattaatgtatatatgtcctcactcagtggcggacccagaatttaaagtgaggggggcgtaaataaatttaaaaagaaaatataaag

SEQ ID NO: 53239 - DNA, 1210 bp, Cannabis sativa
taataataatgaaagtggtatccaattgtccatgtcttcatccataattaatgagccattggcatattcgcctaggtatggtagccactgttaatcaattttcaattaataatcaaagcttaagtttacaaactttgtggaccaaatggtatacgacgaaggttactagctcgcgtagacaattttcctttccatctctagaaacactaaacaactatactaatcaaaattaaaatgaagttaaattctttgttgtcttccaacaacatcatataataccaatgtaaaagttgaatctcttctccatcctaggtggcatacccaaatcccttactaaaaataaatttatgatcaagtaattatttcaacaaacaaaaagtttgacattaatttttatcgtaataaaaatattcaagtatatataaatcattcattattattttgatatatacaaacaattgagccacaaaacaaacaagtatatataaatcattcagtactcaatactcacaagagaagagtcccctgccaatcgattcctctgccaaaaaagctaaccatttttgagaatcaattcaattcagcataaacatagtattcatttaacatcatcatcatcctaataattaaataaataaatttccaattattacaacacaaattattactttctatcagaaaatatgaaatgtaaatttgagagtgaatttttttattcttgtaatgttgtaaagagagaaatactaaaaaagaaaacatcgtttcatcacatttgaaatcaattccccaaataatacataaagatcaagacgattttaacagtacaactgaattactgaaacaaattttatccaaaggtgttgtaatgctggaagatgactataaacctattatccttcaattccactcaattactctttcggtaattaaactacttccacttccttttttgttcgactcaattttcttggtaaacaaacaatccatgatgccatatgataagtttggaccaaaattcagattgaaatttgaaacgactgaccaagactaacaatcgacaatcatcgagtaaataaaaatacttgaaataaaaccagaagaaacctgtaggaacaactcaatcgaggaagaccgccacaaccattttcgatgataagagaagatatatatatatgtgtgtgtaaaacattcatgaaacccataaatagag

SEQ ID NO: 53240 - DNA, 734 bp, Cannabis sativa
tttacatacccatagtgatcgtcgggtatcatgatctccagcatatataatctgcattgtagtatccaacaatcttaacctcatcacctttcttataaaagagaccatagttaatggtatttttgacgtacctcaacattcgtcgaacaacatccaaatgaggcttctttggatgttgcatatatcagctcactactcccactgcataagaaatatctagtcgagttaatgtaaggtagcctagactacctacaagttgctgatacattgctctatctagcaagtccttcccagcataagcacatagcttagcattagcttccataggtgttgagatgggcttgcactcgagcattccaaacctttgcaataagtctttagcatacttttgctgacaaagaaaaataaaccttcctcagtccagtcgacttctaatccaagaaaatgtttcaattatccaagctccttcatttgaaagcaaactgacaagttctcctttgtttgacgaatctctgctttatcatcaccagtaatgataaggtcatcaacatatacaagaacaactgcgatctctgcttcttttattttgatgaataagcttgaatctgcatgtgccatgacataattgctctccactaagaactcagcaatcttatcctaccatgctctctgagcctgcttcaaaccatagagtgtctattctagtttacaaacataatttggataagccctat

SEQ ID NO: 53241 - DNA, 1772 bp, Cannabis sativa
  modified_base (428)..(440): a, c, t, g, unknown or other
  modified_base (1723)..(1728): a, c, t, g, unknown or other
ttaattaattctaaaaaatgaatgtttacctcttagtaacctgctattacaggtcaaagaaaaatataaccatatggttacaataaaaatgtaaccattgaatagtctgtaacatttatatctaaacataatatttatagaataataacgttagaccttgtagtcattataaaataagttcaacggtaagtctgtaacattataacagtcatacaacttatgagtaaacgcccacttagccacgtcataggctacataattacaaaactattgagtgacattagagaaattacaaccaagaaaagtagaggaagtgcatcgacagtgacacatagagttttcaatctcccatctgtactcagtccctacaagagagttgatcaccaccctagaataactttcaactaagggtgttcgcggtgcgggtnnnnnnnnnnnnnactattttttcaaactaacctgcacaagcagtttttttaatttcccaaaccacacccgcaccgtgaaactaaaaaaccgcaaaaactgcaccgcaaaaaatagtgcagtgcggtgcggtttgaactatcaccaaataattaaattatcacaaatataataaaacttgagcaacacttgtcaaaagtatcataagacttgaaaataaatatgaaaaaaaagtttcaagtttcaacaatacaatacaataattaatgggcttgagttgggccttcacatattggacctaaataaatataaaaatttgtattttataatatgcagtgcggtgcggtttgaacagcatattaacaattcaaaaccgtaaaccgcaccgcaccacgcagtttaaaaaaaattcaaaccgcgaccgcaccgcgaaaattttcaaaccgcattttttttgcagtgtggtgcggtgcgggcggtttgagcggtttgatgaatacccctactttcaataattacaaaattacacaccttcttaactgtcaaatctaaagccaaacaacaggcagtagcttctctgcaaagagcatttgaaaaatcaagccttgatgtagtcacccaacagaccgcacccagatgatttctagcgatcaccgcaatacacatatgctccaaacctactctgacatcacaatttagtttgatctagtccatcagaagggggcgccaagaatctctacacactataggttgggcaactaagaaagaagctcgatactctatttatcaaaaatagatagagtcaatataaaacttaatgctacccacattattgttatgaatcttatcatttcgtgccgtcaaatggtgtccaccacaatggacgcatacagaaaaacctcatttctatcaatgccgttatcttttagcttccaaagaaactttacccaattttatatacgaataccaatatcgagaacagaaaaaatactccacgaaagaaacttctataaatgataagctaaattgcattgaaggaagagatgctctattgattctttctcaatcctacaaataaggcaaatgggatcctttaagtagaacctcttatttaggatagacagcacagtaaacaaaatactctgctacaaatggtgctctagaattttactattctaaaacatgttccaaagaaatggcgagacattacaaacgggggccgttggagagcgtgaagtaaataagcaaacttatatttaaactattgggtgaatattcaatggttatatttttattnnnnnnatatggttacatttttctttaacctgtaatagcaggttactaat

SEQ ID NO: 53242 - DNA, 1766 bp, Cannabis sativa
atgttgaataaaatggattacattgaaaaagagttttatttagggcataaaacccaacactatgttggtggtgttttaaggacttgtggtattgatcagaaacgaaagtgtcgtgttagatccatcgctcctagtgaatttagttgttatccaccagaatgacttactcgtgaggcacgcgaggggggccagtggtgaaaccagtggcgaagtaagtaccagtagctcggctgggataggcgcttggagcctcgagcatatcagggctagagcaattctccccctgcgagattactttaaagagttcatcaaccaccttggaatagctccattccaattggttccaatttcctacaaaatccttgcaagtctaatggttttgtataaaattctaagatgggagtgtcccactcccctggaaattatctacctctattcgattaaggcaatccctgcgagaaaacgttgtgcaagaggcttttactaccttgcgactcatacaaacaatcgtaggatcattgttgggttaccaaacaagaccactttcaagggagacttcttctggacaagtggcctctccccaatcaacacaactacctttcacataatacgtaagtaactgtttgttccatacttggttttaaattacttcatgtttttaattttggcctcgttgacctatcttatttttttctcttttaatagcggtctcgaaaagaccaacccccactcttgagatggccgaacaacgtaggcttttgctgggtcttcattttggtcttcgatcagctgagtttcttttgagcgaagccaatctgaagtttgttggcctcctagctggaaacgagtatagttgtgattataagtttcctaagtatacgtcgtggcagcatgttctagtccgagctgacgaggaaaaccaagattacgcggctcgggtacattatcttcagaatgcagtccctcgaaaagttgaagaagatgcatcccaaggtaatcaatgtggatggtctcccactattcttagggtgattcgaacttcgttagtaacctttaacgataatcaatataattcttacatttgggccccttcctcgtagattacatcacccatagatttgatagttagtacccacctttcacgttcaacttagttgcactagttcttattatgggattgctgagcaatatgggactatgttggatagagcgacccatccagattggaatttagatccattaaacccctacgacatattcatgatcacaggatttagggagttttgtgaatattatagtcctcattcttcattatcttatgattatggtaactccctttaagtggggattctttcccatttttccccttttctgtttatttaataagtgttaaatgcatctctttatcttgcagatatggatttagaggatcttctccacacttcaagcaagaaggggaaaaagaggatagctgcctcaaaaacttcttttgacgtcaacgtggagcctctcaaaaggcccagtaagacaactacaaataagaagtgtgcctcgcagacaaaagatctcgaggtttctgagaatcaggtctagactcatcctcctgcccttacacacatcgaggagtcagttccaaaaactcatcaggccaccgcttcttcaagttaggcacctgaagctttgcccatcgaggctgggctggttcagggtattgtgcacagtatgctgcatcctactggagccatttctgatcctttcaacccaac

SEQ ID NO: 53243 - DNA, 784 bp, Cannabis sativa
tattttcatatcctgactttaattattataaattgagcctaatattttttgcattccaaattatattatcttataaatatatatatatatctatatatatatatatgttccctcaccaatctacctacatatgtatatatagcatatatgtggaaattataaatgaatatatattggtgtacaaaaatgtacaaaagaatgatttatatataacatacacagggtaaaaaaatataatagcataatataccattataatttgcatggctaaataatttttctttttaattaatatcctgtttgaatgaggccaccttttattttcttttacaaattattcgaaagggcaggctagctgttatacggactgattccctctctttccagcggagaaagtttcattgcatttttatggatcccgttaaaaaacacacaacaatatatatatatgtatgtcacataaatattattacacttttaataaactcagactaatatatgaataatttgtaggtgtgaaatctgtagaggtgaacagaaaacaaagcaaagtaagtgttaatgggtatgtggagccaataaaagtgctgaaaaggataaagagaacgggaaaggcagcagaattttggccttacattccacagcatctagtccattacccttacatatcaggcgtctatgacaaaagggctcccgccggccacgtcagaaattccgtccaagcttttccggcatctaatgcggccgaggacaatatggtctcccttttcagcgatgacaatgt

SEQ ID NO: 53244 - DNA, 1171 bp, Cannabis sativa
tttctttctcagccgcaccttcaatggtttcgtttaaaatggtagattctttaattcccagctgttaagggagattgttttgtcagcaatgagaattgctttcttggattgtgttcttttcgttttctttcttcagttgtcgattttggtattgaacgtgggttggatcttgatttgggtacatatggtgcattgattaagaagttggttgatttctctatttcttttctgggttatataatttactgttctaaatagtgtttctgtaaaaaaaaattaggttaaaatttaagtgcttactcattatctgagatcagtgaatagaaaaagaactgctgactaggtattgttggatgtaactatccaaaacaaccgcgaccaactcccaaccttctcttaatatctataaaattgctgattgggtgcacagcctatccaaaatgagtaattaaaatgatatacatcccatatagcaacacttatatctagacaatgataaaagaagacaaatatatttcacctcaaaagccacaatcttttcaagcaatgagacaaaatcatcccatgtatatacatattcaatagtttttactttcgtcaatatctgcttcttattaatgaacactgggttattggatagcattgttatgcttagtctcatgaggagattcggatcacattgttatgtttagtctcaaagccacaattggtaatatttgccattaatattctctttctatcttcaactcaatctaatatttttacaccaagccatctacaaatttctttcaatgattcatagatgattcacatgaaagaaaagagtgaattattttcatgtatgtttagttaataaaattttataattgatctaaaatttcattttttttatgtactactgagaaaatactttatttattaagtatatcttttttttcaaaaatggtgatatgttttctaattatttaaaacatatttatctattttctaatttttttataattatttaaaacctatttatctattttctcattttttaaattatatattttttttatttttctaattatttaaataaaaaacacaataattttttttaaaacattataaatatctaacaactaagtttcaaaaaaattaaaaattaaaaaaaatctatctatctatatat

SEQ ID NO: 53245 - DNA, 836 bp, Cannabis sativa
attcatctcaggttttgtgcggctactattcatattttttttcgttttatacaccgttatgtactattttacttcttttattgttattattttattttattacacaatcttttctttttctttttctttttactcatcaacattagcccccttgtctgtgtttaagaaagaaaaacgcttaatgttttttctgcacacagacaatttttttactgttcaaagttgataacccacctctcttttttttactacgtcgagggttggtgttcctcctgtccatggatcatcatgctcttctttcacttatatgcatcacactaattttttattactcaaagatgattactcatcaatcttttcactcccatgcatcatactaatctttttactgttcagtgtgattactcatctcttcaattttttactatgtggaggcatgggaaggaagctcttccacctataaattaccacatttttctttcatttccatgcatctccttcattcttcccatgcaacctcctttttgcctcttcttttttttttttttaatattaatcctgaggtatgtcttctggaggccacaatttatctcctcactttgcacgcagcatgaatcccattactgaactaaaagaactctctcctaatgctttttcgtaccttaacgatttacgaaaaaagtatattgtttggagcactctctttctaatttagaggatattaatcgagaatgggcaatgaagtctcatggtcactcctaatggaggtaatagaatatcctttttcattttgcacactcttacaaaatttgacaagattttccaaaacatcactt

SEQ ID NO: 53246 - DNA, 1245 bp, Cannabis sativa
taggtgaagcagtttcatccagatgtgaatagaactgggcaaaattctgatgcaatgattcgacgcgttattcaagcttatgaggtaaaataatggccaattctagtaatgtctatacattactccaatggtaattggttgatgttgttgattaagaaaaataacatgattatgttatgcagatgttatccgattgcagtcgattggagattattgaaaggtaaattttttgaagtgggtggcagatgtataataactaaaccaatatgcagttgtaaactttttatgtttgtttgcagtgaatgtttagatccttttgagaagcctgaatgtgaagcattggatctctttgtgaatgggactctttgtgttgggaaaggtagttgattggttttctcattttctttccatttctttagctgaagtgttcatataattctctaaataaactttaggaaaataccccacactttagagtcagcattgtttatatcaaattataaacattcgtatcaactaaattatcaatttatcaacatgtttttctttttctcgaaaagagaagcgggccacttgtctttggagtacgttccttcattccccggggttttccctcgatccccctaccacgcggggaaaacatctccccaaacctcctatcggtcgtgtcctacacccgtagttcattcacttgttgaggagcatatctttttgaaaaagagtcattttgtcttagactgaccccaccccgttataaatatagaccaaagcctcgtttgtggcggaaaaaaaccgtagttacaaaaatttagtaaaacaacaaaactagagacaaccaaaacccaagaacaacaagcaaaaaacaatgcttagctgattggaaaaacagacatgagaagtccacttgttgaggaacttatcgttcgtgcactacacccgtaatccactcacttgtttccttgctttcactctaattataggtttaggttcttaggttctgcggaggaggaacaccggggtaaatctacaaaagataactcctcaaaatgctagtcttaaatactggttcatcaaattataacttggttttatcaatttaaaagaagtatgatcttcctgttttgataatcgttccttaatcatattgcagggtgcccatattcatgtgtaacaagagcccctcatgccttcacatttgcatctactggaactgcaactgcaacttctcaaggtttcttcagttcc

SEQ ID NO: 53247 - DNA, 1646 bp, Cannabis sativa
  modified_base (1478)..(1480): a, c, t, g, unknown or other
ctacttttgtagaaaatatgtaggaaaccctaggttgagaaactctgcgattcttctttctcatgggttcatgcgattttatagtccataattcttgctttctaaaatgcatgatgcctgtcttgcatcttccttattcttattctaagcttaataaaaaattttgccctaactcgagaaaatttcaaacttcttgagttttgacttttctttgaacattctaattctttaatctattcagtacagcaggtcagcatatttccttgttttatcgtttgatattccgacgaaacactcatcttgtgtgttgtcttttatagatgaacccaggtgagtttagggagagcgaacatcgaatcaaataggacttgcttcaactcctgcaagaggaccatcctcgtctctgttctagcccaccttcttccagtgaaagacattatccctcaaatcttttgtctagccatagaatgatggcccgtactaagaagacaactcgtgtgactggcgcgtctgaccctcaagtgtctcggtgcgccactttccctagcaacggataggattcagccatccagcaggaaggggatcaagaaggggacgctgaggttcaagagattgaggagcaggacaacgtacgtcctagcagtacctccaaggtggaggaagaggaggaggctgaacccccaaactacgagggatacaatgaggcttgggaaccagttgatgctgatggagacgtctgggttgagggcgtggactacgttagtgaggagcttactggcggttcctcacagaaggcaaggtgtcttgggtgccaggtgggggagccctccgtccagggttactgaagcgcgcctgcggactctcaaccatggtggctacctgggccaattggactggtacattccggcccacaataatcgagccacaaatcctgaaaggaggatgtgcgcttcattgggtgctagtgcccagaaaggaggatgtgcgcttgttacctttgcactagtactttaagaatgtggcagacttcttcggcctctgtctggcccagttcactcccaagggcattaagtatctgtctgccctcttcgtcctttatgcctcccagaagtgggatatgccttctccccacagggttagctggttcttttatttgaagtccacccctaagcaaggcagatcagggtacttctatttatctcaaccagacttcaagtggttgacgggcattggggataaggccatctgcaaaattgggcgttttgttgatgagtacttcatggtggatggcgcgagcattacccatactcggttctagtagattccaacatatcatcgccctcccctcactcttactcttagggatagagctcaaaagcttgctcagctgccgggggaagaccgaaatatcatccagttgacctctgagaataactttgtgacgtacaggctctatccgaaggatttcattcctaagnnngtgaaggggaggaagaggaaatcttgtgttggacgggctgaacaagctcatctggagaatgaacttgtccaacttaagcgtgaggctaagttgaaaggaggtgcaagggccaagcaatatgcttaggagcccttgaatcctgaagatgaggctgagcaagagcagg

SEQ ID NO: 53248 - DNA, 770 bp, Cannabis sativa
tggattattctattgatgagatcaataattatcaagtgtttattggagcttcgaaatataggtccatggtccctgagtcacttctatacaacattgtacagaagaatgtttaatttgatgaattactttcgagtgagaattaatttctatggaaaataaatatttaagggcaatgtagtaatttgtgaaattattgatttgattaattatgtcaatttatgaattatataattaatagtatttaactattttattttgttggataaaattatattaattagttaaatatatattattcttaaataatattaaagaaagaaatatattattttagaaaaaataatatttgttttaatcattgtgaaataagagattaatgagaattaatcaatattatttattggcagaataaataataaatcttatttataaaattgagaaatcaattttggacttaaaaatatggctcacacgtgtaggaccaatccatacgtgtagggttgcatataaaggcccataattaatttggtttaattattggttaaaataatcttaattaaattaagctaattatcttttaattattaattaaatgaattattagataattatttaatcaaaaagatattgttatttcaatttttgtcctcatgacatggcatgcttacgtaaacggaacctgtgccacgtggcagcacaactcactaaaaggaaggccaagtcagcatccgagccaacaaagaccccggcactcaaacggggatcaagtg

SEQ ID NO: 53249 - DNA, 513 bp, Cannabis sativa
tatcaaaataattaagttatcaacaagttatgcatgatgtataagttttttattacttagggatataacaagtaatatacatatatatgtgtgtgtgagccattctataaaaagtagtcacattgggaaattcgtgagctagatcaagtctgacttcaagaaatctattctttctcatatacacttctttcgatgagtatcctgagaaaaagagttcttataggaaccttctcgaccataagacacaatgaccaagtcaaaggcaataattgtcttctattttaaatataggtggttatgtatatttcccacctattaattaaatataatgtgggaaatatccacattttataattattgttgttgatgctgaaaattagtcaacactttctcgctaaattgacgaaaaaattaatagaaaaaagatagtaaataagagagacaccacaatttatagtggttcactcttcatgtcgcgatggtaatggtactacgtctacttcgagtttttat

SEQ ID NO: 53250 - DNA, 1196 bp, Cannabis sativa
tgagagtatcataaaggaaatccacgaaggcttttgtagggaccacgcaggttgggaatgacttattcactgacttttgcaagtggaacaaaatcattaagagttcctcatcagtctcatagccttaagctaatagacaagtcaaagcagtcaacaagacccttaaggatactataaagaagaaactcgacacactaaaaggaatatgggtagataaattaccataggtactttggactcatcgaaccactaaaaaaatagcaacaggtcatactcctttcttactagcttttggctcagaagcaatgcttctagtcgaagttaacatctcatcacataggcaatagttttatatcaagataagaacaaacatttactcgaagaatcttttgacttgctagatgaaatgagagatggatctcaagtgagaaatgttgcatatcaacaaaggatcacaagacacttcaataaaagagtaacgtcaaggctcttaaacgttggagatttggtgttaagatgagtattagcaaatacaagagatcctacagtgagattaattaacccgaattgggaaggtccatacgcaattgaagttgttatagcatcaagggtttataaactagcatggctgaatgggttactagtaaaaaatacttggaacaacaaatatttgagaccatattaccaatgattgtatgtttataactgccgatttattcagagtatgtaaatcttaaatttataaattaatggaattttagtattttatttgtctcaagtaatcaaaaattttttaaaaaattacttggtgctatataattatataataatttgatgttttgataactatagtaatatatgtgtctaggaaaataagacttgaaaatactaaaaaataaaatgtttgcaaaagacaatatattcggttaaagttggtctggaacaacgaaaatcgaacattgaagtcttattgtaagcaagaatgaaaataacctatgttgaaaaaactagattatttaaaatcttgcaaacaacatcaagctaatgcgacctgagtgaataacgacttgcatacctagtagttattataaacaaaactctacaaagttttaataaataatatatcagctaaaagtacgaatagacgactaaatactcgcacgtaattgatcaaaaatattaaaaaataatcgaga

SEQ ID NO: 53251 - DNA, 686 bp, Cannabis sativa
ataccagtgtaaacaggagcagtagcattggatgaagtcccatgatcattataattccccaacagtagtggattaccaatagtaattaacttcaccatcgaattattaaacttaggaatctttccactaagattgttataagaaacattaagtaacaaaagatgaggcaagagtgttaactcatatggtatggaaccaatcaagttattgtcattcaaccacaaatttctcaactctgttagtttaccaaaagcagcagagattttcccactaaaatgcctcttgtgaaaattcactacctcaacttttttctcttgtgaatcacacttaacataactccaacctttacaaacatcattacctcgccaagaatctgccaacatagaaggataacccaaatctttagccacttcaagcaacaccatcacttgccaatcacaaggtcctaaagtgtccctacaatagctgttggtacctaaaatatcaacctttttcacatgagaattgaactgaggcagaggaccttgtaacagattgttcttcaaagaaacacttcttaattttgggagagaaattaatgagattggaacgaggcccgtgaattggttgtcgttgagttggagatcgaaaaggttttctagtttcgataagttcgggattggaccggtgaaagagttttgacaaag

SEQ ID NO: 53252 - DNA, 991 bp, Cannabis sativa
ttttgaagtaaatttaataattttagataatcaaagatactatttactcttaaaatatttttagaagaaattaaaattaaaataaaatacacacataatcaaagtgcatggaataaatattttatgtgtaaaaaaataaaatggtcacatacatacctgtagaacaaacacatttataataaaggtaaaaatatatttgactataggatagaatgtgaattgtacacatattttaatatataacaaatttattgtacatttagaatatttaaatatcattctataaagagaatgaataaacatgaaatagaatataaattttacatatattagtagtaccaaaagcaaattaatatatacttattttattatttcttaaaattaatgatttcaaactgttaactcagatttttgttgacaataaatgaagccttataaattaacaactaactatttataattaataaatatatattagacactaagaacttttacgtgattttgtagttaaaatctacatactccacgagtcattatttttgagtaatatgtttagattatttctggtaatatgtttagattacaagaaaattactatgaatattcactcaatcttataaggtctttccttttcaaaataatccatccctttccctttagattctgtccctatttataggttttttagggatgccagttatttcccttttgatcttatctaggtaactgctcataaaacgtggataatccctaggtttcatatttacaatatatgaataaaataaaataaccgtttaataaccgatttttgattttgtcaggaaatagtcttttattgtcgaggtaacacattccaactattgctcgtaacagtgttcagaaatagttggtcatattctgcgagacgctagttaagatatttatcctcgctatagactttcacgacaacttttggactagtctttagagattctaagataagttgcacttt

SEQ ID NO: 53253 - DNA, 1453 bp, Cannabis sativa
atatatgttacctaataaagtaactatctttattacatcacattgcctaattaggcaagtcgatactttaatttgatcctttattgtattgcctaattacgcaagctcgtgccatagtctgacactcatatatcgcataattgcatcaccgaatccctgtgccataatttaacattgtacataatatcactgtgtcacctaatcaagtgagtctgtgccacaacctggcaacaatatgtcgcattgcctaattagatgagcccgtaccatagcctggtactcacatgtcattgccgtccgtacctaataaggtacactgccaggaagaaacccaacaacagtttcagtctatgccataactcgacattcacatgtcactaccgcccatacctaataaggtacgctgccaagaagaaatctaacaatggtttcaatttatgccatagcttggcattctcatgtcactgccgctcgtacctaataaggtatcgccgaaaagtatatcccatcacctaatcaggtgagcctgtatatcacattcatggtatcatcacattgtcgttgcctaattaggcaatctttttattacataacaataataactgtatcttaatctcaatatcaatcaattctcaacaatattaattgtattgcaatataacatgctatgtagtacaatgtacttttcttacatttgatccaaattcatgcatgtcggtcaacccaagtggagaaacatccccgatgatcttggccctatgtcataacaacagtaaaccaataagtgtttatcccaaaacgttgcttaatagttgcaaagggaaatttaaggtttcctaccaaaccctgtagtacaaatacattaaaataaaacttatattttggctctaaaacacacaccataatgtagagctcattgcaagcttcaaaatggtatatataacgtccaaaacagacattcgagtgaaaagttacaacaaaaatacgattcccgatttcttgaaacttcccaaaaacggtaaaccggttgggaaatggttaaccgcttccccaagaactagttaaccagttcaccaaccggtggaccgatttggcaggggtaaaagtcaaaaattccaaatttttcactcaccaaaacgctgccgaaacctattcaaatcacttcaaacttcatagggcacacatataccataagtacaaccattctgatgcaataaaagttaaaatcaagcccttaaataaaaaactccattaatgtttagacttaagctttaaaaagttctaaacccgatttctaacttaaaatcacctcaacagcaagtaaacatcgaaactagttccatatttacccaagaacaattctatgaagtcaaaacttccataaccactctaaatcacaaaactactatataaaaccaattgtattaaccttaaaacaaaaccaatccttacc

SEQ ID NO: 53254 - DNA, 1752 bp, Cannabis sativa
taaccatatttcttggtttaacaaattttactttttttctgttaaacatcaaacaataattttcaaaaattttaaaataataaataaataaaaatattggccaagtagttgaactaaatccctatttttttaaacagttttcaatagagatattttaaaaaattaatctaactaaaattccaaaaatcatggcaaaatgcggttatattatgagcatgcttagccaatttatggtggcaatgttaaaattgtaaccaacatgagagattattgctaagcaacatttacgtagtggcatcaaagaaaacccaccaagcaacgattacaactatcacgagaaagagccaaaaaaaagagactacattaaaattcataagaatgtcttacatctccaagtcggcggaatgcaccataaataccaccaaataacgttgagaagattacataccaaatctgggaatccataaaatagacctgcaaaattttgtaatgtcaaaaatctaatcatgaaggctgacatgataagaaaaatatatatagggagagcagaaaacatacaagaataattggagcccatagtataacaacaacaccaatattatttttggctgcacaaaaggtgagaccaaatcaatatcactattttattttgctagacaaatcaacatatcacttgatcataggaactgcattaatttatatatagataagagctaaagcataacaacttcatttattcatatataaacccattaccacggggaaagaactcgtgccactaaaaagtagatatatgcacttccattatagcttttgttagccctactagaggttttatatgtatccaagacacacatgtataatcgctcttcaacatgtcattaatcagatgaaaacaaacaaggtatataattataaaatgttaagagattgagttgccatatagttctataatgttgaagtgtgcacatgagtcttttccctgattttatagaaattagcagaatttctattgtacttatatgtaatttttagcttcttaacattggtttctgtttagagggtgtagctcacacttttccttgaaataaactgatattgttaatacaagtttgaggctatgcccaaaaagtaaaaaaaaaaaaatgtaacatgacattggtaattaaagaacaatatttcaactcgtttaaaactgaaaggaaatgcagagagaaagggttgttcttgacctatttcatgggtgtgatgcttcgaaaaggaaatgcagagagaaagggtgcagatgaacagggatggtcttgacttacatatgtgtgatgccttcgattgtaaagctcgagagatgcctttgattgtaaagctcgagaatgagaagctgaagaatgatggagacttaaacaagtacgagtctttgtgctctacttttatttttttatttaaacaaaatttatttctattttgattattatctatatatttctattttctttttcgtctattcaggttcttcacaattattgtgttagtctttgggatcctgtgctcattagttctctccggatgtaactagtattgacaactcacttgaaacttttggctctaatttaatgtctctactatgttcaaattgtgagtcttttttgtttttctttggatgatggtctgcagcaacaatgctcttcggaccatcaagtagttcagctgctaatgagtcattgcagcattcgtttttcaaagtatatgtgtttc

SEQ ID NO: 53255 - DNA, 1308 bp, Cannabis sativa
tattcttattttttcctcttttttttccaactaaaggtgatcctagattatctatttctttagtggtcagcgataaaaatgaccaaaatgccctcactaaagttttaaatggaaaaactgcttatgagtaaaatatttcaaaaccataaccccatctaatcctgacattcaaaatatttaactagattgccccgctattctaaaaatactaaaccataataaagtgactctataggctatacattgtgttccactattaccgagcataaaaaaatataaaaaatgtaaaattcatatataatataaatagcacacctaaaattcaaatatatctccatacttataaaaataataactaaaagtctactattgaaattggatcctaattatctactaattctcttaataaaactaagcagtcattacaggcttattcttgttgagttttcaacacatgagcaagaacaattgagaaaaaaaaattatttctttctttttctctccatgtttcaaaaatagcaacataaaagagtgtaaatctgatttctcaaattaggctcatatttgtagtagttaaattcttttaattaaattatcttatattgtttaaataaataaatatctataactgaattcaattactgatatttatgagagaattaactacttgagagaatatctcaacaaccttaaaatatctataaccacttttcaaattagatatttatctaattaagttaattaaataattaattgaccccaaaagacaaactctacatggatagcataatgttatgggcacccaccattatttttaggacaaggttggtgtcttttgtcctaacaacttctgtcttgaaaaatcttgtattgacaaattttaccttaacaacttttgtcttttctctatttaattaatttgaaaaaaatatttatttattacaacaataaataatatctatttttccaatttaaaatagattttttttttcaaaaaaatttatactatttcttcttcctactcttgatagttttttaaggtggcaattcggggaccatggacttatatgtaatatcttggaaaataatatggtatttaattaaaaaaaatttattaaatatgtaattgtcttgataatgaaataagattatgatcttacttaagctaattagtgtgaatttaataaataattaaataagcgtaatttattaattacagagattttattagattatgtgggtatcgtagataccatttttaaaataaaatatttttgagcctgacgaccgtgggaactcggcggagtg

SEQ ID NO: 53256 - DNA, 642 bp, Cannabis sativa
atatcccttttaacttataatcacactaggattagatgtaatcttttttatgtaaatatttttgtaaaagatataactaactcattaactgtaattaataataataataatcgtattaggatatataagatataatttttgtattttaataatatatactagggcacgtggcaaacgagttaagaaattaattaaaatctaaatgttttttttttaatttgataaaataaggaacaagtaaaaaaaaacaacttataattgcaaactaaatataattgattggaagaagaaaagacatgaaaagaaaccgtcgagaacgagagttccgatgggtacatatggacggttgagatcagttccgcattcgtggcaattgtagattaaagccaatattgattagtgtgtttggttactgagaaaataaaaatagtttctttagttttgaataagaagaaaagctaagtgaagactcttatatcattgtaaatcttatatcataatatatttttgcaaatggtatatatatttttgtttatatatcttaatatatcttatatcattgtaggtgtgaaaatgaacaatttcactttattgatctaaaaaattcagatattatttatgtttgaatatataaaatgtatg

SEQ ID NO: 53257 - DNA, 1422 bp, Cannabis sativa
ttcagtttgagttgttaattattttaattttagagatcaatatttgttgtttatggattcttttttgttcattgtgtgagattgtgaagttgtgtcgttgggtttcattacatagattagtaatgacatttttattactactattgcaagaaattagaatagtaacaaaataataggcaattgagtaggtttgcctttttagaatagattttggttgattgggtgagtaccaggtattttcctatatgtcatactggtgtggttttcttagcaacccataagcaagtattggtgtatcatcgcaagagtagagaatggaaagagatgtactctatgaaaaatagttgcacacttccattgtggttctcagcacatgtataggagcacccttttaggaaccatgctattaacacgaacacattttgaatagttctcaaaactcctataattatactatgtttttcagtatgttaagaaaaataaataaataaataaagtactactgtatgtgtatagtgaaagcagcaaattatatataatccatgattaattatttcttgcttcgttgaataggctatatcttcaaaattatttgttttttttcttaaataatttggaaggatgcaagttgtaaataaatatttaaaatacatacattcataatgtttttcttatcttgtcatgtgagtgaaggtactatgattcaatttgttaattacatatataatagtgaaacaatgaaatacttgaagaaaatcattaaaatttcagaacgtaaagtaagtataaacagtaatagacatagtttgcttcactgatgtgaagaccaaactaattagtaacccatgattactaaatctgagtgtacctctctttgcctacttttgttgcgtgaagaatttaacaatttcacacaaaagatagaatataacaccacttaaaaagaacatatttgctaaatacattatctttgaccgttcaatactagttgttggccaagtaaagataacatctcataaatttacttgcttattgtagtttcaccttgtcattttacttatgtaaaaaatcaataatcttatgaaatatgaagtacttatttctactttcttaataaacacccttttaggattacaaatgtaactcaatgtgattttgtttgaaatcaaagcttgtttaaaataggcttcacgtaagccacatacttgtcatgaattagctttgtgatggaacttctgtcaaaatctgaaggtatagttgcctcccaataattgtttgccttcttattccccatagctatgaatagacaaaatgaaccattgatcagcttgtgtgtaactatagaagaaacaaaataacactactacaaaatatcatttttgtaatggaataaaagtatccattactatgtttactttatca

SEQ ID NO: 53258 - DNA, 1210 bp, Cannabis sativa
taaattatactttagatttccttttaaaaaaagtataaaaaaagtattctttattttttttatttttttaaaaaatttttaaaaaaatactataataataataataataaatatttgggaaagctaaggtaagccgtttaaaattgttactaatgtagataattttgtttcttttatttcattcttaactaataaaaataaaaattataaaaaattcctaattttttattttctctaatttgtagtgttttctaatttttatttaccaacaacaattaattaaaagagaaaagaattctaatagacacatcatatcatataaaaaaagttaattattatgtgttttatgatgattctaataggtaaaaaagtcttgtattaatttcatgtaatttcttagcaattattttcttcattaaattataacttcccatcattcaaaactccatttatgaattggacctattatttattgttttctctatatatttttattgtcttttaaattgttgttttttttttattattgtctttaaaatagtgtgtattgtgaacattgagaagatatgaaaagtttatatcatataattaaatatattaaattacatgttatatattttcttttcttttttgatgtcttttaaataatttttttattgtctttaaaatagttgtgtgtatatattgtgaaggttgagataaaataaaaagtgttttgtaattatatattcagttatattttatgtatttataggtaaatagagatatataaaataaaaagtaataaataataaaaaaaattgcaaaataaatatatataatataatattgaaaagatagcaagcaacatcatctctcttagcatcaatattatataaaatatagaatatatataagaaattaaaattaagaaattataaataatttaaagatatgattatatatattaaaagagatattttaataacataaatttaaaaatagctagaaatataatttactattaaaaagttaaaattaaagatatgaaaaattaattaaatgagaaagtgggtgaaattatgagcagatcgaagggatatagaaaacagagaaaaagtttcataaataataacttaaagctaattaaatgagaaaaaattaatctaatgaaagaaattatacatgagaaaaatagattaaaaaacttataattattaaatatgaaaaa

SEQ ID NO: 53259 - DNA, 880 bp, Cannabis sativa
tagctcggcattctgctgggaagatacacgagtttgcacattgttgtgacttctctccagtcggtttgagatgagaaaaaaagttcgtggaaataagaaaccataagttcatccaacccactattccagtcaacccatgcactggaatgatctttaagttttgcaaaaaaattatttttttgtcttgtagttgcagaagcatgaaaatacttgttattattgtctccttcttgcaaccataattgcttcaatctttgatgccagaaaacttcccattggagataaccttcggccatattcttcttcgcttgtttatagttggctacagagacttcatcccgacgcaatttccacttttgcacttcacttttacacttttttaatctttctttaaagttactcgtaacctccttaccccaaacggccaacttatccccacaaaactaaattttcttcataacatcatgaggctcacaaatctcccaactatcttttacaatctaataacaaagaggctcccttaatcacacattttcaaaccgaaaccgcttcacaaaatggtgacccgcagctggaaccatgaccataagaatcggagcatggtctgaagttgagatttcaagattatggagcttttccatagtgaacatatttaaccaagcgagattagcaatccctctatacaaccacacttcaatccaatgattagttccccacccacactcccaagtaaacggatgcccacataattccttatcttgaagaccactatcaatcaaggattgctgaaaaccttggactaaaaagtcagggtacctattaccaccccttttatcttcatgagataaaacattgttaagatcacccatcacacaccatg

SEQ ID NO: 53260 - DNA, 1545 bp, Cannabis sativa
tcataccaaatgttcagtgtcaaaatgtaagggagaaacaattaacaaagtcaccactgtgttattctgctggaaattaactcattattagagatatatttgagttataacaatagagttagtaattgtaaatgtattgaacttgtcaactcataccatttatagactaatgaaaactcatagtaatagcagttcttctccaacccctttactttgttactctctttaacttaaggcaaactctaagtgataacttttttcactaagaaaacaaagttcattgcatgtcaacacaactctgctgaaacgagaacaagaactgaagcttcaacttactaagctttctttatttataactcaaggatttcactggaacttatattaattttctcatgcttactcatttattgactattttaagggatccttaggaagttgttaaatactaaaaccaatataattgtagggaaaatgcaggatcagaatcttatcgaccttaaaaataactcatatagcttaaactttaaagtggtactttaaatatgaagatatgatcttgatcatcactctcaggctcaactgtgccaaaaaaagagcatctctgtttctttgaaataaggcaagcaaggaaggcaagtgttgacttaggaattgagatgatcaaccacaatcaacttctactgaaaaaacaaaaacatgtactaaatcttgtctcaaccgtatttatctcatcactttcactcaagccaccctctactttatagcctactttttgcctcatccttcctcaacatgattagtggtagtaagaaaagaatgggtcattcatgcacttgggggaaggtggtttttttctattttttaattataactaatttttgttcttgtttttatttatttatttttaatttttattttaagggataagtacattgttggaatgggtgattggacaatatgattagcgtggagcctcaagatattcaactcactctttttgttttaggatttggaccacatcatatccactaattttattatcacaacatatattactttatttatgaactcttccaagatattgacacgtcagagtccgacttcccataggttgacatgtgccccaataagaccggctcaaaccaattgagtgtacaattacctgttaagagagaaaaagaaaaaaaaaaagttatccacataacaaactcagaaatgagtcgttattaacaagctgcctcactgaattgggtgttaaaaatccttatacttcaatcaccagctaatcctacaaaagtagctatgaaattggattcgtcacattactcatttaaaacttctaaagagtcattacgattcaaatccatgacctccaatttcaaaaactgcttgggagtaaatactttttattagaccactcacttggtggttaggtctccctagtccattatcattgttttgctttcaaacctactttactatcctcattatgcctagcgaaaagacaacatgtgcttcagttcattttatcacaagaaaaaaata

SEQ ID NO: 53261 - DNA, 936 bp, Cannabis sativa
agcaacatcagtagcccaaggaaagaacatatcggctattagcccatctgggcggtgtcgttttataagttcttctatttgtggcccaagcatcggaagagcttgaaaaaattttaaaagcatctcaggtgttgtagccatgtgcatgctttcggtctcttctgggagactgacctcgtaagttggaatcttaatggtgagaatatcgatttgggtggctgaatcagtgttttgatttattgatttggaaagaaaaggtaggaagtgtggtgttatgataatggttgatctgtgaccacgagaagcaaaaagcttagccatgtctatggctggtattatatgaccttgagccattaaggggaggaaaaatacatgaagctggtggtgttgatgtttttcaatctccattagaccacaaaatttttgctacaaactgaaagatttcccttttattgtttgtgtgatgaacaatattggagaagtagaggagtatttatattatctctcttctctatatattaataagcatggataatcaattgtcctccttttcacctgcttccaaaaaataaaaaaaaaaccaaaatattattattgggccacgtttctctttcacttatacttttacaaaataattaataggttttaaaatatctttcttttgaactgattaaaaaataaaaaaaaaattgctattgctgttgctgttgctttgtcctcatatctaaattaattgaccactatgcagctagctagcactcttttgtctggaaaaatgacacaattatctctgattacgttataaatgaaaaatgacaaatatacccctaactacaatatatatattatattttataaaacacaatattgttccagaagactcagacaagtgtaggactgacttatgttttccttaattcagtaatgatttttgga

SEQ ID NO: 53262 - DNA, 1210 bp, Cannabis sativa
  modified_base (1160)..(1166): a, c, t, g, unknown or other
atttccaactccattccgttcatctatccaatctcatttcatttatttttataagtaaaaagataaaagtgaaagttatattgtgggtttaccgagtatagtttaattgtgactaatgctaggaaccaaaaaaaattaaaatagtttagtggcttagttttttaataaatgagaaaataaaatatagaatttttattacactttttaattcttatattacttttaaacatttgtttagttaagtaatttatcttttcattaaaataagaattgatttgacactttcttttaatataatattatattatatttatagaagttgcaatagaaaagttaaattaaaaagtcaaaataaatttgataatatatatatatataaacgagggagctataacatattgtatatatgtatatatttcatagaaagatgagggagtcatggcccctgtacagcagaacatccctcctccttgcccttaattatgtctaatccaactatattactcagtgcataaaaaaacaaatgaagaagataaatcttattgttattatacagtaaaaacaataaaaaaatattttgatagaatattttattttattagtagaaattaataaatatcaatacaatttataatatctatagcatattatacttaccttttttattctctccaaagatcgcagaagaaaattgaaagaatgttttgaagaagaaatcaaaaaaagatatttgattatgaaagatatttaataaattaatattataaaatgtaggattatatatatacttaaatttttataatgttggaggttaattaataaaagactttttatattcttggaaagagaaaagttagcaattaatgtgggagagaatgctaattctgttaatttagctgttaaggttaacataatttatattgaataattaaattaaattaatgaggtggctgtaattaattggtgggacagggtggagatagcatattggggacaggtgatttttttccattactattatatattttaaggagtcaaataacatgatatggtatattatgattgattagtgcttttttatatattatttattaaattaagatgtataacactccatattaaattatctcaatagtagtcagggccggccctaggcatannnnnnntaggcccgtgcctagggcccacactttccgggggcccaaaataa

SEQ ID NO: 53263 - DNA, 1958 bp, Cannabis sativa
gaaggattaggagcttaccacaattatacaagtctcaagccacaattcacaccaaagtcacctttaattcaagcttaatttttccaaaattaagaaaatttgaagaagatgagacagggagagagaggggtcagctagggctgggaataaaccagaatataggttttcaactctccaattgttttttgttgaaaatagattatatggtcaaaatgaccaaaatacccctatagtcatttataagcacatttatataatttagggtaaattagtcattttatcacaaacacataatacataattttaaatttctcattaatcataataacacaacaaataaatcccgaaatttatattttgggccccgaacccgattcatcccaaaatacccgtttgtgactataccgcgccgacttgttagaaaacacctacagatagtcagaataaacatactatataataatattgcccataagtacgatatatcatataaattacaattttaccccttcttaggtcaaaactacaaaaatgtccctagtacaccaatagggacttaaaatgcaatttatcaatatagtttcatatattaaattatatagttatataattcctcattaaaacataattaaactagttagagttgctaatccagtttcataaaccttagggtattacactaacccttgtttagaagcatcacactaaatcataaatttctcatcactgaatggcaaggttaacactagtgcagtaattaacctctgtttcaattcttggaagctacttttgcacttgtcagcccaaacaaagctacaattctttcgagttttttctgttaagggtgtagaaatctctacaaaccctttaccaaaccttctgtagtatcctgctaatcccaagaaacttctaactttagttgcaaacttgggtcgaggccaatcccgaaatgcttcaatatttattggatccaccaagatacaatctttgttcataacatgccctaagaagcttacttgaggtagccaaaatttgcatttcttaaatttagcataaagcttatgctcccagagatgttgaaataccatctgaagatgtttctcatgtgcctcttcggattcggagaagatcagaatgtcatcgatgaaaacaattacaaaatcatccaaaaagtcatagaacactcggttcattaagtctgtgaatgtcgatggagcatttgttaatctgaaggacatcaccaggaattcatagtgtccataccaagtacaaaaagctgtcttgggaatatcctcctctcgaatccttaattggtgataaccaagttgaagatcaattttagagaagacggtctttccttgtaattgatgaaatagatcatctatctttgacaaaggatacttgttctttattgtcaccttattcaattctcggtagtcaatacacattctcaatgttctgtccttcttctttacaaacaaaatcggtgcaccctaaggtgaggtactcagtctagtgaattttaagtctaacattctttgtaactgaaccttcaaatcttttagctctacagttgccatctgatacgaagctttagatacaagctctgccccggtatcagatcaattccaaagtcagtttcccgttatggtggtatccctggtagctcctctagaaagacatccaaaaactctcgaacaaccggaacgttaaccggtcccactggtatttcttttgtagtatccaccacactgactaggaaaccaacacatccatcgaataacaaatctcttgccttaatccattcctagtataacatcaaaatcttctagatctaatttaattaaatcgactgacaattctctaccttcaatacgtattgaaagagacctaagccacctgctggagataactaactctccagtaggtattatggtaccaaaacaacttggtaaaac

SEQ ID NO: 53264 - DNA, 919 bp, Cannabis sativa
tattaatacaatttcttgtagtgtaatgctcaaacaaacggaagttttggcaagtatccgttaaatatgtgctggcaaaatatgatgacgtggagtaatttaagtggcgggaaacaaaaagggaaaggctaagtagatttcttctcattaaacttattggtcacgaattcaaaatccaacctataaatacaacttcccctccttacggaaaaaaaatcacctgtcccaattttcctatcccaaccctttccctccaacaaataactgctacatgtctatttactttttcattcatttaatttactaacctttccactacttctattttttttccgtcagttaactttttcacaattacctcatgtaattaaatactcacttcttatatatatatatataatataatacttttttttttaatttttacatgaaagctatttactagttttaattttttttttcttttgtatacatttttttttattgtaaagatagtataatttactattattttggtaatatattcgtatagcataatcaatttttttcatgaaagaaatatctttttagaaacttatttttcatttaattaaaaaaaaaagattttaaaaaataattagataggtgttacaaatagttatatatgtgttaaataatattcatacaatacaatccaatacaatacaatacaatacaatattacggcgtaaacgagccttatataaatttatttttgcattctattttattatgctattttttcaaaaaaaaaaaaaaattattctataatatagaaaagattttacatcaacaaaatatataagaagtgttattttcttttaattaacatacataattttttttatacaataattttaagagaattacataggacacaaaatgttattattaaaagaaa

SEQ ID NO: 53265 - DNA, 822 bp, Cannabis sativa
acattaagtctttcacgtacttataatttacttctaattttaagtcatactgcactttgtcaacattgagttcttcgcacaaaaaatcaaccaaacctgagtagtttatgttcgtatcaatctcaaatgtcaaatttttggcctggttataaactcaatctctaccctcaagctcttaaacactattatacataacaactgcatcaacagttgaacctgtcacatatattaaaaataaaatataattacaatttagaacaaatatctcactataaagcaataaaattcttgaaaatgccataaatatgtaaaccatcagacaatcatcgggccccaatcaggccaatatcgggctcatcaaaaatcaaagttcccaaccccatatcggacaaccattgggcccctattgggcccattaaaaatcaaaatccccaaccccatatcggacaacaatcgggccccaatcaggccaatattaggcccatcaaaaatcaaaatccccaacccatattggacaaaaattaggccccaatcgagccaatattaggcctatcaaaaatcaaagtccccaatcccatatcggacaatcattgggcccctattgggcccatcaaaaatcaaaatctccaaccccatatcgtacaaccatcaggccccaatcgggccaatattgggcccatcaaaaatcaaagtcccaaaccccatatcagacaaccatcgggcccctatcaacccatatcgggccaatcaaaaatcaaaatccccaaccccatagcgaaaaacaattgagccccaatcgggccaatatcgggcccatcaaaa

SEQ ID NO: 53266 - DNA, 801 bp, Cannabis sativa
ccactgtctgttcctgaaagctgcaaaagaaatatttgttaggagtcatatgaaaagaacagcctgaatccagaatacactcatcaccagtggcttgacttgatgcaaccagggcatcagcagactcatatccatcaaatacacatcatgcatctccataacccttcttcttttccttgctaagctttgttttgagggctctacactcatctctgaaatgaccttccctcttacaatagtagcactattttcctgcctttgaatttgtgatggaactcacttggtctttgaccattgttacttccattggaatggttacctttgttgtttgacttgtgattaccattcctggtatctcttgattctgattcgcttcttgcaaacattcatacaccattgatgtcaaatctttcctctcatttctttcgaattcagagtagctttaacctctgacattgtcaaggtttctttcccatatagtatgttatccacaaaatgtgcataacattttggcagaaatctcaacaacagaatcccttgatactcattctaaatcttaacacctatgttgctaagattaaggatgattctattgaattcatcaagatggtttttgagattctttgtatcatatcttcaaggtatacaacttcttcttcaaatagagtttgttggccaaggacttcttcaaatagattgaagcgagtttctcccataaccctattgttatcccttcatttgaaacttctctaagaacttcatctcccaagcttagaagtgtagggttttgtgccctaaata

SEQ ID NO: 53267 - DNA, 951 bp, Cannabis sativa
aacaatctcaatagttcagggagtatttttaacgaccttaaaagttcagggggaatgatttgatatatgtcaaagttcaggaggcaaaaatcgtaattagcctaaaaataatctacaaaaaataaaaaaaccaaatacaattcaattaacaagagtacaacataaaaataatatgaaaacattaaaagatcatataaactataaataaaattgtaaaaaatatttaaaatttcgtatagctatatttttgtaattttttttgttgttcttgcgtattttttaaatacgtgtgtgaaatagattatttaaatattatttttatagatggtatatactacatcttttgaaaaaagtgcattgtatttaatcttgaacaattgttaaaaaaagaacatgccaaataagccaatatgtcaaattgagaaagaacaataggatttgaaaaagaaaaaacaaagaagagtgattcaacataaaaaccaatcgttgctaaataataaataaagaaattattttcttttatatataaagtcattgtttttcccatattatttcataaagggactctaatgattgtagaattaattaagataagcatgaaatattgttttcatactaaaaaataattcaataccaaccaaattttttacttaccaacaaataagtgataagtaataacaataattttcatttgaaatatatagtaagccactaaagtatctatatatgtatatgaatatataagattagaatattaagcaaatatatagtaagccacaaaatattagttgtatatacttgtacggacatcatatatatgacattattgattatccaatatttgttgtatcttaattacaggtgtcacaaaatgaattgttatactcaagtatatatcaacgttgtcttcttcacccaaatcccaaagttgccaactttacaaataatata

SEQ ID NO: 53268 - DNA, 1208 bp, Cannabis sativa
gtagttaggacaataatcactattgacctcggggtcttcctttctccccctgggcctactatttctcgggaaatcattgccctctcgtggtcggtcgcggggctgccactccctatgttagggtgtctttccaccgattctaccgcagtcaccatttttgtttctagagtttccgccaccgcttaaccttagacaaacattatgagagtcatcatgtcccatatagtgactgggtaggacttcttcatccgtagggaacggtcaattgtttttgtggggaaccctgttggagaggtgtctcctagccctctcttggttccttgggcaaggtcctagaccaccctctcccgttggtttcttgaggtagggacttcctatggatatgctcagttgccttgaggtatctgttggttgtgggcatcattacccaacccttgagtgttttggttaaagtagcttcgtattaagtcaatagcctattgggtgcgacggacttggtcatcttgacgcctcctcatttcacgagcatgatcatccagctaagattggaattctcttccttggttagcaagacttttggtcaagatcgctcaagcttgagttttctcttggtgcacaatttggaactaaccttgcattcggccttttgcatctcgtaactgatccatctcggggttagttccttcgatatacacatggagttcattttgcgaactaaggatgcaagggtcctcgaccaatttgagcttggcccatgtcatcagtaggtcggataaaatttccagtattacctcttccggtggcaccgtcagtagcgccgcctcctacggtggtggcatttgcgtttggccagttgtttaagaagtggttgttgcatcgccattccccgaacgcaggggtcgttctccattgtttctgatgggattgcttgctaaaggaacttactggccattatccatctccgcattaggtcgttcttgagatcttcgggttaacaccattttttctggtgaaaaacttcaagatttcggctaaatctctcaatgaaagtagcaaaatgttgactgcatttttacccaaccgacgtggagtcgtaataaatgagatttaaactaaaataaccgtaataaatgcagttaatgacaccagaatttggaataaatgtagagaaaggacaccataatttaaagaggttcggccccggatgt

SEQ ID NO: 53269 - DNA, 1048 bp, Cannabis sativa
aggctatggaaacaactggaatccacgtgcctcccaaggctgtgcctccaggactagaggaaacacaggaagagtcctcaccaagtacccaaaggccaaagaatagagagccaagtcccatacgacatccctctgaagggaaccctaagagaaatcctacctcatcccccgaaaagagcagaaaagcccaatatcagtgaaaggtccgctctgatttcccaaaagggaaagctccacaaaaagaccgaaagagcgtgtcaggtgcatcaagagcccggggaaagagggagaaaaagacagaagcatccccttgccgacttaagacaaaagcttaatgataagcatggtgacttaagaaagcacttggaaaagaagaaactggcaataccggtgtcggaaggcaccctaaacgggggatcttggtcgagttggcaatcctacgcaaagacatcgctagggtttcgcgaagacagtagggagatgaatcggagtctgactgtgaggaccgagagccttgcgctaggaacatcctggaggcggagctctttaaaatttcaagatgcccgaaatgtcaatgtacacaggggactcgaaccccaacgcccatctatctcgattcaacagagtaatgactgtcatgagagtctgtaacgatgcaaagtctttatgttttccactgatgttgggtggatctgtcgagaaatggttcaaaaagaaagaacccagatctctagattgttggaataagctacatgtcagtttttggaggcagtttttggcagcgaggaagattaacctcgaagtaagcgccttgaccaacataaaacagctaccaacaaagaccttgacaaatttcataaaaaggttcaaagaagaggcttcgaaaccaaaaaggttgacgaaggacaacagttagctttacttcaagctgggatccgaactagaacctctttttggaatgaactgcaacaggaaggtgctgctagcctctacgacttttagaagatggtctagaagtacatcaacttggagaaggcacaaatagtgg

SEQ ID NO: 53270 - DNA, 2892 bp, Cannabis sativa
agcatagactattaagtagatgacaaacaatagattaaggacttggtatgtaactttcatgacatcaaaaatgtcatctttttggagtatatatctactttgaactgtatcactcattttccaaaatcatcctcagctctggtctctttacctgtccagataagttacaagttacaactcgtgagctcacaaaattgtgtttgtttcaatatttataacaaaacgtacctgtaagctttatggtcaaggctattcttgacagcattgaacacaaagtggaggctctttccttatgtcacaattgcaacaagctgtatcacaatcgttattgcaccctacaaaacaaaaaagagatagttcagcattcaactttttgccaaatttcttctgtacaagttgaaattcaatacaaaaacctgttacagtgacatatggaaacggttcgggtgtaaatgaaatgcggctacttgatagaacagcattggtccaaattataatgagtatgagaaatatagcactagatgatgccaatttcatcataatgaaacaaatgttttatagctcaactttggtaaacttttcttaccatgagctgtttatataaacatggtttatagtaattagttgaggtgtaggagatgagagaacctaacccatttagatattctcaacatacattctttctttgcctaaaaacaatgttatgtaagattcatcccataattgtgtagacacaagaatctatattgaacaatcatcacaacaaagcgatgaaggaaattattgaatatttgtaacaagattttgtatatactacaaagatacataagagccaagaaaagtatgcaactcaaagcatttcattaacttttgaaatctctaagatgggcaagtagtcagcctcatgacccaacaaggcaatgatgtttcaaaaatttggtaatggtagaacccaaatggagatagctaacacaagattattacaggcacagtctgaggcataagaaaccacagttcttctattaacacttattcaaaacaaagataatattaatgcttgaatgcttcctttagtactaaaaggatggaaagtacaatagctgcttttgtattattagctaaaacacaattgacaaatcctcaataaaacattccagcttaatccatgaatgtgcacgtttatcaagcttcacaaattataaactaggctgaagcttcttaatattttgaatctgctttccagggtttaagcccttgggacaggctcgggcacaattcaaaatagtatggcatcggtagagcttgaactcgtcatttatggatgccaatcgctcctctttgtattcatcacggctgtccataatccacctacatgcacaaccccaaataagattcatcatctgatgttatttagacaaaagcattaatcatacaaagatcaaactcgactcattggctaaccgctaaaacctaatagtagaaagatagtgttgagctcaatgagtcaagcaacaccatctaaaactttgtcaatgaatttcataagccatggaacgtataaaaacaaacctaaacaaatgcaacaacatgttggtgtaatagacagtttcatcaaattttaaatgttgaatgtttgattgaaaggcatcaaatactaaatgcaaggacacacaagagtgataggaagaaaccccgaagcctaattctgaatatctcaagaaaaatgtttcctctcatccatgattggttatcacaagtcaaacagttttttcaatctacaataagctcatttgtgccccttgacgcagaatgaaactaaaattcgtatcaatactaaagactactttctaaaccttgccctcacataagcttcattataataaacctttttcgccatttccaaattctatgaaaggaattctagcttgagatttgagggtacaaatacaccatcaaagcaaaagtatagttgaacttagattattgctacaaacatctagagatcaaatttatgacaacagagtgaaacaacaaaacaataaacaagataagtactaaattacaattgccaaacttcaacaaaacaaccaaactaatcacctgaaccgaaaaatgcaaacttgtgatttgggttattacatactgtgtatagatatagatatcactaaaatttcaaacaatataacaaatgcttgtttcaataagaaaaacacaattacctgttggcatggagcaaagcagcgggtcccaaatacttctcgggattccaccagtaactggggcaggatgtactacagcaggcgcatagaatgcactcgtacatcccatcaagcttagctctatccttcttggtttgaagaatctcctgagctggttcagaagctggagtcttccgcttcaaccacggctcaatgctcttatactggttatagaaattagtcatatccaccaccaaatcctttatcacaaacatatgcggcaaaggcgtgatcatcgtggacgacccagatgggatcttagtcagacaagccaacccattacaaccatcgatgttcatcgcgcaagacccacaaatcccttcccggcaagatcgtcggaaagtcagggagggatcgatctcgttcttgatcttgatcagagcgtcaagtaccataggtccacactccttgagatcgatcttatattcctgaagttccggcttcgcaggcttatcggggttccatcgatagattgagaaggttttcaggtcagtagtgggtcgagccttggggtccacttgctgggcctcggcttccgaagctaaggctcggaaaggaacaaactttgaagcaggtgtagatgaaaccctagctaacgctcttctccacacgccggtcgccattgccgccgcag

SEQ ID NO: 53271 - DNA, 640 bp, Cannabis sativa
ttacacagtccaaacgggttatcacttagcttcctcacttgaagatgtggatgcttgttcgggttcatatgcaaacagcccctggtggaaatttttttgggcacttaagctgccacaaaaaattaaaatattcgcttggcgagtcttccacgacgcccttcctgttgccactggccttgtcaaacggaaagttattacggattccacttgctcattatgtaaacaagcgtgggagactgtgggacatgctctttttggttgtaagtatgccaaagctgtgtggagaatttctggttttaactttgattggtataaagcctcttcaatgcataaaggggattacttggttcaccttacaagtattcactctaaggctgaaatggaacaaatagtatgtattttgtgggctatctggtctgaacgaaacagagttgtacatggacacaaagccaaaaaggccatggagttgtcttcctttgctggaaactatctgctgaattacagatcagctatatccaaatatcagcaaccttttcaagctcaggcaacaacaccaatgcagaattccattccctctgcttcgaattgtaacaatgtcccctggaaacctcctcctacaggtgcttacaagctgaatata

SEQ ID NO: 53272 - DNA, 1033 bp, Cannabis sativa
attgtgtggggttttgctaatttttctttcttttttttgttgaaatgatagtgtggtttgctaattagaagcgtgttagtgttgttttgtcattattaattgtcctatatgatttgtgtttacttttttgttaatttaccctctttctacactctttaatgagtcaacatagtattcattaattatactgtgtgtgtatacgttacctatataagttgcagagaataacaagtaaatagtaaaaaatcagtataataaataaaaagtgaaataggtggcccacctctacactgtctattttttgatggacttctttattttctttaactaacacctttttttttttttttgaaatagttaagtaacaccttttattaccattattattattattataattattattatgagtaaatacttaaattaacctaataaataagtatttaaatttaattttttgtggtaataatacttaagttataattttggaacttctataagtacctaattaaataaattgttacgtgaaaattcttgattggtccaagtcattaaatttttttttttgctactgaaaaggagaaccatttatttatcaaacaacatgatgttggtgagtacatggggactcacctcccaaaagttcaagtaacaattacagtcatgactaagcccccatttagcaaggagatgggcggcttcgttagactctctaggtatccaaaaagaaacaacatcataggaggaatacaacctcataacactaccaaacagagaccagagtttccaatggggcaaagtggaggaagacatggccgacactagaacttgacaatctgaaagaatgtccgccgccgtaaccccgagatgccgccccacctttaggccccaggacatcgccaggagctcaccgtggatcggagaggaggcatgcactttggaagcaaacagagcaagtatcgaaccactttcgtcacgaaccaccactcccacagcttctcagttatctttagtggcatagtccacattaatc

SEQ ID NO: 53273 - DNA, 1372 bp, Cannabis sativa
ggttacctaagtaaatgcttatctctcaatctcataccacctcaatttatctaccccatgtttgattgtttaaaagtttccctcttgagtaataaatctcacaatctagttaatagccttatttatcatcatataaaataaaaaaaaaaatatatatatatatatagaacacataattatgacatcaattaaataaggtagaatcacatgaaaaatattgaactacattaaactttgcattaaatcataaaagcaaagtcataattagaaatccatctaaccctaacaactaagaaaattagccacacatagtgtggtttatcatctcaaaatattatttataatctgaataatattgagaaataaagaagaaagaagaagaagaagaatgaatgtaaactcttgaatatagcttctagttgcttcattaatctctcaaactttctctctttatagttgttttttctctctgtctctcagtgttttaagagccaaaattataatgctcttttatatgatgtttgaaaaagataagaatttgaaacttgtatggacagcgctatgacgcctaagacatggcgctatggcgccaagcgagaatccccaatttacgaacatggaaaaatcatcttttttatctttttctttcttctttccagaccgacgctatagcgcctacatcacagcgccatagcaccgaaagccattttttgtcaccttcttgttctcaactcgttcactttctaattttggtgctttgctcaaatatgtaaaattactccaattttgtcataatttcatcattttaagcttaatactacactctgtcgcgaacacatcaaatccaaccaaaatctcaaagaaaacaacctaaaacaagaataaataagagtaaatgagtgcataaaatatacattcatcaatactaaaagaaaatagcattgtgatctactcttcaatatgaacatttcaaaatgtgggaagcatatatttttttgctatttctaaaaaagaaactatttggttactaatatagtgatcaattactgttttataatttttttaaatattagttaacattaatttaagaattttgttaattaaattatattatattatacgataagtactaattagcttttaaaataacaaaaaggtatataataattgtagcttgttacattacatgaaaactcattagtttggaaaataagttttaagcaggttacctaaatgtattttaaattataagctaactaattaattactaagatgtatacaaataagtagggatgtacatcggtcgatttgggcgatttatcctatataatttctaatccaatctaaagttcgggttgctaaaatttaagtg

SEQ ID NO: 53274 - DNA, 1877 bp, Cannabis sativa
gtcagaacctaaatcaggaacatgggacccattcttccaaaatccaagcagatcaaaaaacaaagggagtaaaacagaataagccttcattgcctttctagctgcagtattcattttggcagtcctcaaagaattataaagaaatataatcccctcattcaactcaagacgacgaaaaactcaatgactttccttcctaagatttatgatgaataggacatgaacagcttcataccaaggcttagaacacgaaattcgcaaacttcgtatataatgcgcttttgggtgagcagcatgtatgtgcgatatctttgttttcattgccttggctttgttgaacttgtggtataacgcttgaatggaatcatcgaaaaggcagtcagttgttgtaaaatttagtgtaacaacagaagaatatttaccttttttcctaaggtaatagaagatagtgttcatatgctgaaacaaaacaacaaagaaacactaaatagaaagtttaaaaatatttgaaaaacttaattacagtaactaaagtaaaaaacaatgataaaacaactgtaatacaactatcaaaagttttaaaagaaaacagaaaatttaccgagtcattgataaacatgtcacaggtagccaaatgataaaactaggttttctcttcaacataatcaacacctaatctaaacttaggggaaaatttcttcgcaccatcctcataacaattgtaatgcctaaaacaaaaaaaaaaaatattgaaatcaaataattgcaaaaataaaaacagaattcaaacaaataacaaaatacaaaacaaaatgaataaaatagtcacctatgatgttttagcaaaccttcaccaatccaagcatcaaacttttcctcaatttcaggaaagacgggatcaacaaatgtatcgttaagagcgtaaaggcccttcacataagtaaccatcttaaaatccatctcatctcctcctgattgagaacctgatgacattagctccattggagtgctcctcacatcaatcgacccaaaatcaacaaaagacaatttcaatgccggtgcacgctttctcttatccaaaagaggagtatcaaaaacagtgtcattaacttcttcatcaaaaggaatgacaactgtcttttcaatagcaacacttggattggattctgggacctgaaaaaataaaaatggaaaatcagaaaaagaaaaagttgcaaaacaaacataaaattgtcaagcaactaaaataaaacatattttactaacaaagaatttaaactacacttacattgattttaccaacagcctctaaaccagccaacataacttgctcatcatcaattttaaattggcttaaaccattaaaaaatcaccccctttaaactagattctttggccttaacattctcaacatccttagccctctcttcattgcgtgcaacaccctcagattgattcacatcagcaacaagaacatcactaacaaccttatcaactttagcagcatcactaccatctttacccaactcatcaccatcatcggagtcggaatcaatattctctggatcaggtaatcccttgtcatcatcctcagcatcagcatcatcatcatcatcatcatcatcatcattggaatcttatgttaccaactcatcaaacgacttaccctgaatcaaacagcagtattgcaactaaaataaaataggaaaaaaaccaataataacagcagtaaaaaattgaaacaagaacagtatacataaatacctcatccaaaggtcgatgatgaatgacattaactttttcttgaatatccttaattacagtcataacagacttgaaattaaggtcaacaaaacacctcaaagaaatgaagtctt

SEQ ID NO: 53275 - DNA, 2182 bp, Cannabis sativa
actcgcccccacttttaagtctatttatgaggtaaagttaaatttaaatttgacattcacttaatctcaacctccctcaaataaaactcgccaagttaaactcttataccaaacacacataaaaggataataatattgaatttcattttcttatttaattattttttttacaaactaatatttgctataacaataaggaatttgacattggtaatcttctcacttaccaaaatttatttgatgatttgagcaaataaaatgaatatatatgttcttagtgacattcctatacccaaggctctacaatgatcttcccagtggcatggccattaatactcttggcccaaccatcttcacccttacttaaaggatgttttgagtcaataactgtcctgagttttccttccttcaccaacccaacaacatactccaagttctcacccttaacactcaaaaaaaatggcaccaatttcttagaagagaaagtaactttcttcaaagcagaagttaaaaaagcagctggcccaggagtaaggtcaataaccttcccattcttattcaaattaggctcaaaagtagaccaagaaatccttgcctcggcgcagtgaataacaacatcatattttcgaccagacgggctttttaaagctgacccttctggggtggtgtagtcaagaacctcatcagcacctaagctcttcacaaactcaatgttgcgggcaccacaagtggctgtaacatgtgtgttttgtctaagctttgccaattgaacagcatagtgaccaacaccaccagaggctgcagtgatcagaatgtttatttcatgcttattcccattgccatcattgtcattatcaagattgataccagcagcttgagttagggccgcgtgtgctgttagaccggcagtaggtaagcctgcagcttcggctgctgacacttgaggcggccgagccactgtcaagctctcactagctacaaaaaattcagctaatccacctccaatctgatgtataacacagaatagaacaaaatagaacagattaactacatgtgaaatagtatcaaaggaaacataagagaattaagtactcacagtaaagggtacattagctacaactttgtcaccgggtttgaatttagtgacaccatgtccagtctctactatttcccccgccacatcagtacctgtgattttcaatccacaactgtagtttattagtttatatgtgtatataaatgttcctaaatgggcatttggtatacatatataaatattaaatgtgtaagtgttttatcttttacatgtttatgttgtaacatttattttggtatgtcttagcaaagttttctagattgtcctcctacttatcattttcatttagtatagatatttagtaattattttttgtgtttgcaaaggcggctaaatgaaacataatatatcttatttcatttagttatgaaacttcttggagcttcagtcttcacttttactcaaaaaagtgttagcaggaccgaccctaagcataccgtgcttatagggtacacactttttgggtacccaaaataaaaaaataaaagacattattaagcttctatttaagtaaaattaagtgtattgtaaacaacaaatattcacagcgtattggttagggtgtatggcacattacacaatagtgtggatttgagtctcataacactctttttcaatatatttttttatatatttatgaaagtgagggccgaaaaaatttaaattgtcttaaacccatatattctggccttgagtgttggtactcggttcaccattgtttatgatataaagtgaaaaaaaaaaactaaaattgggttttttttggggctaaataagtggcttaggcaacactatgagttgttggccaaagtggtgaaggctctatgcttggtaaatgggatcattgctggtctcatggttaagatattccacactctttcccctattgagtattcctagtggagtgtattgggctaggtttagggatcattagctacacttaatattgtacatgtaatgaaattttaaaacacaaaaggggcttagacaacagccccactcaccccatccttaagccagctagaaagattctagattatgtgtgttaaccaataagatgtgttaatggtgctgtgcttgaagatt

SEQ ID NO: 53276 - DNA, 737 bp, Cannabis sativa
ttaattgaatttcactaaatctaagcaacacgaaaaacacactgaaatccttactctaaacttcttattgtcatagcaaatggacgaagagaggacaaactgaggtgcactgctccctcgtccacaacatctacaaaggaaatgaaaatgagaatgagagaggttagtgtcttaattaaatataattcaaaattaaataatttcaatagttggacatgggcagcctctgtatttttctcacagtgaatatttattggtaataaattcaatatacttgagtggaaattacacattttttatgcaaaaatatgactatttcttaaaataggaaaaattgaaaacaagatggaaaaatagtataaaaattaggggtgttgatataattcgcaatttgtggtttcaaaccaatcgattcgaccaaacagatcggaccaaatgaatctgatatgaatttttttggtcaagaccatttaaaattctttgattcggtcacgattttaaaaattccgatagaggttcaaaccaaaccaatccttataattaatttagatatacttaatttttttttttggaagaaacttatgataataattctttattgttttttatgtattataaactagcggaaaggaaaaaaaattattgaaaaaataaaaaattattgttaaaagggataattgcggcaaaagtccccaaaagtttatagttgatgtagattaatcctcaacctcgaaaat

SEQ ID NO: 53277 - DNA, 716 bp, Cannabis sativa
aaacaccaaatggtgtgggagtggagcgtggcgaccagatgttggctcgtgattgctatcgtatagagttgcaacatgcaaaggtcggtccttagttgatgatgatcttggcaagagaaaacgagaaaaaagaggaagatcttgatccccaagttcaagatgaaagaaacctgctaaaaccaatagaagagttggaataggttattctcgacccatgaaatccaaccaaatgcgtgtacgttgggaagaatttggacgagcagctcaaatagcaattaataagttttatgaaagcgaaccaggatcaattcgcttgtagtcatgccatcacttaaatgttgatccaaactacccggccaagagatcaaaaaggaggcccttggattccgagaggcaaggggtactaaaacaggaagttgacaagttgttagtcaacgattttatacgctagttattttatcccttatggatagccaatcctattctcgtcccgaaacctaacggaacttggagaacttgtattgacttctccaatctgaataaggcatgcccaaaaaactattttccacttcccaagatcgaccagttagtggatgcaactgctgggcacgatcttatgttgtttatggatgcctattctggatataaccagataaaaatgtacatcccagatcaagagcatacaagcttcgtaattgttatcgcaatttttacac

SEQ ID NO: 53278 - DNA, 1612 bp, Cannabis sativa
  modified_base (804)..(804): a, c, t, g, unknown or other
actaattgggttttgtacttgaccaggtttccattcccatcatcttttaatctaataacccatttattcctcaaggccttcctaccttttagaagtttgaccaactcataggtgttgttcttcgtatagtaatccatttcctcatccattgaatctattcacttctctttgtctttgtaagccaatgcttcttggaagttctatgggtccccctttttagttaaaaggatatactcttaccttggatatcctttgcatggaattagtcctctagtggaccttttgggagattgctcattttctggttgctagtacttctcccccggattgatatcttcttgtgtcggtacatcttctttagcatcactgtcatcagcatgtgtctcctcagcaacttcttaaaattcatcgtctaccattgttattctggaggaaacaactcaattttagcctttcttggttcacattttgcttctctgtcggcgacaattgttagattttcattacaaaccacatctttatttttgatgaccttcttattaattggatcccaaagcctatacccaaattcttcatttccatagccaatgaagatacatggaactttttatacccaaaattcggctgtactttagaagtgacacgtgtcaatctcaggaaatatgaatcaacaaatataatgataattttatcattaaatgcaaaatagaataactcattaaatgtagaattaatagagtatatttgttacttgctgattgtatagctctaagcgagatagggatatacaaactatcaattcangtattgacgagaaaccatcttgtcccagaaggcataatcctaagggagccatagacaacgcatagcgaggcatctacctcgctgaatgtaaagaagtattgacgagacgaatcggttattagaacacttaacgtataatacacgctataataattaagtgtaataacttgagaacttggaggacatgattgtctagtctgcaaggccttatggtcaaagagcagttcttaagtttgctcagtacattggtgctcatgccattgctggaaggaatatgaataaattaagtaattcatctatgtacaaggcgacatacctccgacgaggtacctttggaagggagttcctattcttataagcgttgaccgccttaaagatggtttaaatcacagctgtgggatcttctaatgttatctacatgtatttaagtagaacgtaattaaagcccacatttttaggaaatattgttatggaattcgaatttaaatgtaattatctgcctacctatattactataaataggggcagattatacagaaaagggggaaggaaaatctttgagaaaaaagagagactaattgtaaaaccaaaattctgtatctagaaatatctgaataagatagacttgtggactatgcagagttaactgcaaaaccatgtaaaaattttggtgtcattgttattattttatttattaatttctttatatctgcattagatttatcacaaaataggctcataatcgttaacgaaaaactacgttaacaaaactgctttataatttagtttggacctttgttcctttggt

SEQ ID NO: 53279 - DNA, 923 bp, Cannabis sativa
agttaaagtttagtgtgtatccttatattagggattccttcaatctaatttctgatgggtaatggttgtttcaaccatgtgaaaaattacaatggtaatttttttacttaaggaatatgtacatatttaattatgtatttaatgtaagattgattttttgtgtcttgtttatacatccaaagatgccccataaatagagctctatctcattatttgttcatcccatcacaaccattacaagctattccaagagtgaagagtgatgctacctcttagtgagagaaatctaagagagaagaaaaagaaaattcctgtaaaattgtgagaaatattttgtagagagatggtgagattattacactagtaagtgtgagagttttgagtgtattcctcaagtatttgttaaaacttgagagtgtaatattatgtacctattattattgttgtagtggaatatttaccgtggtttttatttgccacgagataatttcttggcatgcatttgttactttgattattattcgtaaagtactataacattggaagatattcgaaaattctgaatatgctctgtgattgcagctgtgactgatctttcacatcagaaaaattttttgtagtccccattatattttcccgtaaatattgattacgtacggcgtaagtagttctgtctaggagactggaatttaagtagttcgcttgtgattctccacttctatcctaggaattcacttataagggtgattctgtctaggagattatctaggctcatcctttgttgataggactgtgatatatatatatatatacgcagtctttcctgggaatcgcctagccagtacagaggttggtgagactcaagaaacatgacaggccaaaaattagaaattgagaatttcaacgacagcgataatttttcc

SEQ ID NO: 53280 - DNA, 2113 bp, Cannabis sativa
ataaacattaaaactacatgtaaacataaatgacttgtaatctttcattgataacaaatcagattagattgaaatgggttttatttagggcataaaatcccaacagttggcgtgtgagagagagagagccctaatgggcgtgtacaatagagagaaagagagagaagagagagacttagatctgtttggaggctaagtgatttagaggcaacctagagaacttaggttttcatctagaggttaagaggcctaaaccctaggtttacaacttaaatcccttgaaaataggatagttagctagatatttacataagatcaaaattctctaagattctagatgcttctcaacctgtctgttgggcttttagggcccaattctcagcccattcttgatatgcacatgtaggagagtcttgtgggacctacaatgcaattcttggtcggccatggccttgtgctggccaggttggctggccatgatgttgtttcctggcctgaccggccatagggtcggccaaagatgcctggccagctcccgaaagcgagctcgactatcacttgatccctgtttgagtgtcggggtcttcgttggctcggatgctgacttggtcttccttttagtgagctgttttgccacgtagcacaggttctgtccacttaagcatgtcacgtcatgaggtcaaaaattgggataacaattcatatctaaaaaatataattctgtgattattttttctcaaaaaatatcttaatattattatcttaaaaaaaacaaaaaaaaagtattgatattatttgtcttatcatcttatattaaatgtggctatataacataaaatatatctttttaacatttatattcaaatttaatctcattgcgtatatctaaaatatttttctattattattttttttactaaaaaaaaaaatattttttctattattgtttaaaaataaaaaataaaaaaaaatatatgatatttttagaaaatgaaaagtatcattaaattataagtattacaggtaagttaaaattataattaataaaaaaaaattaaacatatataaatatcacttaaattaaatatttttttaataaaaaataaaattacttattaaataaaataaaaaaatattaattataaactaataatatacataaccaaaattttaactaagaatataactaaacacaattgtattagacataatattaacttacaatttatatatagttgaaagcatgtaatattttagctaagaataatttgttaatttatcattttattaaaaatttaaagtataaatgtttaattcaacttaattaaaataaataaataaattatgtccaacaaaaataaaaaataaaagggataatacaaaaaaaaaaaaaaaaagtccttttgttattgtttaatttcattttaaatcctttattttaaaaattataaaaaagataccttaataatttaaatgataaacaatagtctcctggacatgtttttggtaattattttttttggaagactaacagtgttgtttatttttcacaatattaattattcaaatcatctaaaatttaattttgacacaattaaaaaagttttttttttaactaacaaggaattttattcaaaaaaacaacacacaaaatacaagctaaagcttactgccaatagctcaaaagaagaaaaagtaccattgttcaattacattgataatctattgttctcccctccttaatctattacaattcaatcccaagacccttgctttgacagtctttttcatctccttgctaatatgtctagctgagaagcaagtaagatcaagaatgcatctattcctgttcagccaaataaagtaaagagcagctgccatagttgtattaagaacacagtcttggaggtcaactagaggtctagtgtaccattgctaccattccttgtgatttgtaagccaactgctgtcccctatccatttgcatatttcaacagccacacttttagcaagaggacactctagtaacaagtggataagagtctcatttttcagtttcacaaacagggtaaatagccttaggtatgatcattattttgctcatatgatctct

SEQ ID NO: 53281 - DNA, 2915 bp, Cannabis sativa
attatgcggacaataataagaaatcccctcattgtttttggatgcttttcaattaattgtaggagaacatttaaattgaacttatttaaatttaatgaggcggataatgtgaatttctgtaaagtataaagttaaaaagcaaagtgcaaagtgcaaagaaacatgaagcttcttccaaccatgatagacttcattgggcatgtggtactcaatctaataaataaataaataacatgttgctgtaaaaaataaatcaataagtttaaatttagagagcaatgaaatgttgaatgtagtgacacataaaaggtcaactcaattgaagttggccctaagattatatatatagtttccaattgttacaaaactacaagcctacaacgcattaatattcaaatgttagagagtaattttatttctcaacataataaatgacagatgcaactgccataccaactgagaataaaaaatatatttatatatttattacataggtaagaatatttttacttgaaattattaagcttaatactaaatagtcaattttctagacataacaaaatcatgtttttcctcaccttatgaagtggaaagcttgaaattcctacttgaacaataatatcgctggaagcagagataggcctgcaaaaacatctaaaattaagaaactgatttatggggtcatgtgggcaaaaagacaagaaaatctaactagtcataaaactacaaacacatacatgtttttcgtttctaacatatcaaaaactttgcaagtactctttctcctacagactttcatatcaaaaacacatcaaaaacacatacatgctttaaggctttttcttttcttcttctgctctttaaaaaaaaaaaaaaattgatgtataacaaagtccactagcaaggaaacaaatagcaaataaaactgattatacaaagagaagaaagaaaattacaaaaacagagaaacctaattttaaatttaatttgtttcttattgaatttcatgtgatatatataccttaggacaaagctgacacaaagtaaactaaaactccatggcattttttacttcacttagatgagaaactaattatgtatcatgagcaaggcaagtaaataattctcttgcaacaataaactgataattaattaccttggccaatcataaacttgaaactaaatatgtaacattttttacttcacttagatgagaaactaaatttgtatcatgagcagagcaggtaaataattctcgtgtatcaatatactgataattaattaccttggccaagcataaacttgaaaggaatcctctataatagctggaatttaacttagtcccatcaagcaaagttccagcgtaatgaggggctaccacataagaaacctaatcaaattaaaaaaaatttacaaactcaatcacatatatcataagtccaagaaaggcattatcaatgcataagaagcaaaaaccatctcaaccttttaacatgctttcttaataatggtattaaacaacaaaacatcaacttgaattccttatgagaaggcttgttccaaaagatctaaacctttactgtaattcacattctccaatagaatctggaacaaagaagagcaagaaaaatcagcaccattgataggtgtgaagagcaccagtgctagtgtaactatatatatatacatagagagagctagacattattaaatgctatacacaaaatcctaaatgtggacagtaaaaatttatatataggtgggcagtggacaataaaatttagtttcattaaataaaacttgtagcctaaattaatgtcccataataaagcattagtcccgatcagagtcacaactcacaagccaaaattctaggcactagactcgcttgaggacaaaaatataacagagaaaattcgctctccgaaattcggaccatttgtattttattttatttaatatattacatattaaaacaaactttcatttttcgtagttcaaggaagataaaaattatgtatgtaatcttacttgtctgttgttaatcacattccatacattagaacatcactatttgaaccctaattagtattcagtaatcatactctcactcactcacattagccttaaaggataatttattaatacattcagtattactttcttttcttatttaaagacattattacttatagggcatgtaaatgatattcatttatacaccaacaagatcagatcctcttctcctcaattttcttttttcctctaaatccaccatgtataactggaatggatcaacaagaccaaaattcttgtatatcaccattcccatttcagctcccttactcttaaccctcgtatttttcccaaaaacaaatacacttattagaagtagtccacaaaacaacaatccacatctctatttccacaaatactaccaaatacagttcacagctacagccaccatttccaccttttaaacaattttttttctaagaatagaataataagggtcattatgtacctgtaaaagaaaaaagctccagaacgacgattaacacttcttcgaattccttcagagaaaaaagctctcaaatctcttaaaaatgtacctgtgaagtgaaaattaatcaaacgaatacgttaatattgaagagattcaacaacaattttcacaaaaacaaccagattacaattaacaaatatggtgccactaataccggagagagagatgaacgagaatgggagtgaatagggcaaaaggctttgggatttttggggtcggcttaggatggtggtgatcggtggagtggctctcggcagtggagaggtggcagaggtgtgtcttcggtgggggcagaggtgtgtcgtcgatgtgggcggaggtgcctcaccatgagagagagagagagaga

SEQ ID NO: 53282 - DNA, 876 bp, Cannabis sativa
agatagtaaagattctcacaatcacttgattcttggtgaaatcctggatcaaacatttgttaggaagaaacaaaaatgagtaatttgttgaattggataaagcacaaaccgatattaaattgtgttgaaaatcaggaacacaaaggacattttcaagaatgatattagacactttaatagttccaacaaaagaaactctagtgctaacaccattaggcaaaccaacaaattttatttttctattttcctggacagaaacaaacaaagatgaatcggagcacacatggtgtgtagctccagtattaagtatccatttagatttagggacaaaggaggtcataccagaaatattggatacaatgggttgttctggttgttgaggttgcacctggttttcttccagattctgtgctaacatagccattaatttctaacatttagcagccaaatcttgatgatcatgaacattctcattactgtcatgccctttagtacaattacctgaagatctagcttgctgatttcctggttttccaggtgtctcacgtggaaatctgccatataacttgtgtccaagaggatacccgtgaattctatagcacttagtgatggtgtgtccaggaacaccacaatgggagaaaatgggacgattgtcacctttgttatcaggtcgattatttccacgattagcttgggtattcccagcaaattgacctgtgttatcactgacttgctggttattctcagattgaggtataacaatgcctctctgtttctcctcctgaaatatgctagcataggctttattcacattaggaagtggatcttgaagtagaatttgagatctagcatttaggtaagacccattcagaccaa

SEQ ID NO: 53283 - DNA, 2394 bp, Cannabis sativa
aaggttagtcgtcacctcctagaaggaagttcaagatagtttgttccagctagctttgtacctattcggaacgtagttcaagggacacacttcgtctctctaaaacctttgtctaggaagtgtgcctctcatctggagaagctctttcttgagctgatgtggagatagtgttaagaggaggtcgttaagtctgttaagtcataactgactaacaacttaagttgttgtagctactgactttgggatccatatcccagatctataaataccaccgtactcatcatttacaaggtgtgattgagaagtgatttcgaggttgaagattgaaagaaagagagagattgagaggtagagagagataaaggtacagagaaaagagagattgggttttgggatttgtataaataatcttctgtagatgaagaagattctggaataagagtgtgcgagataaacactttgcgagaatccaaatagagaatcaatctcggctgtattgcacctttatacttagttaatcaataaagacttctcggtggtgttctataattggagtagagacatagatgacttcgatgtaaaggacctaaaccagtatatatcttggattgcaaatttgaaatctcgtcaatgctaattgtttcgtgattctattttagttgatttgattttgcatactagtaatttccctacaaatcagagcttgataatcgatcaagaacgcaaaatcaagattcttttggctgcatttcttgaagcaaagattaatgtcattaatggcaagattcaaattggaaaagtttgatggaacatgagatttcagttctattgaaagagtttgaaagggatattctagtgcaccagaaggtctttaaagtttttagagttatcaactgagaagaatccaaaaaagaaagcagagatggaggaggtagcattctacatgatcatcatgtatttgtccaatagtgttagaagaaaacttgttgataggtttaatgagattattgtaggattaactaatataaatcataaagttgatgaagaaagtcagtccatcattttgttaagatctctcccaatcgtgcatcaagaagtcaaatctgcaattaaatatggtaaagatgttattactgcacttaagtcgaaggatattgaataaaaattggaaaaagaatccaagaaaaaagaagtgtatttggcaagagggagatcacccaagaaaggaagctcaaagagtaaacaccatcactgtggaagttctagacacttgcaaagattttgcagcaaggcttcaacacttacttcaacaaacctcacaatggagataggaatgacgacatgcatcatcaccacaaaaaatattcaggtgcgatcacggaggatagtgatgactgctcaacatatggagaatttttttccatcttagaatcctcaatgatcatggagtgaattcttgactccaaatgcacatgtgttcaagtcgaaaatcattgattataaatcagttgatagaagtaaagttctaatggaaaatgataattcttgcagggtcattgaaatcaaaaagattgtcatcaaatagtatgatggtggaatcaaagtgctgacgaacgtaagacacattttggatttaagacgaaatttcatatctttaggtgcgcttaaagttaagggttgtgaatacaagtccacgaacataagcttaagaatcatcaaaagttctttgatagtgatgaaaggtgaaacgatcaatgttttgtacattctccaaggagaaattattctagccagagtagcaagtttagtaaaagtgtaagaatcagatatatcagtgatcaaggcctcaaagaactgcacaaacaaggtataattgataatttaaattcttgtgtcttaccattgaaacttgtattttaggaaaacaacataaattgaaattcacaccaacaaggcatacaataagaagatactcaaatatgtgaatgttgatctttgggggtcatataaagtacttacttactctggtaagcaatattttctttctttagttgatgattaaagtatgtgttttgacctatttgctaacaattgagaatgaatgcctaaagcaatttaggatttggaaaaatctagttgaaaagcaaactgatctaaaagttaagtaccttaggactaacaatggtgttgctgaaaggatgaaccgaaccctgttaaacaaagttacgtgcctactgttcagttctgaattagaaaaaccattttgtgggaagtagctactgcaacctaccttataaatagaagctcaaacatagttataggcttgaaaacctcttatgaaatgtagtataacagaaccccaaatctaatacatttaagaacctttgggtgcac

SEQ ID NO: 53284 - DNA, 823 bp, Cannabis sativa
gtggtgaacatggtagttgtgtgactatgaggctaagctaagagggcattccatgaaattttggtttataccgacgagtatttttgttagtgttaatttttttaagtgaattattacttatttatttattgttttgcttaactcataattttgtttatattttctaaacattccttaaaagaaaaaaacacactatattttcaatataataagtgttctatcatttttaaggatggtccaaataatttgtaacattttgactcataaaattgagcattattactatgctttgatttttagtggatttaagtgggagttgtataaaataaatctttttttttttaatttttgtactccacgtcttaatttatttttagagttttcacattatatactgaggtttttcaattttttctttttaaagtagggcagaattcaatattattcctttattcttctacacattattagttgtccagatctgaattttctttgggataattacaccgattactcaaatttttaacttttttatttttatactgtgaggtataatttttttcaaaaatattatatattttttttaaaatactgtgtactgtgttaagtttttactgttgttcgacggttgttttttaggtattctatttttatttttagttattctgttttgtgttcgactattgttttatatacactgtatttttgaaaagatttccatgtgacagtatttttgtaaaatttaacccaaattctaacatttttgtaagtttcccatttttttaactacggcccattcttacacaattatcactggactggg

SEQ ID NO: 53285 - DNA, 861 bp, Cannabis sativa
  modified_base (319)..(329): a, c, t, g, unknown or other
atttgcttgttttgtatatttgttctgaagatgttttgttttattttatcacttagtaatattgttgttttagttatttcaaacttttagtcgcattacacttttaacaatgatatttttatggagtattaaataggggtgttcggggttgggtggtgcagattgtagcctttttccaaaccaaactacatatgcggtatttgtaatttctcaaactgctaccgcaatgtgagatcttacaacctcaaaaactacactacaaaaatacagtgtggtgcggtaaaatttgagcgatttacactatcataattatcaaacnnnnnnnnnnnaatttaaaaatcaatctaataaaattttaacaatgtaaaaaaatcttattaaagttttaatatcataacatgtataccaatcatcaatgtattatattgaattgtctctaaaaaataatgtaatatatacacatattacatatatttgttcttatatgaaacaaaagaattaaaatcatattgtaaaaagtagtaacgttgtaatttatagtgcagtgcgatttgaaccgtgtttattaaattcaaaaccacaaaccacattgcaccactcggtttggcaaaaatacaaaccacaaccgcaccacaaagaatgtcaaactgcattttttatgtggtgtggtgtagtgcaggtagtttgtgcggtgtagacgatttgatgaacacctctagtattaaacttaataaaatatgatatttagtttttttttatatatttttaagttaatattaaaaattagatgtgtaattgaatatttaattaaaaaattgatctaataatttaattttgaatttaatttgagatctaattaga

SEQ ID NO: 53286 - DNA, 559 bp, Cannabis sativa
ttgaagcggggacgttacaagcaatctcactagaaacaatggagaatgaccccacatcctggaaacagtggtgtaatcactactcaagccactacctagactaatgttggtcatgggacacccggccaaactgttgctgatgggtagacaatggttgggcgaatcaccaacaccaccaatgaaggcacgagccaacccaaactgtaatgccatggcccctgacccatacggacgccagatgtgtggttttacaaagtaatttataattaatctatcagtttaagaaaagtgtggcttaattaaaaaaaaacttttggattaaactaaaaaacataacttttatataaaatactgctgaatacggggatcccctgtttataaacttttacagctagttccaaaattggtattacaaaatagggttacatttcaaaacataatcaaaagggtagcatttgtccactggaagctgagacaccacggttgatatgtacatcgctgggagacctctgaatcatggatgatccacttttcccttccctttacctgcaccatgaag

SEQ ID NO: 53287 - DNA, 978 bp, Cannabis sativa
  modified_base (486)..(488): a, c, t, g, unknown or other
ttcatttttttatatatgtatattctgttttctattagtgttatcttgtgtctattatattaagtttttagtatcagtattgttgtttctattttgtattttattatataatttatataatgattgtaattatgtttatgctggaaggagttttttgttgggataaataataaaatttatgtaacatttgcatgtataggatgaagactaaagaagatgaagatctcattgagattgaagataaagaagatatagaacttgcaaaagctgctattgatgccactatgaaagagaagaagaaggcattgaagtccaaagtttggaacttttttgagaggcttcctgagggtcctgataaaaaagaagtttaaatttttgctctatgccacctccacacacttgtatcgcattgtctaagaaatttctttccttattgagtgaatggggaattgaggggaaatttttttttcagttactttagacaannnatcttcaaatgatgtctctgttgatgcattacaaacttagatgaatttgaaatgtttacttccatgtaatggtgacttttttcatttgaggtgttgtgctcacatacttaatctagttgtgcaagatggattaaaggatattgatgtatcaatagaaaagattcgtgatagtgttaagtatgttaagggatcacaactaaggaagcaaaagtttttggaatgtgttaagcttgtatttacgggtggtgtttgcaagaggggattgtgtcaagatgttgttactaggtggaactctacctaccttatgttggatagtgctttagtttatcgtcgtgcctttcaacatttagcttggagtgattcaaactatgaacattgtccatctaaggatgaatgggaatgagttgagaaagtttggaagtttctgaaagttttttatgatgcaactcttgttttttctggctcaaagtatccaacagccaatttgtac

SEQ ID NO: 53288 - DNA, 1709 bp, Cannabis sativa
agtggtcatccgacctggtacattcattgataatactttctcaaaggttccccattccaataccttggtactaggacgagcttcatgttttcgtcataccgcccaagttgtatgcccctgattccaaaactttgactacctgatacggtccttcccagtttggtccgagcacactagctgtgctatcttttgtgttcaggaatactcttttgaggaccatatctcccacaaaaattttttgtacccttacttgcttgttgaagtaccgagccaccttttattgatgggctactaactttaggttcgctgaggctcgtttttcttcagttgcgtcaagtgattctgctaggagggcatgattagcttcctgatcataggtcaatcttttgtgggacataggttctaattctacgggcaacatagcttcataaccataggccatagtgaatggagtttgtctagttgtagttttttcggttgtgaggtatgacaataatacttttggtagttcctctggccagttccctttagcttcttcaagtcattttttcaaagtgtctttgagtgtcttattaactgcttcgacctgaccatttgattaagggtgcgctactgcggagaaactttttatgattccatggtttatgcagaaatctgtgaacaattggctatcaaactgtttgccattatttgagacgattttgagcaggagtccaaaccgacatattatattcttcaccataaagtccaatacttttttttagatgtaattattgccaatggttggtcttttgtgcactttataaagtaattaactgcgaccacttcatattgtactctgcgcccttacctcctttaggcaatgtccaattaggtcaattccccaaatagtaaaaggccaaggactttgcatccgagtgaggtcgttaggcggtgcactgggtatttttgaaaatctttggcatttgtcacatttctttacataggcctttgaattttccatcatggtcggccataaatatttttgccttagtattttcttcgataggctttgctcggctgcgtggttgccatagaatccatcatgtactttcttcttttgtaacacatctaagtaatggcatggagaatccccttctatacattaccccttctacgatgatgtatcgtacgaccttccttctcatatttcgagcttcatttctatcatttggaagttctccagtattgaggtaggctgctatgggtgtcatccagttaggagctatctctatcattttaatttcctccgcacaggtgatgctgggctcttctaggaattgaatagggactaaattggccttatctattatggtgatgctcgcgagtcgggctaaggcatcagcagttgtattttattctcttggaatttgcctgagggtgtaacccttgaattgtgcaagtggatcctgtattttgcttaggtaatccatcattttctctccccgggcctcgtactctcctaagacatgattttccaccaattgcaaatcactacagacttcaatgtatttagcatgcagatcccgagcaagtttaagccaacaatgagggcttcatattctgcttcgttgttggaagatttgaatccaaatttgaatgccccgtgttggtgttgcccctcaggtgtgacaagggcaattcttgtaccagacagttgacctgtagct

SEQ ID NO: 53289 - DNA, 1611 bp, Cannabis sativa
  modified_base (65)..(73): a, c, t, g, unknown or other
  modified_base (201)..(214): a, c, t, g, unknown or other
  modified_base (277)..(286): a, c, t, g, unknown or other
attactcagtaaatgaggaaactgtttattttggaaagttgagcttcccttttccctatatatannnnnnnnnctctcttcctcttgcatgcttcataacacacaaaatatacagtgcaaaagtgaaagagaatttcaaaatcccaagtgagagagaagtgcccacgcacaacaaagagtacctcaatcatagattggaannnnnnnnnnnnnnacatccaactgaaggacattcggcctcagatcttgatgatactctgcaacagaaaggaatcannnnnnnnnnatctgagtggaaggagacacattattccgctgcacccactgtaagctttcttaactttttatgtgttttatttatcgttttagatgttcatatttagttgttaaatcaacatacttgtgagtagatctaagatccttgtacaataaattccaacaggtggtccgtgagggcattgaaccagaattgatagaagaagatgagttggatccccgcgtgggatctgaaaaaactgtagagcctgtgcaggacatcgaagaagtacgactgtgcgacctcgaccctaccaagatcctccatctaggaaaaagcctagagccggaggaaagaaacaaaattattgaagcactaagggagaccatagatgttttcgtgtggtgccaaggagacttgaccagcataagccctcacgtgattacccatgtcctgaaaattaacccagacatgccgccagtacagcagaagtggcgtccccttgatctggtaaaagcggacgccctggaaaaggaggtagacaagctgttgaccaacggcctgatccgggacgtgtactacctagaatggctggctaatccagtactggtgccaaagacaaatgggacatggcaggtatgtatagactttaccgatctcaacaaggcctgctcgaaagatttcttacctttatctcagattgactagatggtagacgccacctctaggttcaagctactgtcttttatggacgcctactccggatacaactagattaagatgcacattgcagatcaagagtgcactagcttcaggaccgataaaggggtatactgctacctagttatgcctttctgattaaaaaacgctgatgcaacttatcagagaatggtgaaccggatgtttaaaggcctcctaggaagaaatatggaggtttacgtggacgacatgctagtcaaatccaaagcatgcatgagccatgcggatgacctcgcagaatgcttcgaagtagtctggaggtatggaatgaaatttaacccaaagaattgcacttttggagtcaagtcagggaaatttttgggatttatcgtcaaacaaagaggaatagaggcaaaccccaaaaaaattcaagccgatttattgaacatgccttcccccaagaagcacaaagatgtgcgaagcttgtctggagaggttgctgccttaagtcgattcatttcccgatcaaccgacaagtgtatcctttttttcaacattttaaagaagtgtcaagaatttgaatagactgaagaatgcgaggagacattcagaaaactaaaagaacacatggctaaaccaccgattctatcaaagcc

SEQ ID NO: 53290 - DNA, 1609 bp, Cannabis sativa
tgggacaatattctccaatattatctcacactataatatgtagaaaaatataaaatttaatcataaacatattattttaatattaaaaaaagaaaaaaaaaattagtgtgatctatagtgtcccactaaaaatagtgagacactatacatatatataggataacatttagtgttccattagagtaattttgtgtcaaaactccactattttaagattttagtgtcccattggagaagccataacgtactagtaaacaattcttacttcgtggtggattttaacaaaaatataaattatttacataaaataatttatatcttttatttaatgataactaagtcctaaaattgtttaagattttaatattactaatggaactcatagaaggtttcacgtcaccaccctatgtttcatcctttatatatgtatatagataaatattactaaaattaacacaagggtaaatactattttagatctcgtgttttacaaaaattaccgattgaaacctttagttttgttaaatgacaaaatggaacctatatttttcaaaatagttaaaataagagtatttcatgaaattttccataaaaaaatagggacgaccctaatatgatatcttgcccatgtctaatgtgtgaaaattttaaattatcaaaaaactaacatattaatttactcttatgctgtagtgtgacggtaagactgagtatacaatagatgatattaaaattgtgcatgaagaatgagacgactactgagtattttccagcatagttttactatttttttttgctagcaagtataatcttagctagatttaagttagaatatgtagttgttgttaggttatttttagcattatttttaggttaattcttagtgtgtttttattttagttctattcttgcagatttaaaatagaagaagattagaaaatattaaaggaataaaagatgacatataaaatagagaaaattgtgcaagaaaataaagctaaaacttcatgcttgaattcgactatgttctgattagattttggaaaaagtcaaaacataaaagctctagatctctcttatatctttacagaaaatcttgaatcgtccaatttcgagcagtataaagagaaatggccaaaatactatcagtcaacgcaatagaaaactcacctctgcttctaatcttaagcagaataggttttctaatgatcataagaagaataggttttttttttcttcagcgcattttattttattttattattttttggctataaaatgtacttcaataattttgggggaagcaattcggagggaaataacagcagaatatagagcacgaatttcagagatcaactacaatactagaggcattcttcagagggttttcgacattattttcttctcttttcttaaagttaatatgtatgattttgctttcataaacatgagtaactaaacacttaattagggttagatggatattttttgatatttcccccaatttctatgtattatatataattcgtgcttaactacttttaattgccttatcaccaattaactgtctatgattttgatgcgagatctgagaagtgagtgtcaatta

SEQ ID NO: 53291 - DNA, 1255 bp, Cannabis sativa
tatgatctctgcagaacccctcatggacctcttgcaggatttttctagcttcagggtctgatacacaccttaagtacatcatcctggttcctcttcggtagagaatattatccatcatcacataccgatgtgcctgatactgtagcggatagggccctttcttgaggcaattgacctttctttatgtatctaatgatggggtccatccaacttggatcttgctcggtcgcagccactgtatctttgattctgatgcttggcttcgcgaggtgttcaacaggtactacccccagtctctctatctcactgtctgatgccaacttggccaagcagtctgcgtgagcgttcttttctctgggaattctttccactttgtactctgtgaactcatggagtagttcccggacaatagctacatatgtggccattttttctccacgcgtttggtattctccaaagacttgattgaccaccagttgcgaatcgctgaagacttctactcttgcggcccccacgacttttgccaacttcaatcttgcaattagggcttcatatttggcttcattgttagaagctgggaatgcaaaacgtagggctgcctggagccgaagtccatctggcaatatcattgctatcccagcaccggatccgttttcgtttgacgctccatcaacgataccttccatgctggggtttgcggtactaacacgcttcaactagcttctacttcattaaaatctgttatgaagtctactaaggcctgtgcttttatggagatgcgtggtacgtagtgtatttcgaactggctcaattccatggcccatttgaggagtcttcttgacgctttcggcttctgtaagacttgccgaagtgggtggttcgtgaataccttaatggggtgagcctggaagtagggtctcaactttcttgaagccatgaggaggcaaaaaactaacttctcgatcaaaggaaaccttatctcagcccctatcatgcgcttgctaatgtagtacattagatgttggactttatcctcttcccagactagggctgcgctgacagcgttctcaaagacagctaagtttagtaacaagtcttctccgtgaactggctttgatagaatcggtggtttagccatgtgttcttttagtttcctgaatgcctcgtcacattcttcagtccattcaaacttttgacatttctttaagatgttgaaaaaagggatgcacttgtcggttgatcgggaaatgaatcg

SEQ ID NO: 53292 - DNA, 1106 bp, Cannabis sativa
tcgtccgaagatcattaaaaaccgttctatatatgagaatttttccagtttcatgctttcttatgtcaaaccacaaaatttgtttatattttattcatattttattcattttatgaatgttttatgaataattttatgaaaattaatgtactaaataaaatattcaacttatcttaatttttgaatatattcttaatatatctagcactatttataaaatctatatatatacaatatttaaatcatatatatatatattaattaattacactaataataaatttataaaatttaatacgaaatagtacaattattatatgataattaattaaatgataaattccataatttgcaattagtagtaaatatttttcaaaaataaataatttagacattaaattatttaatttggtaaataaatataataattgtgtagctttaagtgttaaagtcaacacaattattaaaattacatgtctaaataaaattatgtaattaattatcaaattatacttttttaattttaatttatactaaataacatataaattctgaatatatgtttttaaataaaaattgaaaaaattaattaaatgtaatttattgactaaactaatataaataaagaaattaattaatatcccaaataaataaaaatttatttaaaatttttggaattttccttttttttttttaaaaaaaaaattacttgggaaaatgacatgttgtctttcccgtcttcaaccgtcaaactaggattttgacctgtttttattttttttattttttgcaacttggttctaactgacctaacctaaaaccgatcgaaactctcaattctgacgaccaaattgatgctaaatgaatctaaatataaaaattaagaaattcatatagatttaatgcatggagaaaatgagaaaattaggctttaatttccttaaaaaagattcaaatcggccatacataatttcaaactctttttgaaaagccaacgtactaaagcaacattattttgatgttaaaatgaatgagttattgtacaaatgggactgaaaatcataaatataatgattcttaataattttatgcttcaaaaacactag

SEQ ID NO: 53293 - DNA, 665 bp, Cannabis sativa
acaccaaccttatcataggtttgctatagatttagtagctgttaagtgtaatataaatttaaagagtgttcattaaactcctcataccacatcgtgtcatattataaaaaaaaaaaatatagtttgaagttttttatgttgcggttaaggtttatatttttaccaaacagtactaataattaaatttttaataattacgatttaaatcgcgccgcactaatttttacaatataatttttatttttttttcataaaagaacaaatatatgtaatggtgttcataaattaaccaatttaatctaattaacaccatccaatctaattcaattcacaaagtgtggatatatgcacttgtatatattagattagattggaaactctaaaatctatacttgtgaatgttgattgacatgtaaaagtaaccgatataatttaattcacacatatttatatgtatattttaaaaaaattatatttacaattcatattttacggtaagaaatattaatttaaaaatttaatacatataatacaaatatcttttaaaacttcatagatataatgtatattctattcttatttataagaaaaatataattttaaacaaaattaaatatttctttatacatgcaatttttttcttcattctttgaatttgttatttt

SEQ ID NO: 53294 - DNA, 1347 bp, Cannabis sativa
  modified_base (29)..(40): a, c, t, g, unknown or other
  modified_base (146)..(157): a, c, t, g, unknown or other
  modified_base (732)..(736): a, c, t, g, unknown or other
tataaattatcatattaatatatgtactnnnnnnnnnnnnaatggagataatgataagaaaaatatattcattctattattattactatgagactatattgtgattaaagataattacttggaaatgaagtttcattttggtgatnnnnnnnnnnnntaatgagataagaaaagtgaactatgtgagttacacttttttgtgttttttcttgtcatagcaagagtaaagtgatcaaaatgcatctaaattgtgaaataagcttataaaattggaaggaaaattttagaatcaaagaaagtagatcattgtagattcaaataacgagatgaaagattataaaacttgagaagaatgtttgaatcttaaaaagtaaagtggtgtaacaaattgatgagaagtaattttatgaactttggactaatctcaatgaggagataaccataaaattgaagaagtaattttattattatgagaatgttgtacaatctattaacaaattttatgtataatttttttaacaaaaaaaaataatgggtaaaaaaataattctattaatttacaaatggtattttgagagatttcatgtgatctctaaaaggttcatgataattttgagtgcatattatcttgtaagataatgtgtagagaacaaaataaaataaagaggttttattttaaggtgatacagtatttttactttatgataaaatgtgggggtgagatttgagttnnnnnaaatttgttgagaaattattgattatatatctatgaaattttaaatttaatattctaaattaatattttactatgtgcatatgtgaaattttaatatatttggtgtctaaattagtgtttagtttttatatgcttgatatacaaattattgagaatttgagttgtgttaaaatcaatattttatgattgcattttcaaagcttaaatacttaaggagaatagtggtcaccttaaaggtggacactatatttggctagcatgatttgtttggagtcaaaagtgtaaggttaacaaattgcttaatcttcatacaagattaaagcatgaattttgagggatggaacctaaactttttaggatttataaaacactaaagaaatataaatatcacagatctaatcatattcctaatagtgctttaatatagaaaattctaaatcataaatctataaaacatttgctaaattaaagaagaagatgatgataaaacatgaacagaagcagcactaacctgaatctattgttaaagattacagagaaggtttgatcttctaagaatacactatctttctaaagtatgttctctaatgggtaaggagagaatacagaaa

SEQ ID NO: 53295 - DNA, 1943 bp, Cannabis sativa
aatggatatcagaaacagaaaggcggttagggataaaatctaagagcaaatccacagcagccctgtctacaccttgagaagcaaaaagagaattatagaatgtgaggaaatgactgctaatatcagtaggattctcaacaagctccccattatcaagaataaggcgtcggataaggttattttctacgacgaagagggaggctttagaatgaaaatatttggtatttttatcaccagctctaagccagtcaactctcgaccgctgcttccagaaaatctcctcctttaaaaggagagagtcaagctgggattgaagctccttagcctgtttgctatgcaaatcagaaaaaggttgagaagagaggacactgtcaaggctatcctggatttcagcaatacgatgtttaaatttatttttgtttgtactccaagacttaatcaccctggtgcaagactcttgtctatgcatgaagtgctgaagaggactgagattactaggaatcggagaattacgattccagccatcctcaacaacatgaagaaagtcaggctcagaaaaccagaagttttcacacatgaaccgactgctacgagggttcttgttaagagggtcattaagcacaactttgagagccctatgatcagagccaaaaaaacctaagtgatggagggtaacagaagggaaaagtcgaaaccaagggtcattggcaatacaccaatcaagtctttcaaaaagattcccatgtttccaagtaaacttattaccaatgtaaggtaaaggggtaagattaaacttagaaatgaaactctgaaaattatgcatagcataagcaggagggctgttaggactagatctatcattgatggtaagataatcattaaaatccccgaaaatgaaccaaggcaaatttggggctatgtcatataaacggtgcagtaaagtccaagtatggggcttgtccgaagcaaaaggggaaccataaaaacaagaaatatgccatttagtattagaattatcagcaaaagatacaaggcagtccacatgattagaggagtaattgttaatatgtacatcaatatcagcattccaaaaaagaagtaaacctccccctaagcctctcctaggaatttccaaaacattatcaaaagaaagcttggacttaatactatgactacaaccagccccaagcttagactccataacaaaaagaaaacaaggcctatgttgcttcacaagaagggagagatttagaatgctcggggactccccaaaccccgggcattccaacttataagactcatttttcaaggcggggttgctcagcaacacccgccggtacaacatggtcagaatcatcaggaggattgggatcagcaattccagcagctcgtgcccgcttcaacatgctacggatggaggagccaacagcaatctcttgacgagcaaaagaccgtttggtacccgtgcctcctccaatgttcagaggcctagaaggagcctgaggcacaaaggaggtggggacttggatgcctttccctttatccttagaaacagtcgaggaagctgaaggcagatgggtgggagtcctctgttccttgtcaacatgagtgatgggaggagcttcgttcatagtaacctgagagacagcacaaagaaggctctgaagactagaacatggtggtgcagagggttgtatattttggtacgaaatgagcgaggaggcagtagcttgtggaggaagaaagtcttgagaagagaccagagcttggttagcaagagtagctgcaaagttttgatgctgagatggtgattgaggaaaaccagataagggaatggaggcagctggagacaggaactgattaacagcatcttgaagatcatgattctgcctcagagtgggaaggttcatctcctcgaagggaatggagttggccagctcgaa

SEQ ID NO: 53296 - DNA, 759 bp, Cannabis sativa
tatccaatttttttttttagttgtgtatatttgtagttaacgaaagattggcaaaagtgagaatattgttaggtctggtgttatgacttggtgagcttgtctcgttgattttgtttgatattgttaaggttttttttgtctggttttgacggtgatcgtgagggctggttgaggtgcggttctgatggcatcaaattttggtactgaggatcttgactggagtttgtcgatcatcccactcgaggaggaggaggagccagcggttcaatacgatcggcctttggttgatgatacagaggtcgatacgcggtggagtatagtaggttgatttcttacggacaacccgatcgacttcatggagatgcaaaacttgatggcggtgctttggaagccaggtatgggtatgtatgtgaaagatttgggtggaaatagatttatttttcaattctatcatgagatagatattcaaagggtcattgatcggagtccattgacgttcaaaaacgctccattaatctttgagaggttgaaaaccggggatgttccaagggctttgcggttgcatcatctcgaaatatggattcaattgcatgatattcgggcaggttttcagacggaaggggtggttttagatgctgtgaattatatcggaagctttgttaaaaccaatgagaataatttcaatggggtttggagggaatatctcagggttcgggttcggttcgatatcgagaagccattaaaacggcggatgaagtt

SEQ ID NO: 53297 - DNA, 781 bp, Cannabis sativa
aaataacaaatctctaaacaaagcgtcacaactgaagccacatatagcttaacaaaagccaccttgtccttgaaagccatccatgacaagcccttccaaccatcctggtaccaacccacacctgagccacaatcccaggcttatacgtcctaggcggcccggtggtaccacagtcaaagaccttgatgagaagatacaaaataccagtgtgcatgatcagagctcaaaaaccaacctatgctagaattgtcactttgcattgagcctgcaaaaagttatgttatgggtgagaaaattgacagcaagtgaaaacatctaaggaataatttgtattgtgaatttaccagccagctagagactgaagtaaatgccttcctaacaaaaaatcctatagttatatatagtttttttttttttaaattccaacacgacattatattgtagccttacatcctagataccaaaatttctcaaacttaaactcaattacatttggccattaaattactacgtataagaaacgtgatttgctattaaagggtcatagttcagaatatcacagctcatcccttattcagagcaaattgttactatgtgcattcagtatcaccaataaattttagaatgaaaacccaatcctattgtacatatatgtttacatgaaaaacatatcagaaatataacatataaagttacttaatttatactaggataaattaatttatactagcatttcacctttaaacaattatactagtgtacatatatgtttacatgaaaa

SEQ ID NO: 53298 - DNA, 766 bp, Cannabis sativa
ttctatccacttggttaagtatcgaactgctacccactgcgttactacactccaccttttcctttgggtaactgtctgacgaggtcgattccccaaatggcaaaaggctaaggaattggcatctgagttagctcgttgggcggtgcttgaggtatcattgaaaatctctggcatttatcacattttttaagataggccttggagtcttcaatcattgtcagccagaagtaaccttgcctttgaattttcttagataaactctgcctggcagcatggttgccacaaaatctatcatgtacttcagataaaagtcttgcagcttcttcttgtgtgacagacctaagtaatggcatgaaaaatccttttctatacataactccttctactatgatgtatcgcgcagccttcctcctcatttttcgagcctcatttctattatctaggagttcccaagtgttgaggtaggttgttataagcgtcatcgagttcagggatgtattaatcatttcaacctctttcgtgtcggtgatactaggttctttgagagactggataggaatcaaatttgttctatcatttacattgctacttgcaagttgagataacgcatcaggagtcgtgttttcttcccttggaattcgctaaagagcatagcttttgaacagtgcgagcagatcgtgtatttttctcaaatacgctatcatcttttccctcgagcctcatactctccgaatacatgatttaccaccagttgtgaatcgctgca

SEQ ID NO: 53299 - DNA, 1870 bp, Cannabis sativa
ttgtaaacagtgtgtaatcggcatgggattgagtgaatccttcttggataagagcatcggtgagttttttgtaccattgtcttgaagattgacgaagaccataaatagattggtttagcttgcacacaaaattagagcccgtgacattagagggaaccttgtaaccttggggaagctgcacatagacctcttcttctagatcgccatttaaaaaggcattgttgatgtcaagttgcaaagtgtgccatcgtttgatgttgacaatggcaagtaagagcttgaaagtgaccatttttgcaactggggagaaagtatcaaaaaaatccaatccttcttgctgcgtatatccttgtgcaactaagcgagctttgagtctttcaacgctaccatcactgttatacttgattttgtacacccatcgacaacctattgcgtgcttgcccggtggaagaggaacaacggtccaagtgttgttgatgatgagggcaagtaattcattgtccattgctgccaaccattgcttgaattgtgcagcttgtttgtaattttgaggttcaaactcggctgtgacagcaagtataaaggctttgtaagctttagataattttgcataagacatgaatttagatataggatgaggtgtagtagatttatcctgtaggagattgtagcattcaaaatcttgaagatagcttggaggtcgtggacacgagaggttcttcgaggtgcaattggttctggtgtagaagtttcttgctgtgaagtaacaggaggtgtcgactgggctggtgttgacatggtattttcttgctgttgagtagcagtatgagtatcatgggagatattgtcatcttcattgtcattatcctgtaaaatgggattaaaggcagtatcattgtaattttgtgggaaataatcagctatatgcgtgttggttatgtgatgtgatggtaataccagaggtaaaaaaggatctatagattgatcttgcaagttaagtttatgaaaaggaaagacattttcatgaaatataacattgcgagaaataaatacttgtttggtattaatatcatataacttataaccctttattcctctaggatagccgatgaagacacatgttcttgcccttggtgcaaatttggttctatgagaagaaatagtggaagcaaaagctagacacccaaagcatttgagatgactgtaatcaggtggtttgcccagcagtatttcataaggggtcttgttcttgaggttaggtgttggtgttcgattaattaggaacactgctgtcatcagacactcagtccagtattggataggcaggcactttggactgaaaatataaagcccttgctacatagatgttttcttcagcaacggcattttgttcgggtgtctctatgcaagtgaaatcatgggaaataccattcttggagaacaaatctttgaaagcaagttcaggagcattgtcagatctaaaacgtttgaaaacacaattatattgagtttgtatgtaagaaagaaattcaggtataatagatatgacatcagatttttgcttaagaagataaatccaagtgaacctagagtgatcatcaaccaaagtaaggaaatatctatggttagaatgcgaagtaacatgatagggtccccaaatatcacaatgaatgagatcaaaacaattattggtaaagttgtttttattaggaaaaggtagtttcctttgcttagctaaaggacaaatgtaacaaggttcaatactatgcaaatctttagttttacaattcaaagaatcttgtaataaatccaaacatttattagacaaatgacccaaacgcttgtgccaagtttcagcagatgcaaaagc

SEQ ID NO: 53300 - DNA, 990 bp, Cannabis sativa
agtccttcttatcatttgattgtaaatggtgaacgatctacacaaaaagtaaacttagcatatataaatttataaatataaaatacgcttacatattgggatgttagatatagaacctacatgaaaatgatgaatttcaaatcatttggtatgtctctattaccgaaatctaagtacgccatcgtctgcttacttagttggattagtacaagcatctagtgaaacatttccctagctacgcgaacaaatatgtgtaaaactgttaatacataataatatatattatgaagagttataaattataaaattattcattttaaatatacttataccgattgttgtagagggaaataacctattaatctggattggtcatcctagtcatacgagtgactagtgcttgacaacggttactatcaactcctacttcgatggcaatcacacacgaatttagaaattcatgtacactttttagtcgattgatgtccaacattcattctttcacgtgcctgataaaaacacataattaataactatcactgtcaaaagaaaattatcaagtttattttaagagttagaaatcatacttgcaccaaactgttatcggttgggctcccaagtattgcatggtacacaattcatgaatgccatttttaagaaaccaaatagagtcatttttcgaccccaaataaatcataagcaacatggaattagattatggatgacttcgactaccttttcaccgagttccagaaggtaatgggtgaggtagtttgtcgtggctggatatatataacgaccatggtctgttggcttactcgacctcttagggtgttttggaagctatgttcgaggatcgaataaatcttcagaggcttgtctgttctcctcacagtttgtatctgaagttgcttattggtggcggtgtttatatatatatatggaaaaaaataataaagttaataaaaatttcattaatcagtaaacaca

SEQ ID NO: 53301 - DNA, 877 bp, Cannabis sativa
gttgcctcaacccaaaccgccagcatattggaatagcacatattcttcggatgcagattattcctcctctaatcggccccaatcaggcaatgtaagcatgacagttgtcgaggcgcgatagagaattcatacaacaaatcacaaatttttatgtaaattttcaggctttagcatcatttcaattgtatagttggagctttccttaattataatgatccattattagatttattgcctactattgttatctatgaatttggtacaacaacattccagttcacactcttgtttgagtcacaaaccaatgtaacttgatcaagggctcatctggctccttgttgtttggtctacaaactcatcgaaacgaacccgagaagcgttggttgagttgttggatgatggtaactttgttttgagagatgagaataaagaaaactatttgtaggaaattaggatactttgttttttttttcgttaagctcaattgttggtagtgttgtgatgattaacctcttttgatccattttctttgtatcttttggttttaatagggaatgagatcgacacttgcaaagtattgagtgccaaagcctatcagccaggtgaaatactacaactttgaatgtctactttggtaaccattgttagagctagatgtgaatgcataaatggcttctctatttttggtttgatgtcaacattgaaaaagagaaagggaccacttgtcttaaactagcccctccccattatgtatcgagaatcatcacttttggcagaggaaaaccgtggttacaaaagtttaatcacaaccaacacaaaaacaaacaacaaacagtatagttaaaatagctctatttagtaaagaagattgttgaat

SEQ ID NO: 53302 - DNA, 1333 bp, Cannabis sativa
  modified_base (249)..(256): a, c, t, g, unknown or other
taaatgtattacatgtgttctttgacttattttttaaagctaaccaattggatttgcccaacacttacatctcgagaacacgatagtgcaattaagtgggagcgctaatcatgaatatagaatctatagtttctataaacacatagtagtgaaatgatggtttccttaaagcttggctaaacgagtttaaatggtggaatactcatttcagcaaatatattagtttactaaaatatcatttacaagtannnnnnnnttttaaggataaaatactttgaaaggtaaaatggtaatttctccttactcgatgtaaatcatcaatagaggatcattgattatttaaattgaaataatagataatttatagcgtatccatacttggtatagagagttctatgtaatcaagagtgcgattccgagtctatagtggagtcaggaggaattaataagatagagaatttacttggtaaattctttcttgggagcttaattatatagacacatggtcttcacactacttgagataatattgtcttgtagactcaattaattgatttcattaatcgattagaattctagataagactatgtcttatttatgaatttcactaagctagggctttttgagaaggaaaagagaatttacttgtttattaattaaaagactttaaaaggtctaattaataaataaattaaatagaaatattatttgataattaattataattattaaattgataaaattggcattataaagttagaatgaaaaaaatagtatttgtgaaaagaaagataagtttcaattaaatggcaaaattgaaactcattaggcccatataagaattcagccgacatggtttaaataaaactattttatcttttcttattccattttaattctaaacctaaccataaagctatcatataaatagaatatgatagctcttatttttagaacattatttggctcactttgtcagacaaatagaaagtatataaagctctcattatttttgaattctcttcttcttcttcttgtcaattttaagcccttaagtgatttagtaattgcccacatattttaaggcaatactcaagatagtgtgaaagactgtgtagtcttttgttacgtgcaggagaatccaagttcagatcttgatcatactctgcaatagaaaggatcgaggattagagatctgaacggaatgagttattttatttagctgccatcaatgtaagttttctatacctttacgtgtttaattcattatttttagaaaattcatatttaggatgttagattatagaattataatccaacatacatgttagt

SEQ ID NO: 53303 - DNA, 1451 bp, Cannabis sativa
agtgaaggaatagagtaacatactgtttataggagaaaactttgaatcgtgatgtgctcaattgctggtgataagtgaaagttagaatctttatgctctcaaatgttttagtttcttgttaattagtgagagaaagagagagagtgagtgagagaagggatcaaagaagaaccgagaaggaaaagagtaatgaacatttttatagtatactaatcattaatgttagctgttgctatttatttcttgtcgggtgcttttgctagttgatcactctgttaaagcaatctttttggggttgctgattacaggtccaaatggtgaagaatttgcatggtatcagtgtacagtaagcattctcaacatactgtgcttagtttttgattttttcttttggttttcggaaatggtttttctgttgtgtatccaatgtaatatgtaccaacccccctctcttatcaagaataaatagttaaaattattattcttgaaaagaagaaagaatacgaaacaggatactctagctttcttaaagcgaatcacatttaattttaatagcatgaaatgaaatacttttctatagaagatgaaaatggttaattagaataaatctttattcttaacggttaggctttggtttggtcccataagaggtttgagtcccatttggttttggaagcctagataacttttgttatagtttcttgttccttaaatattgtaggattaggtgaggagtctagtttttcaaagaaaaaaagtatctctttctgtatttcaatgtaattctttcttcttcaggttagtgggggacgggaaggtcgatcaattggagcttatgagcttgcaaaagctgttgaggagcttggagctggagagatactgctaaattgcattgattgcgatggtgaatgtgacttcttccttgacaactccctgtcacatatatttactgtaaaagaagttttatttaaaaacttagtatattgttttattaggccttccactcttgtccaactggtgcacaagttgcagtcattttattgtatctttgtatttactattttcttctcatcacgtttcaggtcaagggaatgggtttgatatagatctgataaagttaatatcagatgctgtgagcattcctgtcatagctagtagtggtgctggtgctgccgaacatttcgaggaggtgttcacgaaaacaaatgcatcggcagcccttgctgctggcatttttcatcgaaaggaggtgaggttatagcattttttaagaactagtccaattttttatgtttttcagtggtgcaattgagttttatgttataacctttgaattatgtgttcacaggtaccaattcactctgttaaagaacatttgtcaaaggaaggtatagaagtcagaatctaattaatatttcgaaagcttctacttgttggacaatagaggattt

SEQ ID NO: 53304 - DNA, 1431 bp, Cannabis sativa
cccagaaagttcaactcatggaagtctttctcctcgaagttccatgcacaattctcctcctctggccaacttccattgcacctaggagatctggccgaagtaaaccaaagactaggagagcctctccgagcctacatcagcagacggaggcgactaaggtttctcgggtaactgaggatagaaagttgtccgcaatactagggggcattgaagtccttggtgagctttggaaggacatatgaagaacggacaagtagactcgatgagtgattttcttgacagtgtggaaggttttatcaaacttgaagaggccattcagcgatcagaaggtgaacaaaaacctggtaagtcaaaagctccttctatcgagacatccatctagctcccccattacccaagcaattcaagctcaaatggtaaacggtctagcaacaataataggcaagggaatgagaaaaagggaaatttcactggcaagaccgaacaagccccccaggagaatcctgccaagttactgcatttaccatcctgacggaggacatagaaagtgtttatatagctactcagtcattagccctgtataaggggcctgcacccatgaaaaaagatgtcaacaagagagatatgaccaagttttatcgatttcatggggattacggccactacaccaatgaatgcaacaacctaaagcgggaaatcaaattcctgataaggaaaagtaacctgcacgtacaaaagtatttcaaggctgatcaaaatcagtgaagagataacaaccaagacttgctaccaccaccagtatatggacatctgcaagtcattattggaggcccgcacatacctggagatttaagcaaagcccgggagaggtatgcacgaacagtacaacatgagcaagaagaagtagtcttggccgtagaagagaggaagttgaagatcccacgggtaggggaacccaccataacatttaatgatgaagatgctgtcaagattagatttctgcacaacgacctattggtcgtggaagtctagatagcgaacaagatggtggccataaccatgatagataatggagcctcttccaacatcttattcaagacaacatataaaaagatggggctctaactcaaagatctaaccccttgtcttctgcccgtatatggtttctcgggccaaggagtcgcatctctagggcaaatttgcctacccctcactgttggatcggctccaacaagcataactataatggcacaatttctggtattggacgttccatcagcctttaacgtcatgttaggccgaccagctttgtatgacttaaaggcatttatgtcgatattccattcatgcctgaagtttccgaaaaagaatgcggtagggttgttgggttttatgccctaattaaaactccatttcaatgtaatctatttt

SEQ ID NO: 53305 - DNA, 2414 bp, Cannabis sativa
attattaatcatttcaatacaaaaattataaaaattaatacatattaataacattgtatgttttgcttagccaaatatacaattactagtacattgatttgatatctatttggttggatcatactctgacaatatacgtttatatatttgattggataatacgtatatactcacagtcatatatataatatattttcttattaaatattaaatctatatataaattctaataaaacataattaattttaataataataataataaaaaaaaagtggtgaagaagatgttgcccacgcagttgatgcctttatttaaaatattcttccaaaaaaaaaaaaaaacctactgttgtctactaacttgtttgtcagaaacagaagcctctttatttttattttttctaaaaatcaaaacaggtgcctcattaattctattgataataataactcattacaactttttcccttcttttttcattaaaatgactaaaaaaaattataatacactttactacaaatccttttcgacgctaattacaatttagtggttttatatttttcttcataaggaaaaacttccaaattccaattcccctttctctaaaattaaaagaagaaaagactattttaatacaacttctaaaggtatattgtagttctaaaattacctacaaattttaatttttttaatagttacatgcattgattagatttttagttaaatgacacagattgaatttgtaataaataagatttaaataaaaaatgatcaataaatgtaaataataatatcataatttaaagaggttcgaccgaagatatcagtaatagtctactccctttatattttattaatcagtattgcaaaattaataacatgctctctaatgcaaaagataacaataacagagtcttttttctctaagtactcaaattttcggatccattcccaggtaatgggtgaccctttatataagagaaaggttagtgcttcttgcttcaagagacacggttattgcggagatatctcaactgtctccttagttttcgaatgtggttgtaatccgactcttgtgataatattctgatattttcgtgggttcacaaccactattgaactttttatggaatttaaatatttgaactagttactggcgatgaaggtccctcagagtaagttatgaccgtttaactttctttggggttatagcccctactttggggtgccacccccgagacccactctgaagggggtgatagtcgtcacctcggggtggtacccccgaggctccttccacttgatcttcgatgttgtgtgtagtcttaacgttatgaagatgcactatatcaatcatgtcttatgtaggtggaatgtgttattacttggaccgtgagggtgcaggggtagagacatacccctagaataccccccttagggagtaagggatgtactcctagataaaccctttatataataaggggtgtacccctagactaaccccttaggggataaggggtgtacccctaaactaacttttagggggataagagctgtacccctaaactaacctcatcaccttttgagtagaccattacatttgaggtaggggtattaatgtatacccccttagactggtttgattcctgtacatgtgtggtaattgtacgtacatcctgtttatgagggtcttaagtccaccgttcccctagggtagtcatcttgctcaagctagggagaaatatgactgtcagacttctcttccaacggtcaggacctacggtcgtgacttacagtcatgacttacggtcatgacttacggttgtgacttacacattcttcatcaattcagtcctaatgtcctcgtatcacgtgtcatcatttttgccacatcaccaccatcaaaatttaagtaaacagtttatattattaaaagtaaaatttaaatattatttttactaaaaataatatttacaaaattatttaccacatatataaaaaaaatagttaagtgtataaagtatttatattttatttttcacattataaattattcaaaaaattttaaaatttacatgtgattttaaataattacaatattataatcataaaaaaaaataaactaaatttttttactaaatgtcaaaacaaatacatcaaaataatcttttcacaagtgtactatattattaaattatatattctttaaaataatacgagtatataataattattaaattaaaataaataaaatctaatattaaattataccaacaactttcaaaaaatcctaaatatcacttcaaatgcagccacactaattcacaaatgtcactctttttattattttttgacataattcacaaatgtcctcttaaaaaaaacacaaatgtcctcttaaaaaaacacaaatgtc

SEQ ID NO: 53306 - DNA, 1010 bp, Cannabis sativa
ttaataaatatttgaatttcaaataaatattgggtattgccttttatctccaccatatgtaaaccttatacagaaaatacaaaagaataagtttggtatagcctatcagtaattttttcttccaattcttgtaagattgatttatttactatcttttgaagtaatagatacccgaaggtagtaatataacataattaaattaagcacaaaaaaacatacaattaaaacatacataaaatagtgtctgggattttaagggaaagaaaaatgatttgtaccaaaggtgtacgacgcccaacttgtacacttccttctctatttgtaatagaatactttgaagttggaggtgtgactgctagttctagattcacaatcttccttagaatccatctgtaaggatatttaacaaaagttattgaagaaatcataagagaaggaatgtttgaaaacacaatacatatatacattctcaagcacaatagtctttttattttcttttcatacataaaaaatagcataagagaaggaacaaaaacccatgtcataaaaaatataaccaggaaaaaaatacacatggtatacagaaagatacaaaaaaatatattctcaacatctgtacaaatacaagccacacatgtaaagaaatgcaatatgagaaacaaaagtctgtagagctatgtttgcaatgaattaagcagggcacaccaaaaaaaaaagagacaactaatcaatagatagataaaaaagaccaacagtcttaataccaatcattaagaaaaataaaattagcatgaatattttacttaaataaaattatatattttagttttgacctcaatttaacataaggagaagagaaaaagacaaatctataattgatgcaacttaattaggaaaagaactactcaaaaaaatattacttttactcaaaatttctatcacatggtgtaccaataaacaataatataaaaaaatagaaaatattgattaaattggtaattcttgagaaa

SEQ ID NO: 53307 - DNA, 778 bp, Cannabis sativa
tatatatatatatagtaaagtgggggagagaagagtatactcacaggtacttgaaggccaatttggctgatgctgtccatcaattcctctaccttattttgatcgttggttctggttcgcaaaaggggtctccgaatcttatccagcggaagctccaatatcactggaccacctatattcccacggctcgttggagaaggagaccctaaaattaaaaataaaattgtgctaaactttccttttttttctatcccaggaaacaagcaaagagattttcaatttgagagggggagaaagtttataccatttgaggaagcagaaacagagaaggtcctcaaactgttgggagcttgcataattaaactcaccatcttttttattctttttctttcaacttgttttcaatctgtctctccgttctgtatgtggatagtgttaatagaaaaaaattggaatggaaaaaagtatatgaatagatggatgcgttttttttttttttttttctattgcctgtttcgtgtcagctcacctttggaagatggagtgtgaaacacgtgtgacgcacatgcaacttatcatggaagtagattaatgttatgcattattattatttgtaaaatattatataagacatatatggaatcgatgattgagagtgattttgatatagttattaagatattggaaaaagaatttatttcagttgagttgtaattttttatttttgttaagattatgtaattttgtagaacttttactatgaatgttttgcgtatat

SEQ ID NO: 53308 - DNA, 761 bp, Cannabis sativa
aattaattgcatcctaatacgtagtttaatctatttcaaatatatatatttcaaatatatctttcgattgagaaagtttgattagttgaatggctgcagtaatatatatatattcatttaggtttataaattacacccttaccatttattttttaaattaaacattttaacatgtgagaattatctataatttttttgccatttttgaaaataatgaccaacatcaaaattaatctttttgtttctttttattttatatttaagagttacgaaatatctaattaattatctatattcaagaattataaaaaaaaaaatattaaagtttaaaattgatattatcacaaattaattttagtaacttataaaattagactctatattgaactgttttaaaaaaaacttataagggtactgataatatcttaacatcatgaatcaattacattacaaaaatttagttaggtaatatattgtcttaagatacttttatacttatttttttagcaatatattttcattatcatgagaattattaataagtataagcatttattatatagcttattattatagttactatatatgatagtttttataatgtaattaattttattatgtttaagatactattggtaactttataagtttttacaaattgaaattgctttatcaaaaaaatttgttattagtatactatatggtaacttttgaatacaatataataaaaaaaaatataataatttatgatattagttgat

SEQ ID NO: 53309 - DNA, 1912 bp, Cannabis sativa
tcgttttagaagttcatatttagaatgttaaacaacatacttgtgagtagatctaaggtcctggtaaaataattccaacagaaagacccaactaactctaggtggtcttgcatcaagtatctctagctcagaagattgctctaggacatggtccagtcctagctctaaaggctcaccgagcctgttcagtggattacctcgggcgtcatgttacccgagagacaatccatgaggatagaacaagtcctatacctcctcctcctcactggaacaacctcttccaactcagattctacatcagaactctcatcccctgagtccatctctggttcaccatcagcagggggctgagcggtcccctccaccattctaacttgaccccttgtggccaccctagccatgtaagggtcatatggaagcatcctatggagagtctatttcgttctggccataagaacaatgtaaataaagagacgtacgtggttgtcaccccctattcaacacccaacactacctgtatggaagaaagaaggggaggtgagcaacttgacaaagctataaacacattaaaatcaatggtacccaagggtaccttccagggaaaataaaatgtacaagatcgatcaatgaccaagtattgtcttaagtacacttactaagacatatagtaagtcctaagttatataattcactataatggactcactacctagctttatatagagtttctgagagaaaccacgcataaggtcagagttttatatgcctccaaggtcgtcacgagaccctagttgaggtcaaaaagggagaaaaattggctacccacttggagccttggccttgaccagccaaggttccaggtcttagaggtcggccaaaccctaagacccagtctagtggctggccaggaaccctaattctaggcatagatcgccagcctagggacagagtccgtatggccagccagaccccatgaaagccccctatggctggttaggcctcaaataaggcctccttggccgaccaagatctacatggatcagaacacgtatttttcaagaactcaaacatgttcttcgtgttctttatgactcaaagagccaagaatcacaacaaaggttagattcaaatatttttcgtctagaaatcacacattatctatcctaaggctatcatgcagattaaaataccgaaaggacaaacaatctaactaagaatcaaagcatgttcaaaacaagaaataatgttcatgcatccatggaaaaataaatcaaatcaagtaaaatagcaggaataggaagcttacccacaacatgattttgttgaagaagaaagtgggaagcttggatcatcgaaacgacacaaaaaccttgggaagaatggtacttgtgggttcggccacctagagagaaggatgagcttttctaaagaaagttttgtagtgagagaaagtgaaaagttaaaagtgagaagtgaaaaaagggtttccccctaaaagtcacttatgtgggccccttttcttcacttacctcacctacacatcataaaggcaactaaagtagttattgctctactgcaatgagatcagacagtcaagaaaaagttttttaaaaggctaaaagcgcataaacttttattcaacaaaatagtattgaccacatcaatatagctagtaaagtccttatccgtacagttgtccacgcatggacttggggggcaaatgttatcccaatttttgttctcatgacgtggcatgcttacatgaaaaaaataagtgccacgtggcagtacatcttaccaataggaaggccaagtcagcatctgaacaaatagagccccgacactcaaacgggcatcaagtgacagaccagctcccattaagagctggccagccagtcttgggactacacca

SEQ ID NO: 53310 - DNA, 671 bp, Cannabis sativa
accaagaaagtctcaaaatggtccaagattttttatttcaaaatcgactgtgattttcccttttaaccttgtcatctctattgtgtcattaactattgaaatgatatcattctaataggcaattagaatagtcatcttaccatcccagtgtttgtagaacaacatatgattagaataagcttgtaagtattcttggtttacaatcatctttttaatgtatagcgaaactctatgagactattttaacctataaaatgatttcttcaggttgtacaattgttgtagttatttatcaaatttctcatcaaaagacagaagttccatatagacttctttagtatgttttctattaaggaaggtattctcaaaatacaattgttgtagttaccaatattagttttcttctaagcagaggaggatgctccctcaagctgaagaataaatgttaattatgcctatcttgttacagataatcaacccgaaactcattcaaagccatagtgaaaatagttcttaattgttctccgagcttcacatatcctatggagagataggccttgttgaattttctcacaaaaaaatgataatcgatctcaatgtgcttagttcactatgaagagcagcttgattatcacaccgtaatttttctagaagagaagccttgaactcga

SEQ ID NO: 53311 - DNA, 1273 bp, Cannabis sativa
cttggaccaattaaataatgccattgtgtgtgtctagttgtcatttaacagagaacttaacatgaggtacctcatttgcaacaaaatattgacaaaaggtatttttaccgccaataaaataagttaggtatttatctgtaattgagagttaaacttaggtatttacgccgcaaattactcttataaaatttatattttatttaattaagttaattataattaaccatacatttaattaatttttttcaattaaactatttaacaaaaaataactgacgaatataattaaatttaattttaaaataaaattaatgttaattaatattttataagaaaaaaatatactttaataaataaaaatgaaattagattcgtcttatataatttattaattatttttaattaatttttaaatttatcacaatcatttaataatgatttacaatccataatgtctcaaaataaattcttaaaaataccattagatccataatagaatcaaaggtatgacaattgatataataataactatattttattttttttaaaaaaaaaatagagagacaaagataaaatattttcatttgtagttatataaatgataaaaatgaataaactatttttattaagtggcatttagtaacacttttatttttaaattttttaatcacaaaaatacaagtaaaatttttatttttaaaattttgtttttgtaaaaataaaaatatgttctataaccacttttgtattttgattttaaaaatagaacttaaagtgtgttctgtaaatttttatttttattttcatctgttaattttatttaggggaattacccaaaatactgtttttttaactcttttttttttttcaaatttacggtttgggtttctaatgtggttgcagcgctagttgtaatagaggtttctgtataattttttattacaatttaggttgcagcgctagttacaataggagtttctatataaaattttgtaaaaatacacaaaaaaaaagctattttaaagtgtaaaaataaaaaagctccttttatttaaatcgcgagtccgagtctggggtcagagttggggtctgggtcggggtccagggtcagggtcatgcggtcaaggtctgggtcccaaggtctaagtttaggatcggggtccaaaatattaaaaaattttgattatcaattaaaaaattaaaagtgaaataattttgattatcaattaaaaaatgaaaagtgaaagcaattttatagaatatagttttaaaa

SEQ ID NO: 53312 - DNA, 1486 bp, Cannabis sativa
ctgtaatctttacaacaattctcctttgaaatcatggggtttgattacatatcacctagtataaatgcagttattatttgaatatcacacaactatgattaatttgcttttattgggtcaagataatagtttattaaacatgtttcaaatcataacattctgggatgtcttgacaggaactcaataccaatgaccttgatagcgaggaggagcttttcccctatctttcagaggttgttgatgtacgcctcatgcattcttttcttgaagggataacacttcattttgataatcactgttcttaataacaaagagtacttcagcagtcatcattcaaatgtcaccttctgctcgagagaactaatttgccaagactaataacctcactaaaagatatctgaagctgattggtgaaagtatcaggagcatgcaagactgttatacttagtttgtttgggttcacccgactgttatacttagtttgtatattatacgctaagtgttttcacagtcattatgcatcgcttacattttcccaggcgcagcgaagttgatgtcttgccttgtgcatccaatgtcgtatgttttcttgttattacgtgaggcaacagtttgtatatcttcatctcccataggaccttatagttagcaagttgcaaatatactctgtcattttcgcatttaatgagttattccattaaatgtaattaccgttacatgcatcaatccatattctccttaacttgacacgtgtcttccattgaaatggtagccgaattttgagtataaaaattgccccttaaaaatttctttctaataaaaaagtacttttttaaatgcttatagagggtatatttttcataatcccttttttcaagaccacacatgccctcaattttaatggctccacagttttgagggtcattattagtattcatgaaccgccttttcatcttctacctcattcccaaccgttagattttcccaacctttggccttaacgcttactgggttctaagtataaaatgacagtccaggcttgccatattccataaactactagtttttggtgaaattcatctaaaaactggattgtcactctctttcgcagatgtcccatccaagctcagaaattaattcctcaaagcttgtaacaccaaaatatacaaaccgcttatcctctccgtacgatcccaaaaatttcaaaccttagtttaaacttgaaacaaaagattccaagactgaagatcatccgattgatccaaacaaaggagacatagttaatcgttactggtgatccccataagagatttttgagagtaggcatcatcgtcttctaatggtggtctgatctgaattcgtggtttttctcaccattgttgcttcactgaacttttatctttgtcattacagaaatggacgtagattttgagagcaagttcacaggtacccctcaggctggcaagaaatccaggaagaaggtaat

SEQ ID NO: 53313 - DNA, 831 bp, Cannabis sativa
cttgtgttttgataaaaataaatgtgcactaatttaaatatggtggaagtcactcactctggactacgatcaaaagatctacatgtgcattccctattgttttttaattttgaagtgtcaaagttttgaatattagagatattaaaactcttctactatgcggagtgcggacgtctgaagtgggtattttttgctttgttacaatcctagatgaattgggcatggaaagaatcaagttggagttttttccttgtcctcatcatggttttttcaatcatgttcgtttcaacaggttagccttctctcattctctgtcacaatttttattacttattagtgacatataggccatcatctcattggtcattgtatgaaatgattatttatatatatatattcattatagaatttttatatttgtaatccttcttcaaaatgttttcttttcctgaaagaaattgagatttttttctgaaagaaacttgggcattactgatttgcagtcctccttcaaaattaaatgccaccataatttagcttaacctcttccaaagactccttcaaaaagcttatctggggaagaaaagttttcttttattattattattattattttggcaaccatgaaaagccaagtttggtcatatagattttgattgtaattagtataattttattttttaggagagatcaaataaaataaaatcaatatataattctatatgttcaatctctctctctctatattactctgtgaaaataaaagatcagatctgaatgatatctcagatcctcttttggattggactgaaaactcgattatgaggtgag

SEQ ID NO: 53314 - DNA, 1495 bp, Cannabis sativa
gaaccaatgggaagataaataggcagaatgatccaagagaatgggtacgggtggactggaccccattcgggaccggcctaagaagtgaccaagattggaaaaataaaaacccttggcatgatcaccccatcgaaaagggggaatcctaaacctatgaattcgttcatcaaactctactggcctacggttagagtaatcctgaatgaaagggacatgatgaacaatcagtggagacttaccagctctgaaagtgctggcatctagagccccggtgttagggaccgcgaatggaaacttgggccgggaggtcgtctgctcttttctggcttcaatccgaagggccctccctgcagcagcctaggccttgatgtaggccaactcttgttccctcttaaagcagtacttcttgtactggtcctcagcggaggcgatgatgtcatcctggagcgccttttcagagttgaagttgcgaatgttggggtagagaaccttagacaagttaaattcatccactgactagctctttgaaacctacaatgtgcagtcgcgaccaagtcccctacattcaacccgtcattgtcataggtggaaaagactttggcgtgctgggggaaaagttgagtaggtgcggtgcggtgcatagggggaaccctgacccatttagtcagcaactccgggcgctcaatggctttgaagccggaggagaaaaaaaatagatggcgatattccttaacattcttttgaaaatcgtaaggaaccgaaccttcattagcaggatgggcctgaagtttgaaaaaaccatccttgagtttgtctcccttcttggggacaaataaaagttcgtaaaatagagaatttcagccgagttgggcggagcaggccctgacaacatagaaaatgtacaggcctgagagtaggcggtaagcttgggggataagttgataaggcacgaggccaacaaaaactaaaaaatctataaaataatccgggaatggtaacatcgccccggacatgaggtgggtttgactcgaagccccaaagccgccgtagttacggttgggcatttcatcgtctctgggaagacggtggaagactccggaagcagagggcctgatcctggcaagtgtgacaatcctctctagttgctgggcgcaagtcagagttgagtgaactcgtctgcctccaagccggtggatcgacaagtgtacttttccttgaccacgggccctttcatcacctcctctagggtggccatggtattggaccctctgcctgaggacttcgctctagtcgtagggatagacattccttgagattggtaaaactctgaaatttcctgatcgaagctgaaaaaaccgtgctcgtggaggtcgtttagaagctcactcatttgaaaaagagaaatccagcagttaacccccaaaccaaaccctaacgtacaaggagggaatgggggtcccctaaccgctggaaggaggccccctccgaatgtctg

SEQ ID NO: 53315 - DNA, 3132 bp, Cannabis sativa
ttggttccttctggctttaatacttaggtggaaagttgctgtgctgtcatctccatcacgaatccaagtgagtttggctttttgatgaagaaaggatagatagctagcatgatcatcagaataaatttgcctcaagtctttttcctgctcctgtattccagaattgaaaagatccaggtgcaaccgattctgacagtcatctagagcttctttggctttaatcacagcagcctaaatatcagaaaacccctgcttgtttattcctttgaaaatggcctttagagctttgagttttgtcaccacttggtacatcttggtgccttcatgtttctgcctccatattcttttaacttgttctgcataactaggatgtgaagaccacattcgaaagtatcgaaatggttttttccctatttgcatattctgatggacggtaagtaaagctggtgcatgatcaaagataccttcatttaaaaatatagtctcagccccaggaaaagagtcaatccatctatcattagctagagcccgaactatttttgaatagattctagatgaatcttgttgtttattacaccatgtgaagaagttccctgtatatttgatgtcctccagctgacagtaggctacacagttcgggaaatcaggtgtaaggttgtgtctaactttagaaccaaccctttcatcttttgcaagtatgccattaaagtcccccatcacaatccagggatcaagagtggccgtatccattaggtctttccagagagctttccttccttctacctaattaaatccatacacaaaagtagtaaagaatttcttaccatctaaagtagatacttcgaggtggataagttgacttgtgcatttgagtatgttgatggaaaagaaattaggattccaagctactattattcttcctcctttatgccaagctaaattactagtaaagcaccatcctgagaacatatttgagtacaaggctccaagcttggaagcctttactcttgtctcgaggagaccaactaaaccaacattttgggaattgatcaattgcttgaccatattttgctttcgttggttgttgactcctcggacattccaacttagtagcctatccattttgtagaggaggctctccccctcctccactcttcccccttcttgtctgaccattttcctgcttctcatctggtattgtcactgcctcatcattgttgttctcttgttgatcatctaacacatggaacgagttcccagtcattgtaccagtaacatgaggcttgctttttggtttccaccctttagtaacaggctgaaagtctctagcaaccgtatctgtgtttgtggcccctgctggtggtagacctttcgactccttgagtatcgattgttgctttttctgccctggttttttcctgcattcttcagtaagatggccaagaccattacaatttttacacactaggggtttccattcgtacttaatgcccactgtgacattgaaaccatattcatcctcaaaactgatagttccaggtaaatcctgcttcattgatacttcaataaggattcggggataggatagtttatgcctcatttttgtattgtcatccaccattatagggtttccatatttccctacaattttgaagagagtgttttggccccaatacttcaagtccaagttttcaagttgaatccaaattggaacaacttggatatcttccttcttaaagttggtgtcgggatcccatggcttcattatcactggcctgttattaaagaaagtataccctccattaaggatggtatatctgtcctcaattgtggtaaatcgaatgataaagatgccataggatagcaatcccactttgtcaactttgtctttccagattcgacgaacaaacccttccaaaattgataaaggcgaattggccccaagtacataacaaactatagatgaattccaaaataaaatttcctcttcaatatcgtccatggtaatcttaactttcccttttccagtattatctctcttattgacatcagaattctcagcattattaaaagaatcagttaagttccttaagacagaaccagatctcaagatagggggaactgagtgattaccttcctcaaggtctttgctgcattgaatattagcttccaggaagaaagcaaaatcagcacgaacatcctcttgttactgcagggctcgaagagatgatcgaggcgataagatcaaggattgctcatccagtgcagcattctcttcaataggtatctcctcatcgtccgtaaactcagcagcttcaattccaaggatagagtccatggatttgaatttcttagcatcggttgatgaattagggcctcgtttcttcgcaccaggtttcttagctaccgattgttgcttcctttgcgccttagatctcgtttttgccatggcaccagctcgagagctgcgagagcaagaaacagaggaagcttatccttcattataattttattaatattaatctatctaagagagagagaagatgtttaattttaattttttctaattcgtgatatttttgtgtctttaaaaataatgaagaaaaaaattagagcaaatatttatattacaattactttaatatttttaccaaaattaattaatctctcataatcaacgtatcatattaatatatatatatatataatttatataatcaatttctagtatcaatttaatatatacatatactataagatacatctataactataataaattaatgtataactatgtaattttaatatatactatatacaataaaatttattatttttatctccaataaattactaataatataattaaaatcacaaattcattacatcattcttattattgctcaagtgtaccctaattcctttaagtagttatacaaataacattcttaacacaacacagcaaaataaattaaaaaattattgtacttttaattaatatattaatagctcctaatattttccttaaaaataactcacatagttaatttattaacagtttatgtatttattttctcaaaaataaaaaataatttatgtattatgaatataatataattaataagttaataa

SEQ ID NO: 53316 - DNA, 1752 bp, Cannabis sativa
gggcacaaaacccaacacatgcatgagtttcgtattgtgatccgagactattatactttgattattaagttcgtcgagttaatttatcctctttgttgcacatgtgtcatgtaactaagcccattattaactgttcaagatatgagtgtaacaattgtctgctaaatggtacttttaaaatttttaagggaatttttaattattatctagataattgaatcgtcctttgtttggagttggcagcgcggctaccaataacctcgctgcggcagttgtagaaagttgaatttgaggctttctgtagccctctcgccttggccataagtcgtgctccccacagtcacgaatattagtcgcgaccaaagtattcttgcttcgaccttttttagtaaaacatgcataactttctcatgaaatctctgaacgagttgattcacgatgcgttggaaagataaaaaagagatctaaaacttctatgttttgactttttccaaatctgatcagaacaaaattgaattcaggcttaaagtttcaactttattttcttgcaaaattttatttatttggtagatcaccgtttttcaaaatttaacagttatacattttaagtactgttgatatctgaaactaaaaaattaagcgtaattctattcttaaaataataataaagaagaaaaataactatgaaagtaacttaaaacttacttagactaaaaatagtctaactaacaaattcctcaaaattaaattcttactcgccctcgagtaagactttgattcaaaaaaaaaaaaaagataaaaatacaaactaacacacaattaactaagctttcagacaatcaaaccgtttctgccacctgtgaaacttcaatcaataatttaaactagaatttaaatcccaaaactctaacaatggatttaaatacgtactttaaaaaataatgtaaagatgcaaatttgcttcaatgttcaaaaaacatcatattaatttattctactctatccaatctttccacaatccaatgatcaatatgcttgcatgacttatttcactccactaatgttaacaaactttgtttgtaatcacaagaactttcaagattgtaatgaaatagattagataataggtagataaaaagtcatttatgttatattataccataagcacactataaacctatcaagcactcgtatataaatatactatcccgaaattcaccaaagaaactttttttaaaagattgagaatttctaacttctaatccaacaacactttttcacaatttttttttaagaaaaaataactatacaacttttttttttcttctttttttaagaatataaataacattattagtgatgataaaaatacttttacaattcacatactgtctcaatcactcacttgtaataataatttcactcatacacaattcatctcccccaaacttatttctaagcttatggtataattcaaccagaaaagaaaattgcaagtggattcaaagttagtctcataaagtggctaaaaacaaatgaacaggctaaactcaaacatgctaactagggataataaagataaagataagcttgaaaggtccaaacaatccaaagaaaattacctatcattttccaaacaagtattgtcaagggtttcgcctcacgaaataattcatgcaaattctatattcaatcaatcttactacaaaccaatataaaacaattataatacaatctaactattgataattt

SEQ ID NO: 53317 - DNA, 2004 bp, Cannabis sativa
aacatgaccctagccgaaagtagggaccccaagtttcacgaagtgaaggccgatagatttccaagaggtggccaagggaggatgagacaagccccgccaactcttcggagcgtttgaggaaaggagtattgaacacttgaacccatagagggattttgagaaggctatccccattgagaacatccaaggaattggggatgtccataaggattgcttggttgagataagtccaaggttgctgcaacaaaacccgacgtctgtccccgtcacagccaaactcaacgaggaaaagaccattggagcggtcagatatggtcacgggattgcgggaaatattattccaatctttggtcattttttctatgaagttcttacggttaaaagacttaaccgtgtgaaccttgatcacaagaaacagcggcataggttgaatctcattatcaggggtgtttgtagggctaggttcatgaagagtttgaatggtgctttcggtatctgtgagattaagagcaacggataaggaattggttagctcatccatgatgcaaatggacagaaaaaatcgtaaaactaaaaggtcaatataactatgggaggacagtgcaaactgtaggaatgtgtgatatatgtttctgaaaggaggaaaaagagaccaaaacagagatgataaatgatatatttgaccaagagtacacgtgagactaaagacctggggactttgagcaactgaccaaattagataggggctgtaatgacttgaagattttaacaaatagaaaaacttaactatagtgtaataccagaacagagagctaaatggatcggtgggggagacacttggggctaaatgcaaaacatgattcaagagaatgtgagggataagaggccttgagctgctacagtggaaaatatgtatatataagtaaatacgactactataaagactcttatgcagagaatatttcttagaaggaataaaactgtaagtgcaagaccaaaagaatggtctgcccttatatagaaaaatcctagtgaagaagttgtgaaccgatttggtaacaatcacttcaggagcatttactttcggacagagttgctgcacaataggattacaaatggtactaggcagatcacccttacagattagtataaatgctaacagttgaaaattttgggcaaaaggaattatggaaattctgaaaattattataaaaacatttcctttacccaaattccttttcaaaaatcgattatgcaaaggtaatttaatgggcaagctgaatttatatctaaaataacctaaaaaatacccatttctctgatgggatttgacagggaataggaaaaggtggaagaaggagttaatacctgtaaggggttgattaatgcttgtacggttcggacttctgggagactggccggagttatggcttaagtgactgggatggttggggcagggcagttcgacgcggctgaggcggcttgggcgagtcgagctgtgctgggtgtctatggaggacgagtcggagccaccaagatcgatagatctggggcttgagaaagattccaccgagtgggaacgcagaggggatgagtgtgaactcattggggatgaaggtgagagtctgttcagactatgcatgtcgagagggagacgaagaagagtctggagagtcacttattaaattctatctcatattttaggatttggtgccaaaaacttgagaaatactacataatgattatcacactattatgacacttttataatagtaagaaattaatgaatgatcatcaccctacacatgcatacattaagataattaaaagaggatgatgaatacatgacatttttttattctcatataaatatgcttttttctgaaacaattctcatataaagattagtataataagtaaagtatcgaataaataatcttaaattaaaggaataatgacataagacactatttttttgtaaaatatttacatttttatgtttaa

SEQ ID NO: 53318 - DNA, 790 bp, Cannabis sativa
caattatttgtttaagagaacatttcctcctaaaaaatattaacagaaatagtgagggacctttaaataattttgatctatgaggaattcattattataaaaagtatttatatttactttaaacaaaaaaaaaaaatataacttactcttagtaaatttatttaatttaagaaggcttattataaaaaatatttgcgatgaccattttttattatttttgtatttataaattttgcttggatccgtctcctgaacagaatgcaatttataaattttgcttttctttgtttttcattattttttacattttatgttaatttaataaataatgtatatttgacttcaaaattacataatgtatatttatttttatttgactttttttaaaaacatatttttatttgactttagtaaaaattttatatcttttgatatatttgaaaaatatttatttttacatgtgttattttgaaatgtgataagaaaaaaagattgagagcattttaaaatattgaagtacattttttttttcaaaaagttattaaagaataaagtagtttgccaattttatttgtatataaaatattaatttataatctatgctcaccttttctaatgctttttttccttctcacatattcttaaaaaatgcatttattttaaataaatttatttttaaatattaacacaagaaaatatatgaaatgttattttaataagtatatatatatatatatatatttgttcaaaaaaaaaaagtatatatatatgatacattataaaaaataga

SEQ ID NO: 53319 - DNA, 1525 bp, Cannabis sativa
aagatgagtatttggcctggataatgaacagaaaagggttggttatacaaaccaggtccgatcaagggatcaaaaaatagaaattttgcatgataatgatgtttgcaatcaagaatttcataattttgaattaatggctgattttcactaagcccaaaatgggtgagtgaaagtgaatatcgtgaaattgaaattaaaatgcagttatgatcaagcaacgtgattaagcactatcaagatttcaaattcctaaacataaattttctatggttttcctataccaagttcaagaactatcaagctttgcaatagaaacctagaaaattaaacattcaaatacataagaggaaaggagtgaagaacttactcactgttcgaagcttgagatttgctcgggttatgttgattggtgtttcctagagaatctttgaagaatttgaaaaaaatggggtttcttgctctggttcttcaaaagcaaaaatggctaaaagttgttgattaaggttttcagccctatttataagcagattaataaggcaaagtaatcatttcaaattttaaatacctcgagttccccctgaaagtgcatgttaattcaaaggcatgccacacgtttagacaaagatctagactgagtgaagtccatgtgcgaccaagaaggttttgtgcagacttggggggaaaatgttatcctatttgttgcacaatgatgtggcagaatacacaagtgacacctgtccagcattcctcgcatctgggtggagatgaatgtcctgaacagactacatattatacatcttcatgtataacctctaattatccgagcagggtgaatggtagatcatccgagcacgcataaagctagtttttcgaattacttatcaagacttaactactttagaatgatctcgtgaagtccaaccacaatgataattcctatggtcatgggattgagtcagaggaatatggcaacctgttccaatttcctattttgtgtatcataattatgtaatgaatattccttccttttttatacattgtaagcaaaagagaaaccttcccttatggattaagaccctataaataatgacttagcttaactatgaaaggggattggaagaattgcttcaaagtgatctaagagaatcactcagagactccattgtaagagctttgagagaaaaacactttgttctttatctcaagttaatgcaatctaaggagagtaggctattaccacacttacggggctgtacctcttcaaaatctcgtgttctttattatttattttttctctattttaattatattcttaatcacttattaattgacttattttcattggctaaaagcgaggtcaaaaaatttaaaattaaacaaatcgaaattcaaaaattagggttgtaacaaccataaatatcttttcaaaaattatcaactaacttttcaaaattatgttgtttttaaaatataaataaatatctaacaagataaaatgataaataattatcatttttctaatctc

SEQ ID NO: 53320 - DNA, 1591 bp, Cannabis sativa
  modified_base (199)..(199): a, c, t, g, unknown or other
  modified_base (260)..(275): a, c, t, g, unknown or other
  modified_base (907)..(913): a, c, t, g, unknown or other
gtaaaataatttccaacaagttttaccaccaaaattttagattaggggattagttgcaaactttaggaggttttgccgcaaatttcccttttggattctatatttttgccacactcgacaaatccatttaaaatagggtaaatactattttgaaccctgtattttgcaaaagttaccgattggaccctctattttgttnaatgacaaaatggaccatgtattttccaaaatagtaaaaataggaccctgaattgattttnnnnnnnnnnnnnnnntaataataatccgatctaaaagtgttatgacaaaactgtttacatattctttatctgttcgtattttcaagttggttatattaaaaaaaaagttgtcaaaaattaagttaagggtcttatttgtaccattttagaaaatacagagtccattttatcatttaataaaacagagagtccaattggtaacttttgtaaaacacagggtccaaaataatatttacccttcaaaataagtaaaaaagaaatttaataaaattatattttaataactaaaaatataataaattattaattaaattggaattctttgagatattatatctttaagaaccttcaggctaactctagtaaaatattaaggtagtgtttagttgggaggaataaaaatataagaatggaaatgtgaataaggataggttgtataaaaaaattgataaaaagaattattaatttttttcttattatgtatcagaatggttcttttttttttttttttctatttcaaaataaaatagtcattccaccaaaatggtagaaatatcattctattggaatgaccttccaatactttaatatgcaactaaacaaaagaatggaatgaagattgttttctttctattccattccatttnnnnnnntccaaccaaacaccacctaaaatgtcaaatttaataagatttgacactaaattcattccaaccttatcatatttataacattgtctatagtgtcccattattattagtgtgacactatagactacacaaagtatttttctattagtttttaatatttaaataatatatttatacttcaactttttgtgtatttattatttgtgtttatttatatttaataaaataatataataataaagaatatgattttagtgttgtgattggaatagaaaataatttagtgccaaaattttatcatgtgttgatttaacactaaatttaatatctactattggagttgccctcataaaaataaatatattattggtttatttttattgttgacttaaaaatttagactaaacttctaaggcacacccactcgctagattagagagaatacaaagagttgtaaagtaattaatgagagacacaataatttatagtagttcactcttatgtcgtgatagtaatgaggctacgtctactttgagttcttatttaagaatcagaagtttcgaattctagagagaaattctagagagagaatctgaccttatgggtagttttctgaatcttcaaaataagctaagagagctctctttttagagaaaattatattgtatacccactttactt

SEQ ID NO: 53321 - DNA, 1254 bp, Cannabis sativa
ctggccaccatcttgttggctatcaggacttccacgaccaatgggtcattgtgtggaaacctgattttgacagcgtcttcattgttgaatgttatggtgggctcttctgcccatgagattttaggcttcctctcttctacgaccaggattactttttcttgcttgtgttgtactgttcgtgcatacctctcccgggctttgcctgaatctccagataagtgcggtcctccaataatgacttgtagatgtccatccaccggtggtcgtagcaggtcttggttgttatcgcccctctaattttgatcggccttgacatacttctgtacatgcgggttattttttcttatcaaaaattcaatttcccgcttcagattgttgcattcattggttcatggccatagtctccataaaattgacaaaacttggtcgtgtctctcttgctgacatcttttttcatgggtgaaggcttcttgtacggggttagtgactgagtggccatataaacactttctatgtcctccgtcaggattgtaaatgcagtatacttggcaggattctctcgggaagcttgttcggtcttgtcggtgaactttcccttttctccattccctttcctattattattgctggatcgtttaccacttgatcttgaattacttggtgaatggggagttggacagatgggtagaaggagcttttgacttgctagaattttgttcaccttctgctcgctgaatagcctcttcaagtttgataaaaccttctgcatggttaagagaatcactcatcgagtctactggtctgttcttccttaggtccttccatagctcagcaatgacaccaatgccccgatcatcgcggataactttccgtctttggttacccatgaaaccttagccgcctccatcatgaatctgctgatataggctcggagaggctctcttgttctttgatttacttcgaccagatgtcctaggtgcaacggaagttggcgagaggaggaaaattgtgcatggaactccaaggataaagccttccatgagttgaactttccaggtgccaacttgaaataccattgttgggcggcttcaaagagagtggcaggaaaaattctgcaacatacgtctcctcgtactccttgctgatccatttggatctcgaaatacttgagtatacatcttccaggtcagcatcttaaacttgtggggcaactccaggatattaatctcaggggagaaaggggttccacgtgct

SEQ ID NO: 53322 - DNA, 1119 bp, Cannabis sativa
  modified_base (1071)..(1073): a, c, t, g, unknown or other
aaaagtttgttgttttacataaaactattaactaaggaaaccaattttacacgatatccattgtgtgtgaacacattcagcaatatagaaacacaataatttttgacagctacccaaacaatagtgtgcaacaatgtgataatgacagaaagtgacaatgactagtacactcagatgtgcagcaacctgaaaacaacagaacaacaacaattaaaaaacttttacttgctccaaggagggaataaatttcaaaagatattattttggttgatactagcactttaacaacaggataaaccatacaacaacaagaaaacaatcaaaagtaaacccccgaagaagctgaataatcaaaaaataaagacaataatgatatcatgaagaaacttatcttaaaagatgaaaaaaaaaaagcacaatgaagatgccctctttcttttaggcattatatcaaacacatggcatgcatttctttatatacatatacacaaaaattaacttaagaaataagaaaaacaaacacaataatcactactacaaaaaaggactttttgcttcggttttaaagtgacacataaataatttgcttcagtttgtgtaaccgacgttattaaatattaattttttttgcttcaactttgaaccgacgctaaataattttttgcttcagttatgaatcgaagcaagaaaaaaaaaggttttacttcggttcataactgaagcaaaaaactaatgcaccaatgctaattgggtttttgcttcggttatgaactgaagtataagaatttttttaaaaaaatcaaaaccatcacaccaccaccaccaccacaccattatacatctcacaccaccacatatacagagatttgaacaaccatttaaacccaaaatcaacaagtttaaaccactgcaccaccaccactacaccacaaccactacaccaccaccgcaccaccaacatcgcacgccaccatcacaccaccacccatggcgactgcaccaccgcaaccttaaaaaattagcaagcaacaatgagaaaaagacagatcgaaagagagagagagagagagnnngagagagagagagagagattagaagagaaaaataaatagagagaga

SEQ ID NO: 53323 - DNA, 878 bp, Cannabis sativa
aagaagacatgaccattaggattggacgccacagccccccatccccattttgcgaccttcatcacaaatccagcatccacaaacaagttaatctcaactaaagacagatcaatttcggtagttgacactattcattcgacccctgaggagaaggctgacctttagatgacaacccagcaacattagcatcttggtatcttcaaagatagttaatggtccaagcactgaccatattattgggaagaaacttatgatcatgaacaaaagtattacgcctatgccaaatgcgccaacaaagggcaatgaactcctaattcaattcatgtttactcaaaatatgtacacaatttagtaacaattcataaaagcaagaggcatcctttagagaatcgagccctttcaggatctaatgtgatcggatacacatgagcaaaggaaaacaccaaagagcatgaatatatagtagtctcattattctggaaataaatatgacaaaccttagaagctttcacaccatgacgagtcaaattggcataggattgtaggaaattaagacttgccttccaaaaaatgtttttaatctttggcgggagattaagttgccaaagaagcttcaaccaatgagaagtccctgagaacctgaaacttatccccaacccaaactcgaaactgtgctccaataaccactctttaccaaataaattttgttacccgaaagtgccaaataagcctatcttattgatcaaacaaagaacaaggaatagacaacatggcactgcttcgacctgatcaaacaactcttgaattaaagaggagttctaacatccaggattaagcttgagatcgctaaccacttgaagataagtcccccccccccc

SEQ ID NO: 53324 - DNA, 1693 bp, Cannabis sativa
aaatttacaattttattgtcaagcaaattttatttacaaaaatactgtctttttataatacaaccgtaaaacaacaaaaccgaacaattaaaacaacagtggaacaattaaaaaaaatcatggaacaaccgtaaaaacttaaaacaagacacaatataaaacttacacagtatttttaaaaaaatacagtattttgaaaaaaaaaatccgtccccacattaaaaaaattaaaaagttgaaaatcttagtatggagcataaaaatcccaatctttttcccatgttggacttttgtatattgggccgagataccactttactcaaataacattaagatgacaaaataaaaaaaaaaaatcaactaaaagaattttacaattaaaattataagaacatttaattaaaatttattttatataaataattaaaactttataatatacaaatttaaacattacacaccaatgatgtagataagatattaactagttattgttatagtgtgaatttttcacttagaaattcgagatcaggctcccataaggatgacacgtggactcactctcttcgaggattactgagctttcaaaagaagaccactcggggataaacctcacctgaaccaaacttagcaagatgatgtgaccttgacagagccagcacattattatacctcacatgatgcaggaccaagaaggccatgtttgagactcgcatctaccaagatacatgcgatgtccataaagacttctcctgcaaattagtagagatcgattctttacttagcgagttggttcgaaagacctaacgcactcgatgacccgataaggactcgcacgtcctgagttatcaacgctaaaaaagtatccgtatacgcgactcgaatagggcgcaactatcttatcccaaagactcattagtcctatacgcaccctaggcccgagagcttgtgcgagaatatgaatagacaactcgcaccatagaggttgcatacgttactgtggttagtaaatcggatcgaaattgttctttatttattcaattaacgttttctcttaatttaatgttgatattcattataaaacggttcaataattaagttttgtgtaattaaagcgacacttgctttgtatataaaggagtgatctaatatgaataaaaacatgatagaaattcttgcaacaatggactaggcagactgtgatttgactgaaccactataattctcttgtgttcattatgtttatcagtttttcagtttgtctgtgtgccttctttttgaatactcactgttctagattgagtactcgcgcttttttattaaataattatatttttattttttatttggtgctgttcaaattcctccgacaatagttatctgtatttattattaataatactattttttttatatatataaaaacttcatttctagatcacattatttgagatacattcaaaatttatttgtctgcatcttaaaaaaatatttacttatttttaggttatatgataatatattattacttaatatatatttgagtaactttcaaatttatttttaaaattaatcaaatataatacacacattttagggctcgtttggtacgttgtattatattgtattgtattggattgtatggtattgtattatattgtatcagtattttttttaatacaatactatattt

SEQ ID NO: 53325 - DNA, 854 bp, Cannabis sativa
gttgttattttggaccactgctttcccctttttatcacgatcattattgtgatttccctcgtgttttctcttattctcttgatttcctccattgcttcttcgggcttcccacttagcaacattctccttctttgtatcatttttgagcaactcagcttcaagagctttttctaacacctcagcataaaccgtgttggtccccaccatgatttccacatcctttttaatcatggcgttcatcaccttcaagaatcttttgacccaaaggacctcgattcgtacgatctcttgtgcaaacttttccaaacggtcaaatagcctaccatactccgtgatagtgagattgttctacctcaaattcataaactcatcttcttttgcagccagtatggaggcactatagtacttcctgttgaacatagcaacaaagtccaaccaggtcatagttgttatgttgccactttgtcttactacttcccaccagatccgtgcatcctttttaagtagggtagcagcataggatactctttccctatcattgaggtccatatattccaatatggactccgttgagcgcaaccattcctcaacttcaagtgagtctgagctcccattgaatattggtggttgttgcttcctgaatcgctcgtacacaggttcaaaacgttgtatttgctgtggattcaatgaggctggttgaagagctaggtttccaacgggtggatttcaatttcggtgtaactcctcattcagagctcgtagccttgcaattccttgagttagctcctcacgtatacgagcctcttcccagagtatctcagcttgagcattgggtggtgcttgttgttgttcgg

SEQ ID NO: 53326 - DNA, 929 bp, Cannabis sativa
acatgataaaactacaataatataggaatagtattcgacttgtaacagtaaagtataatgattatatacatatacatgcatgtattcttctatatatgtgtaaatttgatgaagaatgaagagcaaagcgaagagcagaaaagaatacaagtattattactcatatctgtctaaatttataacacgttatcaacacgatcactctattgcatcatactcatatagttgttaccatgtcaaatcttgtgaagaatgaatttgttgcacttgatatcatggtaaaaaattatatgtctcggattattggtgttgaaatgcatctagaatcagtgggccttactggcaccattaaggagataaataatacaacatttcaaaaaaaggcaaagacaatgatttttctccgtcgacatcttgatgaaagtttaaaacatgtatatcttactataaaagctccaagtgcattatggaaagatcttaaagaaagatacgaccatcaaaaggatgttgttcttccagccacacgtgatgaatggaatggtctacgttttcaagactttaaaaaagccaatgattataattcatcaatgttcagaatcgtttctcaactaaaattctgtgggcagaaaattacagaagaggaaatgttggaaaaaaacgtattctacattccatgcatcaactttaacattataacaacaatataggatgcgtaattttaagaaatattctaaacttattacatatttccttgtagcagaaaaaaataatgaactattaatgaagaatcatcaatcacaacctactggttcaatgacacttccagaagtaaatgccacaaactataataattatggacgaggtcgtggttgtggccgaagccaaggaagaggttgtggtcgtggccaaggacgtggacgaaatggtca

SEQ ID NO: 53327 - DNA, 1461 bp, Cannabis sativa
gtatactgctacctgatcatgcctttcggactaaaaaatgctggtgcaacataccaaagaatggttagccgaatgtttaaaggccttttcggacggaacatggaagtatacgtggacgacatgttggtcaaatcaaaggcatgtgcaagccatgtagatgacctcgaggaatactttgaagtagtccggagatatgaatgaaacttaacccgaagaagtgcactttcggggttcaatcaggaaagtttctgggatttatcgtcagtcaacggggcatagaggcaaacctgaaaaaaattcaagcactcctgaacatgccttctcccaagaagcacaaagacgtacaaagcctaaccgggaaagttgttgctctgagccgatttatttcccgatcctcagacaagtgcattcccttctttaacattctgaagaaatgccaaaaatttgaatggaccgaagaatgcgacgaggcattcagaaaattaaaagatcacatggcgaagcctccaatcctgtcaaaacctgttcatggagaggacttgttactatacttagccgtctccgagaatgcggtaaacgcagccctagtccgggaagaggaaaaaactcagcaccccgtgtactatgtcagcaagcgcatgataggggcggagacacgatattaagtgattgaaaaactagttttttgcctcctgatggctttaagaaagttaagatcctagtttcaggctcaccccatcaaagtattaacaaaccatccgctccagtaagttctgcagaagtcggaggcgtccagaagattcctcaaatgggctatggagttaagccagtttgacatacaccacataccgcgcacttctataaaaggaaaagtgctagcggacttcataacagagtgcaatgaagcagaagctagtgcaaacataccaacaccacaaaccccagcgtggaaagtgttcgtggacggagcatccaacgaaaacagatcaggagctagtgtagcgatgatatctccgaacggactccggctccaggcggccctacgctttgaattcactgcttccaataatgaggttgagtatgaagccctgattgcgggactgagattagcaaaagccgtgggggccacaagagtagaaatcatcagtgattcgcagctggtggtaaatcaagtgtcgggagaatatcaaacgcgtggagaaaaaatggtcgtgtatgtagcaattctccgggagctactccacgagttcacggactacaaagtggatagaatccccagagaaaacaatgctcacgcagactgtttggccaagttagcgtcagacagcgagattgagaaactgggggtggtgcccgttgaacgccacacgaaactaagtattaaaaccaaaaatattgtggcagcagttgagaaagagcccaactggatgatccccatcattgaatacataaccaaaggcg

SEQ ID NO: 53328 - DNA, 906 bp, Cannabis sativa
  modified_base (840)..(862): a, c, t, g, unknown or other
atttacatatttggtattttcttgcaaatttcatgtaaagcagatacctaacttgataactcaatgctgtgttttcattactatagaagttgaaatttttgtaaatatatccgtttcagttgttgttaatgtcaatgtttgtagtagaagattcacaatactgttctttgtgcttttttatttggtgttgtctttgtttatatagttggttttattaaatattaatgtgattttattgttgtgtaagaaatactttgaaacatatgtattatttacaatattcattatatatatttttagattatattaatttataataagtgaaattgtattaatgtaaatttaaaattaaataattatataattatttgaaaaaatgaaattaccatttcaatagtatatactgtataaaagttaacaatttagttttttaattatatatataaaaataatttaataacatttgtataaatgttagtaatataatgtagtaataatttaaaaattttactataattatttaaaatattagaaatagtgatttaataacatttttataaatgtgagtaatataatttagtaacaatattaaaatgttactaaaattatttatatataaaaaataaacatataatttttttttagtaacattttaaaatgttactaaagtgtattatttaataacattttagtttacatcacatgagcatatcctacattttctacaaatgttacaaaaactatgaatgtgaataaaagtgtataatagtgacatttctaggtgttactaggtatcatttttgttgtagtggttacaccctttcaatatattttatcctnnnnnnnnnnnnnnnnnnnnnnntgatattttagtgaaataatataatcactaaaataagatctcaa

SEQ ID NO: 53329 - DNA, 1541 bp, Cannabis sativa
  modified_base (48)..(52): a, c, t, g, unknown or other
attatatcactttcaaataacttagaaaaaaattagcataaaatttannnnncgtgcctcgcacgtaactttttgctagtatatatatataacaaaaaaaaaaaacttgaaatggtttgtaatttgcctttaaagtgtaaataaatttagcattgtaaatatactttgctcactctagtgactagtccctctccacatatgagtggatatttttacataatttttggcttttttacttataactgacaactccaacaatcaaatctttatgagataaaaatgtgaaaggtagatatatatatatatatatatatatatatgagggatgggatgagcattaattcatttccacatttttcttttatgtaaactagctaacaattattgaaaggcatcaacttttatcaatattgatatttttcattcactttaaagtcatcattaacaggtttccaaaaaaaacaaaaagtcatcattgaccccaaaaaaaaaattatagtgaaaggtaatttggagataagtcatgttgctaaaggcaaacctttttttttttttttttctatttcatggttgtgacttgtttttttatgtagaagaaggattgataatctcattctcatataagaaaaacaatctagattgttagatgaaatcccctcattgaacacgtggacaactgcatagactcatctcactcaaagttagttgaatctgtttttgcaacttaactgtcctaattaactcactcaaatgttatgactgttataaatagcaaggctctccaactcaaaaagatgatcgctgagcaagaattgaactctaagagagctagagaaagaagtgatttcaagaaagaaaattttaagagaattagagagaaaaagtgaaaaagtggtataaagaaagattagaagagaaccgagatcaagaaattaccagtcaagttgagacttgaaattaattttcacacaactgatgtaattcgtgatttaattatagtgcaagggcaagacagttttctatggcaagctcaacaagaatgtaatctcgggaaaaaatcttgtgtttgttctctttatcttttcactttcatattgatctgtttgtttacatatgatttgctaattataacttgtttgaatgcaaattggttcttcgaagtttgatcaaaccaatgagtgattaaagattagcattcaagtgggtgtgtgcatgcaatctgttatgtcataattgttacttgtttgattgaatgtgaagatcaataaagatcttgatgatttgatgtgtatgttgagttggtgtaatgattaaatagtccaatcccaacatagatcatgatcaaaataaaattgtcacattattgctatcaaaatatgttataattagttgttgagactgcattactactactgataataataatctattacgtgcatacctgttgagatacagagtccatatggttaggaagttagttaagggctgttatagttagttactaacagttatactgttgtacagttagttagtgtgttttc

SEQ ID NO: 53330 - DNA, 3511 bp, Cannabis sativa
attttaaataaaatcaagaaaagagacttcctaaaactctataatcttatccaatattattctcaatatcttcaaagatgaccctttatgtcaaaagatattaaatcaaaaggtaaaataatatggtattaatttattcactatataatttgacaaaaaatttccatctatatattaacagagaaaatgaaggtccacaaaatatgaaaagtctatacagtaattttttacatatgtataatcttaataagaaaataatatacctcaaacaagacccaaatgaaacgttatgtgcctagtgcacattttcaaacacctaagaatagaaaatcaagaaaattaagaaaattaagaaactctatgagcagcaacacaataacttttttcttcttcactaagtatcaacttaatgattacttacaatggctaatattgaagaatggttaaggttttggacgtagccatgaagagatgttaacgtcgaaccgttaatgttccgtctgttttattaaaaaaaaaagctccgttaaaaacaattgttaaaccaagaattaccgttagatagacacttttaatatatataaagatttcataatttataatattttttatttttataatttcatttaattttaaaatgttctatagagaaacaaaaaaataaaagttgctggaccactaacatctaacaattacttgaaagactttagaaaaagacaaatattgacttgatattaatttgccttgttattttatttgtccacttcttaatccatctttggctataaatataaatatgaaactttcaatactcattgaaatatagagaaacaataatattgctattaaagtgttctactagctagtgttattgttatttcatcatttgccgttatggatttccaatctttgcccaaaactcaggctaagttgatcaaagagatcaaagaaacgatgttctcattgttagacatcggttctcatgatcacttgcttcttttgccttgtgcttacgagactgcatggctagccatgataccagatactgatgaaccttccaagcccatgttcgaaggttgcttaagttgggtgcttaacaaccaaaccgaacatggcttttggggcaactgcgatgagagtggcatgccaaccctcgggtgtctcactgccactcttgcatgtgttgttgccctaagtaagtggaatgttggttccgtcatgataagtaaaggtacgtacatgacatgttacaataatatagtttcgatcgcttcgtgtatgtaatgttgaacaccttaacatcaattttcgctataataataacaatatttcttttatattatgcaggattggagtttattcattcatctaatgcaaagaaaatattgaaaaaaatgaaagatgaaggctctattcctcaatggtttgcaattattttcccaagaatggttgaattagctgaacaagttctcaacatcgaaatcttgaaagatcaatcccttattgtttcgaatatattttatcatagacaactcattttccaaaagtaaacatattattatatcatttgtcattgtttcattttaattctaattattatatttgtgagtgtgtatctaacataactttttatacagagaacaacttaataatagggagatgaatttgctatcatatcttgaagtgtttccttcatcgtattttaaagaagattattctaatacaattataaagaatttgtgtgaagaaggctctttattccaatcgccatcggccactgcatgtgctttcatggctactcgaaatttcaaatgcttgcagtatttgcaaaccctagctcaaacatttacaaacaataataatgttacaacaagtaaataataaaaaaataatttcttttttttcataaacaattattttcaattaattaaaagtttattaatgtatatatgtagttcccaccacatatcccaacgataaagatcttataaagctttgcattatcaacctcatcgaaaggttagggttggctgagtatttcactgtggagatcgaggaagttcttcaacaagtttataagtatgttttataaatatatatatttatataaaaatatgttttattatgtaggtgggaaaagtattactttcacttttattgcataagagcattttatttttggcaactaaagaaattatatctcatatatgatgttgtatattatagtacttatgacaaatatattatataattttgaataataaaattttatgtaatcaattattatatatgtaaaaaaaatcatgcagtgcttactaataatactaatactaataataaatttttgtttatatttcttttttcaggaattatatgaaacatgatgaattattttcttacaaaaatgtggcaactttagagttacatctactcaaagaatcattagcttttaggcttctaagaatgcatggctacaaagtatttcctagtaagaattttatatacataatatattattattattattattattggatccttctacaatacacatcactaatataggtgtactggtgcaacctctaactgtttcagcatttataagatttttttagtccaaaattttcatagttatgtacgttatagttatttaagacattttacaaaattttaagaaatttaaaataatttttaatatagaaatcaatgttcaaactgtttatttcacacgtgataaaataaaataaaaaaaatcacgtgtgcaatagattttttgaatcttgttttcggtgtgttaaactcttttcaaaattttgacagatgtcttagataactacaaagtataaaactataaaaaaaattagactaatttttttttaaatactgaaatagataagggtgcatcaatatacctattttaaaagagtgcattgtattatatattattattattattatttaataaatttgataattaaaattaatttttttaacatgtgtaggtaacatatgttggttcctaaagaatgaggaaataaaaaactacatagaattcaactctgaatacttttttgttgcaatgctaaatctttacagagctactgatcttgcttttcatggtgaatttgagcttgatgaactaagaacattttcaagaaaattacttgagaaatctatttcagaaggagctcaacatacaaatccctttaagaaactggtaatattagtttaatgtatattatttaatatattaattgtagtaattaatttttatattttatttatggttcaaatataacttttggttttgtatttttttaaaaattgttgattcggtctttctgttttgttaaataacaattcaaaccttatgttttttaaaattgtgcaaaatagatcccgagcttacaattttttgtcaaattaaaattaattataatctgaactagagatattataacctggatagttacatttttacatctattccgctagaaattggcttcaggtt

SEQ ID NO: 53331 - DNA, 784 bp, Cannabis sativa
gttgaattgaaagtaaaatgatacttgcacattttattttttaaattaaaaaaattattaatgaataaagatatagatatttttgtcaatatattatttattacattctatttcaatgttcattacataaataaaccaaacatcttatattattccccttactattctcattacattacattatattactattctcattaccattttgattacattaatgaactaaacaccacctaaaaatttatcaagctttacttgtaaaataagcctgaatgattttcaaaaatcctaattccattcttcattttgttcttaaagtaaatactttcaccattttcactttttagatgctcataaaggtcataatcctctagcttgcaataatctcataaaacctaaccagtctggtgttaataaaattaaagggtggtggtcttcactttggaaaaacaaaatatcacctgaatttaaaaactttaattagagagctttttaatcatatattaccttgtgctttgaatcgttatcagaaaaatatcattcctaacaatgtttgttttgttcgagttagaaattcttctaacttatcttcttttcattacaataataattttttagatgttaccaattttgtattaaggcttctcatgaattaaaggctaacgacttcaaattagggctgtacatcggtcggtttagtcggtttatactatatattttccaacccaacataaagatcgggttataaaattctgcatgcaaactgcccaatttaaaaaaaaaa

SEQ ID NO: 53332 - DNA, 1665 bp, Cannabis sativa
gtgttcgtttgaaaagaggaagcccgaaaagaaatgaatttgttgagggaggcaaacccagtaatgtttcgacaagtactgtctcaatgagggttgataactcaagggcttctcgctcgaagaaaaaggacaattctaaagaaccgtcaaaggataaaaagaaacgaaaaaagcacgataagtatgtgccagtgtatacaatttacaccgagcttaataaaactctggagaatatttaccttgcatatgagcaaaagtttgccttcagcaagcccgagcccatgaggcatgtgaggaacaaaagagatcctaataggtattgtaaataccataaggacattgggcacacgaccgatgaatgccgccaattgaaagatgagatagaaaatctcatcgctcgaggccacttcaaacagtacgtgaagagacagggcaacgggcacaaccagcccagtctgcctaataacccatacaaccaggggttacaacctcttcttgttgaaggacaggacatcctggttagttttggaatgccacatatcgcagggagagcaataacgttcaaaagagatatgtgaaagagataaagaatgggcggtcgacatttgccccagaaccttccaagaacgtaaaaactaaggaacctccaatcatatttttagaggaggatgagaagaatgtgagatatcctcacgtcgatccattggtgatcactattcaactcgccaattaaaggataaagagggtgttgatagataacgggaactcagtgaacatcctttctaaggaaatgctgagcaaaatggggattgaaaaggccaaattgaagctctgcatgctaaatctttgcggcttcaccggcgacagtattgccagtctaggcataatcaagcttgcattaaccttgggcgaggcacccttatccaccatagttatacaggactttctagttgtcgatctgccctcggcttacaatacattgttgggtcgtctagcattgatcggactcggggcagtgagtttgatcaagcacctatccttgaagttccaaacactagaaggtatgggagttgtgcgacgcaatcaaatgctagctcgtgattgctatcgcatagagttatagcatagaatagccggtcatcagttaatggcgatcttggtagaagaaagtgaaaagaaggatgaggatcttcacccttgggttcaagatgaaagaaatttattaaaaccaattgaagaattggaagaagttgttcttgacccaggaaatcctgcaaagtgtgtctacattgagaagaacctggacaagcagctaaaatagcatctaataagtttcttaagggcgaatcaggattagttcgcctggaaccatggagatatgatagggattggccctaatattatctgccaacatctaaatgtcgatccaaactacccagcgaagaggcagaaaaggaggcccttggactccaagagacaagaggcactaaaacaggaagtggacaaactactagtcaatgactttatacgcgaggtgttttatccctcgtaaattcccaatcctgttctcgtcccaaagcccaacagaacttggagaactcgtactgattccttgtcagcctgaggaggacctctaaactggctctcaaaatctatgtccattcc

SEQ ID NO: 53333 - DNA, 1218 bp, Cannabis sativa
aatcataaaatttaagaagtgtgtaaattgaggtgtctcaattattattgtgtttgagaattattggataagttgttgaaatgaaattgaatatctatgtaaggaaagacatatttaaaaatgatacaagtcagtctatagccctatatatattaattgccttctaggtccatcgatcgagttaatcatcaaaatgtgggatgtagttggtttgtgcatatgggaatattgtttgttataatgataagtcattggtgttacagatggcaacccaaaagtgccaggaaagctaccacccgatcaatgggctttcctcttattggtgagaccctccatttcttttctccaacttcaacctatgacattccaccattcatcaaaactagaatgtcaaagtaagtaccgttaacgtttttatattaataaattactattctaaagtaaaagatatattttggattaattatatatttcagatatggatcgttgtttcgcactagcatagctgggcagaaggttatagtgtcgactgaccatgaagtcaattatcaaatatttcaaccagaaggaaaggatttccagatttggtacttggactctttcaacaagattgtgggtgaaaatcaaagcctgctagcttatcaaggatcgtttcataagtatcttaagaacttgattttacaccttcatagccctcaaaacttgaaggaaggtcttattcttgagatgggtgaatccactctcgcactcacatattttcatgggttactcatcatggtgtggcattgtagacgtaaaagaaggagccttaaacgtataacatatataattttactactattattagtgctattaaattaataaaatgcatgtcaaaattgatctataagtttaaaaatatgttcggtttataaaaattggcagatggtatttgaatttattgttaagaagctcctaagttatgaggaactgaaggaaggaaagaaattgaaagatagcttcaacaaattcattgatggccttatatcttttccattagacatcccaggaactgcgcttttcatgcatgtataaaggtacttttatatatttttgtgttgatatttttataatgaattaaaaaaactatatatatatatatactaactaattgttatattatttatcaataatataatgtgtagattaaatacatgtaacaaactaatatgtaacata

SEQ ID NO: 53334 - DNA, 1531 bp, Cannabis sativa
gtacgtacgtacactcactcgctgtcacataattttcattctcatttggtacgtacgtactctctctctctttctctctcttactctttcttattctcattcttgatgtatgcatggtgatcttgttctgataattgatcaagaagaaatttttaaattaagcagacttgattgttatatattgtaatgatattttatataaatgattaatcttttttaatgtcattattctaaattcttgatgcatgcatgttggttttgttgaaagaagaaaaagaataatcaaatggcaagaaacaacatcaccatattttatataattaatctttaatttcttcccaagatcactatatatataaaaagatttttcttaaatttaggaataccttaaatttatatatatatatataataatatgctgtgtatgttttttcatttcagcatttcggattgatcatatctccagggctaggatgatggtgtacgaacatcttcatcaattgatggtatgtctattttttaacattaatgtccaattattaatgttatcaaattaattgaagggtttttaattttaaaaaataatgaattaataataataatttaaggttagaaatgagataaaatagtatttttaaagaataattagtatttttaccttctgaacttacgatactacctgattttgcctcctaaaatattaagcttgttaaaaattctctataaaatataataattacataattatactctgttaggttccgtttcttttacatttagaagttagtatttttacttattgaactttgaccaatataaaattttaccatattttataaagaaaaattaattttaaaaattataatattctagtaattctgaaaaaaaaaattaataaattattaaaaaaactctataaaaatattaagtttacttaaaaaaacctaaattattcctaaaatagtatttttaaacttttatattgttatataatttttcagaagtactagatatttagatagataatcattaatgaagggtatacttcaatctatttgctatttttatgatagtttttaattatatatttttttattgaatatgttgtagttatttataatcatttaaatatttgattgtaggcataattattttttcttagacgtctgtaaacaaattaattgaattttattttaatatggtaaattatttaaaatattctaaaaatttagaagtaattttatacaaataatgtatatgcactgaaacagttttttaagaaagtatactgtatagatttttccaaccaaaaattaaaaactttacattaaaaaatcactttcttcaaagaccaaatatacttttttaatttcaatgaagattataagttcattcttcaaaaaaaaaaaaaaaaagaattatttgactatatatgtttaaacatgaaaagttgtacaaattaggtttggcttttaatactcgttcgtgtgacgtggatgaaacgagtgttttataacagtaataaatataa

SEQ ID NO: 53335 - DNA, 590 bp, Cannabis sativa
  modified_base (366)..(368): a, c, t, g, unknown or other
ttgaaggcccttgattgaggtccaaccttttctgatggaaatggcttgagatgaggttgacaagggcctttttgcatatatgctcgtcgaacttgatcacgaacttttaaaggatgatctaaaattggtattctcaaccgagggtcactttcaagttcttcaagatatgtgttaacatccacacaacttgattttacaattccatcactctttcccatagaagttgaagactcttgtatacttttaaaatacctcttcatatctgtttataacaaatatgtgaaagattagtattatgatttataattataattataacacacaaataaaaaagaatcaaccaaatataaaacacacaagatatannnaatagacaataaatattattaaaagttgctatttcttgtttttatattttcaaggaaaaaatatataatcttttaaacaccaaaaaaaaaaaatactatatcatatccatataaagctagactcaagaaattataatcttcatatacataagaaatggcaatgacttattaaaataacataaaaaaaattaaccactcaaactcaaaaagcattaaaaaaaa

SEQ ID NO: 53336 - DNA, 913 bp, Cannabis sativa
tctatgggcaataatatcagattcactcttgcaaacttcagttcaaatcgttggcttttcataagattggaaacattaggaggtatcatgatctggttgacaacaaactttgttgttctgcagaatgggagagcagaaaatctagtagaatatgcataaataatgtgtctacttctcagttacaatctaagtatcaccaatcttctcagtggcgcatgaagacaagcaagtagagctgaaaatagtttaaatgctgtggagcgtgttagcgtgttggtacagcatttaaatcttgccgagaaactgttgtcaaacgaaaaaagtgcattctctagaatggtgcaaagtaaaggacctgccaatgctgaccatttacgtagcttagaattatgaggaaacagaacatgaccggaatttagagcacaagcagttgatcaaccagaggaggtggctagcctcgccccaatggagtgctgctgctcaggactcctgtttctctttctgcttcacagtttgatgttcaacaatctgatattgaagatgagagcaatatcctcttgaaaataaaggatgcagttgtaacaatggagggggtcgagatagagatgaaacactacaccgtttcgaggttccaagagataatttgtggacagctcttcacagaatagttggaggtacatatccaattacaatgcaaccacaatctaagaaacaatacacaacatttaaaacaataaaacattaatagaaaagcccacaatacgttctagaatgccttcctaaaattcattatgctgtcaaatgaattctctcttagtttttgttgtgttctcataaaattcctattttctctttgatttcattacaaaatttgagtccatttaattgagatcaaataatccaaaaaaaaaaa

SEQ ID NO: 53337 - DNA, 799 bp, Cannabis sativa
agaagcttcttactcttagaaagccgtgatttaaaattaccagagattgaacttccccaattaactaactgctttaggcaaatggcaagcttatctgtaagctgaacatgatgacttgaatgccatatatcagcaacaagttgagcacaaaatggttctctattccaggaattttcgtaacgaagtaaagccaaagagttcccactatccatagaagcaggtacaagaaaaataggggaatgatcagaggatgaaaatgccaaattagtaagtgatacctcattaaacatgtccaaccattgttgagtaaccatggctctgtcaaggcgaatttccacacttctagacgtccctcggctgcgttcccatgtaaattgataaccacgaagctccaaattaataagatggcagtcggttacagcttcctggaaaccagaaatcaaagaagctggataaggtctccctcctttcttgtcctcactgctaataatgttgttgaagtctcctatcacacaccatgggagtccggattcagcggccatagaacgaagttgattccaagtatgaaatcgtaagctcttgtttggttctccgtaaaaaccagaaagtctccatttagccgtccctgggattgttacttcaatatcaatgtgattattggagtaatttttgagatgtgcttcctcagagatacgccaaaacatggcaagcccacctttccttccacacacatcgactgagaaacaaccctcaaagcccacttttaatctaaacatttccacaacatccttagtgcata

SEQ ID NO: 53338 - DNA, 952 bp, Cannabis sativa
tctttttaatcatgtagcttaatatctattccttaattatactctgaagtcttaaattatttttgtatatatgccctgaatcactattataatttcttaaatatctattccttttcatgcagtgctgacgatctattattactatcatgatgtgcacaggtactttgcagaacaaattccttctatgatatataatgatagaagtagaggatttgaatcataattcagattactgcaaaaaaacaatgggtgatttcaatgaagaacaagttagtaataattactttgcagaacaaactgaggacaagtggattatagctgctgaaaagttagaaatcttcaaggacccaattgaacttgttcgggaggacttggtaggaaaacagttcttgacatttgaagatgcagagttctttatccaccaatactcaaacatgatcggtttcagttctaaggaaaggaaaagttaaaagacaatttgggggtgctataaaatatcgccagtgggtgtgctctaaggaaggacatcgtgaattgaaatggattaaaaacttgaaccgcaaaagagagccgagggctattactagggtaggttgcaagtttctatttagagtttccctgagaaagcaggacaggaaatggtattgcaaggaatttcgtccaacacactcccaccccttggtcattgccgggcatcgacaattcattcgctcgaaccgaattataccggatgggatgttaatggatgccacttgtatgaagagtgcagggataaaaacatgccaaatttactcttatatggcagaattagttgggggttatgggaaactgtctttcctacctaaagatttgtataatcgagttgcaaagaatgaatcagtgcacttaaaaaatgctgatgcagcaagggctatcggctatttccaacataaggcagatcatgatgtagatt

SEQ ID NO: 53339 - DNA, 848 bp, Cannabis sativa
taagaattcatgtctcgggtttcgaaataacccttaactaaaaggaaactactcagaactagacattataacgataatcataataattagtaagagtttcaggagaagaaaagaactacaatgaagaacacttcgaagctgcgatattcgtctcttcctcgctctctctaagtttctctctcaatttgatagctctacggttgtgaaattagcaacctaaaagattctatttatagtgcttgaaaagatagataaatccccttagaattaggatttttgtttttttttttttaaaaaaaagataagtacagtgctactgattagtattttggccataactttttcaatacaactcagaattagacgatttgagatgttctggaaagctaacaatgagatctaaaactttcatgttgagctccaagtccatatctacatctaaggttgtcaaaagttgcaattaagatcttccttgtaaaaccgagctcgccgacttctactattttccaccaaaatatgctaacatccctctaaatgaaaataaatgcatgattagtctttaaaatattcaaaacaattcaaatcatactaatcaataatttaatgaatcaatttaagaatattaatacataaattaatcatatttttaagacaattatggactcatcaaattcccccacacttgactcttgctcgtcctcgagtaagttaatgataatataaatgatacttaaacaaatcggtcattataaaaaataattgtagtttcaaaaattgtacatccctttataattccaagaaaattcaaactctttaatcattagaatttcaattcaagataattactt

SEQ ID NO: 53340 - DNA, 837 bp, Cannabis sativa
  modified_base (676)..(678): a, c, t, g, unknown or other
ttaatatttttaataggtgacgctctataattaaaaaataatattctctaaaagttatttttttcagttatataaaactcgatacttaattacaaaaataaaaatatgacaacaaggaaagtactaatcactatctcgtagcatttctcatatatatataaaacaattttattagaaaccagtattatccaacactttttataaataacaattcgttaataatatatcttaaaaattattttcttaaattatacagaaatttaatacttagttccaccaatataaaccataacttttaatattggtgtatggagagagagatgactagaaatttcttattactttctctgcgtgcaagctaatctgatgaatcatctatatgtgcatctcctacggtggaaccctctccctataccctataccctacaccaccaccatcattactttctctttcttctctcaatttttttttattattattttttaaaaaattaaaaaaaattaatttaaattatttctctcactttgttttgttggggtttgctttatatatttatatatatgtagatggggtgcctctatttccttactttgcatgactctctctttctctctactctcttctataactatattactcttcttactcccctcatatatatatatatacacacannnatatatatatatatacataattaggcaatatttgcaaacatttcttccttaaaagaaaaagagagctagctagtgtttaattgcatttactgcatggatccttcaactggacaaaatttgcaggtactcatgattttcctcaatttttaatcacctttt

SEQ ID NO: 53341 - DNA, 2096 bp, Cannabis sativa
  modified_base (37)..(44): a, c, t, g, unknown or other
ccaacacaataccaacttttgccagcacaaaaatgtnnnnnnnnaagtgacatttcttgtagtgtacatatttaatgtaaccattgaaaactcatttgtatatataaataataagaaagtaagttattgtaatgccctacttcaagcctctattgggcttcccccacggacttatgactcttatacacgagtacttcactttagttgtttcttcaaataacgactagccctacaaaccaatacgagttgttgactcaaaaatttagactagacttttaagccacacccgctcgctagattggcaagaataaaaaagtagttaagtaattaataagaaagatacaataatttatagtagttcgcccctatatcgcgatagtaatagggctacgtctactttgagtttttatttcttacgagatggtaattacaacaatagactaatataaaaaattctaaactttagagagagaaagtttagcgagaaaagctcttgtgggtagtttattgaatgtgtaaaatgagctaaaggagctctcattttataagtgaagaaggcccaaaaaaataggagaaaaatacaaataagttattttccacctttgatgatgacctaacatcgaaaattagcttttggtggtgatggtcaatttttggtgccgggcgggttctgctgcgagttatttggagcttatttttgtaactcccttcggggtgaattttgatgatgatagcttcagaattacgtctgggtgtgagacatgacttgatagagcatttaaagagcttcaacactactacaaattacactttttacgtcggtcaactctactattcatggcgttgaccgacgtgaatagtgcctagataattgggccgtcagttttgaaatgacgctgataatatgtgaattgcgtcgtttcttaaatgatggtaaaataaaaacggacgaataaggtgaacaattgtaaaaatttgctttacattttgcgtctattgttaacagtagaataatttatatatgaggttttaaaccatcgaaaaaaatggtgagagtgcgtaactgacataaactagagtgaaatccctaaacccccaattcagatgccacactgttcacactcgtccctaaccattaatcgtgagaaagagctctaacaaaatcgacgaacccctcgaccttctcctcttcttcgtcttctttttaatcatgcggcgacccaaccttgacctcgtactctcttctttgtcttcttattaatcgcaaaaccaccactgtccaatgagttcttctctaattgggtcgagacagtcagacttaaagtttttaagcaggtgtgttttttcttattattccatgtcttttagtttaatgttctatcatatgggtattttggagaaaagtgataagctgatttggttttacttggactttggtgtcctcggtttgtgtaattttgaactaagatagttttacaaaagatttttttggaacagaatttaattgtgtttcatttgtttcttcttcttctttaatttatattttttccttttcaaactttgcagtacataaaaggtgggcctattgtagggttcgtatattggggccctgagtatcatttcttggtgttctttaatcggctggggcttcaagagtagatttctcattgtacataacagtcaaagtcattgttttagttcaataaagtagggtaagttcattctctttaaagtatctgaagtaagaaagatatgttcttaactgtagtggagagccaatgcatctacttggggctctttcaaaactcagccatgaaatgttcttatattacagtagtctcttgtatttttactttgaaaaggtgcttgatggatataattttaagattatagtctattacttgtatatttggataatggaggtagtgtgtggagctcagtactttattatttgtttaggatataacttctacaactgaaactacaagaaaacaaacatctcttttaatttttattactattggttattatccgtgatcgattgaaaagaattgaacgaagcttctttaaatttgtgcctctcttgttttgcagta

SEQ ID NO: 53342 - DNA, 2107 bp, Cannabis sativa
ttaatggatttgttgtttttatgactaggtgatgttggaggatgaaaatactcaccaatataatgttttcctagagttttgaaaatccatgaagatccaaaattcgagatttggcactacagtgaaggttagaggttcgttgcaccgagcttagaagaaattcactggcaaggggttatggctacgacgaggagattgtggctgcggcaaagggtgaagctcgccatgacgaagacatgattcttgcttttcaaaattttatctttttctttaaattgtagatctttgaggggatatatataggacctttagggttcgatttttagcacctttgaactgcgtttttgagagagaaactcaaataaagagaaaaagaaaaagaaagagattgcggaaccaattatttttcatcattgtttcttttattcttcttaatgtcatacttttattatgatttctattataatgtctagttcagggtagttttttttagttaagggttaattcaaaacccaagacatgaattttaatttctatgataaatattatttttttagttttcattatatcgaatttcttctattcttttacttttaatgccatgattattattttaattttttttttagatgatcactaatttaggtcttactttaatttaatcaattatcatcttaagattactattcacctaatagtttagggttctatgtgtttgtgataaattataatttttaatattattaaagatatttttaattatgatgaagaatagaatctaggttaaatgaattatatgctccattaatttattacttatagtaatctatctccattgaatttaaagctttatctaagttaaataaattgtatgcttcgccttgattaattgcaatagggagattaggataattgactactttaacattatttatgggattattaattttatttgaaaaattgaaataacatttattattaggaattaaggatgattattgagggtagagattaacctttgactatttcttaaatattgtagtatcacatttgctttctattataatatctttaaattaaaatcctcccttttaattcttgttactaatttcagaataatttgataagcatagtccttgtgggaccagtccttatttgctcttatactgaaataactagaagtattagaatcaaaacaattaataaatttgattcggcatacgacaggcatcaaatttttggcatcattattggggactattattttattttattattcatatttaatttctgtcttactaagtaattttcactttggcaatctagggtgtacatgtctagtgaagacgatattcaagagagactatcaagagtaaaacaatatcttgagtcatcgcctgcttctctctcctcaaagaatatcactgataatcctctcttttaatatcttggtcttgttaaagagccattaccagctgatcacaagtctgattctgacgactcaatccattctcataagaccatggcttaaagtaggacgttcaaagagttggcctcgccaaatcttgatcaacaaccattgtgcatccattatccacctttagatgttaattataaactgaaatcaagcctcattcacttattgccctctttccatgggtttcctggtgaagatcctaataagcatttaaaggaattcatattgtctgctctggtatgaaatatccttcagtggttgaagaacaaatcaagttgtgggcttttcctttgttcttgaaggatgcagctaaatagtggttgtactgtcttccacctgatactattgagacatggaatggcatgaagactgtattcttcgagcgttactttctagcctctaaagttagaagcataaaaaaagaaatatgtggtctcgaacaggttactggagagtcactatatgaatattgggaacgattcaagtggttatgtgctagttgccctcatcaccaaataagcgaacaactccttatccaatacttctatgaaggcttgctaccgttggataggagtattattgatgcagctagtggagatcccctagtagataagactcctgtagcagcta

SEQ ID NO: 53343 - DNA, 782 bp, Cannabis sativa
tatatgcttataatgatagggaaggaaggaaggaattgtggagacatttacaagagattgaaacacaggacccgtggttagtacttggggatttcaatgacattttgacttttgagaagagaagagaggatagggcataaagttagaggagatttggcgcctaaatttctacattgtgtgacgaattgcaagcttgaggatgtcaagtatagtggtaattactacacttggaacaacaagcaacatggcaaagccaggatctattctaaaatagataggatccttgcaaacccaaactggattgataagtacacaggggctgaggttttatttttaaatgaagagctatttgatcatactcctggaatcctgactatccatcctgacacaagaagtggcaaaaggccatttaagtattccaggatgtggagttcccatccgaactatgggaagaaagttagagaagtttgggaatcaagtataaaagggactaagatgtatcaactggtgtcaagactgaaaatgctgaagacagagttgaaggagataaacaagcaaggatactcaaatctccatgctgcagaaatcaaagcccgagaagagttaaatagctgccaagataaactcaagcttgatcctttgaatccttttttgcataatgaagagagggaagcaagggagaagctgatcaaaattacagcagatcttcattcaatgctacagcagaaagcaaaggtaacttgggtgaagaatggagacgaaaacacttctatttttcactc

SEQ ID NO: 53344 - DNA, 1085 bp, Cannabis sativa
tattgagttccaggttagggacttattggtttccttggagtgtcaccaatgaaggggatttggaaatttagataaaaaggaaaactaagtcctagatttattggtcccttcaaaatattggaaagagtaggtcaagtagcctatcggctagctttatcccttgctttatctggagttcaaaacgtgtttcatatttcaatgctttgaaaatatgtgtctgactcgacccatattctgagttatgaggacattaagcttcagacagacttatcatatgaagaacaacttgttcagatcttggatagaaaggagaaagtgttgcggaacaagtattctgctagttaaagtgttgtggagaaacaacaagaatgaggaagcaacttgggagttagagtggcagatgcgggagcagtatctcgagatgctcaggtaaatttcaaggataaaatttttgtaaagagggaatagttgtaatatcccaaaaataataactatgtttaattggatataatttattaaatatgaaattatatgaatattagagtaagattataatcttacttaagctaattatgagataattagtgatttttaagtaaataaataattgagcgtaatttattaattacggagattttattggatcacacgtgggtattatatataccatttttaaaataaaatattttcgagttcagcgactttgaaaactcgatggattggccaaagatatcacgacgataatataatgagttttattggagttgtaccagattgtattagtattcttatagtgtcaaactaattaggatagtttgtattaaccaaagtacccctagactataaactagtttaagtgtttattggagggtaaaatagtcattttttctaagattaatccttttattttattaaataacctagaaaataaaagacaagctgtagtatagagaacttgagagttctaaatgctttctatgcaacatggaagatgagactgcgactcacttatttttagagtgttctttctccttggaatgtttggagaaggtgaaatcaaagctgaattggagaatggctgccac

SEQ ID NO: 53345 - DNA, 1387 bp, Cannabis sativa
  modified_base (81)..(87): a, c, t, g, unknown or other
ttttaccattttagaaaatacaatatccattttgtcatttaataaaacagagggtacaattggtaacttttgcaaaacacnnnnnnnaaaatagtatttaccctattaaaatagtagaattaatagaaaaactgtacgtattttataataacataaaatgaaaaaaaaataacaatttttatgtttaattatctggattgtgattaatgacataattttttaatgtaaaaaactatttagactatttttcttcaacaaaaaaaaaaaataactacaaaaataatttaagtgatatttatgatcgttttatgaacgttggaatactcttttcacaaaggtaaattaattaatttaaataaattatgtagatgtgaaatttgtaccttaaattataatgatgaaaggggtctataagactaattttttcataaaatgtttattgtaaatattataatgatgatgagatatttttaaaatcaaagaggaaatataaaactaaaataataacttcttgttgatacatctagtattaattattattaagttgtatgcttttattctattaattattaaaatgtcaattgaaataaaataaaaaatgtaattgctaatattgtcattatttttttttaaaataaaaaattaataataataaagtaaataaatgagaaaaaaattcaacattatattatataatatgtataataaatttgtgttatttggaaaaagttgaaacaagtatagtatgtatatatagatgtaagattagcctttacatagaaaaaaataataaaaaaaaaaagattttatatatgtataataataattgcacatattattacgtagaaaaaaataaattgaattaaggtggaagataaaaatacaaatagagagagaattaaaatacactgtatccactaattactcccgctgaaattgaaataggaattaaccaacagaccaattgtgcacatgtaaactcaaaacaaccagaatcactaacttatctctaatatacatcttagagctataggcaaagaaaatcagatgaaacaatatagaggcacaattatgctctctaatatcatattccacctcacgtaaaagggaattacaaacattaatcaataaaaaaaaaaacataattagtgaaacaaacaccgtcgaccaagaacataaactagaaagtaacgcaagaatcacaagaaaacaaatttcaataaaaaaagttgaaacaaaacactccaatattacttggttcagatatcaccttaaaaaaatgagtacttcaaggaatgggatagacaaattgacgacatggaaagttaatctgataagccaaacaatacgaacaattgatacttggcaagcatttttgaatcagttg

SEQ ID NO: 53346 - DNA, 803 bp, Cannabis sativa
aagttaagcaacgaacgttagttagtcaagatgaatgaaaaaagcaagctaagacttatttggaaccgaatccaggatggtgagcaactagatgggtaggcagttaatcgtgaaggatacctataccataggggaagactggttgttgcagatatccctgatctcaaagagtctattttaattgaggcccaaagatccaagtttgctgtacatcctggaagtacaaagatgtaccaggatttgaagagacaatactggtgggacggtatgaaaagagatgtggctcgctttgtagctaagtgtatagtttatcaacaagttaaggctaagaatcagagaccttcaggtttacttcaacttttgtctataccagaatggaagtgggacaagattacaatggactttgttactggattaccattgaaaccttttaagcatgaccctgtttaggtgattgttgatagtttgactaagtctgcccattttattctaatcaaaaaggattacaagcttaccagactaactcaactacatatggagtgccttcaaaaattatttctgatagaaatcctcaatttacattaaggttttggaaggccttgcaacaagccttaggaactgaacttcacttgagtactgcccatcatccacagacagatggatgtctgagaggaccatacagactttgaaagacatgcttcgctcttgtcttttggattttggaggtagtttgggagaacacttgtcactggtggaattcacatacaacaatagataccaagctagtataggcatggctcctt

SEQ ID NO: 53347 - DNA, 1686 bp, Cannabis sativa
gaatctcctccacaggagccatgagaggtattgcttggaactgtagagggttagggcagacctctacagttcgggaactgaagtccctgattcagtctcactctctggattttgtttttctaaccgagctcaaagtggatgctaatcctctggtacgtaccctaaagtctttacacttttactttaatatttgtgttctttctattaataatgcgggaggaatcattctggcttggaagtcgaggtttagttttgagtgtatctcttgctcgcgtaatcatatctcgggtttagtgtactctgaccctccctcttacccgtggcttctttcgtgtgtctatggccctccctatatgaatgctaagaaaaaattctgggctgagttctagaaaataggggatagatttggtgggccctggctaattttgggagatactaattttgtcctaagtggctctgagagagaaggctcctctggtcgggatcccttcattctgattatttctaatcttattgagggtagaggtcttatcaatatgcccatccaaggagactttctgacgtgggataaccatcggtctggccggcaccatgtgaaatctgctctggataaaggccttgtgtatggggcctggattcagttatttccgaaggctattctcaacactgtccaaactagcaattcggaccaccgccccctgtgtcttttatcggagggcatggagctcaaattcaagagatgcttcaaatttgaagaaggttggatccgcgacgctagaagtaatctggtagtagcccatgcttggaattcggtcaaacacaattgggcccctgctcgcatttataagaaggtgggtgccactcgggtggccctcctgaattggaatcggtcccagtttcggaagttggatgtggccattaaagatcttgaacaaaaactcaacactctccaaagtctccctgctggctcccgcgacaggaatcaggagagggagatccgtcgagagttgaatgaatctctggaaaggaaagcgatctactggaaacaacgagccagagtggattggcttaaggaaggtgacaagtgttcgaagtttttcttcctctcggctgctatcaaaggaagaagaaataccattgaaagtattttgaacaaggataatgtttggatctctggccgaaggactattgggagtgaattcattgagtattttaaaggcatttttgccggggatgacaatggtgctgagtacaactgtgctcaattatttcaagagagaatctctcccgaagactttgtggcccttgttagttgtcctagtcctgattaaatcaaaagagttctctttgccatgagtaaccataaggctccgggtcctgatgggatgtctgttctattctacaagcactattgggagtcagttggagctgacttttgcgatgcggtttcagatttctttatcactggtaagatgcataggggaattaatgccacaaatgttgtactcattcctaaggtccaaaatccgatccgaaccacccaatttagacctatctctctgtataatgtggtctataaagttatttccaaaattttagcgaacagaataaaacctctgcttccctctctcatttgtccgactcaagcagcctttgtcctgggaaggaactgttgggttttatgcc

SEQ ID NO: 53348 - DNA, 1038 bp, Cannabis sativa
ttttttataatatattgagattaattttggtggagatataaccatttgttaaatgataaagtatactttgtattaatttttttaaatagtacaaatataaatagatttatgaatttaatttttgataattttttttaatacaatcaacttgaagataattttttatatgaataaatataaaaaatataattaattttatcgtaacacatttatattaagttattactaatttttatttgacaaaaaaattaatagagactaaagagtactattttgaaaaataaaaagtctaatttactatttattaacaaaacaaatgttcctaattttgacaaaacataaaatctgaactgatatttacttattcctcacgtggagaattgttggcggcccccaccccaggattggctgaagctaaattgtgatgtaagagtggggttgaatagcatgtgtgcagctgtagtcgcaagggatcatgatggcaaggtgatctaggttactatctcaaaactggagttctctgatgctctttgcggggaagcgacggcttgttgcttagctctgaagtcgacaaaagatcgtggtttaaagtttattattattgagagtgattcgagtgcagtgatcaatgctcttaatgggaaggattcccgttgggagattgagaactatgtctcattttgtactagatcatctcttttgtttgttggttgtattttcgaacatattagtagacattgtaattttgcagcccataatgtggctaactgggcgttttcccactaaaggttcggttcccttccggtatcctctatcccagataaactcctttgtaatgaccgtgaggtctaattaatgttttatatatgcacttttctttaaaaaaataaaaagaactgatatttacctatatatgtaaatatataaatttgaaagacaagggtagactacagtctacaacctcccatgtatgatagctacactatatattgacttaatgaaagacaaaattaactatcacaacttcaaaaaaaaaaa

SEQ ID NO: 53349 - DNA, 1182 bp, Cannabis sativa
aaatgctatattttagtcacaaataaatttttgttgaaattaaaaatcacatttaatcataaaaaaatatatatattatgattaaaaaattttcactaaagcatcaattttttgtagtgatttcttaccctttcttttttctttttaatgtaaattagaaatttttttatatatcactcctattaaaaagcatcgagcaactatattagcaaacattttaataaaaaacagacatatattgtttgcgacatgaccaccccaaaggaagcaagcaagcaaggcttcccattctcacctaattttgtgaagaattcaatagcagagcactcctcgacatcaagaacagcatattattcctcgtaacttcatcacttcaatttttttggttgctaattgagctcacttggcctcaagtccctcttcaacagtctgattacttttgatgatctgtttgagaacgacaaatcctaccatgtttaagatgacaaattcttacctaaccatttagcccatgttggaaactgataagacttcaatgaggtttcaattcattttatccaatttcttcacaaaaaaaaaaattgtaaaatagggtgttcttgtagtagcgactaaaagagaaagagagtcatatagacacaatggaggagagagggtcggtggttgacatgagcgagaaagagagaatgttgatattttaagagagagaaataataagggctgatattttatatttcttaatattattttatttttttaaaatatatatcattatatatttttataatatatatttatttgaattgaataaaaatatttttattgtaaaagtatacattttatattataatgactacatgatgaatcaaaaatcaaaaaaactttcatactaataaaaattttatgctatatatactctataaatatagataataaaattgtagtgacttttttgaatggaacgttcaaaatagaggttcaattaaggtcgtaattaaagtgacttccttcaactatgattctttttttttttaacaaataaactaggaggagaggggtgttagtgctgcaatttttaattattttttcaaactaatctgcacatgtgatttttttaatttttcaaaccacatccgcactgcgaaattaaaaaatcaaaaaaattacaccgcaaaaaataat

SEQ ID NO: 53350 - DNA, 978 bp, Cannabis sativa
gcatctgaaaattttgagtattttcatttattagtagtgattttaaacatatttgctgtgtattgatcattaagtggccaccaagtgtttgtaataatgttcaaatgaaaatataattgtttttctatctacatgatgatttgtttattccaattagactttgggttcttttgttttgataagcataatctcagttaaactgactatctatgatgccatagttagtttcaaagtcttgttaattcaatttaatcgttgttagagattcatttctactaattgaaataaagattaactcttgcaaatgctttgtattgataagttctttcaagtagggttaattattttgtttaatttgtttaggaagtatgagtttgatcttcctatttgaattttgaagaattgagactgagttaattttgggtactttttgacttgcaagcagaatcattagcaaggatttagtatttgcttctgtttcaccaatttgagtactcctccaaggtccaaagtccaaacaggtatttaattttgattttccctatttttgtgttgtttaattatatgattgtcaataaactttaatttttgtcaatgtaatctgcttactgatagaatgattaatttgaataaccatgttattgtgcatataattatttcctcatcatgacaattaagagtttgttgtataacttttactctgtttttacttttttttggtttttactaaaacaagttagacttttgacacttgggagaaaatgtatctattctataaattcagataaacataatctgttaggatttcagtatcattgattcactctaatcttttctgctccttttttttaccaatatgaattcaaacattttatgtgtatatttataaaggctttgttgtccatcaagagaaggaccataattgagctgaatttatataaaaaaaaattaaaagtttggttggtttacacatttttt

SEQ ID NO: 53351 - DNA, 703 bp, Cannabis sativa
caatgacatggagttctcgagtacccttttcacagaagttgaatataccgtgtccaaaacgccattgagctcaaaaaataccggttttgatattcaactaaaagaaccggaagaaaagttggggaagaagaagacggaaaatcagtttactttattggacacatcgtttaatcccatgagcagtgatttagaaacgaaaaccaaacaaatggaagtggggagttgtaaagctgtttcaagagatgagcttggtattcaggagatgccttcaacttcagcgtcttcccaacttggctcgcattcaagctctgaaaaagtaggagaggtatctcataggacaaagaaattgactggagctactcttaaatcgtctctgaaagcttctcggaaaaacaaacttagtcgctctgttacatgggctgatgagaaatctgatagctgcaggaaaagtaatctttgtgaggttagagaaattgaagataaaaaagaagctaattctatattaggcaagaaaggcaaagttcctcttaaaccttcggggtcactgaaagctggtacctccatgtcttgggctgatgaaaagtgtgataccaaagtgtgtaaagatactattgaggttagagaaataaaagatttgaatcaaacttcagatatgcttggtatggacattggagatggcgacttgttgcgccttgcatcagca

SEQ ID NO: 53352 - DNA, 1289 bp, Cannabis sativa
  modified_base (30)..(35): a, c, t, g, unknown or other
  modified_base (520)..(523): a, c, t, g, unknown or other
tttttattttaaagttatgtcgattttttnnnnnnttttttataggttgttagtatgtaaattttgttgtacattatatttctgttttgttgcatagtatattattattcatagatgctatttttttttgctatgtataatagtaatatataattttattagcataatacaaatattttaatgcataaatttttattggcatgctatatatatatttaattattatatttatatatttttaattgtataatatattttttattttaaataatatttaattaatttctattttatcatatacaatgatagtatataattttgattcatggtatatatattttaattctcatatataatttggttagtatattatgcatatatattagtaatatatatattttttttattattgttagtatatatattttggtgagtggtatatgtattttttattatataatatatcattttttaaaataataattatgttctattttctattgtacttttattgacgtgnnnnataattttattagcatgctatatattttatttttatttgttgttattatatatatttttattataaggtatattttttgttatatggtatgtaaattttattgtatagtatatcattttgttttagatcatgcatgtttatttttaattttattattgttgccccggtttttttccaaaatacgtagtcacggctatgtatgacacgtagaccaagaggacacctcacccgagaattagttaagaatcgtatagaaaagaataagtgtggttcagggagtaagctcctggaccagtgcaaaaagaacgccctcttctccgggagttgaagatatagtaaggcatcttcgggacgagaagagcctattcgaacagtcacctcacatttatgcaacatggagaaagcgtctgggaatgcccttaagaggacatgtcagccatcgtaagctttatttaggatgattacacgataatcgaaggggctagtgacgactccaatatgaagaatcacatcaattaaggaaggatgaaggttaatctcacctaatctctatggcacctaccgtgtaggtaatacatgccctattttgtatcttttgggaacttgtgcttatccatagctagcactcaaagacaagttacccctttttaactattcccatcaatctctataaataccactgagaaaaatgggaaggggatcgaagaaaggagaaagaaaaacacacaaagaatattctctgtaaaagaaatactctcattaataa

SEQ ID NO: 53353 - DNA, 682 bp, Cannabis sativa
ccagaagtgtggtcaacaaggatgtcgaaccccgtaagggggtgattatgacagttagtagtcttgtgattcataaggggaaagaccgaaagctgtacaatcccacattgcctgggaaggtcatgtgtgattattttaagactgtgtaggtatgggactacatagttgaagagggctaaaatagattcattggtactatctatattaacaaggtgcatcttgttctccacagttaagcgtgcttaacttgtgatgattttaggatgggtgacctcttgagaatttctcccaagaagtgtgcgagtgaggacaaagcactttgaaaacactcgtgttggtctgtagggccagtcatcagtccaggaagcaacaagagtggcgtacttgtgtgtaagagccataaatccatggggaaaggcccaatggaagcttgaagcggggacgttacaaataatatcaaagctttgacccagctagaagtgtggtcgatgaggacgtcaaatcatgtaaggggatgaatgtgacagtcagtagtcctgtgatctgtaaggggaaagattgggagttgtacaatcccacattgcttggggaaggtcatttctgatgattctaagactgtgtaggtatgagactacatagttgaagagggcttaaatggattgattggtactacctatattaa

SEQ ID NO: 53354 - DNA, 2053 bp, Cannabis sativa
  modified_base (1856)..(1858): a, c, t, g, unknown or other
  modified_base (1939)..(1940): a, c, t, g, unknown or other
gtttagcgtcttcttccatcaaaattcgatgcatcactgttgaggtactgattcccttaacatcacccaatgtccatgcaatagccttattgtacgctcaaagtattgtaagcaacctatcagtctccacatcagaaagtgaagctgacattatcactggaagcttcttatcttctcccaagaactcataccatagatgactaggaagcacattcaactctaactctggaggtttctctgtagatggcacaagctcctttggcacaacccccaactcttcataatactttctattcagtggtccataagaatcgagccatttagcatactcccttgcctccactccttcttgctcagtcaaatcatcttcaattaagcttagttctaaaggatcttctatcaactttttcttttccacaagggtatcgatcaaatcaacaaagaaacagttatcacttgcctttgggaaagtcatcacctttaacacattgaagaccacttcttccccttgcactcacagcttcaattcacccttctgaacatcaatcaatgcttggccaattgccaataatggtctccccaatataattgggacattgctgtcttcttccatatctagaacaataaaatcagatggaaaaatgaacttatcaactgttactaacacatctttgatgactcctctgggatgagctattgatcgatcaaccatttgcaaggttactgtagttggctttgcctcccccaactgcaatcttgtgaaaattgactgtaaagaccgcttagtttaaatttgaaaattagtagataattaaagtttaattatgaaaattatttattgatattaaaataattatttatggtgatttatttgaattcaaaatgcatttcatatgttctacttagaaatttcataattttgcatgttcggtgcccgacaacataggaatgcggtgtatggctcagtagaatcacatcttggtatttttgtatagcatggcagtttagttagacattgggaatgtcgggattagtcaggaatttagaatttcccaaaatacccttagtacccttttatggcattttagtgtgagagggcaaaaaggtcattttgcccatatgtgatttgtctttagtgatggttacttaagttaataagctgatttatttcctatgttttaagctgagattattatggtaaaactaggttttaattcatttattcaaaaattgaaatttggaaaaaatcgagagagaggctttttctctcaaactctctctttctctctttcggcctagagcagctagggtgtgggggtttttttgtgattttcaagctggttttagcaaggaattagtgatctcaatttcttggtaagcttcttgtaacttcctttttgatttcttgagttgtaaggaagagaatagttttgcatgcttgaagtttgtttgatgtggttgctgttgttggttgttgttgtattcagaggtttaattatgttttattatgttgatttatgcttgatttagaggttgttatgttgtttaagccagctttggagttttgaactcaagcttggctcattaatggcaagttttgattctgtgtttgggtgaatgttttattgccttgaaaatgttctctagggtgtatagaacaggtctggaaagtttgaattggattggggttgatttggtcgagttatgaaatttttagtcattcctgcactgaacgggaatttcggtttagagaggcatgtaggaaccgaaattccggttggcttccaagaatttttcccagaatcgggatttcggttggggaaccagtctaccagttggggaaattttgggaaccnnngtttttcccatttttgtgttatttagggtattgccatgttattcatcgatagggaaacatttagtttcaagtttaagtccnngggaagtgatttagcgtatcgcttgtctgtgttgtgagtgatgtgattaggagcctgtaattcgccgagcaaattgttccactcaggttgatcggcacacctgaattcagaat

SEQ ID NO: 53355 - DNA, 991 bp, Cannabis sativa
atctaaatctcattccctcttatctgtacacatcaacaagctcactttattcccaccaaacattgggcatctgaagtaacaaaaggacacacatcatccagaagccatgactagtgcaaaagatcaaccatcacaccgaaacctattacccaacgaacctaagacttaagaagctcatgcgattcaaagacgcttttccacacaaaacttggattattcccaagggatgctgaaagaaaatcacccctggaaaaataatgagccttatataacctactcatcaaagagtttagttttgttagtaaacaccacccttgctttctcaacattgccaaataaaagtcacgaagattacggaagcccattccacccataattttatgtctactcattctttcaaaaatcatccaatgaatactgccaccatgagaaaattttgaaatgccaacaaaacatactcataattctctccaaatctttagacacatcaattggagcaagaaaacactcatggcatatgtaggcaatgactaagcaaccattttaatcagaacctctttccaagcataagaaagaagcttcccgtcccaatcttgaacccttttccaaattctatccttcaagaagcccataatcacagacttagaacgacccaaggtattaggcaaaccaagataagtattgtgttcagaagcttttgccatagaacagtgcaaagattcaatcgacttggccccgtcacattggcactaaaaaagacattagattttgtaaaatcaacttgcgaacctgatgccacctcaaacttatgaaataactccaaaactctcgtagcatcttcaggggaagctttgcaaaagatataactatcatcagcgaaaaatatatgagagataacaggagcttgtctggaaactttgattcctctaatccactttcgaaattcatagaatcgaatcaatgagggaagatcctcaacacatattataaa

SEQ ID NO: 53356 - DNA, 1661 bp, Cannabis sativa
cgtacttacattccaacttcagtaattatattgattcatgtaaataaaaatttgattacatctttaagattactaataagttgtaacgtggagagcattactaattgttatttctattatagaagtgagatacatttactgttttgagaatacgtctcgtatggtgtttatagagtttcatattaggcctagagttcagaattttacagaccctaagaaaattttgtgacaaatttaggtacagtgtttatggctaagaattataagagtttgagcatatcgacattaagccataaagaggcgtgaaaagtgttcattaagcacgcaacgctaaattaaatgattgcaatatccttaactaaaggcatgtcgcaacctaaattcaaggatcataaaataaagatgagattcaatctttttgtatacaggtttttgttgtacaactaaaatattcaatgaaactctaatttcgatatttttcatattcatgtgtactttaattttatctgaaaaaattatcttcagatgaccagaataaacataagatttaaagtttatttgctcaagtacattgccacattaagtacattattatgtaatacatttatcgtaataaatggaagataatactcaccatataatgaaaatatatcaccatgattcatatgtttgttatatagcaaggataattattaatttttaagtggtaaattaatttaaataccgaccaaatgggagaatgttataatattttatatacaataataattgagagaatgttaaaatattttacataatgtaataaatcagtaatttgatttataaaatataattacttgtttaataattaatcaaaaacattttaattatggttactatttaattatcaaatatttcaattatccgatttaattgttaaactattatgacaattaatgcatcacaaataatgatgagtactcgtccctaagctataactactcattctatgaaaataataaatccatataagaaagttaaagagagtctggaaatccaaatatccgcactaacttagatttgctttttttgtagatctaaaactcatgtataatcaaaactcaaaggattaatagttagatatgtttagtttatttttttcctaataaatttatgttcaattcattctgaactttatacaggatttaatagtgatgctgaattaaattggttggattatggtttactactatcaaataatgacttcatcaaaggtatagtagtcctgcacatatataggaaatatattcatatatgtagagttataaattaagcaaggtgacaaatttataatagagcggctgtacacaatattttgatgggccctatttaagtcatgatctgtttcttgtctgggctaggtaggtaggtatataaaaattaatgattattttatgttgacgaaccaaagaaattaatcaaactttatttatgttataatatccatacaattgatgatgatatacaccaaaaagtaggacaaatattagaaaatttatatatcccataatattatatagctggtgaattggtgagattatttgtcttctgcaatggctctcgactggatatgatttatgagaagtgataatctctcaccacattaatatttgtgcttatta

SEQ ID NO: 53357 - DNA, 1028 bp, Cannabis sativa
agcgacataactctgagaagacaaaccaccaagagtttgtgattgaacatacatttggataaaattatcaaactgtgagttataaaaattgacacgttgtttaggtgtcaaactatttcttaatgtgtcacgtatagtcgtaaacaaatttatcacagtattgtacatttcattaggggcgaaggatgtgcaagtaactgactttgactgtatgattttttttctttgcctttaatcttataacttacgcctctttaatagtcaagtctttccccaagtacctcgaattgataattatcaaattcagtatgttgacgcgatttttcatcaacataagctatgaagatttttaatttaagaataaattcaaaaaaaaaatgataaaaataataaattaatactattgttatacctatattttgagaagtaataaaaaattgacacgtgtatcaaagttgaaatatgaaccaactcaaattatgcattattaaatgtactttagcccaagttaacatgaggctcgtcgatactagggttgctaaccccaggtttagtttcaccagcataaacacgagacccaacacccgtatcaggaactttagccgttggttgaatagtgggtccagaagcaggttggtctcctggccagacttctgtggtagaggtactagacagttggccggaccgtggtggccgagcaaccgtgttcaggtaggttgatcgtagtagctgatacttggacattgggatccgtgtcataaggtcccgtaataataataataataataataataataataataataataataatagaaaaaatctcatgtaggaagtgaattttaagttaaaatttgagaatattcttaaagacaatccaatagataacaatttatctttttttcgtttcttttaatttataattttttttttttttaaagaaaaaactatattatctcacaattgaaaattggaggaagaaaagttgtttgttttaccattgacaacatggggattctatcatggtg

SEQ ID NO: 53358 - DNA, 988 bp, Cannabis sativa
gattaaaactcaattaaaaatatactaaaattaatctaaaattaatactaaaaataacctaacacattgatatacataaggtatctttactttcccttagtccttttctaattttatatataagtataagatctaaggctttcccaattttatacatttcaggataagaaactatgttttttattttttgtagtagctgaattaagtttaatgatggaaaaatcatacaaagtttggatttttaaattttctttttctttagggtatttttatttgtttggattggaattaaaagtaccatatttgttgttcttttaatattatgttgcatttttctaggtttgcggttataggggttgtggtggtggtgttgtggcgtgcggtggtgtgttctcccgtctctaaaaaaatttgagattgttgtaaatttgaggtgttagatttgcttatgtgaaactgaaaaaattcgtgtggcattgatttggttataattactagatttttttacattttttaaaaaaattgcttcagtttatgaccgaagcaaaaaaaaacaattagcttcggtgcactaattttttgcatttgttatgaaccgaagcaaaaaaaattttttgcttcggttatgataattaattagcgtcagttcataactgaaacataattaattagcgtcgcttcataactgaagcaaaaaagatcactatttacgtctacagttatagcattgggtacaccaactgaagtaaattctttatatgtcacttaaaaaccgaaccaaaaagccttttttgtagtagtgattggggcatccctcttgtatcaaacttcattcattgaataaagaattgcgatttcaaaatcagtcccaactttcattgttcaatttgtcattatgctaaacaaaaaaaattaccctttgtttcaaaccataacattgccaaagagtgttttgatctcattcacatatacagtagaacctctattt

SEQ ID NO: 53359 - DNA, 1432 bp, Cannabis sativa
  modified_base (1388)..(1388): a, c, t, g, unknown or other
aacaaaaataacatcaattctcaaaaaactaagaaaagataaattaacaatattcattctatatatataaaaaaaaaacttatcttatcaaatgcagatggtaccgacattagatcctggacacaatagactactttaaataatttaataatttaataactcaataactttacaactctactaataaccaagaaacaaaattctctaataactactaccactaatagtcataataaagtctacctcatatatatacagtttagtgtgagaatttaaaaactaatattaatacaacaaaaactaacacatttaataataataataataataatttttttttaaaaaaaaaactcataaagatagcaacataattctcattattttagttaagacgataataatacttttaaaataataataataaatgttaaatacttaaaaaaataatagaagtaaaataactgctcaaaaaactgattgcagtttaattaaagatagaacaatagtaaaagagtcttttgtatctgccccacttatgaagcgactttgatatattggctaacatcactcttaccggatccacatgataaaatcttgagaagaggtgcaacagttattctccagtactatataaccgcctctcactgcatgtagagacaccttttctaacttctcaaatcatttcttcgaagcaaaaatagcacatgattacaaacttttacagaagattttccgagaattagaatcccaactcatccaagtactttcttttaattcatcagaagaacaccccactaccaccaccacaatcatcatataatccctgtgacgtcgtcgatttcgaacagagattggcattcttcaaaactctcttaagggccaaatcttctcttcaaaccacattagttttttcgatttgttgataatcaatgacggtgagacttgaagtatggagattgaagcgaagagatacagaggaatggatgaggcatcggcagttaccaccatatttgcaagagcgtgttcggcgatttgtgcagtatcaatggcttgccacacgaggtgtcaatgagaatttatactccgttctttacctttggaccttcatcgttaaattcaatgccatctgtgtcttgcacttgttcgccgactaagttattttcatactctaataactcactatattcaatattgaaatgcaacaattatgaaataaatatatgtcattatttttaattctatattattttatagcattattcataatttcagacaaatttttatttcacaataaataaatttgttattcctaaaaaattgaaaaaaaaaatagaagaaagaagagctaagagactaagagcatgtttgatattgttttctattttttnttttcaaaaaattgtttttagaaatgagaacaaaaaataatttt

SEQ ID NO: 53360 - DNA, 1270 bp, Cannabis sativa
ttcaaaccaggtggcattgcttccattctaaagaactccctcaccgtatgtactacatcccctcctactatattccaaaacttttgataaaatgccgggttcatcccatcgggtcccggggatttgtcgggatgcatttggaacacagccgctttaacttcctcttccatgattggttgtaacaacactctattatggttctctttaacaacatgtggtacacaagacaaaatttctctccaatctacaactgaagcctgaaacaatccttgaaaataatcaaaaatgacactattcaaaccactttcccaatccacaaagaccccattctcattttccagacgcacaatctgattatttctacgtctcccactagctcttgaaaaaacttactattttgatctccatctttgagccatagttgcttagaccgctgcttccaatagacctctttttgatgaagaacttcaaacaacttcttcttagcttcactatactgttgcaacccatcctcatcacttcttcccttaagccgcttaagagccaaattacaacttttaattctttgagaaaaattgccttccatgcctctgccccaatccgcaagagcttcaccacatttaccaattttgaactgaagggatccccctaaattattttcccagcaacctctaacaacttcctcacaacccggttcactcaaccaccaatttttgaatttaaaatgtcgatgcccctgctctttatttcgaaagtttgtgtttagaatcaaaggtgtgtggtccgatggagaaacatcatgattgaagagtcttgcatagctaaacaatgccaaccaatcatcacttatcattaccctatccaaccttgcttcaatccaattgggtgtatttcttcctttctcccaagtaaatggatgaccatataactttaagtcttgcaacccacactccccaatagctgcccgaaagccatcaatgagccaatttggataacgattaccccctttcttctcgctttggtccattacattattgaagtctccaattagacaccacggtaaagaactttccgcttttaactccctaattaaattccaagtgttagctctaagacttctatttggctccccataaataccagttagccgaaattgatgaatgccttcccaagagatagaagcatctatatggtttcgagaatagccattgattaatacttcatctttgtctttccacaacagagcaagccccccacttcttccttgagc

SEQ ID NO: 53361 - DNA, 621 bp, Cannabis sativa
agaaatcaaaagtacaaagtgagcttcaatttggtcccaagtcttcttcaagcaaattttgatctggttattcatattatttgtttacatattgtcaatgtgagactctttaacattctccctcaaaaggtagtttttttttattggctcaccaatcttgaacttctcgatcacaaagtgacacttttttttaagttcactatcctagaatcataagtggttattttagctctaatttttggattttttttttattttgggtggctctttttttcgctctactttttttatttaatcgacttttattttggatttgatacttgttagaatttgtttttggttttgataccacattaaaattgtaagatgcatgaggtttcatctcaaaatcaattatcaagaataagaactcatgcatcttaaaattaaatggtattacctttcacatattagcattatgagacttttaaacaattagtttcactaaatatatactacaaaatataaataaaaaacagtcacctttcatcccagccctccctcactagtcaccactgagctagtctcaatcgctattgaaaacaaggttacttagttggacggtattccacttggtatttt

SEQ ID NO: 53362 - DNA, 1837 bp, Cannabis sativa
cattggaatgctattccaatactttaaaatgcaaccaaacaaatgaatggaataaaaattgtttcctttccattccattccatttcattacctccaaccaaaaactaccttagtgtgacatgtttattaaggagactttaaaataatgttatttgaatatgaggtagttcaaatcattttaagtcttttgttttagtttagttaattaggaattttttctctatatgtaccttttaaaattttcttcgagctattaaattgttgaattgagcttcgtccaatttaactaacaaaaacctaatatggataaaagttgaaaggtataatttagtacatgtgaattagacaaaaattgtttaattcaacaattttagaaatttttttaacaacctaaaatgggcatgatttattacactattttggatactgtgttttataaaagttattaattagagaatatttttttttaaataacaaaatagatcttgtatttttcaaaatagtaaaaataagatcctaaactcaatttttaactatttttattttgtaagataaccaactttaagacaatttctaacacgaatagatacataaaatgtaactagtacttttgtcataacatctctagatcatattattattaagttttatttttactaacatttagtttagggttctatttgtacaatttaaaaaaatataaggtctattttgtaatttaacaaaacagaggaattaattgataatttttgtaaaatacagagtccaaaattatatttacatttattttaaatttactattaatgctctgttttaaaatatatatttgtgagttttatatcttgtcaaattattgaaaatgtagtcctctgaatttgaattccgccaaaatatttaaaccctcgtgttttgtttacgagatcattagtttactaaaaagtgtggatctttgacaaagcaaccatttttctaggtttatatttgaaaatattttcaccaaatttagtttcgataaaccattttcatttaattaatggttcaattaagttaaaaacttaaaactaaggaactcaaaatagcaataacacgatatatatttaatttaatataatatttaattaaggagaagctttaaaaaaaaaaaattaattaaggagaaataaaatcttgatttgcctcgtataatgtcatgatttttttttttattatttgttgttagctaggttggcggatttgatagaacacggtcggtgtgattagtcttgaagttttaaagcaatttttttaaaaagaaaataaagagagaaaagtgtatctaatgataggagatgttgtatttccccacaagtctttctaaattggattcttgtggactaagatttgcttcaactattggagaattgaaaaagagattaaaacgttatttatagtcaataaagacgcactcactcacgtccactcattaatcatcatactttgtttggtagctattagaatgtttacataattatgcatgcatacatggttattagtgaaaggttttttaattatgtggaaatgatggaattgcatttcacaataatgttaatattaataaaaataaaaagcctatttctttcatcttttgggcttcaaaactcaacttttagaccttgtggcgaagattattgacgagagtccatagagaaccatatttagtcatatagattctttgacttggttggggtaaccgggaaaaaatggaaagttgaaatttagactggactcaattaattccttttacttttactatacattcgatttcataatacatatatgctccttttctaattttcct

SEQ ID NO: 53363 - DNA, 1457 bp, Cannabis sativa
tgggatgtgttctgatgcaagctgacaaagttatagcctatgcctcccgtcaactgaaagattatgaacaatgctacctaacgcatgatttagagcttgctgttgtagtatttgctctaaaaatatggtgacactacctttatggtgaaaatgcgacatttacactgatcataagagtctcaaatactttttcacccgaaaatatttaaatatgaggcagagacagtggctggaattggttaaagattacgattgcaagattctgtatcatctcaagaaagacaatgatgtggtagatgcactgagtagaagaggtcccgggccggttttcaccaattcaatgatagctcctcaactggcctcatagatggttaatgcaaggatcgagtttgtagttggaaagttgcataacttgacactccaatctaatttgcttgatagaatcagaaaggcacagttggaagatcctgagctaatcaagattcaggatgagatgatggctggtcgacctaaggacttttcaatctcgaataacgaaatgttactgtataaagcttaggtttgtgctcctaatattgatgagctcaagaaagaaatcctcaatgaagcccacaccaaaccttattcactgcattcgggaaccaccaaaatgtaccagggtctaaaaccctacttttggtggtatgggatgaaaaaagatgtggtagagtacatgtccaagtgtttaacttgccaccagaacacacttttataggggtgtactacagaagatttcagtagaatttatcataaaacattaatgtagaaagaagaaaaatatttttgaaataattgtacccccttacaaggttatttcaatagacacccttctctattttggcatctatgagagtttttaaattattatttttcttcatcgtgtacattgtagttacttagaatcacctgtaagttcttataaaattctgattagtttacagtgctgcaaataaaattcaaacaattgattaccacgtctataagataaaatagtcgcgcgtacaataaaatatttgagtcttaattaattttaacattgtaaactatttattgattgaaatttttttgaaaatttacaagtagtccactgaaaaaattagaatacatttttagatgaagaaataaggggtctactgagagggggtacactaatttttattagatcaacttatcatttcttaaactgtcatgaaaatattttaatttaaggaaaaaaaaagtctgaaaactaactatttgaaataaaaataaatttattaattattttttaacaaaaggaaaaagaaaaaaaaaaactaaattagaaaaaaaaaatacctataataaaaaacaaaaattaaagaaaagaataagtattaaaatattattaaaatttgaagatatatgtaactatgtagtaaagtcgatactatcatact

SEQ ID NO: 53364 - DNA, 1310 bp, Cannabis sativa
  modified_base (1242)..(1242): a, c, t, g, unknown or other
ataagtcggcacgagcaaaacacagtacgaattcgagcacgacacaaaaatactaggcctatggggctgttgggaaaaatgataaacttcaagcgtatcgaaataataaagaaacaaaacaaataaaatttgctcagtttggtaaaactaccaaactcacaaagagaaatatatttcacttattacttcaaaattacatatactctctatttcaatctctccacccaaattccaatacaccatttgcttcttactttctctcaccacataacaaactcacacacacttctcttttcaaaactcactatttttctctacatccacacctctctctcacacaaaacacatatttataaagttacaaaatttgggcatcaagacagcttgggaaccaagacattccaaatcttttttaagaatactcatcaaacttggtcaccaagacttttttttcccacaattaataattactcaaaaagaaattacaactttacaaatatagataaatacataaagaaataattaatttgagtcaaactccaacaatctctaccttaactcaaattctctaaactcacaactcaaaccatcaataagagtatatatacaacgaattcatactctcattgaacttcacttgagcatttgtcttcacattcttcaatctttcactgatgtcttctttcttcaaataatttttaactgaaattagagtcttctccaccttgtcacattccttcgcactaactaaatgccttttgtgatgtgactccaccttcacagatctacctaaaatagtctttcccactaatttatacaaatttcactctttcttacccttcataactaccaagctacctttcttgatagttatttcaccatattttgcggaatagacataaactcaagtatccaaagctcccaaagagattaaactcctccttaatgttggaacatgtctcacacgggtagtgtcctcacaacaccatcaaatattttcaccttaacagttcctattccaacaactttagagctagaatcattgcccatcaaaacagtacaaccatcatatgcctaataagtgtcaaagcactccttatgtaggcacatgtggaacgaacaaccagaatccaaaatccaagagtcaaaaaagttttcatcagctatgacaaagagaacatcatagtcactttcaaagccttcactaacaatatttatggaatctgatgtgtctttgcattnttgattcctcattgcttcaagatgcttggtcaactcttcacaagtccgcctaacatgtccctttttgt

SEQ ID NO: 53365 - DNA, 1325 bp, Cannabis sativa
ccctcacaactccttcctagatgctagtatgggccactctccatcgttaacttggcaaggtattcggtgggatcgtaaacttttgatcaaagggttgagatggaaaataggagaaggacgctcggttagatgcggtttgtaccattggatcccaggtcattctacctttcttccaacttgctactatggatcttcacatggtgttgtcgcaaactacattacggaagaaagagagtggaatatctcatgctggagcaagacttttgtccacttgatgttgagaaaatcctcactatccccttgagttacttcagcactaatgataaacgtatttggcatcatcataactcggggatatatacggttcaaagcgggtatcattttgcaactaagctcgaagaagaagacctttgctctaactctagctcttctttgtgatggtggaaatttttttggtccctacaaatccctcaaaaagttaagatctttgcctagcgtgtcattcatgatgctcttcctatggctacttctctggtttgaaggaaagtaattactgattcgacatgctctatttgtaaacaagcttgggaaacaatgggacatgctctctttagctataaatatgctaaggcagtttggagagctcaaaatcagaggttcgattggcacgcgtgtacatcaatgtgaaatggagactacttgttacacctctcatcaatctataacaaaccagagatggaacgacttttttgtacactttgggctatttggaattaacgaaacaaggtggtacatggtagcaaatcaagagctgcaaaggacctttccatttatgatgctgtcttcttgcaaaactttcgaactgctcaacacaaaaatcctactgttgctgttacctcaccagcaacggcatgctgcaacagcccccattccgtggtcccctcctgcttcaggcgtcctcaaactcaacattgatgcaacagtcaactcctccactaaaaatactgatgttgaggctgttctaagagatgcgaatggacatgtggtggctgcgctttcaatgccaattatcggtaacttcaaatctcatgaaatggacgcaaaagtactttttcacagcctcaattgggctattcaacaacaattgccaatcacgcaaattgacaccgatgcacttatggtggtgaatgcattgcaagctcccttcaatccaaactcctcctttttagatttaataattgatgttgttagtcttttatacttttccctaatgtaaatgtttcacatgtaaaacgtgttggatattattttaccaggatctagat

SEQ ID NO: 53366 - DNA, 534 bp, Cannabis sativa
ctttttctgaactttttgtattatatattcttattaatatcgacttgtacacctattgtgatttgtgaattgttttagcattttacaacattcaagctttagtcatgatcacatgacttttcagcaaaagatggcatagaggaagataattggatagtgaaaagagctttccattgtctatgtagatcatgtgttcgtattataagtgttaatatctaggaattagcatacctttgagaaaatcaataacaattacacgttactaagttatttacaatattcaataaatataaaatggcatctcttgcacatccaattaatgccattttgaggttcgagtggattctcaagattttgggctttatatatagagtttcttaaaagtaaagataaagtaacctttttgttaagtttattctgtattttaggaagtctcatacaacgtgagttatgtgtctatattatggatatttactactaaagaagatactctatatagtgatcttctagttatacatacgtgacaaaatatta

SEQ ID NO: 53367 - DNA, 1017 bp, Cannabis sativa
ttcattgttatttagtactttatgatatacatgatgtttgtgcttcacctgcttttcttgttgagtctttgtgactcacgagtgctttattataatgcctcaatgcttaggcacgctacattgattttttaattacagtgcacacctttgctaatcaaagggttttctcgaatatcatgacaaatttaaacttttgatttaactttaagcttttataaatatatattatacaaaaaagttgggatccttcttttaaaacttatatttattttcaaaataaaattttcaaacatgtcgcacagcgactacaaaatgaatcccaagtcatcctgagaccaaactctccaggttgcaccatttcgacatgtgcaatcatccccgagctttgaactcactgttgttcaaccttactctttcctttacttacacataaaaataatatttgtgagtcaacagactaagtaagaaaagtatataacatagaatatattactgacttgtatttaggcgcccatacacctatccacaaggctaaatagatgatcaagaacgttcttaataaaaagtatgacatctgtaccacatgcactaagtactcgtctcgtactagtgttggtacggctgaaccgtaccccgagtactagtgagtgttgcaccacatgcactacgtacttttaaccatactaatgttggcaacaccggatcgtaccctttgaacatgatatgctatactaatgcactcactaccactactatactagtgttagtagcatacaaatcatacaacgcaacatgcaatttacatacatacacatatatatatacatattctatgctagtcttaccttgtttctgaattcaagtgtgccggttgatctgaatagaaaatcacgcattgaatggagaccctatctcacaatcacataaatgggtaaacaacttactaaaaccttctccaatcgataaatagaatggcaataccctgaatatcgagaaaacatcaaaactaaggctcta

SEQ ID NO: 53368 - DNA, 2574 bp, Cannabis sativa
  modified_base (640)..(641): a, c, t, g, unknown or other
acatacggtcatattggtccccattttctcaaatcttaactctttccaacacctcgatttaatgctttgtctgcaccaacacatgttgtgcttcaattatcctccctttctcattcctttctcttacaataataataataatttagtattaattattttttgtcccaatattaactttccattcaactctaatttttcttatttattactagctagctatcataagttgataactaactacttgttttcaaactttcaaaattgattattgacatttaaagttttgtttatttaaggaaaacttacaaaaaaaaaaaaactgtaaaatgaagaaaaaacttacaaaaatattgagacacaaagatttttacatttttactatatcaagtttacaaaaatactgtgccaaaattttaaaattacaaaaatatagtatttcgataaaataaaaaagaaacaactcaaaaataactttaaaataacttagcaaacaaaatgaaaacaataataaaacaacaaaaatatatctacaaagtaacagaaaaataacaaaacattaacctaattggaatatgcaaaacaatatcaagttctcaatatgtttttgtattacgattttttttttttacttagttttgannacttgatttatctttttgtactactatattatttttttcaaggaatttgttattacaatttcatacttttaacttttttttttctttttctttttgagttagtgacagttaaaatgataatttattttttaaaagttaaataaataattgcattaataatagaattaataagatcttatgatatcaaaacatggtatataatataatgggtaatatataagtaatatgtcaatatctactactacacatcgtgtcaattaaaaaaaataaaaaaatgtatcattgtattttaaaaaatgtgtaacaaaataaactaaatatatgtatctatatttacaaagcaacacacatacaataacaaaaaaatatcaagaataaactaaacatatacaccataaaaaatacacatgaataaaaacaaattaaaaataattgttcaacaaaaaaaattatgaaaaccactataaaataactaaaaattaacataaaaatagcaaaataaatgtgcatatatacaacaaaaatattatctgaaataaattaaaaatatacacaattaaaaatcacataaactaaaacaatattaccaaaaaaatataaaaacaacagaaaataactataaaataactatagaatacctaagcaactacataaaaacaactacaaaataattataaaataacaaaagtacagttataaattaatagaaaaataacaagacatcaatcttgttaaaatatacgaattattcataaatcaactttgaataaactacaaaacatccaaaaaaaaaattactttcattaatcatgtaaaagataaaaaaaatatgggaggagtgttcttaatttttttgtaagagagagaaagagtattaaataaaatatgagaaaaaagatgaaagtaaacgaatcatattttaattagtaaaggttaaaagaaattaattaagattttttttacaaaatgtgattaattaaaaaaaaaaaagttaaaaatagttagagtaagaatagtaagaaaaaaagaataaggtgcgcgtgactttcttcccttctcccatggcgaaaaagagaagaattgttcgaaagccagtactccgatggactggtcaaattaccaatgaagaaaagcgacgagatgtggatgatttgggggattcaagatcggaagaaggactaaacctcattgcagaagtagtcagtgcctctgaaattgatcaaatcaggtacgaagggggtctgaactcaaggatgaaaacacatcgaacaccgtaataaaagttttgattgggccaaggaagttaaaaacgagaatgatacaggaaggagcaggaattgtttcaagaatcagcaagattgcactggaattccttctcgaaggagaaaatcttttctagagattcaaagcttacgttcacaaaaccattgatgaaaaacagagtcaagatagctcaaattgatccagaagaggttgctgaacaagcaataaattggaactcgactgtgatatgtatggtactgggagcaaaacccctatgtaagtcttcgagagattcatcaagcatatctggggacacctaggtattgttcaagtagctcgaatgaccatgggcttggttatggtcaaactcaatgatgaggcaacaagagacaaggttctggaatcgagaatgacacaatttaatgagaaaccagttataatcaaaccctggtctacgaatctaaacaccattaagctggtgcaaatagtcctactatggattcgtcttcacgacctaggtcttcagtattggggaagcaatcgcttaagtgctttagttagtataattgggaaactgatttttgtggaccaacatactaaggattgcactcgagttcaattttctaggatattggtggagatggacatcacgaatgaccctctgagatca

SEQ ID NO: 53369 - DNA, 1701 bp, Cannabis sativa
tccatatttcacatcctctaattggcacttaattgtacattcacggaaagcagttggattaaaatgtgctctcttcccaattctttcccccttctcaagaatatcattaaagtccccaagcactacccatggttcatttgttctcaatccctctaattatttccaaagaagcctcctatcctcttccttgttaaaaccataaataaaagaaactaggaacttattcctattatccatagttgtaatcgaaagatgaataatttggcttgagcaaaatagtatgtctactatgtaactcaaaggattccatgctactaaaattcttctccctttatgccaagcattatttgccgtaaaacaccaattggaaaacattctaacgtataaggctccaagatttgaagccttaactctcgtctcgaggagaccaaccaaaccaacattatttttagcaataaattgcttaacatctatttgcttgtgttggttgtttgattccccggacgttgcaacttagaatcttatccattttttaaaggaggctctcccgctcctctagttattatctcttcatgtatcccatctgccacccgatcctctatctcctgcattttataatcttccccagtctgtaatacagtatactgattcgaagtggaagcttcagcattatcattctgatttttaggcctccaacccttcaccaccggttgaaacccctctgtatcttccccattcagtacagtttcttgtttcttcatccctttcaccacccattcttgcttcttagtctccttcttcctgcattcatccgtattgtgtcccattcctttgcaatgtttgcaaagaacaggcttccactcatagttgacaaccacagaaacatcagcaccaaattcattctcaaaatagatcaggcttggaaactcttgctccattgaaacttcaataaggattctaggaaaaagaagtttatccctttccctagtaacctcatcaaccattataggttttcctagttgcccaactatcttgaacaaggatttttggccccaatacttcaactctaagtcctctagctgaatccaaataggaatggtttgaatattttctttctgaacattacaattagggtcccaagccttcattatgacaggcctcttgttaaagaagatataaccaccagctagaatatcatctctatctttaatactagtaaatctaatgatgaaaacaccataagaaaccatacctatcttgtccactctgtccttccagatccgtcttgcaaagccctcaagaactgcaagtggtggattggcacctagaacatagcagacaatagccgattctaggttacgcatcactggttcttctctaagaaccgaaggtgtagcttgaattcctttcgagatagaattttggcattccttattagcagctaagaaatagccaaaatcagcagctatctcatcttttcgcttcaataacctcaacgatgaatccggagatagaggaggctgatcatgaatcaaatcaactcctactttgtcttcctcttcatccgagaattccactggttcaacaccaagaatttcctccatggattcggtcttccttacatcagcagatgaattcagacctttcttcttggcctttttgtttaaaatttgcgattttcccacagtcttggacctcgtt

SEQ ID NO: 53370 - DNA, 779 bp, Cannabis sativa
tcaggcaaacatacgaacatacattctgtgtatctcttgaagaatttataagtaaacaacttactgattaaaactgactcgtggactaaagctaggtaacgccccaactacgtaaaaaactgtttgtctctttatatactttctctttcgattgttatttcttcagttcttattatttttattccgtttctgaaaatcttggaaaacaagaacaatatatcgagagatctcaagaaccaagtaatgatttaaacagtaaaacaaagaagaatagcattgggtttaatgagttcaagccttgtacaatactctacatctcggtcagaacaacaacaatcatatctttattgatatcagtgtcaaggttacaagattactcacaaactctcaaagattacgagaaaagatttctctctctagtttagactctcttctctcaaccttacactatcacgattttcactctagcaattattgtctgattcacctcacatgattacaaagatttggtagctatttatagatttccactgttgcttgaaatagctccaaagctatcgtggcacattgacaccactttaaatgtttcagctcatcagccacaacaataatccacgtcagttttgagaatgcacttttagtactgacaatttggaagctttaatatggacaagctatctagacacgtacaagcactccttccggagatgcacttccaaatagcttactgtcagtcaaggatgttcgacttttacttgggcttacatcaacttttattg

SEQ ID NO: 53371 - DNA, 1623 bp, Cannabis sativa
  modified_base (157)..(157): a, c, t, g, unknown or other
aatgtgttccaatttctagccttggatcgaccatctaatagaccatggactaaacggccaatgcctgaaaggactatgtccaagggaccgccgccccttcacacctcgcggtgcttacacctcttgctttctgaagttctgttcaaaaacctcgtcngagaacttgcatagagaaggatttcacacgacgcagcagttcttcctgaaaactaagaagcagaggaaaagcaggggagcctgtggctttttccttgttgacaagcattgcaaaattgcaatcctttcatactgtgaggtatattagcttgagttaagattttagtgagtatagggggtgagggatggccaagtttacaatgccatagattgatatcagtggacaaattcgaatgatacacagcagcagtaggttgaaaacagaaagtagaatctgtagttttattaatatgagaggaattacaagaatcctgaacacaggtttgagtacaagactgacagatacattgctgagattgtgaaaaaccactagactcaataagatgacattggatggaagtgccagacaaattcgagccttcatctccaagaagatatagaccatctttaagtgtccctttgacaagaactgctcctgtttgcttgtccttaacaaaacaacatgttttatgaaattcaagaaagacattgttgtcattagtaagcttagagacactaactagatttttagtgatagaaggaacatgtaagacagaattcaaacttaaaggagagtaatgtttagaaggaatgaaagctttaccaatatgagagatgacaaacttcttaccatcacccactgcaacagattcttcgccagagtagggggtgattgtgtccaggggagcttcactataggacatatgatgcgtagcactagtatcgacataccaattctgatcatcaccaaaatcaggaatggtttgagcaacaaaggcagtagggtcatagtcaatgacattttcagtaaggtgagcctgtggagaagggttgccaatgacagatttgggagttacccaatttttgtcaaacctgtaatgacaggtaggggcagtatggccatagcgcatacacacttggcacagaggtctattgggattttgtgacctggaatactgagatggattgtggttcttggtggacattcttgaaaaagaatcagttggagtgcctctaccattgtttgtgtactgtctgtagccaccatttcttgaaccgaaggtaaggtttgctgccatcttagttgagagatccatcatagtcgtatggcgttcaagtcttgtttcatgggacattaacaaggcttgaacctcttcaagagacaagttgtcacttcgagaggtgattccagaaaccaccgaatcaaactcaggtccaagaccattgagtagatgaagaaccaaatcaaaatcagaaattggatggccagcaacagcaggagaatcacaaagaattttgatcttatcaacataatcggagatcgataggttacctttgtgtaaattggacaattgactcttgagttgaaggagtcgagccttagactgactagagaacttttgttcaagagctttccaaacaccatta

SEQ ID NO: 53372 - DNA, 1065 bp, Cannabis sativa
  modified_base (1023)..(1038): a, c, t, g, unknown or other
tttatatatataaagaataacatacgttagaaaaagaaaatgaaatccaataagtaatttaattcaacaaaataacatatctttcacatggagatgagtcattgatgatgaagatggtgatgatgattatgggaaattgtcttagggcggctcaacccttgtggactctctctctctctctcttatcctcttttggtgacttatatgtgtgtaggaaaggaatgatgttaagtttaactttgaggggaaaagtatgggtgtgtgtccatcatgtaatatgactttaaaattctagtttaggcaaatgggtagatatactattatatattagggaggtatatccatcatattgaatttggaaatggaaggtacacagttttataattaaataataggatagaaagaaaaggccaataagaagatgagaaaaataaataaacatctttcggctgcacaccttggaatataagattaagattaggattaggagcagcaaaataggatgttgtcttctcaaccaacaaaatgctaccaaacatttagttttgtagttttgtgagaaatatattatgtgatcaaacatttatttattttatttattttttttttcatttttgaggttataccctgtgaaaaaggaagaagaaatttttattgttgtgctgaaatttttgagaaatactaaaagataagcatggtgtttagtacttttgctggtatgatattgttatttgtgtaatttaatactaaatttcacttattttactttaataaaaaattataaaaaactactaactatttatagaatgtaccttactgttgtgttagaaacattcagatttcatagcaatgttaagaattttgtaacattataaaataatggcactactttactgttgtaccctatgccttagcctcttaggcttagctcttagaaatgtcatcaatctaaatgaaatggaacttcgctagacttgaactctagggctcttttaaacttaagaaatatatatatatatatannnnnnnnnnnnnnnnaggtgattgttacgtgccaagccacgt

SEQ ID NO: 53373 - DNA, 2186 bp, Cannabis sativa
tggaaattaaagaagcaaaacccacaatgttacgatcatccgcgctgaatctgaatacggggggccatggcaaatgcaacttgtgaactcacttggctccaaaacatcatcaaagatttcaacattcaaccacaactctcctccactctcttttgtgacaattctgctgccatacatattgcagaaaacccagatcatcacgaaagaattaaacacatggaaatcaactgtcatattgttcgagaaaaagtctcaaatggcagcatcaaaatgaaccatgtcttctccaaaaccaacttagctgatgtactaactaaacccgtgtttctaactcacttcaataaaattgtatccaagatgggtgttaaaaatttttacactccatcttgaaggggcctattaaaaccgttatgttagttatttcaattggctagttagttgggttaggtaggttagttcagttagttcaagatctttgttctggtaccctgctgcctatatatactgcaacttcattctcttgtattcattcaattcagtttcaatacataaataaagacaattttcttttctctagtctaataacgaggaattttagaacttgaaacctcttctttacgagaagaagtataaaattactaaattatgtttataatcacgcttaattaaatagttgattgcaactaataaaactacaaggagttttactatgattatccataatatttaatcagtttttggttaatatattttcttttaccacctgattctcgctgagaacgtcaaacgtcacatacttggttaaaaaatacgtcatttctccaataaagctacaatttgttgtgaatcaaacgactcaatcggaaaagtgaacatagagaacatcataatcattttttaaactttaaaccaaaaataaaagaggaagtggagaacaaccttttttctatgtcaagtttgcagaaatgatggatcccactcttaaaataccataatcaacctatatatttatgtatgatcatcatgttatataccacatatataatgatatatacacatgatacatagttccatcacacacacatatatatatatgctgattaaagtaattgacacactatttcatactcataaatcataatattaatatacaggcaccctcggtcatctgctctctaacattcacccaatcatgttccgaatgcataaaattgtataacacattcaactcttgaatttttcttcttcttctttcatttttgtcctctgctttttctttgattttcatttttcaactatactgaataaaattattgtgaattaattcctgatgaacaatctcagaaatataatttcaagtccgatgagaaaatcgaggagcaaataaaggtgcctaagaatatttctaatgattcatttgatgtagagtctctctacactaccgttagattcatcctcaaacggtcaatccgaaattttcaggtatatatgtagatggataaaattggtttaaaatttaatttagttagttttctttttctgctgtgttatataaattggacatatatctttgctgaaaaaatatgacttatatctttgttgtttttcatggtgtacgtaccaacttgaatttgttaaaaaaatctgttagcttgtttgcaatatacgtaggctaatattattagatataaattttttatcatttttattttttggtatttgtaaaataattctaatattaaataatatttaactatattgtaggaagctactcctcaggtagaggaagaggagcctaagccaaaaggaagtttgagactccccatttgctatttgaagaagatcataagcagtgaggtgatcattgcttaccattttttttaataataataataataataaaaccttacatatagtatatttatttttcttattaaatattaacacataaagtatacccacattaaaaaaatttgatcggaatattaaattgaaaaatatatataattgtttataaaactgtgtttgattatgtatgagaatatttagttagattattctatattgaactatattgtttagttaaacagaagaatttggtattgttgtaaaaagttatataaaattattaaaatattaatctgttgtattaagattgaaagaaatagttagaacttacttttttt

SEQ ID NO: 53374 - DNA, 808 bp, Cannabis sativa
agttcagggggcatttttaacaaccttaaaagttcagaggcataatttagtacgtgtcaaagtttaaggggcaaaaatcctaattagcctaaatgcaattgcagctatatatatacattgacagttttctctttcctttgctgggctcatattcatatataatatgcgtagttatgtatgtataatatcaaaagagaatatatatcattaattaaagaatcaaaaaggttattacaagtgctttttctgccaggccgaagaagagactttgcagcacttgttctttgattgccccttctcgtcaaagtgcttaaagaaaataaaggattggctttcttggaggatgacttccaattctttgcatcgaatagtaaggtggatacgaaaagtgaaggttagtaaggctaaaaagatgattcttgctgcagttttggcagcccttgtatactccatttggggagctaaaaatgacattttatggcaaaacttgataccaagtgtagatagtatagtgtgcaaagttaaaaatgtgtcaaagaagagaatatcttgtacatggccaaagaaagcatgaatgagtgatgagtgatagagaatggttagaaggattgtaaagtttatggtttattaggttcttctacttggagaatgctatttggttatataaatgtgttttgagcaacgaaattcttataaaaaaaaaaggttattacaattaatgttatatatgaagtactgcagtatatatataagacttaattaaagattacatggattattattgtgattattttacaaatacacaaaa

SEQ ID NO: 53375 - DNA, 721 bp, Cannabis sativa
  modified_base (44)..(63): a, c, t, g, unknown or other
catgtgttaaatgtatattaaatcaattaatatatttttttaannnnnnnnnnnnnnnnnnnnaaaattataaatatattttaaaaaatatctaaatataattgaatgactattagatgataattggatcggtttggtcggttatcctttggatcggatgtcccatccaacaacctatccgatccgattggattggattttcaaaatttacattcgattcgatccaattatgattggagatccgattctattggatcagttggaattggatcgatcgattgtaattgtattagatgactttatgcatatccttaccttttacttaagacaattttcatggttttttttttagtttttaagtttttttattggtttaaatatgctataaggtgagagaggatccccttgtctcaggcctcgagaaggcttgacagacccagtaaccgaaccaatgatcaaaaaagaaaggctagaagtggtcacacacttcataataagcaaaacaaaagaaacatgaatattgaaatgaagcataacacttttcaaataataccaattgaccctgtcgaaagccttagccatatcaagcttcaaggtagcccaaccacactcaccatgctttcgggaatttatggcatgaataacctcttgagcaatcaaaatgttatcaaaaataactcttccagccacaaaagtgttggaagttattttaccaggaact

SEQ ID NO: 53376 - DNA, 1086 bp, Cannabis sativa
gtttatatattacattgcataacttgggactcgaacccaggacctccaacacacacgctccctcctatggccacttgagataccctcaagtggttataaataattgaggttaaatgttagttgtttctatttcaaggttatgttatttctagtttttgaggttaagttgtttccattttttatgatatctgtttccattttacatacatatatgacgttaaataatagttgtttctattttgatattaaattgtttctattttcacatataatgtgcttaaatattacttattttgtttttttttttttgacttatttctatttttagtgtaagttgtttctatttttataatattgtttccatttctcatatatatgaggttagattctagttgttttcatttttcacactcacataatgttagttgtttccatttaaaaggttatgttgtttttattttttataatatttatttccatttgccatatatatatgagatttaattctagttgtttctattttttatagtatttatttctatttttatagttgacttgtttccatttttagtgtgagttgtttctatttgttatgatatttgttttaatttcatatatatgtgattaaattctagttgtttctattttttatggcatttctttctatttacacatatatatatatatgtatggttaaatactacttgttttgtttccatttttaatttgacttgtttccattttcagtgtatgttgtttctattttttatgacatttgtttctatttcccatatatatatatctgaggttaaattttagttgtttctattttttatgacatttgttttcattttcacatatatgtgcttaaatactacttattttgtttccattttcagtgtgagttgtttccattttttatgatattcgttttcatttttcttatacatatgagattaaattctagttgtttctattttgaggttaaattgtttccatttcacacagacatactagttgtttctatttttcacacacacataataatagttgtttccatttaaaggttatgttgtttctattttt

SEQ ID NO: 53377 - DNA, 5567 bp, Cannabis sativa
gctcttccgatcttggtaaaataaattccaacaggtcttacatagttttgtcatcaataggacctcgaagcattagattttgccctctaatagatggttatccatagaaaattttacaccgtaagatctcgaaaggtaagtattttgtagatttatatttctagtagactcatccctaaagatgactacttagaattgagtttacaaatataaaacaatagtagaagctcataaaataagaataaccttgaatcttggttactcggacaatgttggttttttattttaattgaataaaattgtatccattttagaagagcttactgctctatttgactggtgatatctttgactcttgcttaccgggatattgtatatcatttagttgtaaaccttataaaatttgaaatatgtttatttttagtttttttttttcatatcttccttattttattatgtgtttacaatttttcgaacatatgtgattagaatttatattgaatatatcattgaattctgttattgattatatagtatcaatttcaaatcttcattgttgatctaacttaattgattgtcttcaataggacctcgaaacgctagatatcgttccctaacaggtggtcatctattgaataatctaatagtgttagatcttgaaagataagtatcttgtaaatgtgaaatctagttgattcatcccgaatagatgacaacatagactagtgtttacaataccgaaacaatgaaaaaaattacaaaagaagaaaattttgactctcacttgttgggacatcattagattcttattttaatcaaaattattctttagatttcctctaaagctttttgataatgaaatagctataatcatacatcattggactacatggattaggatcatctacttatgatgttgatttttttttcttccaagaaaatgagtaacgttgatgaacatattccaaatattctatctaaaaaatgatgattatcctcaatttttagggattgaatctccttcttacagtgctactaaatatcgattaaacataaacttaaggttattgttctaaaatctatattaagcttttgctagataaacttagagttataattgtgtcttagtggtggtctaagctaaaataataactcagttttagattactaaacactaagtttaactttcacaattcttaatttcaatattagtggataaaactatgtgctaatgtatgaaaatcgagttaatatcctgagactaaatatccacttacactatttagcaaactttttgttgtaactagacttagtaatcatatacatatcaaagtatagtaatgactattgataatctatgggactctatcttttcatagttttttttttgacaagattattctctgcaaagagaacaggagccatacaatcacttggatagtatattcatgtgttattttgacattggtggttatgagtaactcattaaattcttacacgattactatagatatttaacttatgccaaaaatttgaaatatttgaaagctttcatgagtttctagaaaagacagttaaaaaattcattaaagatcttgtgaactgataggggtggagaaatatttaatatgcagttcaaagatcatttaaatgaacttggaattataatctaacttacctcctcagaattttggagtcgtattttaatgaaatgatcatgtttatgattagttactagcagctaccaaagtcattctaagtctattccttagagacaacaaacaatattttaaaatgtcttcccatctaagactagatcccaagacaaccttataatgataaattgtcatgtacttagtgcacaccattgataaacctagggatgtgctgatcatgtccttaaaaaaatctaaaactactaattgtggtttgtatgtatgtaagctattctaaagtaattagggtggactatactatggtcatcaagattagtaagtgtttgttttcacaaataatatttttctagaagttaactatataaaggaaagggtaatctcaaagccataaatgattttttatttttacactttaaattagctttttttgtatttttatggaactctatatagaaattcttataacaactaacggagtaacctaaatcgcgctcaaaatttacatagcaactcatataaaaactaccggagaaactactggaacaatctaaactgtaaattcgaaaattaaaataatatagaaaataatttctagaaattaaaatatgtaaattgagtgtgtcccaatagtaaaaaaatataacatttaataatgctagctgtgaatgtgatgagtcatctctgaaatgtggcttgaattcaaacgataaatatatctctatataaaacctcattaagatatatgcagttataatatatttattaagccagctaataacttaaaataaaccttaaaatgcatgctattacacctattttcttttagccttttaaagtgtagaaaaagaggtgttgatgattcatgatgaaagccacaggtatttgatttaggattttattattatgtctactaaaattagtattagaaatacttacaaaatgtacttatttaaatagtgttaaaagacatacgaaggaagatgacattactttttctttttcttttttttgttagtgataataaaatttgtgatggagaataaataaaaataaaataaaaaactgtgtcatgataaacgaacatcaaacaagtataataaataaatagttcgtttttcttttgtagcggaattatcgatctcgaattgagatccagataatcgatgctcagtactcttaaatatatagagaaaaaacgaaccatatatagttaataagttgataatttaacatctttgggatataatggaaaagaaagaaaaagaatgtcataatggtgagttaatacaccattaattatatccattttaatgacacattaaactctcacacctacatacatatatttatcctatatttatattagtaaaatataagtcaaaaaaactggtttaatatataaatatataaaataatataaaatttaaaagaagaagaatataaagagagaaaaaaattaaatgaaaatttttcagttagagtgaattcttatttatacaaaaatatgattaaaagaatgaaaaattaaactaatgtaataaagaaaaatacaactaagcattaatggcgataattaatttggtgatttcgacatgcataaataatatttcataacactcctcattggttgtccataaaaattgtatcattaaaaaccttctgaaaaacttggtaaaaaaaagagttcattttaatcgacgaattctaatcttgtaaaccatcttctcaaatattgatgttggtaatgacttcgtgaataagtctgcaagattgacacttgattgaatttattgaacaccaatatgcattctcttgaaatgtataaagaagaatttggtcaaatatatattctatctccttcaatgtaccctcttctagttgagtgatgcaagtaatattatcttcatagagtactgcttgtattgatacttctttattgagtgtaatccatatgtttcccgaatatgttatgtcaatgacatcactcccacacattctctacttgcttcataaagtgcaagtatgttaacatgatttaaagtttccccgctaaaaaccttgtcaggaaaatctaatgggacaaaacccgagctaaataaaaaaaaagtgcaatatatatatatatattaattattcataactatttgcaagttgcctcgttaaaaaccttgtcaggataatctaatgggacaaaacctgaactaaggaaaaaagagtgcaacatgaatatatctatccctcatgcacatatgattcataattattttagtaataatatatctcataagattattgttatcacgtttgaaatatcaccgtatattatctatgatcatatatattctatatcttccagagtatgtgttgacttctaaattatggaggagaggtttgtggaacatcaatatttatccaacttatttaattactaatgcatgtatagatacaatattgttaatacaaaagtttaaaattttaagtagatatgaacataacacattattgataatataaaattttatttgcgagaatcactactacaatttgatcttttagtgacactctttagtgactcgcacaaaagtgcgtgtcactatagtgctaaagagttaggagtgatttttagtgacacgcataatgagactctaaatttttagtgttggtctcatgtaatgtgtgtcactaacactatgaaaggtcactaacggtttttcaaaaaaaaaaaaaaattgctgacctatagagtcaagccaggagggattgcaaaagcgtgtcctgacatgcctggcgtgccactatatcataataatatatttaattattaaataaatttaagattaaggtatagtgacgcgctaggcgtgttgggacttgtgtacccagtcatgccttgcatgtcactatatgttaataaaaaatacagattattagttatttaatttattaatttctttatttttttaaaaaaactttttataaatttaactaaataaataaatgagatataaaaaaagatagtatgaaaccctaatagcccactctattcttgagtgttaaggtaagcttggaagatcaaagtatggattcttcaacaaatgttcttagattggatgatcattatttatacaaaacaaaaaaaataaggataccttaataggcttcaagaggtatgatctttctttcagtataatttcaactatatatattatgttgagattcttaagcttatggttcatattagataagaactatttttatcaaattcctcttccgcttttataactctgatatggaccataaaaaccaacatgcttctccattagagcttggacctcttgtgaagtttctagaattggatcttgaatagttagttttttagccatatgagttctgatttctcttgtattccctcttataatttttttttttaacaatgagtaatccttccccatcggtctcttctttttcatctcatttttcctgaatttctttagaattcaacgcagccttaatctctatcatggtcagagtttctttgccatacaagattgtatgaacaaagtgctcatacatcttaggaagtaaactcaacaggattatagtctagtcttcatcgtcaatttttatcctgagattatttagatgatcaagaatgattcagttataatcatatagatgctttctcaattcttttgactcattcattcaaaatgtgtacaacttcttcttggatacaacttgtttacaaaagatttcttcatgtagattgaagccagcttgttccagagacccaagtgttgggttttgtggcctaaataaaacccatttcaatatagtcagatttacttattaataaagatcaaaaataacgttttatgttgcatggttcac

SEQ ID NO: 53378 - DNA, 1174 bp, Cannabis sativa
ttgtttacttattagttaactaaatattaatgagtaactaaagattaagaaagtaaaatgttacttttgattttggtcatcttcttcgataatggtaaaaaaaatttatgcttcccgcataataaaatgatcacactaaagagtagattgtagtgatgtaatttttgagaccaaaaaattagatgtgtagccaaaaaaaacttttaaattaataaaataaaagaagaagagaaatctttaaaaataaattattttttaataatattatttgttttattacatttgtgtgaaaaaaatataatttgattgcacgagaaaatctgagtataattatatatatgatgatatgtcatatatataaatattgagagaaaaaaaaatggtcagtacaaatgtattgagaaaaagaaaattagtgtcaaaaaaaaaaagcaaaagtaaaaaaaatatgcgtcagtgtaatatgaaagaaaatatatgcatttttatgggtatatacctatcacaataaaattaaaggaagaaacggtatatgtgcaaattgattgaataacaatattgtagtaattaattttaaattttaaaaaaatataagaaaactattagttgcccttaaggggttaccttatattgcttttccatacattctttttctataattttttttttttttggaaaaataaccatattttttgaaatttatgtcttaaaaattttcctcaaaaataagtgaagtttcaatagtattgtaaaatgtatgtcaaatttagcacatgataaaagtttgatcaaatttgatataaaatatagtatgaacaaaacttataccacaataaatatcaatttttttatttactcatttaccaagcttttgacattttattttcatttaaataattattttatatagtttcaataaaaatttaatgattaggttaactattagggttattattttgcaccttatgcgctatagtacaattatacatttatgccaaatataaataatataatattgatcaatttttgaaataaatttgctataaaatttacgttatgtattgaagatagtcttattgaattgtataactaaattagtgtgtagtctcaagggagatttcaaaaagttaaaattacacgcagtatgacttttttaaatgttttatgataaata

SEQ ID NO: 53379 - DNA, 1939 bp, Cannabis sativa
tttgaccgagttgaatggtctttcatttctcattttcttcaccacattggagcccctcccatgttcatttcccttatacataaatgcctttccactgtcacctatcaattgtccctaaatggtaaattatcaaaggtgttctcttcctcccggggcattcgtcaaggtgatcccttatcaccttaccttttcttaattgtggctgaaggtttgtctgcagctattcgtcttcatgaggaagctgcccttctctctggcattaaaatttgccgtggggcaccttctttttcccacctactttttgctgacgatagtatggtttttgtccctgtttcaactcaatcctccgaggccttaaataatattttgcatctctattttcaagcctctggccaatcagttaacagggataaatcttccattctcttttcccctaacacctcccctgactctcaatctaattttcgatcttccttactcctaaacggtgaaggtttcgttagtaaatatcttggggttcctcgctgtataggtagggtcaaaaattctgcttttcactatctcatccaaaaaacctcttctaaacttagttcttggaatgaaaaacttttttctagagctggcaaggaaattcttattaaatcagttatccaagccattccatcttttgccatgtcttgtttcagacttccaaaatccacatgtgcctctattcaaagtttaacagctaaattcgggtggggctcctattcgaataagtagaagattcactggaaaaattggtctgctctctctgcatccaaattttttggtggtttgggattccgttctcttatttcccacaatcaggctcttctggccaagcaggcttggcggatttggtctaaccctgactccttgctccattctcttcttaaagctcgatattttaagcattctgatcttctccatgcccctaaaggtcataatccttctttcacctggagaagcattctttggggttctcaacttctcaatcaaggccttgtttggaaagtttgctctggaaatgatatccctatctctgccccaaactggatccccaacatcactcacccaactatcctacaccctattgatccttccttggccactgtctcctattttattaaccctgatcgcacctggaatattgataagctctaccattattttccttcttatcaagcttatgctatccttaatattcccttggatattggtccttctgattctctcatctggggattacatcactctggcttttttactgttaactcagcctaccatttagcccagtccaaggccctcaatccctccccttccacttccaatcctaacccttataaggactggtggaaaactctttggacattgaaaatccctcctaaaattaagcatttcacttggaaggcattcaaccatcttctcccgtgttctctaaacctgtttcttaagcatgccatcccttctcccacttgctcttattgtgggggtgatgcagaatcggtttctcatgctctccttcactgtaccagagttaaaccaatttggcatcataccatctttaagcagttttttgttgaccattataggctggacattaaagatttctatctgcttagcctttctttaattcctaaacacctccccttatttcttggtctcatctggcaaacttggaacattagaaacgcccatctctttcaaaaacattcccctccgattaatgttcaagattcagtggcaagttttttgcaagactaccaggatgcccaagctcattccccaggctctcatcagactactaatcattgccctgttgctttggatcatattttgaccccctctactacggcactttttgttgatgctgcacttaacactaatgcccctactactggcattggaatggttttta

SEQ ID NO: 53380 - DNA, 781 bp, Cannabis sativa
taacactttatccaattccaaagcatatacaatataaatcgaggaagccatagatgcatcaaacaattaaaacacaaaaatcaaacaaatattaaatgataataatatcgatcgaggaagcaatcagttggtagcagtacgtaatactagctagtggatgatcagtgaatcagctagggacaatggtggagaagggtgatcggcgcgcggcacgattggagatcggaaccaaagcattttctggaaggagaagaagagtttgtgttcaagttccaattccatgaagatccaaggccaggactgacccaaaattaatgatcttgacgatgaacacaacaccgtacgtgtttggaagaggtttcgggatcagtacggacgatcgaacggtatactttgctctcggatcactatattatatggttgttgaacggagctgcggtggcgatcgtggggagtggcagccggagtgaaaagacaacattttagtgaggtgcattttggtttgtttggggagaatgttaatatttgtagctatcaaaacaaaattgtgaaagaaaacaacttgcagaagaaagtttgataataactttttatgttgagattacgttcaatttcatttctaattcttatcttttttcattgatggacatgttttttttttttttttttttgattacgtacaatggacatgcttttttgaacaggtaatattgaagaatttgagatttattattattattttttttaatttataattaaattaatatataattttataata

SEQ ID NO: 53381 - DNA, 1314 bp, Cannabis sativa
ataggggttcaccccattgaaataaacaactgagaaattctcattcactttctctttttgtcttcttcttctttcttctcatctattatatattattttataacaagaaattaattgataaagaaagaacttaaaattaagagatctttattattattaataataaatttattaaaatattaaaaaaaaaatagaaactatatacgatagtttcaagcatcaagctagaaataatcatgatactattaaaaaaaattcaaactataaattaataaatcaaagtaattaaataattaactacaaaattataataaaaaaattattttattatttgcatatatatttttagttgtattatatgtttatatttgtgattatactaatttatataattattaaaaaatttgtaaaatgtaatgtatattatttttttttaatatgcacaatatataattactaaaaattagttataaatatcttatttgaatttaaattaatatcttaaaaaatcaaaaattagtttaaaataaaaataaaagtcaagaggatagtttatattatgaaattattaatttattttgaatcaatatattattttcgttaaatacatgcacatatttattcttttattatatatagataatcacacaaaagtaaagataaaatataaatacttaattcttgcttcgcctctggttgtagcattgatgcttttcattttttttttcaataaaaaattaaagctaaaaagttattgtagttaaaaattaggatatatattaaataataatgtgtgagattataattatagcatttttaaaaattattatacattggagtgtttttagaactaagagtgcacaaaaaggtactatagtctggtcctttcacctcgcgtatgctctgttttgctgtcaaaccctaaagtgttttcttgtcttttcgttttgttcttcaaggtagctcttcatggctgatcatgagacgatggacttagagaatgatagtgattatgtgactctaacaggtggagagaatgatgatggtgggctgttatatgatactggtgaaaaggaactgtaacaccctaactaatttaggcatgttagcgtgatttttaacttaccgtgtagcccgttgctaatcaatgaggttatcgaaaaccgtgattaattaaaattttgcttatttaattaaaaacataaagtgacatacatataaaattctgggatcccgcttacaaaaatatttacagaagtttaatattcatatacacaagtttgtcgcctcgcgactacacaacaaaagccctga

SEQ ID NO: 53382 - DNA, 824 bp, Cannabis sativa
  modified_base (532)..(544): a, c, t, g, unknown or other
gcatttcagaattcaataagaacaacataaataattatttaaatatctatgaataattttcataattaatcataattaactgctaattttctaaattaaactaagcggtctttacacccatagatctctaaagtggatttatccaataccatatcaaagtaagagttgatacaaggttattattgttgttatcccaatttttgcactctgatgacgtgacatcacacgatggtgacacgtggaatcaactctatgtatgtgctctcaagaaatataccgaacagggcaccacatacattcgctcggatgaagtcctcttaggcgggcagtgagcaatccgcgcaacacgccaacactttacaaattcagcttttgaatcgtgagtcaccgaagaaatccctataactttgggatcagatcacagagatatggaaagctgtctgaattccttaattagtgtattatgtgtccttattcgctctattatattacactcatattaaactacttgtcgcttacaaattagactcannnnnnnnnnnnnaaagcgaggtcaatattttggtgatttcattgagagttgaagtcaaggatcactctttatctcaaatctaatcgcaaatacaatggtggtacagactcgcaaaggcgtggttgatccggcgaatccacaaacagtggatcctgtactgcagaaccccgggaacacaagggttcaaccaaccgtgaatctcgaacatccatcaactgtaggtcgcggtgtgacgactcctgtggttgaaatcgcgcctggtgtgcaaaagactgggaataccagttcagca

SEQ ID NO: 53383 - DNA, 1560 bp, Cannabis sativa
  modified_base (691)..(697): a, c, t, g, unknown or other
tatatgaggtaattcccctaaaattaattgtaaatttttaaaaaatttggagtagttacaataatattaaaaataaagtgtaaatattttattgcatgcacaattatattttctcatacgtataataagtaaatatttaaatctcgacactaaaaattatttataattttttgaaaaatctatatgtgatttgatatagctacatcatatcatatgagatcatacaacaaattacactaaaaaacttttttaatactgaaatcgagaatctactaaaagaccctgaaagattatctcaaaaaaaaaaaaaatcctgaaagatacttatatctctcttttatttatgaggagtgctaattacaacctctagtcaatctccacatccgaaattacatgccgaaatatttttttcataacggtattcgttatagttatagtatcatccttgtaaatttttgaaaaacttcgaatagtttacagtaccgaaaacagagttcctgatattccaatttaccacgcgttcaaaaaatttcaaacgtattttcagaactgtaaattattcgaaatttttcaaaaatttacagggatgatgttgtaagcataaccaacaccccgtgaaaaaaaataggataaataccactttggaccatgtgttttggaaaagttactaattggaccttctgttttgttnnnnnnnaaaatggaccctgtatttttcaaaatagtacaaataggaccatgaactaattttttgttaaaataaaatttaataataatccaatttaaatgtgtttatgaaaaaactgtttatattttctttatgttcgtgtttggaattgtcttcaagttagttatattaaaaaaagttatcgaaaattaagcttagggttctatttttacaattttggaatacgaggtctatttgtcatttaacaaaacagagaattcaatttgtaataacttttgcaaaacacaagatccaaaatactatttaccaaaaaaaattctgacatatattttcaggcgtaaaaattaactaagaggttataacaaaaagttaacggcatagcactcgtcaaaatctttatatatttataatatgtatttattaattttgagtagttttaattagttttgagcggtctgtattgcgtgttaattttttgatttgaaagaaaataaagtaataatggagagcaaattataacgtttgtgatctttttaagttaatagtgaaagaaagataaaggtggcagactatagtgtcgagtggggattggaacatgaatcattatttgggattgaactttagagacacaacacaacaccaccaatcaaccacttttttaaaccgttgcaaagctaaagatataatttcaactttttcttcttccatttgtagccctcctttataattattttaatatatataaacatatttattgctgtgtatatatattgttcatataaatatatatataaaaattattgaccatctaagtgaagctgctgtcatctcacacatggtatatataataattgggaccctttttcttatac

SEQ ID NO: 53384 - DNA, 539 bp, Cannabis sativa
cttccattgttataaaatctctaacaaagttttggtatacaccattcattttattttcgtaggatttttgcaaattaataagtaaattgagattacaaaatttttcatgaactttatttgttcacttttttttttctataattatatatacatgtataattgtagcattttcttaacaatagtattttttttagctaaataaaataataacataacaaatattctatattttaacattgtgaatttgaataagtcagagaattattaaccggtaaaaaaattcaaaaatacgattcaatagttataagagttaaaaaaaattcttaatagcatatttttatttattgttacacttgaattttggttgagaaagttagttattagtaaaaatcttactctggtatgtttatgttttatcacttaaaacaatgaattctactaataatgttatgttaagttataatagataaaagtaataacttttttaatattcatatcattttattttaatgtctatcgaatagggacaaggcttcgac

SEQ ID NO: 53385 - DNA, 1403 bp, Cannabis sativa
aaaaagttagggtaaaaataaaattagaatgtttatttaggtgaaataaattgggaagagtaaataggtatttatgtgtaaattgtgggagaaaaataaggatttttagaattttttaagtggaattctggtaaaagaatagtcaaataacaactcagtttttttcttttcttcttttttttttcttctactagtgccacatggcaggttgtggttggctcggtggctgacgaaattgtgtgtggcgtgcgctgattggctggagaagctgatgtggcacttgcgtggcgaaaggagaagaggggaccatctctgcgcaggtcccacgcatgcaggctaagagaaaaagataacactattcagtcagccgagttgtaaacatgctctgttaattatgcttttaacgagttattccatttcaagtgtaattatgattacgtgtttgagttctttattctttctagcttgacacgtgtcttcctctgaagtgctcgccgaattttgggtataatactaatgaattcaaaaataattaagaactcgtaaataaatttaaaacttaagaactaaactaattttagtttcaaaaatgtgaaaataactctaatttctagagttatcagtattcctaagggtgctatagcagattccatctataatgatgtggatagtattagccctcggtattaatacaactaaaaggagagtaggtcattactcgctatcacaagggggtcgaacctctataacaaatttgtgtgtttactacttttcattcttgtttgtgcaaacacgtgcaagcatcagatctatacgatcccgctgtcagttgatcactttttgaggtcaacagtttggtgctttcattgagagcatgtatatcatatctaatcaagtgccatggttaaaacaagaagaactcctattacaccatctgcatattagggtcgccctcaagacccacaaactgtaggtccagatactcagtttccactcaaaattggaattcccatgaacactacagatgtggtgaatcctaatcagataagcagatgatcaagttgcactcaagcaggtctcctaagtctcatacttggaactgaagctgccaccaccacttctctatgcatgctcagaaatgacggcacgagcacaaacatcccacgtcctcaccattgctccaagagacatgggttgtgaaagggtcctcaatgatatactgaatctcgactttgttttgacggagagatcttcatattccttgctgtacataaaaaatggaacaatgagtttcatcaagtattttcagaaataaagagtagccatcataaactattgataaaatggtccaaaaaaataaatggatccccaaataaaacttataggctaattagtaatttttc

SEQ ID NO: 53386 - DNA, 1550 bp, Cannabis sativa
  modified_base (27)..(27): a, c, t, g, unknown or other
  modified_base (53)..(53): a, c, t, g, unknown or other
gaaatgaaaattgtttcctttccattntcctttccattccattccatttcatnacctccaaccaaacaccacttaaatgtctaaaaaaacaacaaacatttagataatatcttaaaaggaacttaagatatgttggatttgagtaattatttctttataactccatcgggtggttttacgaataataattaattattatgggaatttacaattatttgccaagtatcattttgttaaaggttatcaataatgattatcaggtaccactaccagcattttaaaatccaacatatttgtagtgtacatttaaatttaataaataaagttttatcgtataaccaaactagctaacatgtaattaaataattaatttagaatttatacaattgagagaaatttttacataatcgtaaattcattacataaatttccatttagagcacgtaccaaataggtaagatttcaaaatataagatatcaaaaaattaaaaacaagaataccaaaatgatacttcccaaaaacacatgttaattggtaccaaacccttaattgtgagtatccttatcttcccggatagggtaatcaataccaatctaggtaataggatttagaatataatctttattctttaacaccaaatattcatcaatgagttggtattgcctaacactatattaggtgatacatgaagagtggttatagtagtaattaatatccggtattactaaactaaaatatatatattagatgcagttaatttacgaacaataatttcatgtgatggagcttcaatgatgccttttaagtaataatctacatgaatagacagccatcctattatgagatgtactactgtagcatatattctaatattgtattatattaacaccccaaattttatcaaagcattattattattattagatattttttaatttatacacacttttccttttttttttctttcatattctaaaaaaataactttattttatgagataaataagatagattttaaatatgaagaaagcaaacaaaaatcaagtgttattacaataaatgtcaaaaaacattactaattaatataaacatatgaaattatgaaattcatggaaaaattatgaaataatgttaagagcaaaatttaaaaaataattcaatttttttttttaataataggggctatatatattcatctagaaagtaaaacatacgcttacgtattaacaaaaaaataaaaggtacatactctacattcacatattttattatcaatcataaaattaaatgttaaatatttattatatgtacacatacaacgaactcatgcctttgcattgatattttcttaaattttaatgttcattgataacttattaggtaccctatatggctatatttattaggatatagcattcgggtagaacattaattaataagatgtaattaattctaagattttaatttggagagatgatatttgtgatagggtgttacaaagtaaaagtaataagttacaattatatgttcttataagcgaattattatt

SEQ ID NO: 53387 - DNA, 821 bp, Cannabis sativa
catcaacacttagcttgaatcttccagatgaaggcaagagagtgtcctaaatagttgcagtctttggatgataaaaaaaaaacttgcaacagacgtttgattgccattcgagccaaagagggatttgtttaagcagtacataatcctacaaataagagctcacccaatgttctatatttgtaataaggggcttgtgagcaacaaaaagagacttattacaataattccatatagcccaaataataccaaaaaactaacgcaagtcttccttatttaaattctcaaaccctctcaagagaaattcattactatcacaccaaaaattactattaaaaaatcgagagaacttagtattgttccaaatattaactgctctggaatactctaggagtgaatgagaaataatgtcaatatggttggagcataaagagtagtaagggttgtcaagcacattctgtttagaaagattcaaggttgaaggaaggatatgattgaaagctttccaaatgaagtgtttattcttcggaggaatcttagaagaccaaataaatttccaccagcgcttaagaaaggcaagattagaagaacaaggagaagaatgtgaggattcagcaaggtgataggcagagttaacagtaaagcaaccggagagatgatgtcccaaaatgagatagtcatccatagaagaatcaacatgcactttaaggatggaattaacaactgttttgggaaataaggtattaatttatcaatgtcccaaaacctatcattatcaataaaaaagagacagtattaacaggaggataagtgtcaatattata

SEQ ID NO: 53388 - DNA, 869 bp, Cannabis sativa
  modified_base (32)..(39): a, c, t, g, unknown or other
tagaaaataatgttcaaatagtctattttacnnnnnnnnaaaataaaatagtcacgcgtacaatacactgtttgaacgcaatcttcggcatcttaaacttttttgaatttcttaaaattttataggatgtcttaaataactatagtctacatgactatgagaaaaaaattgactaaaaaattatttcggatactaaaacagatagagatgtatcagtgtatcccttttgagggggtgcattatagaattttcataaaatttagggtaattttataatatacctccttaaaaggaatttactaatgcaccctctacttgtttcggcatccagaaaaaaaattagtctaattttttttcatactcatgtacgttacgactatttaagatattctacaaaatctctaaatccatgatgttcaaccatattgagtggatactcgtgtaaaataattattttagcaagtttgtgtcttgaacactcttgatcaaagttgtgagcagcaagtgaagtacttccatccttcttcttacttggatttaagattgattcttttatatctcgatgcttcttaagaagacatatgttaaaatgatcacgcaaatgtgttgttccatttttgcttgatcctccttattttcttttgacaatagttgcaaacaactttgtcaactccatcaattttttgcttcttgaaataattccagacaaaggaagtcagttttctctttgtttcatttttttggctattaacatttgattgggttgttgtccttgattcatcaatttttagagatgaaggaattgatgaatcaaggtcaataggtcctgaccacttaaggctagttcaagtggtcataggagggtgcgt

SEQ ID NO: 53389 - DNA, 875 bp, Cannabis sativa
ctctgaaattaacaatattggaggtcaattttcttcattcggtacgagggctcttttggatgcaaggggtggacttgatccaatttgaagcagtattgagatccaaccccttctgatgggggtccaggtaagtcttcatttccttgttttgcaggacacattggggacaatgtgtattctaagtttgggggaggggacttaaaaaaaattaattattttagttattctgttctttttagttattttgctttagtttagtctttttatttagttgttagtcgattaattaagctaaagatagttgtatgctgctgcttagtgtaaagtactttgaaattacaaaataactgtgtgcttaattctattaactctttggattagtttggatgcttagaaacctgtgtatgaatgcaatttgttaatctggaaacattgttataaatgttttactatggtttgtggtaagattgacaggatagcttagaacttgcatgtttattcttttgaggcgaaatccttgacaatgttcaataggaatatgatttaggcattttttagatagtttgagcctttcaagcctacccttaaatttttatccctagttgactctcttgagcttaagcctgttttgtttctcatctattgaaccaaaatatatatatccacactactaagttcgtcttcaccattttatctatgatatcataagctatataattagtttgggggagcgaaaattcttagtatgagaggaaaaatagagggaagaagaacttgcaagattgaaaaagaagaaaaaaaaaaagaaaaaggtgtaactcaatgtcacagaaaaaaaaaaagaaaattccaaaaaaaacacaatagaaagtaag

SEQ ID NO: 53390 - DNA, 1505 bp, Cannabis sativa
tttttttgtttttttgataaaaaactttgttcattccaaatgagcaccaaaaatctatttttacagtgtttaagtgatcacacttcgaattcaacacaccacacatcatttatctcacatgaatgagtattaatctattttgtaagaactaaatcatcatagttttgaattccttaaattaaattgtgtaacaactctttaattacaataattatgtgtgattaacaaaagagttattactagtgacaacaaattgtaattcctctcaagcactacaaaaaatcttaattttagtcacaacaaaacttgtgactaaaagtgaaaaaattgtaactaattataaattattatatattgtgactaaaaggtccgtggccaaatacattattcacaaaaattatgatttgttgtgactaaatgtatttttagtcacaatacttgttgtgactaaaactaaattagttacaacttgtaactaaatactatgttttagtcaccagtaacaaattcacatttagtcacaaaaaaattatgttttgactaaaaagttgtcactaaaaatagtaattttttgtagtgaagttacatcatataggttacaaagtatagattaggaccatataggatacacatttatttaccatatatttaatatatattattcgcataataatatatattgttacattttaatataggtacatattatattattaaatatgataacacaattttacacaaatctttaaaattttatttaagaggctattttacccaactttattgggcatgttgattgtcaacttttttgggatatttttctcggggcaagatgcaaaatggccctaaatctaacaataaagttaataaatgtcattttttataaaaaattaagaaaatgtccatttatttaaaaatttgatgatgaaattacaattatatccttagataataaactctaattttctaccgcattctcattttcttggagaacaaaccctaactttctaccctatgttattttcatgtgtccagagaactctctttcttctccctcaacaccaagaccatctcgcctctaccagtccgaccgccaccccttgagtattaccaccgctgatcgtcactgcccctggccaattaccatcgcagatcgtcaccacctgtctccagttaccatcgcagatcatcaccacccgtttcaagaaatctgtaagaaccaaactcaaaggtaagatatctttcagatccttatggttacattcagtgattttgattttatttttccactgactttttactttgcctcaaatttttaatggccttacattttacagtacttaaaacctaaaccacattttcccacacaagtacataaccattaagccaacggaaagtagcttgtaggttattctatatacaataccctaaaaccaacatgtcttgtttaaattaaaataactaagaaaactataagtaataagaatctaaaaaatgaaatgtat

SEQ ID NO: 53391 - DNA, 1252 bp, Cannabis sativa
ggtatctgcacttcggaagaagcgtttgcctgagcaagacctgatggctcatcatcatctgacgagtctctttgctcctcaaagacagctttcccctttcctactataggagtggatggacgagcaggtaaactaggctctctgatctgaattgtatgttcaataggcctgtgctcggctggaagtttcttcttaatttttagcggagtcacctgctcttcctcaatctcgtcttcctggttaagatgctctaagcatgttgcttggctcccacacctcccttcaacttagcttcacgcttcagttgaatgagttcattctcctgatgagctccctcagcccggccagcactggattttctctttttctccttcataggctggggaatgaaatcctcgagtagagcccgtacaccacaaagttgtcctccgaggtcaacaaagtgatattttgggcagcacccgatagctgagcgagtctttgagctctatccctgagagaaagtgtgaaaggtggacggtgatatatagggatttgctggaaccgagtgtaggtggtgcccatgccatccaccatgtaatactcgtcaacaaaattcccaattttgctaacgggcttgtccccggtgcacgtcaaccacttgaagtttggctgggaaaaataaaagtatcacgaccttccttgcttgggagtagactttaattcaaaaaaaactagctaacctcgtgaggagaaggcataccccacttctgggtggcacagagagcgaacagggcaaatagatacttgatgcccttgggagtgaattaggtcggatagagacgaaaaaagtctgccaccttcctaaaatacaggtacaaaggtagcagtggcccttgtttggaatgagcactcgaccaggcacacatccccctcttagggtttgtggcttggttgtttgaggaaggaacataacagtccagctcgcccaaataatcgaactggtccaggtcccataggcttgcctcaatgaccttggacagagggctcacccacttggcaccaaaggcaccttgcctcctgtgaggaactacagtagtaagttcctcagtgacgaagtccacgacctttaccaagacatcaccgtccgcatctactggctccccagcctcgttgtatcccccaaagtttaggggtgcgtgttgggtttcatgccctaaataaaactcatctcatatgatcaaatttacttattaataaagatcagaaatta

SEQ ID NO: 53392 - DNA, 1507 bp, Cannabis sativa
aagatatgaaaaagttagcattttgagaccatcaaaataggttttttgggtttttcgaacccagtggccgcagcccgatttttggtcgccacggccaaaacctagcagagagccatcccattttcccaattttgttttggccataacttttaactcgagactacatttcagacgttctttatatcattggaaagctcgttttgagctttatattttatctataattggaatgcaaattatgtgatgatgtgaagttgaattttgggattaaccctatttgtgaaatctcggaaatgtgtgactagtagtactagtgcctatttaggaacacgcggaggtttggaatctccacatacttgggatactaggtaagatagtagttagcacgtagaattaagtgttgtggagctcatgtttgatattatgcttgtgattaagagagaaactgggattagggttattatcctaaaatgagcagttatacgatctagggttattactctaatgtttaactgattttgaatgcaatactatgttgtatatgttgagataaagaattatgcgagtaaggcatagttaggttagactcggtaatcagaaccgagataaaccaatctaagaccttattgtaaataaatatgtgagtgcaacacgtaagtctatgttaaatagacaatagatgcgcatcagtatttatttgaattgagaatatattgcatattgttatttatactgtcttgctggggttagctcacgggtgctctgctgttctggaaatggtatatcagtttgtgatcagccatgagttcgagggcttggcagtggattgtacatgttcgggccacactagaccatgcgggttgggtctaccagttgatgtattttttgttcttattttttttgccacttaggtcgacatgtaaaaatgacttgtaatgttttttgaaaatttttatgggatccgaaacatgtgtaagcttttggaatggtttgtgaattaaatagttacaatttaattttcactctgtacttgatttaaaatttaaattcacactcttatttctagtaatccctatttagcgggattaggttatgtttaatggttgatggtagtgtgcctttcattaaggcgttacaatttggtattagagctccaaggcttttaaacttcctgtagaccggctgaacatgtacaatcattgccagagacaagctccactcatggtgcagtaagtattaagagtaaatgcttcactgcctttgtgttatttattgctttctattttaggtagtatatgagcatctagaaatgaatgttatatggaaagtatgattactgtttaaattgataaatgtttatttaataagagaaacagtaggtataagttagggttaaggcaataagtgcatagtgtgagtttggtgcctgactcgctggggtttttgatttcaaggctatttgaaaaagaatggaccctccacaatcatctagaccacatggtaagca

SEQ ID NO: 53393 - DNA, 837 bp, Cannabis sativa
taacactacgtggcttggcacgtaacaatcacctaatatatatatatataataaaaattagtatagtacatgtatagagatttctaaaatcaaaatagaaatttagtttacttactaacatgcagtggaaataatgactctaccttttgaatttccctaatcttttgtttgatgaaagctaaatattgtcaggcattcaaccgttagaacactaacaaagtcttacaaatcattctctaaaataacggccttagttatttgtatggacaaatctcaacacatgagaataaaaagcaaagagaaaaagagagaagataaagagagtggctagcttagggtagaatttctttgtgaaatattaccttggtcacaaaaacatgggtttgctaggatgagatgtttaaaatattttgattaattgtgaaataataaaatagagtatgcattgtttgagaaattacgattatgtttggttatgtaaaataatatctaattaagatttaattgaaaataggaatatatgcgataaattattgtaagaaattatataaaaatattaatatattaaatctatggtattataatatgatgaaagataatgttttggaacctatctttctgagaagatttaagattacccattaattttatttccatagtaataaaaaatttatccgtaaaatagaaatatcttataccgaacaaagaatgtaaaagagtacttaccaatcctattaaaatctacgttctcttcatacaccaccatttagtacatataaacaaatactaggtcataaaatatgtttagttactcattttgtttttaattatttttat

SEQ ID NO: 53394 - DNA, 1874 bp, Cannabis sativa
  modified_base (1837)..(1849): a, c, t, g, unknown or other
tgtctcaagggctgatcggttaacacttttatggggtgcgcttggaagtatggtcgtagtttacgaaatgcgtggactaagcacaaagcgagtttttttagagagggatatctagattctgctcctagtaaccttttacttacatagtaaataagttgatgatgcttaccctcttctcgcactatagatccactaatcgcatcctccgagatagccaaatagagaaatatcatctctccaattattagttttgccaaaactagaggcatcgctagatgcctttttatgttctcaaaggcttcttcacactcttttttccactcgaacttcttgttgccttgcaatatatcgaagaaagtcacacacttattagttgacttcgaaatgaatctgttaagtgcagccattcttcctgtcagggcttgtacttccttaggctttgtcggtgatggcatgtctattaatgccttaattttttttagatttgctttgataccccttgcattaactatgaatcccaaaaactttcttgaggaaactctaaaggaacattttttcgggtttaacttcatgttatacttcattaatatcttgaagcattccgcgaggtctgtggtatgatccctactttttattgattttactaacatatcatggacgtaaacttccatgttccccccaattttgtttgcgaacgttttgtttacaaatcgctaatatgttgccccagcattcttcagtccaaatagcatgactttataacaatacactcccatgttggttacgaagcttgtatgttcttgatctgggacatacatttttatctagttatatccagaataagcttccataaatgacataagctcgtgcctagcagttgcatccactaactagtcgatcctgggtaatggaaagtaatcttgtgggcacaccttattcagatcagagaaattaatacaagttctccacgttccgttaggctttgggatgagaacaggattagctatccatgagggataaaacacctcatgtataaagtcgttgaccaaccacttcttgttttagtgtcccttgtctctcagaatctaagggtctccttttctgcctcttcgctgggtaatttggatcaacatttaaatgatgacacataagattaagtcgatccctatcatatctccatagctccaggaaaattgatcctagttcgccttcagaaaacttattagttactatttgagctgctcgtccaggtttttcccaatgtatacacatttcgcaggatttcatgggtcgaaaataacctcttccaattcttcaattggctttaataggtttctttcatcttgatctcaggggtcaagatcttcttctttctcttcattttcttctgccaagatcgccattagttggtgaccggctttcctatgctacaactctatgcgatagcaactgcgagccagcatctggtcgcctcgcaccactcccacaccttctggtgtttggaacttcaaggataggtgcttgattgaactgactgcccctattccgatcaatgttggacgacccaacaatatgttgtgagccaatggcaggccgacaactaggaaatcttgcataacagtggcgaataggggtgcctcgcccaaggttaatgcgagctcaattatgccaagactggcaatgctgtctccagtgaatctgcaaagtaacaccatacaaggcctcaatttggattttttgagccccatcttccatagagtttccttataaaggatatgcactgagctctcgttgtctattaacactctcttgatccttttattggcgaggtgaatgnnnnnnnnnnnnngatcgacgtgaggatatctcacatt

SEQ ID NO: 53395 - DNA, 1008 bp, Cannabis sativa
attttaattatagcaaatatttctaacttaacccgcacattttatttttagaaaaattaaaacttgagtgaaatatagttttacaaaatttaaaagaattacaagtatttgcaaaataaataataataataataataataataaattgtcttatcaacttttatgaagagggagagaaattatttgaacggtaattgtaaagcataatcttttaatataccattcaaatagaaatagggtacatatactttgaatatatttttcttctgaaaatacctttacatttcaaaaaagtctttcttttaactcttttactctcttactctttcactttaagtctcgttgtcttcaccatgaagtcctaaaatttacgagctcaaccacctcgaaaccctaaaaaattgtcagagttcttaactcattgctcgttatttatttatttatttattttgttgtttttcaattttttatcttgcaatattagagagggaagagattattttttaaatggcacaaaaactaagtctgactccaacttgaatattttattttctgcgccattaaaatccaatctcttccctcgcgctcccaaatatcattgtacatcaaatagctaaatagagttgaccctattaatttaaaataaagtaaaatataccacaaaaaatatctacaaaatgtataaatcaaacacacatcatcgaacaaatatcaagtaccatttattgagatcttaattaattgaattagattcacttaattatttttaatctttttgtgttctcgacacataatattttgtgtcataattttaaattaaactctttaaattcatattatttgaataaattatgtctctttatatatctatatatacaactctgcattgccaaatataactatgcagtggacgagctgtccaaaggtgatgctgaggctgagactctaaacaaatggttaagggaggcccatgatgagccctttcgaggtgagtacactggggagatc

SEQ ID NO: 53396 - DNA, 1291 bp, Cannabis sativa
gcattatgtctgattcatgcatctagcaaattacggccatatttccaggcacatcctatcaaagtcttaactaatcagctcctaagacaagttttatcaaaaattgatgcttcaggatgattgataaaatggtcaattgagctaggacaattcgatataacctaccacccgagaacatcaattaaaggccaagctttagccaactttctaattgaaggaataatctcagaagaagacccatttgtcaagcacgatattgaaacttggaaattatatgtagatgtggcttcgaacgagaatggctcgggggcaggagtcataataatgttgcctgacaacttcaaattccactatgcattaagattcctatttgaaacttcaaacagcaaagcagaatatgaagctttgtttgctggcttgagaatagccgaagcaataaaagttaagaatctcatatgctatagtgactcacaactgattgtgaatcaagttctaagtgaataccaggtaaaatgattaaagatggcaaaatatttagagaaggttcggaagaacttagaaaagtttgattattttaagattgaacaaattctaagagaacataactctaataacgatgcactagcaaaattggcctcgcaaaatgaactcgataagttgaatttggtactggtcaaagccaagtatatgtgaaaaggaaaaagttgagatgatagattcttcaccaacatgcatgacactcattcaaatatctactcaatgggaaacttcctaaagacaaaattgagacacgtaaactcttgtattcagtacctcgctatactatagtcgagagaaagttgtaaaagagaggatattcaattcctctcttacgatgtgtgttaccagcataaaatactgaaataatcaaagaaattcatgaaggcttttgtggagaccatgcagattggcaaagtttgtcaaagaaaattatttgtcaaggatactattggccaacaataaccaaagagacacacgaatttattaagagatgtgataaatgtcagaggttttcacatatacatcgcgtaccacaaacaaaattgagaatgatgacctcgccatacccatttgtaatatgaggaattgacctgattggggcattacccacaggacgaggaggagcaatgtacgcagtagtagcagtcgacttctttacaaaatggacagaggctgaacctttagtttccataacttgaaaaaaagttctcaattttttaataaagagtatcatttgcaggtttaaaatacc

SEQ ID NO: 53397 - DNA, 1519 bp, Cannabis sativa
attcatctcgacttgctattttttcaacttcaaatttacttcagcaaatatattttgatctatatattttttccacgtctcatttttattatttcagacatagtactgaaacgtgtgtacttgcacttgtagaaataaataacttttttttttttagaaaaattattcttttttactgattttctattttcaagaatactaatcaatatatttgcagtcttggatggattatttatggtgtgaggaggaatgatgatgatgattatgattgaatctcaaagatttgaaaagaaaaatgggataattccaactctcaacattgactgctacatataagtgagccttcttactttatttaatttctctctttgctgctattattgttgttatgacttatgattgagattatggccttgtttgatgattttcttatgcttttagctacttagacaacaataatgcagcttaattaattttgtcttttgattgaccaaccatgtttttgactactgaagtctcttactgctcataagaatctatacatgtaagtatttatacatatttttttcccttaggctaaggctacttttgacaatattcaacaacaactatctgaaattttcaatctttttacttgtgaagggttttgtaaaatttttcaactttattggtagtatatctttcttatggaattgccttgaagccacaacaaacatggtaaagtcatgtttgttaattgttcaggtaatagcaactttcaagaacaataattagctagttttatctttctagtcttttttgtttttgaattggtccaataatatgatatccattttaatttgttactctaatttcaacagttatggcgagtaatcctagacaaggcaatgagctcacgctttcagttatgtaccgttaagattatgtcaaagatcaagggttcatttggtattcgaaaccaatacagctgaattgagagaatttcgggttttgtatcgagattcgagagtgttggagggctgtacggagaactaggtgtgtttgatcccagtctctcatgtgaggtttatgtaatttaatctattttgaattaattccattttagaattgtaactctcttgatcatcaataaagctcattgcctttggtgtgtttgtttctacaaggaagtcactcaaattttgtccttatagttaatgggaattgtataatttgtaaaaccatatggttacaaggaactaaagttactcaaaaagagagtaagtttgtactctgatagtcactcttcaattgatttacgtcgaaaatcttgcgtatcatgaaacgcgtaaacctattaacttaagattatttggaattcgagataagattgagcaaggtatcataaactttgaaaaagtccctacaactgagaatccaacaaacttgggcactaaagtttttactttcatctcgagttcattcgatctatccatgtggattgcaaatccgtagtagcagtcaattataaccataacaa

SEQ ID NO: 53398 - DNA, 707 bp, Cannabis sativa
tttagatttttttattttagtgcaataattctaataatttacgtcaaatattctactaaataaatatattttatttaaaaaatctcaaattttgtattatttatattaatgacccaaaataattaatttataatatataattatatcatgtctactagtaaaaatttaaaattttaaaataatttaataaaataaaatatttattaaatcaattaaatattacacatttttctttttatttttttttgaaaaaataattattgaaattcaataattgatcctaatgtgtgattttacaaatgagcaaataaaaattatgcaaaaaaaaaaataataataattctcaccaatactatcaaatatctcaaaaatatcaaaattttttaagttcatattactaatattttgatattcttcatggctaagatccttaagtaatcaatttgactattagggcatgtttagtactccgtactgtattgtaatgtgttagattgtattgtattgtattgattgtatattaatattattttttttgagagaatatattaccattatttaatacaatactttgtttggtattgacttgttcatagattattgtagtggtcaggtcccaaatcctggatttgggtccggggctgggtccatttagattgtattatattgtattgattgtatattagcattatttaatacaatactat

SEQ ID NO: 53399 - DNA, 1124 bp, Cannabis sativa
atcatcgtcgtcaaaatttgggtaagcaattagaaattaatttaaatatataaatattaatattatttgttttagattaatttaacttatataaattttaaattaatttatatatttataaatattaataaattatttgtaacattatttttttattgttatttttaatattaggagtatattaaattttaatattcttaaactttacatttatttttttcaattttttttgagaaattatttttcgtaaattttcaaaactttaaatattgttttttaaaaaatataaaaaaaaaattaataaaaagttttttttaatttataaattttaaaaatacacatcacaaaaaataaaaattaaaaatataaataagtatatatatatatatatgcaatacatatatttaaaaaaaaaaaaaaaacttacaaaactatctcaaataatttgaagaaaatgaacttctacgatcatgataaattcgatcagctacgataacaaaaagaacttttagttgtaatttctttttgcaagaaaaaaatatttattgtaagttttgtgaattatatttttaatcatatatttattagtaataacataaaaatgatgataattttaacacaagttttttcactgaaatatatcaaaaaaaaaaaaaatgatacatgaataataacttaacacttaacggtcagtgctgacaaaaattttaaaaatataacttaaatattattaacataaaaaattaaacttaaattttgtaaccagaaattaaacttaatattatatacaacaaattgctcttcttatttataatattttgtcctattaattaagagtcttaattgtccttataaaatgtaagtgtttatattagaggtgtacgtaagtcggtttggtcgggttatagcatatttttactaactcaatataaatatcaggttgcatatatttaattgtaacccgcccaattaaaaattaaaaaaagttcaacctgtccattgatttcgtcggcttagtcgggttaacccgtccaaaccgttcttcaccttttttataattattattcttagtttctaattcaaaaaattatatttaaaaaaataaaaatacattatagatcgga

SEQ ID NO: 53400 - DNA, 1227 bp, Cannabis sativa
actcctccccaggacaaaagccgcctaggtaggacatatcactctcgggagaatcggtctaattttattagcaatgatcttagaaatcactttataaaccacattgcatagggagataggtctaaactgagtcactttcttcggattagacaccttggggataagaattaagttcgttgcattgatacccttatgcatgacacctgaaacaaagaagtcgcggaccgcttcacagaagtcctcatcgaccgagctccaataatgcttataaaacagggaagacatgccatcaagcccaggggccttaaaactccccattgagaataaggtttggcgaatttcctcctgagtcgggatcgtcaagaggtcatattgatcagttgtcgagaggtgatctctaacaagatggtccaaacgttccagcggacctttaacagtgctggtgaaaattccccccagaaaatcagagaattccttgccaatgttacctctgttgctaatccacaccccattcttattcattatactctccacagcattacgtctatttctgatggtagccgtagtgaagaaaaatttggagcacttgtctccctctttaatccatgagatacgggctctttgttgccagtaagtggccctctgcctaagtgcttcacttagagtcctccttgtgtcaacctcatctttccaatccctcaaacccttaggagagtcctggatctccttcagatggcattcctgattagcaatacgagtatctagtttcccgaattgggccttttgccatttacaaagggcaatgcgcgtagcccctaccttcttaaaaaccctggccggggcccagccatgagagacaaagccccaggcatcatccacaataagcgagctccgggggtccctagtccaccacgcctcaaaacgaaaagacctaggcagtcttgaatcttggttcatcgtactaatgcatagagggcgatggtcagaattacaggtatgaagggacttgactatagcctttgggaagaggtcgagccagtccctgttcgccaaagctttatccagagccgacttaatgtggttctctccatcacggtggttatcccaagttagttgatcacccttcacaggcaaactaataagcgcaaacctaccgatcaagtcagggatgaaaggcaagaattggtctttacccctcgagcacacccgctcagagttatttaacac

SEQ ID NO: 53401 - DNA, 1359 bp, Cannabis sativa
tcttttcttgcttacttttttctgatttcccttctagctatggctatgatccccacctccattcctgtccctttgtccctaactccagatgaaagtgatgtcttcactttaccagatattcctgatgactctcacccctccattaaccttctcctgcgtctgttcaccattcgtcccttcaaccgtccttccctcatgaaaacactctcacaaatgtggacctctcaatgccgatttcctgttgtggtctctgaacactctgagggattgtttcttgtcacgtttgggtgcgaaggcgataagaagagaatccttgacgggcagccttggcattttgctcaaagcttgactgttttcgcatctcctgatcactcttttcctcttacaactgacctcttgcattatatccctttctgggttcaagtctatggcattccctttcgctgtaagtcctatgatcttgccaagcttatagcttcaggcctgggcgacctcattcaagttgacgaggataccattagggaaggcaccgggccttacttaaggggtagattccttttggatgttaataaaccacttaggaggggtattaacattcgttttcttaagatgggaagggaatttaccaaatggttggacttcaaatatgaaagattgcctgatttctgcttttactgtggtaggctagatcatactcgtagattctgccaatcttatctgcaaaaatgtgatgaaaatcccgttccaccacctagtccttataccattctgcttagggggaaagaaaaatctatggacaagtctggtccttttgattatcctcaccctcctgctttttccatctctgagttacctcagcagcctttccctcttaatcagggaatgtcaaatccgttcttggcccagtcttatactttcactggtttgttgaactctactattggacctagttcatttttgggatcacctgttaactctagtgttcttatgatccccactcctgttaatccgaaccttagcactcagggtacttctagcttccctgagtatattactcacatgcactatggttctgttcccagtcatatgactattgcaccaacggattccactattgtttctgatcactctgatatccagcacccagaagttataagggctgctcgatctcttgctgatgctattccttctcttgacttgggaacccatatggagaagcaaactgctactcctgatcctaatgtcaagggaaagggtcttgcttgtgcttcaggagtcaagagacccactttccactcgcatcatgtccaaattggtggttctctgcgttctcagctgaagcgagccaggtctggggat

SEQ ID NO: 53402 - DNA, 615 bp, Cannabis sativa
aagtccttctcatgaaaatttaaagctaattatgtaagatcatattgttatgatacttgataaactaagcttatgggtattattacctaattcattctttagctaaaaagtttatacaaatggtcttaaaatttctttgtattggcaaaagataacatatcaaataaagttttgatttaaaatgaaacaaaataatatcttaaatatgaggttgacgtcatattttaattttaattttaaaaccaaacaaaattatctcaaaaaaaaaaaactttgtcatgtattatttggattcaaaaaagattgtctaattttattcagttttactaacggatgcctaactggatgattatatttacatatatattaagtttaataatctcaatagttcggagaaatttgtaatgatctgaaaaattttgtagaggcaaaattagtacatgccaaaactccggcgaaaaagttctcatcagccaatgaaaaaaataaaagatgtgaaaatcataaaaaaatacataaactactattttaagtaaaaaatttataagtttatattcaaaggtttttttttttttttgtatatttttacggtattctataaaagcacaaaaaaaa

SEQ ID NO: 53403 - DNA, 907 bp, Cannabis sativa
tcggattggtagggtattacaaataattcgtggaagggttttctaagatttcaatgccattgaaagagttgagtaagaagaaccaatggttcgtatggcccgataattgtgaaacaagcttccaagggttgatgcagtgattgatcacggcaccgttgttagctttgccatcaaattaagaaaattttgtggcatatttggacgcatcgagacagggtttggggtgcaagctgatagagtcattgcttatgcttctcatcagttgaaagagtatgagtagcattatttcttttatgtttactttgaaattttggcagcattatatgcatggtgaaaagggtgagaactatactgatcacaagagtcttaagtacttcttcactcagaaagatttaaatgtgagatagaggcagtggttggaattagttcaggattatgattgggagattttgtatcacccttggaaggccaatgtagtggcaaacactttgagtagtatcaccaagtatcactaaaatgtaccaagatctgaaaccttattgttggtggtgcagaatgaagaaagatatagtggaatatgtatctaaatgtttaatgtgtcaacaaattaaggcaaaacattagaaattggtagggttattgcaaccattaatacttccctagtggaagtgggaggatgttataatggacttcatggttggtttgcctagaaccacgagaatgcatgatttagtttggctcataatggatcatttcacaaagtaaacacactttctactagtaaagaaaacctatatagaggatcagtatgcagaattatatgagaaagagatattttgtctccatggagctctaaaatcaatcattttagattgagatttgcagtttacatcaaagttttgggtaa

SEQ ID NO: 53404 - DNA, 1308 bp, Cannabis sativa
caggcaaatgcaataccaaatgtatcattatgtcaaaaaaagctggaggaaaaatcaattccatcttgcacaataacatggataatatttaccctctaagcttttgaaatattatagatggtggaagcttgcttcaatctacataagtggacaagtgaagactaaaggtaaaatctttacaattttccaaatgaaactgaatatggaagagagctttcattcatttgctttaaggatccaacgtggcattattttcttggctcgttaggcgtcctgtcatatgacgaggcgtgcgtgacaacccaaacattttgatgattatttatttctgcatgagcttcgagggaaatatcattatgtgattttaccttggttctaaacaatgaattaaatgttggccggaaggttttcttaaccattggatctgttttgtgtttttgaaggatctgtctcaaccgtggatcttgaatacacacgtatcatgttttgctagtataaatacttccaaataccacattttccaacctttatccaaatatcgaatatccttgtttcaaaaccataatcttcgagagtgaaaccccataactaaaattgtacacaaatcgaaccatattggaatgtgatattgacttttgcattcatcttcttcatcgaattagggctcaagaattttcagatgcaccacccccattgctgagatgcttcatcgactcaaaggttttttagtttagagaatttctgtacaaccatcttttgacgttagtgtgtatctcctaagctatactttctctcgaatctagaatctttgcctatgtcatcaccaggtaagctttctccttttcaatttcttaaaatgtgttgcatgtcgagatataaggatttacatgtaatttattagctaattgaaaactatagctttagacttgtggctaggattctatttttgataaaaaaaaatataggttgtcctgaatcacttcttgaatctgggataatgacgtcataatatttaaaaataatatagagcataacatataatttttttcaaccattagttaataaatcaaattattctatagatgagattgataataattttaaatttattggagcttcataatataagtttatggtccccgagtcacctctatacacattgtacagggaaggtcttataaattcttaaggaaaaaatagtaatttgtaaaattattattttgattaattatgacaattataaattgtataattaataatttttaactatttagttttattgggtaaaactatattaattaattaaat

SEQ ID NO: 53405 - DNA, 1340 bp, Cannabis sativa
  modified_base (847)..(853): a, c, t, g, unknown or other
gtttcgattcgaaaacaagaaaatgtgcctgctaagccttatcctggccctgtattcaagtaagaacttctgcatttgtcttttctgattaggaattgaacttatttggaatacacgagcctatttaaacaaaagatatgtcttgttagatttcggttttatgcagggcacctaatgaagtatttttttctgttgttgttgtgtattttgctcagggacttggatgatgaacttcagaactcactgtatgattttttggaagtgagaggcatagatgatcaaatggctgtgttcttgcaccggtacatgaagaacaaagataaaactgagtttattaaatggatggaaactgtgaaatcctttgttgaaaagcagtagagttgttgaatcagttttattttgaactttggataaggatgtataaacttcatttgcattggttagtggaaatttaacagaatctgcacacatatatattctttttcaataaataagaagttttctcaccaattatgtcattgtaaagttttgtttgcttaaaaaaatttaatttttttttcctgataatagtgttaatgtgacggtaatttggcccggggtttttgacaaaaaaatatatagagataatttactgttgtctgttcttttccgaccttttgattatttgtattttttggttattatgtgttttttttaatagaatattgtaaaaatatattaaaaaaattttaaacataaaagtgtattttttttaaataataataatttatgtaatttttcaaaaaatatattcatcaatcacaataaatataggagaattatttcatatactattttttttaatttnnnnnnnttttaaatttacggtttgaatttctaaagtggttgcaagcaactagctgcaataggagtttttatacgattttttgttgcataaattcagcgctagttgcaataggagtttctatgtagaattttgtaaaaatacaaagaaaattgttttgaaattaaaaaatgaaagagctccattttaagaattaaatatttatatatttagtatcaataaattcaattttggataattaaatttagtttaggctctatcgtaatacaagttcttgtcatttagtttgtgaagaattttttcaaaaaaaaaaaaggaactttggggtaaatttttacagtcatagtttggtgaaaaaaaatcatttttattctatttcctgtatatgcagctataaatttagttacattaattaataaaattttaattgatgacattcatttatttatttagttttttttttttttttttgggataattgacatttatttagttt

SEQ ID NO: 53406 - DNA, 554 bp, Cannabis sativa
tccttttccacctatgctctgcctggatgacagagcctcctccattaacaatacggcaagttgatctaatagagaactccccacttgagtcacccagctacagccagtcatccttagtatcttcttcagggagttgtatattgaggattgctgccgcatcttcccgtgcgaaccatcttctaatcatatcctcgttccaacgaagattatcatccatgaattgattcacctaagccactccattagttgcatccatgagcggggtaggacatctatttgcggaaggcacccacgggtcaaaccatatggaagtttctttaccattaccaatctttctgcacacatgatcaactagcagggacctagttcttagaatagccttccaaaaacttgagtccttactattggatacatcatccatgaagttaccattcatcaaatatttagtctgtatgactctcccccaaatgcttgaattgtcggtgagagccttccaagcccacttaaggagaaaagctgagtttattgtttccaatctcctgaaaccgagaccc

SEQ ID NO: 53407 - DNA, 1009 bp, Cannabis sativa
  modified_base (942)..(983): a, c, t, g, unknown or other
ctgatctcccatactgactcttttctcttatattgtcagattgctgcagagaccgatcgcctctcaaagactttaatcgaccatgggtacgtcatgtccgagttcgggggcatcgacgaggccatcgagagtctgagagatttggcggctgagaggaaggcgttccaggaggaagctcaacaaagggaggctcaggcggagcggaggcatcaggaggcgctgaaggccaaggcagagtagttgaagacccgggatgaggtcgtggctaagggcgaggcgcgagcttagggaggccaaggagacagtagaggacctgatcgctcggctgaagtctctggaggagctgcacaggctgacttgcagacgactgccaacctgaccgtcgaggtgaaggagcttcgtgacttcaaggctcaggctgaaaaagaaagcaaaaaaggatgagctcttggcccctgttgtctggcagcattgcaccaaacgctttgatgatggcgtctttatggcctagcagactaacggccataaccataagcttaacttctatccaaagcttgaggaggttctcgtccgcttctgagagaagaagaagagacttgatgccttgctggaggagcgcagggggcctcgtcttccactccgtcttgattaagccagtcgttgataaccattgttattattactatctctctcttttttatttcttttaaatatttagtccttcttcccccttttaagacaatttattatatattttcttaaggggagacacttaaggcccgtccccaggcctttatctcttttttttagagctttctattgggttcgaacaatttacatttatgcttgaatacatattttgctttttaactttgttaagcttttggcctgtttcacatttgtcagcgcggtacgccttactactgttgggttttgtgcccnnnnnnnnnnnnnnnnnnnnnnnnnnnnnnnnnnnnnnnnnnaaagatcaaaaataacattttatgtt

SEQ ID NO: 53408 - DNA, 949 bp, Cannabis sativa
aggagtattatttgactcctatgtggaataggcttatacaaaataataataaaaaaaaaagatgtaaatatatttatatttgaattagtacatacttgaggttcaaattagaattaagaaaaaaattgtatcggtcacagttaaagatattttatagtattgattttttattatatatttatttttcgtaaataagttttatcttttaagggtctttttattttttcaaataatacatttaattattattaaaaaaaaagtaagcaaaaattaattgactcctatctggaatagaattatacaaaatatatttatattttaattagtatttcaggtttaaattactacacaaatttgtttcgatgaaatgatcagttcttgagactttattttgtcattacacgaaaatcaaaatcattgagctaatgttattgattcaattcctcattgttgaacttgaaacttttattaattgataaaataatacaacgatgtattccaatctacatatatatattttaaaatatatatacatataattaatattttaatatagaaaataataatttaaaaatctattacatataatatagatatatagattgaatatttattcaatttttgtaagatttttttttaattgaatttataagaaaatataatgtaaaataaaataaaatatttttttatacatactaccttctgcatttggaatgttgctatgggattgttagcaactcttagatgagttgaaaaatgtttctttaagttttgttaagcattctgccaataagactgtgcactttcttgcgcgtagttcttgttattcgccagttcgtatgttatattctaatgattctcctttggaattattagacattgtaatggttgattccttattttaataaaacgccatttttcatttgataaaaaatatttctctatacat

SEQ ID NO: 53409 - DNA, 1112 bp, Cannabis sativa
cccaaccacaattatgggggcttcggagcctggagtcagacccacttgatgtctggggccatgctccctctccaggattattttataaatttccttgtttttgttggccttgcgccgtaccaactaattccccaagcctaccgcctgttttcaggcctttttatgttttatgctgcccggagctggggcttgcccagtccggcagagatattgtacttttatgaactagtttctatccccatgaagggggataaatttaaagacggtttttatggccttcggacccatcctttgaatgagggcccagtccctttcaaccatcagaagcatgtgaaggaatatcgtcaccgcttcttcttctgctccgatttccacgccatggaccgcccggagcttctcacggggtgggttaggatccctccctacatgaggaccgcgcctactcaaatatttcttcaacgggccaagaccttctccacttacgataagaaggccctcgatgttggggagttggtcacgacagagaactgtcggaaggccaagctaatatcggagaaccagtcggtggatgactccaacctttccaaagtcatctgcacgaatgcgaggactacgtcagcagaaagggcactctgggtagacattatcgccacggcggaggacaagtaccagaagtacctcttcaggagggaacaggagctggcctatatcaaggcccaggcggctgccgggaggactcttcacttggaagctacgccggagcggaggacccccaggcccaagcctgtggtcccggtccctaataccggtgctcccgatgccagcacttcgggtctggtaagtctcatttaacattacattatgttccttccgtccgagagtatacccaccttagacctataaggttcgatgagcgccttcgtaggtttagaatgccttctacccggtgggggaatcacgctaagagtattacttttcccatttaggccattatttaggtcgatcccggatgggttctagacttccggcgcctattcccctggatcattcagcccacttatcttccagctggtttcttccctccgacagctttctcggggatgatgaagcca

SEQ ID NO: 53410 - DNA, 902 bp, Cannabis sativa
agttttattttgataaaaaattaacttaggataatattttatactattttagaaaatacatagtcccatttagcatttgataaaaacataggatctaattgataagttttacaatatacatggtcaaaaatagtttttctccaatttataatgctacattagcattttgacgaaaataaaaatagaacaaaagctaatacacttctatttaagaaaggtaattgtcattttagaccttgtgttttgtaaaaattatcaagtagactccttattttgttaaatgataaaatggactctgtattttttaaaatagtacaaataagatcctgaactattttttgtcaaaataaaacttaataataatctgatttagagatgttatgacaaaactgattatattttatgcatttgtcagtgctagaaattatcttcaagttggttttattaagaaaaaaaatgtcaaaaattgagtcttatttttatcatttttaaaaatatagggtatagtttgtcatttaataaaactgaggatccaatcggtaatttttataaaataaaaaatctaaaatggtatttatccatctaagaataatagaggtacactaaaagaagaaaaaaaatcaaacacgaaaaagaattaaatataacaacaataacaataaataatcgttaatactatgccataaaaaatatgtaaatataatatactatatgatacaatattacaatttggaaattaattataaaatatatattataaactatatatattttattaatatatattaagtataaggattacatttttgcaaatgaatttctattttggatataatgtaagttcatggagcaaaaacattagttatacatatgtatgaaaattttaaggggtaagttgaaaa

SEQ ID NO: 53411 - DNA, 1994 bp, Cannabis sativa
aacagagccattgatcaggaaagaaaaagagacactagagatgcatctggaaatgagattaacaaccgaggaatcaaaacccaatgaaagcatcatatgttgaatgaaatgccactcaacccgatcaaatgctttgctcatgtctaatttgatagctgcataaccttcttttccccttttcaagtgcttcaaagaatgtaagagctcaaaggcaatgagaatgttatctgtaatcaaccttgatttcagaaaagcgctttgggattctgagataacatcgccaagtataggttgtagacgcagaactatagccttagagaccaacttataaagcacattacacaaacttataggtcgcaattgagtcatggaggtaggctttttcaccttaggaatcaaagtgattattgtctggttgaagcttgaaggatcgcccccatcattaagaatgtgaagaacggttttggtcacaagctcaccaacaatttcccaatagtttgtgtaaaacatgacagacataccatcaatgcctggactgccatccgattgcatagataagagtgcatcataaacttcagtggcagtgtaaggacgggtaagtaacagattcatgtcatctgatatgaggctgggtacagttgacattatttgttgagttgcatccaaatcaacaccatcagtagtgaataaagagtggaaatacgtctgaactacttgagaaataccatcaagggaggtatgttctattccatagtcatcaatgagcattcggattgaattattagacttgcggcttgaagctttttgatgaaaaaatctagtattggaatcctccgattgtaaccaagatatgtgagatcgttgcttccagtattcttcctcttgggacaacaagtcatcaagaatagcctcactagattttagttcttcaaaatgattactgctggtgtcatgtttgttattcaaagatgcgactttttgttgagaaagtttgatcttttttggcagatctccaaactttgaacggtgccattgttgaagccgagaagcacaattagaaatattactcagcacacaactggtgggatcagaatcagcagctgaatgttgccattgttgggagataatttcgagacattggtcctcttgaagccataatttttcgaaccgaaatcgtgatttgaacttagggactggtgcagcaactggtgtggaaataacagctcgaatgactctatgatctgagccaaaaaaatccaaatggtcaatcgtaggagtaagaaaaatatcagcccaagaatgattgatgaacccataatcaagcctttctttgacattagagctttgagcatgcttattatgccaagtaaaacggtcacccatgaaatctaattcatttaagccacagcgatcaatggtagatcggaaagcatcaatttgatgttcatcacgcaaaggtccaccaagtttgtcatgattcgataaaatttcgttaaaatcacccatgaccagccaaggaaagagcggagcagtgtcttttaatttgttcagcaactcccaagtgaaatgtctttgggaagtacaaggagccccataaaaaccagaaaaatgacaagagggaccatcaacaaagcccaaataacaatcaacaaagttcttaccataattgagaatagatacatttacattagacttccaaagaaataaaataccaccactaagacctattctaggaacttcaataccattaggaaactttaaagcatttctaaatttagtaatagatcctaatttaagtttagactccattataaagagaacatcaggattacactgggaagtgagcaatttaagttgacggaacgctctcgggttgctcaaacctcgagcattccaagcaatgatattcatggcgattggcgaggctgccgagcagccttcgccaaaaaagcatcaatgtcttcattctgctgtgagtgttgatgacaatcagt

SEQ ID NO: 53412 - DNA, 1342 bp, Cannabis sativa
aaactcgaggtggatgatgaactactttggatatataatttttttttttatctttttctctatgtattaacttctaatcattttcaagtttatttttttaaaaaaagtttataaacagaaaacatatgaaatgaaactctcgttctcccccttcgacaaaactttttctctctatattcattttttcgatttttaatccaaaacctagcgatctaagctctagtagtagcagaatagaaaattctcatagcagaaaagcttaaggtaaggtttaattctgttttaagtttaaaataattggttttatattgaagttttgtgaattagaatagttacggagattctgaccttatagaattattcttgggtagttatagaactagtttcgatgataacttgttgaattcgaagtaattttaagttagaaatcgagtttagaactttttaaagcttagtccgaacgttaatggcgttttctgtttaagggctcgattttaatttttgttacgcaaggactgttgtatatatggtatatatgtgccctgtgaagtttggagtgatttggataggtttcgggagtgtttcggtgagtgcaaaatttgagatttttgtgcccaaagatggtcagccgtttttaccaaaatggcctgccatttctggaaatttcgcgaagatctagaatcatctttttgttataacttttcactcaggtgtttgttttggacgttttatatactatttcgaaacttgcaacaagctctatcatatgatgtatgttttagagccaaaatataagttttattttagtgtatttgaactacggagtttggtaggaaaccctaggttatcctttgcaactattaagcagtgttttgggcaaacacttattagtttattcttattatgacatagcgcccgagatcatcgatcgttttttaagcacgtcagccaacatacctgaactggaacttgaggtaagaaaagtataatgtaccatatggtatgacatgtgttataattattagctgtttgattagacagtaataatgctaatgtgatataaaacttcacctgattagttgatatgatagatggatttcaaattatgaaatgaatttgtctgattaggaaatatgatacataaatacacttgattaggtgatatagtgccaagctatgacataggctgagcttgcctgataaggcaatgcaatatatgtacatatatatgatgaatgtttggctatgtcaaaaacttgcttgagtaggtaacgtgatatctctattcagtgtagatcatctatagaggatctttgactaacttatgtatatcgtggtacat

SEQ ID NO: 53413 - DNA, 1717 bp, Cannabis sativa
ggtaggagatcatgttttcctacaagtttcacctatgaaataagtgaagcgctttggctagaacagcaagttgaggaagaaccagtttagatcctcgatagaaatgatatagttctcaaaaataagagaataactttggtcaaggtactgtggagaaacaacaaggtggaggaaaccacataggagttagagtccgatatgagggctcagtatctggagtttttctaattagatttcgagaagaaaatatttttaatgggggataatagtaattattgcatgcttagacatagaaattacaagctaattagtagattattagtgattgatcagttaaatacgattatatgtgtattagtatgagaataagtcctattattagaaataggtatttgtgttataatttctcaactatgaagattatattgaattttaagtgtgctaaatacgttgtatatatatatatgaaatgtgatatttttatgttttagtgtttgacaacggtggtaactcgatcaattggccaatagtatcacaatggttttagtattctagaattatcagggagaatttatggatagttagaatatcaaaattttgcaagaaattgggttatgaccatttaacccctaaatttagtgattacttagtagttaagaaaaggaaaaatagtgtcttttctaaatttaatgaccattagtgtttatgtgggttgtaaggacgaagggagattttccttctgtccataatagactcgatatttattttattttaatttttactagcttttattattttttgttagtttattatcttggggtaaatcttattatgttctatgttggttttgtagggaattttacagttatccaagctgaggcagtagctattatggtggcgttggattggtcgcttggaatcggtctccctctccattctattgagtctgattgcctagctttgatttctacttttcctaaaagatcttctctttgtaatgaccttggttctcttttagatgatatttctagtctactatctgattttcctgaggcgtccctaattcatgttcgtcggtcggctaatttggctgctcttgaactagctgtgcacgcacttagggtggatgatgagcttgtttagatggaggattttctatctttccttttcgatgtactgaacgctaaatgttgttcattgttcaaaaaaagaaggaaaagtagtgtcttttctaaataagttaatataattaattaattctttttctaatggattatggtgagatttgatgatatactctagaattttctaaataaatacaaaataagataaataaaaataaattcatctctttctcgaagccttctctctttccctgcctagacaaaacttaagggaatcaaagaatattcagaccaaattttaccagttcctgaaagaattcaagctataactcaagtgggattggaagctagttgaggtaacacttctaggtcttttattccctttgagttttgttgaattattttttatttctataaggattttgagagaataggatttgtagattatggtgttgggattttatgccctaataaaatccatctcaatataatattattagcttataaatgaatgatatagaagtcaattttatattacccttttcacatgatatttttgtgattatagttttgatatataaattctattaaat

SEQ ID NO: 53414 - DNA, 1606 bp, Cannabis sativa
tgccacgacatcgaatcctcctgtgagtggtaacattagtatggggactgacagtggtaaccctgatcataaacggaaagccgattcttccaaaatattagggggtaacagaaagttttgaggaaatagaggtggctgtcaaggccgcgggtcttcattcaaatcatactcttgattgtctgaaatgcaagaaacaccatcaaggtgaatgtcgggccaaggcttgtttttttgtatggcatggtgggccactttaccaaatattgtcctcaaaccaagaaaaaagagccgaagaagaatactaatcagaatccgggatgactatttaccatgactcaggctgacgtggatgctagtccgttagtggtgacaggtcagttatctataaaatgttgttcttacactgtgttgttgatttgagagctactcactcttatgtgtcgtgtagggtagtagaaagttttcataagccgtgtgatgtgtatgcttcggggtttggtactttgttaactttgggagacctaatagtatccactaggtggatttggtccttgtctttatatattgacggttgtgaattaaccgccaatctaattgagttacaattgtttgattttgacataatcttgggaatggatttttttgtctttggccaacgatcgactgcaaacagaagatggtggtgtttgagcccgatagtgctaacccagcagtgtttgtgggtaagattcagcggacgcgcatactaaggataacacttttaaaagctatagatctgatgtgcggaggttttctgggattcctagtcaatgcggtggataccagcaaaccagtgacatctgaacctgagaatacaagattggtgtacaagttccttgatgtttttcctgaagatctaccgggattgccaccttcctaagagattgaatttgtgattgagttagtttcgagagcggagcaagtatcaaaagcaccgtatcaaatggctccagcaagattgaaagaacaaagatccaactccaggagttactgaatctggggttgattagaccaagttactctccttggggtgttccagtatatttgtaaagaagaaagatgggtcactgtgaatgtgtattgattatcgagagctaaacaagtatcctctaccacaaattgatgacctatatgatcaattgaagggtaagatggtcttttccaagatcaaccttcactcaggttaccatcaactgagaattcgagtggaagatatcctgaaaactgtgttctgtactcagtatggacattatgaatttttggtgatgtcatttggactcaccaatgcccaagtgcattcatggaccttatgaatcaagagtttaaggattacctggatagatgtgtgatcgtgtttattgatgacattctcgtttattctgcgtcataagaggaacatgaactacatctcagatcagtattgtagcggttacgagatcacaagttatatgctaagttcaaaacgtatgagttcttgttatctcgtgtctctttcttagggcacatagtggataaagatgggatcatggttgattcggccaagattgaagatgttcgggattggcca

SEQ ID NO: 53415 - DNA, 1652 bp, Cannabis sativa
ttgtggaggaggacgtcggggacagaagaagaagaagaagaggaagagatgggcagtggtcggagagacgccgaggtggcctgtgctggtgctctgctcgggactaagatcgagaaagaaaagagagatttacgtgaacaaaaagaaagaggaaaaaaagaaaaaagaaataaaaaaaaaatatatctaaggaaaagaaagaaaaaaaaaatcagattttttattgtaaatttttttaaaaaaataaaattatgtttacatattaaaatataattacaaaatatataaatactaatataaaaaagaaatatcgtagtaaacggcatataaagatttttatcaaaatataaaagaaaatctaaaaaagatagtaccaaaacggcatatagatagtaataatcgaaagaaaaggatatataataataaattataggaaaggatttagattcctattatacattttttttcagaaaatgataatacttataattggtatacaattataattatgtaatttttcctatataaaagggatgaaaccatttcaacaaactataagcaagaaagaaagagagaaagaaagaaagagagagaaaaggagagatggagctcttaaggttcaaagttgagaaatttattacgttggcaactttagtactatatatcaccattgcactctttgaagacttccttggattgagtgacaacattctagccaaacaagcatggtgcctgttggctacacttactgcacttgttaccatttttcatttgttgtttgcattattaacaatttggtgtgatcgtctagtaacaatctcatcttattggggaatcaacattagaaagatggagatggtaattgtaaatatcttgttagctattttctctggatatcatacgtttgtatcttttcaacgggtctttccagaattgacagagaacaagattttctttaagatgcaatcagtgtcgacattgtccaccattcttttgttcatgaaatttgtacacatacacatggatttcagcgtagagaattctaaaaaagagaccaatacatcttcattggagtgctcattgttaaataaaaataaaaatgaagctgacattgaaaaccaattcctagatgacatttttttgtagggaatttgattgcttcttctttgattctacaaattttattttagaagttatagtttttatttcaatttgtttccttagtgaagttgagttagttaatttgctgtaattagaaattccgaccaacattcattatcttttgtttttgatttcttagtcaatctgtttaaattctcaaaatatatgagtttcaacagactatgttttctaatttcttttgcaaacttgtaaggaaaacttgtataccagaataaataattaacttattttttcctttttatttcttttgtttaataagtaaacccttatttagcaaaacaaaactcagaaaaaccaaacatggtcctcagaaatttaaattgtacaagacccactttctttccttttctgaaaggggcaagacccactttccagtcggtattgaaaaacataatttaaaattcatacatattttttattttaagattaaaaatgggttatgatttagattgtaaattatagtaaagaat

SEQ ID NO: 53416 - DNA, 911 bp, Cannabis sativa
gccatggtctttatatccaaccatgacaaactagctaaatcattaccttctggaactccaacaaaaggtggctgaagtcgtccataatctaattctaggtttcttatgatatatttggggtcaaagatgactccatttggcttgtatgacattcatgaattgtgcaccatgcaatacttgggagcccaaccgataggagtttggtgcaagtataatttctacctcttaataataaacttgataaaattcttttgacacagcaatagttattaattatgactttttatcaagaacttgaaaaagattattagacatcaatgggctgagcaaagtatataaatttttaaatctgggtgcaattgccaccaaagcaggggttgacggtaaccgttgtcaagcactagtcactcgtatgactaggatgaccaatcaagataaatgggttattatacccctaaaataatcggtatgtagatttaacatgaataattttagtatttataactcttcataatatttattattatgtattaacagttttacacatatttgttcgtgcaggaaaatatttcactagatgcttgtacttatccaaccgagtacgcagactgtggcgtacttggattaaggcaatggcgatgtaccggatgatttgaaatttatcatttccacgtaagttctatattgaacatcccaacatgtaagagtgttttatatttataaatttatacatactaactatactttttatgtagatcgttcaccatataaaatcaaatgacaagttggctggatagacctatctagtggataactcctatatatcctgaacaacctgacggtaaacaatgtggatactacgtcatgaaattcattgaaagtttcatgaccgtagaagatccaatacacgt

SEQ ID NO: 53417 - DNA, 1100 bp, Cannabis sativa
tgaaaaatatttatttttcttattttatatttaattcttaaaataactttaaaaatttaaaaggtagtcttttcatatgtggtcttgaataagatgtttgaagagactccattatttatcatagttctggcaaccatcttgttggctatctggacttccacgaccaatgagtcattgtgcggaaatctgattttgagagcatcctcatcactgaatgttatggtgggctctcctgcccggcttcctctcttctacgaccaagattacttcttattgctcgtgctgtactgtttaggcatacctctcccgggctttgcctgaatctccaactatgtgtgggcctccaataatgacttgcagatgtccatctactggtggttgtagcaagtcttggttgttatcgcccctttgattctgatcgacattgatatacttctgtacgtgcgggttatttttccttatcagaaatttaatttctcgcttcaaatttttgcactcgttagtgtcgtggccgtagtctccatgaaatcgacaaaaattggtcatgtatctcttgctgacatcttttttcatgggtgcgggcttcttgtacggggctagtgactgagtggccatataaacactttctatgtcctccgtcaggatggtaaatgcaatatacttggtaggattctcccgtggagcttgttcgatcttgccagttaactttccctttttcccattcccttgtctattattgttgctggactgtttaccatttgagcttgaatttcttgggtaatgggggagctggacagatgtcccagtagaaggagctttcgacttgccaggtttttggtaaccttctactcgctgaatatcctcttcaagtttgataaaaccatctgcatggtcaagaaaatcactcattgagtcgactggtccgttcgtccttatgtccttccaaagctcaccaaggacttcaatgccccccagtatcgcatacaactttttttcctcggttacctgcgaaaccttagtcgcctccgtcatgaatctgctgatgtacgctcggagaggctctcctggtctttgctttacttcgaccagatctcctaggt

SEQ ID NO: 53418 - DNA, 1184 bp, Cannabis sativa
tctttccctacacgacgctcttccgatcttaattaaaattagttttagatattagtagcctttgaatttgaaaatttgatttttccacaaactagccttatggttaattttgaaattttttattatatttgtctgttttatttattttaattataagatcagatattacttattttattattaaaatttaaaatgatcctattttgatattaaaaactaaaaaacttagaaataatctagttagaatttcaaatttgctaccaatatcatattttaaaattttataatttttaaaatattttttattaaattaaatataagattagaaaaatgttagttttgacattttatcttattgttaatttatttaattaaaaatttatattttttgtgaaagtaacatgaaattttgaaaagttgttaattttggtttgaatagatatttaagggttgtgcaaccataaaattttaaaacttagaatattttattttatttctatttaataaaattgataatatcctaaccttcaaaatatcttatttttaattttatttattttgttaaatttattttattaaattaaaagattagaaatatactatcagaaatatctcaattttcaaattaagatactaaattatattatcttattagatatttaactaatttaagttatttcaataaactaaaatttttggaaattagttggatatttgattttcatatttgaattttagatatttaggagattttttagattttaaatattttaaaaaaaattctaacaacctaaatttaaactctagttaagatatttttttaaaaaatttttttattttaaaatagaaatatcttaatttattttcgagatatttgttgcatgttgttttgttgcttgtttatttatttattcacttttttttaaaacaaacctattatttattggatctaaattgctatgattaacttgttgacaaatccaatgatctaattttaatcatagtccaattgtgaatagattctacaaataatttgtaataggtaaattttgtatttctttcatctatgtaaacctagaagcgtgataggacccatccaaatcaatttgaccagtgtgaggctatatatttgtttttgggcttagatgcatataggaagtccatttatttctagatagataaat

SEQ ID NO: 53419 - DNA, 909 bp, Cannabis sativa
gttcataaaatacctaatctaatctaatccgcacgattcagtccaattcaattcgcacgatccaatctattccaatctgcaaagtgcagattaaattggattgaaaaatctaaaatccacgcttgtgcgaatcaaatgtgtatttacatacaaaagtaaccaatctagttgctaatatatcaaatgcatatatttatatatataagataaatataatctaaaacatactaaatttttcattctacatacaatttttatttctccttcctgcaatttgttatttttttatttgtttatttaatttattattggagacattgaataataataacttgttttattttgttgtatatgctatgtgaaaataatttatattttaataataattaaataatctaatattaaaaagtaactatcagaattgtcagatgaagaggatgaacgagttgcagacaagctagggagaaggatgtctgaatcgcattctggtcttcacgatgtgtttcaacctccacaagtgaagtttcatgcttacgcagactcagaatgggcagcttgtcctgatacgaaaagatctacaataagtttatgtatcttcattgacacctctatcatctcatggaagagcaagaaactgcacactatttcaagatcttctgtagaggcagaatatagagcatgactaacactacttgtgaaattgtttgccttctttccattcttaaagaaccgaaggttgagcatgaagggcctgcattgctatattgtgacagacaaaaaatttgctcaacttatagctgcaaatctagttttccatgaaagaactaaacatgcactttaaaatagactgtcatttggtaagagaaaatgtgcaacaaggtcttatcaaaatagttcatgtttctacaa

SEQ ID NO: 53420 - DNA, 1323 bp, Cannabis sativa
aaaacaacctaatataagcggttaccctaattgggtataccctaaatttttttcctatatattttttttaacttttttgaatgttttctaaaaaaaacatacatttttgtaaactttgcaaaaaagaaataaaatcataaaatttaaaattccccttataaaataattatcaaatatcaatgaggtgatttttggttagctctttaatttttaatagctacaactatgtaacccttaatttaacatgataattaattatttctttcaaactttaattcttaaaattgttgaatgcatagaggcaataattttatgtggtttttcatgcttacattaaaatttttatttatcaatgcctaactatagactgtatatattcttgaataaatagtattttttttttctgaatgttttacactatatgttttctataatatactagttaataatatttctcgaaatataatttttacaataatatagtcattccattatattttatttaattttatcgtgaaacgaataacagtgtgaatggtatttaataattaaaaaactaaaaataaaaataaaaattattatataaaagaaaaaaaaatttattctattatttattaatgtaaaaaggtgaagggcttttaatttgtatttatttatcaattattatccatcactttacttattttacaataaaattgaataaaatatgatggaaagactatattattataaaagttatattttaagtagtattattaataaattgtataatttaaagggaacaacttaatactataaaagatttagggcaaaaatattagttgttctatatttttcttaaagataactatagactatataaagtcaaaacaatatactaaaatttcttttgcattgtttaaagcaccaataataccttttttccatcaatgggtgataacttttaagcttatatatgtggaaaaagtatacttatagggatgccatttattgtaattattttagttaatttctatgtttatacaatgttagttagttttgtttgtgtagtttttaagagctgatggtcatgaagatgatgattttattgatagaattgtagaaagagtgtatgttgatgttgatgttgaaatttcaaataaaaaattcatcagccatagtttcattttttaagtttaggatattatattgtatataaaagagataagttgagaactattatttttttattataatttaactaaatgtaattacaaaataattttaattgataaatattttctttaatttataatcaaagtattaaatagggtaaataccatt

SEQ ID NO: 53421 - DNA, 1474 bp, Cannabis sativa
  modified_base (430)..(430): a, c, t, g, unknown or other
aaaaaaaaaaaacaaataaataatgttaagaatcacgggttctatctcaaaatcaattgataataagttgagtagtctatataggtgtggatatcgaataagatcaagcaagggatatgactttaataccatgttgagaatcatgaattcaaaaccaattaataatgggtggaataatctatattctaatatatgactcaatactctactatttatttcatgtgagacaatgtccacaataaataaattataaccctactatatctttttctaaaaaaaaaattataaccctattaaatatatataaatatagtaggttataaatttgttttggaaaattaaatatatatactaagtaggtattagtaacatataatataattattgttacttaattattaacttaactactactactactaataataanaataataataataataaaatttaattatatttttttaaatatataaaatttgatttaatcttaaatttatttataaaataatatatcgaactaattttgttaaacaacaaaataaataaataattttagatattttaaatactataactaataaatttgttataaaatatgataaattaattgaattatcatctaattcaaatttaaattaagatttatataaaaaaaaattatctaattttgttgatatttttaaattaaatttaaatctttataactatttttttaaaaaaaataattaattaattgatttaacaatgttagttttaaccgttaactttaacaaaaaataataaaaaaaatattaaaccaacaatttttcgttttgataagtcattaatattgtatgtatgtatactaaaaaatatcgtacgggtatatatgtgagaaacgtttcaagggttacattaaatatgtaatcatcataattacatatatttttaattattgtagcattattaaatagttataattaatttataaattaattaaaaataattaataaattacatgtaatttaaatgtaaataatattattttatttccttataaataaaaaaaattaaaatatttatagatattaaattgctaaagttgtcttattaaatatttttaactaaaaaaattaatttattttaagtatataattattttaaatttaaaaatattttttttcacatgttagttacttgttatagaatattataaaaaatttaattattatatttatatttttaatgtaacaatttaataattactgatatatgcctttttatataaatatattttattattagaaaaaaaaaaaccatgtctgcaattaacaattttatttttgatactataataatttatatagaattttctaaaaatagatagtatacttatttatatatatatactagatagatgttacgtgtcaagtcacgtatgttaattttattttagttttttttaatatcataattttaaaattaataatat

SEQ ID NO: 53422 - DNA, 2239 bp, Cannabis sativa
gccattaacttaacatttaatgatcatgtacttagggaagttccagaaatttagcttagatattattactttcaaaaattaaacttgaatatttatctacaattgaacgttaaacttatatatttatactgtaaattactcatttattttaatatgagttacttgattatatgcttatttaaatatacgttgatgtatacatattaatttatgttattttttatgaataattgtacttattagattttttttttatgaactagaaagttgtattgcttaaaaattgattttataaagaaaatagatctaagaaagacataaaatataatctttggaaaataaattttaaaaatagttaatcctcaacaagcttattaaaataaatattgtttgtaagtaacatactaaaaaaaatatttagagaaatatgaaaaaataaaaaattaataattaagtgtactaaaaattaaaataaaataattattaaagacaacaaatgtgtaaaaatattatagttaggttttactattactatcatatttcttcaattttactaccattagatcaaaaattactgactgaaaaagtatttctaccatagggacaaaactaaagtttctactatagacatttcttatattttgtattgaacttggtaaaatatttcattgtaccaaattcaatacaatttttaacattgaccaaccacattatttatttttcgagaaaatcacaccaaaccaaacagacatagttttttatcccatcatcaaaatgttataatggcgttatggcttggtaggaccaactatactatattgtaatttttgttttttgtttttttttttttttctgaaaaaaatgctaaaatgtaactacatagaaatactcttaagtataatgcgagtagtgacgtttgggcacagtagaatcacaaatagcaacggtacaatattgttcagaccgtaactagaaaaaacagcatttttattttttaatggtatgagcctatgagcaatagcaacaaacaaaagttgggttttgtaaagtgaaagctcgtgtgtgtgtgtgtgatatttctatgagcctcttcttctttctctccttccctcccaacccaacccttatcaatcaataaacaatagaaaacgacaacacttgattgagtattgaattctccaccagttatccatggcagccaccctttaccacttcccaacctttaactctcttcacccgtataaactcttcttcttgaacccaaataaacggcaagaactcaagctagcccggtacacccaacaaaacccacctcacaaacgctgcagatttcgagtatcttctgttaagaaatccaggtttctttatatacactcttgaatttctcgtattggaattgttaatttttggttcaagaaaacaatgtttttgtttgtaatgttaaaaatatatgtagaaaaatgaaagacaatgtggagctctgcagagaaatacgagagtttatggctgtggttggactaccggagagtcatgtacccaccatgaaagatttttcccagcgtggaaggttcttgctttctttcttcttggaaattcttctcagttttagtttgttttgattcttgaatattttatttttaaggtgttgaattgaccaatgtacacttcagatatgtattttgatttcgagcaaaaatttgagctcttttttataggagtgatcttgcatacattgttaggcgaagagggtataaactgattggagagcttcttgcaagttcaaataaaacagattctgaagggtttattttggagaaaaggggaaatgaaaataaagatgcagatgtagtagatggtgatggtgaagttaaggtaacatgtcaaagtatctttttaagtttgtgaaccttttttgtatatgttaaaaggcacatgaaacagttgttgatagcttcttactatttaaaaaggtcaggatgaggaggacagcgttgtggttggagattttccatcatcaattgaagcttctgtggagggaaactgttctagcaatttggttatggatataaatgccaattcagatgactattatcatgtgcctgtagaaggcatcaatttatgaatgatgtacaagtctgatagacagacatatgtgtaccagtaacattaggtacttcactttgagagaagttattagttctgttaccagtttaaaggaaatgtttgcaacctgttcctc

SEQ ID NO: 53423 - DNA, 2564 bp, Cannabis sativa
  modified_base (678)..(683): a, c, t, g, unknown or other
tatattggtttgatttatatataattaaatgaagatgggaatagattattattggagattaagaaacaattttttttatgaaatattaaataatttatcattaaaaaaaataacagatccaaaattatgcagatcggattagatccaaaatatacaatatgcacttagtgcagattaaatgttatttgactaaaaaagtacggattaaatcagataaacacttctaataataaatagtgttatagctgttaatagaaagagttattacatataagtttcctaaaattgtcggcaggaaaactttcatatgaagtatgagcatatataataacaagagtcaaaaattctacttggggtgacactaatatttaattaggtttttgttgattattttttaactattatatatatatggctaattaagattttttctctttgaattttgatatgtactaaattatgtccctcaacttttaaggtcattaaaaatacctattgagattgttgaatttaatgatttttatccaattttagtaaaaaaaaaaatctaatatggaccaaagtttagggagaatgatttagtacatatcaaagttcgagaggcatgatttggtagatatcaaaatttgagtaacatggtttagtacataaacaattactgaaacagtaaaattgaannnnnntagacaaaagtccttaaatctaacgatctcaatagtttcaggaagaatttttaacggctaaaaagtttagagacatgatttggtacatatcaaaatttaggaaaaaaaaaatcttaattaatctatatatatattatatatttatattttcttttgtgatatttgaatatagctcaaaacatggaaaaacaaataagtgaatttatagtgtggttgaaaaagaaaaaagacaaatatagaagattcgagacagggagaagaagacataaattttaatatgttgataagctcagataagtttttaggatgaaaaatggggaagatatatagtcctggaaaatatactaatactatagctgcccaaacatgtgtctatcaatgtcatatcattttcaaactacaatagatctctgtgttactgtatatatacataatacatataagtattattttggatttactatctttttgttcaaagaaaaaaaaaattatcaattaaattttttattttgttaaacgagaagtttgaattctatatttttaaaatttgtataaaataatatattgaattgatttcttttgttaaaattaaaatttaatgataatttgacctaaatgtgatgatcagactttaattataataaaaaaaaaacaaattgatcatgaaaattgagctattagtgtattattttgactagacaattagtttattaatagaattttttttttttttttttgcgtagacgattatcatagtgtgattcagattacttttttttttgaaaaaaaacaagagtttaattataattactttttacaaaatacaaatactgatccaaaacaatatgatcaaccactgataaatatatctgatttatttattatattttgttattgttgttgcatttttatagtatgttttttaaacaatgaacaaatatttcatggaaaggtaatgagagtaatacatcatgaagaaatgatggagaaactatccaaaattagtttaccatccaccttaatgtacatgcgctgctaaaaattaataacgccttaagaaaattagtaagtaaactaataatattttctaacaaagattttaaaaattcaatataaataaaagatctcctaaaaaatatacaaaaacaaaatcaagcagtcagtcttggaaaaaaaaaactcatgcatcaaagatgaattcaacaccatcatcatagaaaacttgagtaaatgtgagtgtcccaacaaaacatgcatcatagaaagcttgagtaaatgtgagtatcccaacaaaacatactcttccaatactattaacacaaccacatattttgctcgaccgatattataagagtataaaaatattattgcgaataattagaatgcaaataaaataacaagctaaaatatacagtaaatgatgaactaataaatctaaaagatttaatttgattaaaaaataactaacaatacttatctcaagtgaaattctaaatctttatcaacctttttgtgaaagtctataatcttttaaacgatctttttaatctctaacttccattaactcacaaatatagaactcgatataaaaaaaataacttttgtattattaatgctataacttctgcatgaattattataaactttctttgatgaacaagtaatcaacctacacacaaaaaaaaaacatttagaaaattaattgaattgaaaaaggaaaaatagaatgtaataattaaaagaagaagaaaaacttatctgttagattcattattcctccaataatcttttaaattcctcaaatttctataaactcacataaatatttcttaacatatataacacaacatcatatgaacataacttaatacaataaaataa

SEQ ID NO: 53424 - DNA, 2325 bp, Cannabis sativa
agattaggctcccaaaattatttgggtaagtttgaacctctttaagttgattgtgttcatttagtattttatgttcttaatatgtttgatgtgtgttcttgataatttgcacaagagtgtgtgttggtttagtgtgtgtagattgatctctatattgaagttgagactaagatccttacatatatatatatatattacctgtagatcatgatgatcatcttgagaaatagttttattagaggtgaggcagctgccaccatccttggttctcctttgagtataccgctcaatggtcttgtttatgctgaagcatctccaaggaacaacagtatcatcaaaataaattagaatataacgtacatactgagtcttcttaaatctatatatatattatatatatatatatatattcattctttcacaagtcctatatagacaaaagtaataggacataccttttacacgtagcacaaatacacatcaaattaactacctataaattctgactcaattagtggctcagagataaaccaaagcatttcaataaaatgtacatataggtccaagtttcaacaagaccaataacatcaatcaaattataatatgttcattccattcatacatattgaacccgatcaacaactaattcaagttaattatcaattttaattaagtaattatgttagttaattgctagtctagttacttggtcactctgacggagttcgttagttgccttagggacggtcaacattgactgacgagtttttctattagttttctaacacagattatagcctataaataggcatcagatcatattgttttccctaatgtaactattacaatcactttagtgaagatattattcattcatatatatttcctgtccaagaaagatctgagttagagttatacaatcttgtctccatcttatgtcaatgtgtcattgcttctggctgttccactgagattcgatcaaagcttgaagacttaattaacaagtggtatcaaagttggtgaagcaatttaaggaaggtgatcttggtttttggatcaagattgtggtgaaaatatgtcaccatgggtattgcaaagtttgatcttgggaaattcactgggaagaacttcagattgtgggtgaaaatgagagctttactagtgcaacaaggaatccaagcaaccttgttgggggaggaaaagctccctgcaagtttagcagggaaggagaagacagaggcattggacaaagctcacagtggtattatcctaagtctttgggataaggtattgagagtggtctcaaagcaaaagacagctggaatactgtagtcgaaactagaaagcttgtacttgacaaagtccatgaccaatcgtttgttcttgaagcaaaatctatattcattcaagatgggatcggaatataagaccatttggatgaatttcacaagataattctcaatttggagaatattgacatcaagattggagatgaagatcaagcaatcatcattttgaattgatttcgttcatattcatatgagcatttcgtaaacactgatgtatggaagagaaaccttgacaccagatgaggttcagaatgcattaatgtagaaaaatgaagagaaagtctaagatgaaagaggagacagatggagatggaatgttttttcgtgggaaaatctccaagaaagagaacaaagatcaatcaaattagagcaagaagactggatcaaagtccaaacaaagaagatgttacatttgtaataagcaagatcatttgaagagagactgtcctatcttcaagaattataatcagaagtatggtaatgttggtgtagcctctaaaggagaagacactgatggttatgaaagtctaggggtcttgatagcttttaacagtgattctagctcaattgaggtactcgattctggatgctcatttcatatttgtcctgacaagttaagattcagcaagttccagtctataaggtaagaaaatgtgacattaggggataataaagcatgtaaagttggagagattgaatctgttatgatcaaatgatggtgcaataacaaagttgaaacaagtgagatatgttttaagaggaattttatcttagtggctatgctggatcaagatggccattcagtcaaggtggagaagggttgcatgaaagtggtgaaaggttcaagagttactatgaagggtttgaagaagatatgtgttgcaagagattctagaaaaggtggagataaataatgtttcagatgacaagattgataccatgttttagcagagaaggcttgcacacattggtaaca

SEQ ID NO: 53425 - DNA, 1643 bp, Cannabis sativa
cagaacctgacatggtataaacaccaggagtgggactctgtgaggacgaagaaccagattcagcatcatttacctcatttctcgaccgagccctactgcacgggttgcgtcgctttgggtcctcttcctactgtacctcgcgattagaattttgtgcgacttgatctctcggcattggcttatttaagtcgaatccttcctgtttggttttacgtttcatgcgagtgcagttagttcgtcgtctagtattagtcacttaagggttgtctgagcaagtggttggtactcgaggaggacgtcaagtcctggttcgtccatcgacctcaacctgcaaagcccacatttgatcttgtaatgcggtatattgggcggtggtcaactggataataccttcagataccacggcaggtgttataggcgggaactaccccactgtggctgccggtgtagatgtttctccagggtgaacggtggtttcagggaatagattaagaggagtgatgtttgttcgtcccactcctccgttgatagtgtcgacgggggccgttccattccctgggagtggaacatttattgttccgatattgattgatccattgttattatctcttgtcgtctcatttccaaccatagtgattttccttcaaaatcaataaagtatttcgttcccacagacggccccaaatgttgtttaaggaatttagacaacactaaaataaatgatatagtaataatatagggagaaaatatgcgagtactcaacctagagtggtgagtattcgaactaagaacacaaaatattggaaataaactggaaatacgaagaacacaagagaatatagtggttcagtaagatcacggtctgcttagtccactattgcaaggatttctgtctcgtccatttcatgtaggatcactcctttatatacaaagcaagtgtcctttgattacacagagattgaattcattatcaatccgtttatacattaaattacaacaattaaattaataaaaatgtaaatacaataaatgaaggacagtttcagcttaattcactaaatataacaacgtatgcgacttctatagtgcgagttggctgttcatattcttgcataagctcgcaagcttaagatgcatacaagaccaatcgagtctaggatgtctgcgtcctatttaagtcgcttacacagacatctggtaatgagttggcaacctagctaaggcatgcaagcccttattgggttaccgagattattgggtcacctgaactagctcgcaaagtaaagaatcgatctttaaaactcgcaggaggatctcgagagtcatcgcatatatctcggtatacgtgagtcttaaaccgttccttggtcctattctatgcgagccatacgaatacaactagactctgtcatggtcacatcatctcgctgagtctggttcaggggaggttcatactcaagaggtctctcactgacatctcagctttcctcgaagagagtaagtataggcgtcattttcataagagtccgatttcgagtttttaggtaaaaaaatttcacaataatatcactttttaaattaaaatagtattaatgttaatcccctctaacacatttagtatttaaaagtctactattttcaac

SEQ ID NO: 53426 - DNA, 981 bp, Cannabis sativa
gagagcggatcaccttgacggatacctctagacggagtaattggtcccaactcatgacacccgtgaatgactttgtactttgccgaagaaacacaagccattataagaccgatccatctatgagtgaaccccattttcaacaacattgcttccaaaaaggccattcaatctatcatatgccttactcatgtctagttttagtccatgaaacccgtcttacctttccttttccgctttagatagtgaagaacttcaaaggataccatcacattgtcagagatcaacctaccaggtatgaatgcactttgggagtcagaaatgattgcgtccatgaaaggtttcatcctatttgccatgactttcgttacaactttgtacaatacattacaaagagcaataggcctcaagtccttcatcgtatcggggttcttcttcttgggaatgagcaccacattagccatactacactctaagtcaagctgcccattttcgaagaagcgttgaacatagctagtcacatcagctttaatcacatgccaacacttttggtagaaggctggagtcataccatccggtccaggacttttatctggatgcatttgaaacactgctttgcgcacctcctcttccgagaccaacgaattaaactcttcatttgcaagctcgggaaccaacctatcaacactatcaacaacctcctgacaagacacaccagaagccgaaaacaaagaagagaaatactcaaccataacatctcccaaaccgtgatcccaatcaacccaactgccatgatcatttttgagttttgagatggtattattcctctttcttttactagccataagatgaaaatatttgctattgtgatcaccttccttaagccaaaattgtttggctctctgcttccaaaaggtctctctttggtcaaggatagatgaaagttgatttttgacttcatcatagcgaaggaccgaagaagca

SEQ ID NO: 53427 - DNA, 1303 bp, Cannabis sativa
aatacaatacgacctaatacagcgttccaaacgagcccttaatgatataataaagggtctcacaataaatactttattgttaacgtaaattttcgttaactaaatatataagcattttacgtaataagatataccaaaataataataataaatgaatactagatatttttacgtatttttgtatttaaaatctacatactccacgagtgattcttattagggatgataactttaatacagagtataattctctaataaatgtaaagtatagttttttctctcaattttgtcgtctctagcttctttcctggattctgctcctatttataggtgtataggatgacagttatttttatttgaatctaattctttacaattgctcatgaaacgtggacattcttcacgtttcatttttatacacatggaataatacttaataactacatgaccgctctttctctttatccttaaacgattatgctaactaagaaggttgtttctcgctaaatgtgagttgtcctttctcaccatctttataggaaaaactaatgctaagtataaatatgcttcctctcacaatgttcttcgtattgtaatgatattagcgaggtagttactccgttgcgtaaagggcgagatggatgaatgcagttatttcctccatgcacaaatatgtgagtcaatgagttgcaagctccttgatgtctcgtcctgtacacttttattatatactctgtttatcctgagatggacatattgtcttgtcaattatatctgttaatagttattactcttatctctcatatgcttatgtggcagcgcgtttgaatatttctatcaactataattaattgaaacgagttatttaagctgtatttaataatacaatttaatatatcattgagttgattcatattcttcctgaagtacacgtatcaacttctggttgatagccgaatttcaagtataacaattgtctgctaaaaaatacttttttaataaaaaagaactttttaaatgtttttaagggtataactgtatttttcctagttttaaaattacatgcttagaatttggcagttcaaaactttgaggtacatcatttctcatttaatgtcctgactgttcctttctttgtaaagttcccatccgttagattagattttccttgatcaaatggtggccaccttttaggtataaatttgaaattgtgcattattttcgccattttttcagctttcaaaccttcgatctttcgacaaaatctcaaataccttcttctcaaatttacatgccctcatta

SEQ ID NO: 53428 - DNA, 1081 bp, Cannabis sativa
aattagaaagttccttttataatctggattctgtcatctctttacgtcatcccttttagtgttgaatctgcacataagccaaaatcggatattctacaatagtgtcacaatcacctcgtcgaagtctgaaatctatcaaattaaataaagtgagtagatagccttataaatcttttcagaaagcaacaagtaccatatgtgtaccaaaaatttgtgaaacaaatagactcctaatctgacccctgatattgaagacccaactgaattttatcgaacccattcctaaatgtaattttcagtcctctgctcacttaagatctggatgtgttcattgtttctttgaatttctttcagaatataccaatccttatgtgactaatcatgactcatacagggtcctcaccttttggtatcattaagattgttgaatccctataagagaaaatagtcgatgggagtgcgactaagagaaataattgggagagagatcaaatgatagctagggctaagaaaatggggatgaagaatcgtaattaaccctaatttgtataaaagcataagaatagacacgagttgaatctatgaattaaccatcaatacttcaagattgttggaatcgtctctctgctcccattccctatgtcgatcaccatttcaccaactctctttctctctatctctctctctctctatgttaattttgtgaacgattgataaatctatgtggatttacttgatcattgttgaaagtttcttcctttgctccctttctccgaaaatcgataagtactagccctcttccaatatgtcaatcacaataggggtaaatgaagaagaagctaaatgtaaattttattttgggatgctaacgggaaacattagtcttccttattttatattaaagaaaaattaacgtttaaaaataaaatgttaaacgaataattttgttggatagctacattttatatagaaataaatatatatgtattacctattaatgggtaataaataaatttaactataaatattaattttaaaaatattaaatcattagatattggtccgatagcgaataataaaa

SEQ ID NO: 53429 - DNA, 932 bp, Cannabis sativa
taagcacctccaagtgtgggaatccttgaaggaccccaaagatctgaatgaacatatgctaattgctctttagtagtgtgcttggcaggtgtaaatttttgtctgcagcttttgccattacacactgttcacaaaaattcattttgcatgacaccttccctttgagaattccttgtttcttcaattccatcaagcctctttcactcacatgtcccaatctcaaatgccacagccttgtcaagtcatcatcacctgtacctgtcacatttgaagctaggtcagtaactgttttcccattgaggaaatacaatccatttctatagattcctttcattacagtagtggaacctttaatgacattgagtgagttttcatctattttaattttacagcctttagaagctaaaacaccaatagacaagagatttctcttgagttcagggacatacctgacatcagtgattgttctttgaataccatcatccatttgcatcacaattgaaccagttccttgaattgttcatgctttgttgtcacctagtaaaacagtaacccctgttttcttctcaagattgcaaaatatatagttcttcacaaggacacatgtgaaaggaacagcctcagtcgagtatccattcttgtccagagtctgtattagacactacaagaacaccagctgaatcataaccatcagcaacatctgcttgccccttttctttgttcttttctttcttcagtttgtttttcagagaaaggcattcatccctgaagtgcccttctttcttgtaatagaaacatttcttgtcagtcgtgtttcttgaacttgtctttgtcttttggttccctcgatcaccaccatatttggagttcttgtgacccttattgtcatgccttcctttgacaaacagcccctcaccattgtgctctgtttt

SEQ ID NO: 53430 - DNA, 796 bp, Cannabis sativa
atacaattttctttgttccaaatcctacaaactgaaaatatttacaattcaaattgcctagaaaaaccataaattagattttatttggagagaagtttcacgatgttaccaaacacttcaccaacaccaagatatagaattatcccaaacttaaacacagtacagtactgaaacaaaatatatgtacaaacaaatacatacaaatgggattcacatgaaagaaacagaaaaaaattttattgaaccaaaatcagaaaattatgaaactttctttggccctggtccttacaccaaatctttctattcagattattagaacaaaatctggtatgattcattattaacacatatattcatattgtaacgtttcaaatggtaataatacacacaatttctaaatcttagaactaaacactataaaacctagctattattaaaaagaaggaaaaaagaaaagagaattggataataggtaaatcatacccctttatacagaagtaaataaataattgaaaaaaaaacagagagaaagaatcacttgagaaaactcaaacaatcagacaaagtttcaaccctattagctgtagggatagcaaatggggttggtcagccccactccgttagtgttttgacccgtccgacccatcagggttcttaaaccggcgcgagtcaaaccagaccgaatttttaaaccgtcgcaattgtaagaaaaaaaagaaagattaattgctatttcttaaaaaaaaaaaataataataataattctagcacggtcaaagactagatatcactgtaa

SEQ ID NO: 53431 - DNA, 868 bp, Cannabis sativa
tgtatatgttcttcaagtattaccaattgaaatatgactttgaacactttttttagtccatgggaatttcgaaaattaattaacaaagtaaaagagaaaaaaacttatcttttatctctttctttgaaaatttgaaattttctaaatttttgttatggtattagtattaattggattgaagtcctaatcctatttggatatgccattcaaaattagggagaaaaaggaagaagagaaaagactttggccttttgtttatcatatatctttttccattgattctctaatttttttcttaatcttaatagcattaggaattatttttaccttttaaatttgtattcctattcctagttgtataggaatttcgaaatatgattaaaaaggaaaagggaaaaggcataattatatctttcacgtatcatttgtctcttccttagaaagttttaaatttaaaagactcacattagctttagacttaggaaattgaactcaactataaataagtgagttggcaaccaaattttcatacctctctcttcattcccacatgcctatagctttttaagagcactttgggattttatcttcatcaagccttcaagccttctccattccaaggcagaaaaaacattttttttttcttgggacacgctgattttttttattttttcttcttctcctccttttttggtcttactccaaggatttttaaactacccaaaacccttgaaataatttttctaaaacctgtaaaaatccaaaacactctcctagtgccttgaaaatttcctccaaagttactttgacttttttaaattcaattttgactttcctagagttgaagcaacttgagttgttgagctag

SEQ ID NO: 53432 - DNA, 2466 bp, Cannabis sativa
aacccagatccgaataggacacgggttgacgggtcatgggttggcgggtttcggttttggtcgggttgaccgggttgaccgggtcaacttggtcaactctttaaaaatatataaaaaatggcattcactcacgggaactgttttctctctagtgttgatgagaagcaaataaatctttgaattctcactacagcaaataaagttaaaaaagaaaggcctattattattattgttattattaattgtggggcttggctattgtttttcttccttacctagagtaatggcttcaattggttggctcccacaaacttctgttgtgcttgaaagcagcaaaaacttaataagtaaataatagcaacccaaattgtttttgttcttcctacccaacttgttatgatctgaaagcatcaaagggaagagattattctattaatagtctagacaagcactcaaaataatatagaaatattaatcaagttactgttaatgttggggaacttgaaattaactggttttgttaaattctgactggaaaatggataaattccaaaacaccaatactaatttcatccacaaaattgatgattaaagagcagatcatatatcatgattcatattattaaatagatatagatcacaaagatcattataatatatataaactgtaataaaaaaaaataaaaatatatataatatatttaaattgcgggttggtgggcgagttggcgggttcaacccgaaacccggtacttctaaaaactcaacccgcgaacccgcccgaagggtaccaggttaaacccgacccgcccgaatatttttttttaaaaaattttgtaggttcaccggtttggtttcggacgagttgctcggattcgtgtcaaacccgctcgaaatgttcagtcctacctgacgctggacttgctgatgagattgaaatgagtgtacttagtgaggtacttggtgaaaggcgtggtcataatcgtggagtggggcgaaaattaaaggggcaatcttcgtcgcggaacacacaacctactccgacttaagatatgcctgtggatccaagagtggagcaaaaatttgaaaaatttaccagactattgttgtggatgtctcaaaggttgggacctgatgtttgtctacctactgatgaggagctgtccggaatggcaatgcctcaaatgtttggaggagggtttgctttatcttcatagcctgggacttcgcaatatcaccaagcccagcagtcgcatccttttatgtatcctttgtcatcacctccgcaaatgtccccttttccttggatgccatcgccgatgtcgcaaatgcaagtgatgaacatgcagtagacaccgcaaacacaacagatgcaatcgacacaatagatgcaacaacatccaccaaaaatgtagcagatgccatcaatgcagcagacatcacaactgcagcagcattcaccacaaatgcagcaaaggccatcgatgcaacaaacatcacaaatgcatcagtcttccatgcaacaaatggcatcgatgcagcaaactctatatagaagcagcaggcttccatgcaacatatgtcattgatgcagcaaataccacagatccagcaaccttccatgtagacaccacatttacaaccatcttccatgcaacacacaccacatgtgcagtagatggagtagatgacacatatgcagcagacaccgcatacgccttcgatgccattgatgcagcatatagcaccaacgtctcagatgcaaccattgtcatcgatgcagcagatgtctcacatacagcaaccatactatccgtaaatgccagaattatcacaacaaacttactttccccaaataccgaatattccagaacaacagtctggagataatgatgataatgacgatgaggagtctacacaattgaaaatatagtattaatatttgtaatggtatgaatatgacattataagtattgtttatttgaatatttattttagttattgttattttaatacttttattgtagtttgaattttaatttatgaggtagaaaacacttttattacttaattttataatttatatttaaattaaaatttatgtatatttgtttttaatttatttttttttctttacataaaatctaattggcacgactttgtagtgcctaaatgtatgataaataaagtttacgtttccaagttggcactacattacacgtgccattagatcagtcaattggcacgccgatatttgtggtgcctgttgcttgttttaggcacgaacctattggcacgacaaggcacaacaagtcgtgtgccaaaataactatgggcactaaaatttgcatttgttggcactaattttatcgtgcctatatgtcttttttcttgtagtgacataagcgtgttccattaacaaaaccaaagtctatgaccacggatgatggtggagaccatagtctt

SEQ ID NO: 53433 - DNA, 1081 bp, Cannabis sativa
cacacttgagcacggaaacgaggtaagatagcataaaatgtatatacgtgaatgtatgcatgttatgttgtgattgtttatgttttgggtgctatcatagcgacagaaccactgtgtcagtttggcagtacaggcatcgtactagttaagagtgatgttcaccccagagagtattaattggtgctatcatagcggcacaaccattgtgtcggttcggcagtacgggcacagtactggttaagagtgatatcatgatcaatttgttgcatcataatctacatttgctacttctggtggagtatccagaaaactatctatctcggcttctatggaaaattttgaaaaatctttgaaatcatcaacaaccacattagcagattctaaaacagttttagttctcatgttgtaaacacgataggctctactatttcagaaatatccaatgaaaacaccaacatcacttttagcatcaaatttttcaatatgctcacgatctctagaaatatagcaaacacatccaaagacatgaaagtgacttacatttgggcgcttaccttttcagattttataggatgttttggaggtacgtggatgaataaccctctgtttattgtatagcaagttgtgtttatagcttctgctcacaacctttttgtcagcttcttgctatttaacatcactcttgccatctcctgcaatgtttgattcttcctctcaacaactccattttgttgaggagttttgggagctaagaattcatgagttattcctgcagacttacaaaattcatcataaatagagttctcaaactccttaccatgatcactccgaattcgaataattttcccaatattacatcagttttcaactcttaatctcgaacaaagagttttaaaagcatcaaatgtgtcagacttttctcttaaaaaatctacccaagtaaaatgagaaaaatcatacaacacacacaaaaatatatcacttaccattcagactttcaacttgaattggacccataagatccatgtgaagcaattccaatactttcgtagtattaatatcagacacacttttgtgagtg

SEQ ID NO: 53434 - DNA, 1529 bp, Cannabis sativa
ctcgttgattagcaacgagctccacaaaacgtttaaaaatcacgtaatacgcctatgctagtaggggtgttacaatatttataagtcttctagtcaagccgatattgagaatacatgcaatatggttgagtcttgtaattccaatgaagataatcgacagactaaacataaagaaaagacaaaaaagcctcgagataaaaagaaacgaaaggaggaattttcaataggtcaacaagtgttggtgattcattcaaaattcaaatctttgacaagtaatgttatgtcaagatggaaaaatccttttaaagttaaaaatttacttccttgtggccttgtgagtattaaaagtgaaaaaaaaaatgtgagattctaaaggttcacaagcgtaaactgaaggcatgtactgatgagctccgacgatcatatcaaccacctggggggtaatgatgacgatccacctgctactgattgcggtgatatagctatggacccgtagtcctagctgctctggtttgttttctctcctttaattttattgcacagtgggggcactatttattttaagttttgggatgggaatgcaattttcatgttttaatttttttttttgtttttttttaattattttggtttttatgggtagatttaaggttatttttattattgttggatgactatatcaacgttaacttatgacctatgggaattcgatgatgaacttatgctaaactctttgacattatttagtatgtgtgaaaaacttttagattgtgtgcttaacctgttatgcttgcttttgatattgcgatatgaattttgtgttgttctacttattctatatattgtgattttatgtacttatgtagactttgtttgatttgattgatattgagataactagaacttgtgtgattaatttattgagccgaaatcctaaatctttgttgagtagagatgattaaagcaattttctttgaatcgtgtgagccaaaaagctaacattaatacattaccatttgttgtcctattttgagcctaatttttttccaatttttattctctattaaaaacaaaacgcatatttatctttgattacgagccatgaacttaaataaattatccttaccctattttgcaccataaacataggttgttgtgtattgaatgaaaaatatgatgtaagtgggatgagataatttttttttaaaattatttggaaaaggtgtatgtgcatagagagttatgatccaagtacattatgttgaaaaattctcttgtaaaagaaaattcataatatgaaaaaaaaaataataataacaagagataaatttgataggattataactcttattatgtgaacaatggggtatcaaatgaggaaaaatattatcgggtgaaaatgaaatttatgatgaagggttttgcaatttttattagatttgtaagtttatggtgtgaaactagcctaaatgacattcttatctaccatttacctaaacttaacattacatgcctataaagtcattttg

SEQ ID NO: 53435 - DNA, 1886 bp, Cannabis sativa
ggaaggaggagaaggaaagaatattgcagtttaccacagtagaccacaaaagaatgaggccgccacttttgccattggcttccaccacaaaacaaccaacaaaacccaacaaaacccgcaactctttagctttcaaattttacaatctagactccgaaatgaacaccaagtctggggtccaacagatcacaagggatttcaaggaacggaccgtccaaggcttccccatcccttgaacattccaaagtaagattttcatggttgtaggcgaccctgcatagtagaatgcgcctcttcttcattcaggctgactttcgaatccccattgtgagaagcataccctctaaccttcccttcttattctttgcatctttcttgacagccacgcttcacctttgctcctttggaactgtcttctggctaggaccaaagacaaaagatggccctccttccattccatttgcctccttggaataactaatcggtacttcaaaaagattcaaagtcccagagatgtccttgggatggttcgctattttttggagttttcccacacctgtcccatcccagtcttccacgattcttctttttcctctaccacccttatcttgattattcaagtgtcccaagcttcttatctcagcttcattttagatccccatttcagttacagccctctccttctcctccatgctacttcttgcttgatccttctccacttggatctcttcccgaccaatcatctccttaccattgttgttgacaagtagtgcaaatgaattagaagttctcagcccctgtttcggttgaattgccccctactttttttccatttcctccatttgagtttccttcctggcatctttccctccctcatgaaatccatacctaatttcattatccactttcagccatgtcccatacgccttagcttgttttccatcagcccctgtaatttctttaaactctgaagagcagtccttttgactatgcctgattctcccacatcggaagcacatgaacgggagctcatcgtatttgaaggctatcgacacctttgaacccccacaaggtaatacataaccaggccaaacaggtttggtaatagacaccaaatttgaaatttgtagaatccgttcatcaccatttttgagacatccgaattctgtatggtgattaccttccctgccatagaagccaatctcaaggtattcttttcagtaagataatcggttggtactccaagattcactagtgttcactattttccccaatatcaatacccccattagataaataccatcgcatctttgatagtattcgggactgggcttgttcagaggtaaaagaaaacgtaaagaacatacctgagtcatatttttcctggatcttgacattccaatccgcctccttcagcctccatattcttcccaagactttctttaagaaacccctgctatgatcaacgttagagcacagtcgtcctcctgagaatgtttttggcaatcgttaaaggaaagactctgatccacctcccaatcttcttcatccgagacatgaagttgattagttttttatagtaattcatccatagcgggggcgagaaatcaccaagccggaactctggtagcctttcgttgtcgagggaagaaaaccagccaaagccctagcaggaacgccctcggggaataccgttaattattatttatattactattattattatatataattggatcttttttgaaaactcagtattttatttttcatgccaaatatttcatgtttcaaattttaatttatattatgcattcaatttaattttttaatagtgatttttttggggggatattggcggctaaaccacctgaactttacggtttgta

SEQ ID NO: 53436 - DNA, 756 bp, Cannabis sativa
agcctgtggtagattttcataaccacctccttaaaatctaccacggaccctgctgggtccatgggggtgtagagaatttcaacctccccgacctctttcggtctctaccatattaccctgactccttgtgtttcgtcaggcatccatattacaggacttagcctctgaactcaaaagtctaggtaagtcagacaacaatcacatataatccaaatatcgcatacatggaattttaagcaacttattaaacatttaacgtattactaacatgcttattatcatgtttttctaaccaaataaattactagacaagtaaaacttactgaactgtgagtcgagcttgtctccgacaatggttgtacatatcttgacggtcttccgtaaacaacttgttggctctgatatcaaattgtaatgccttactttcttaagcacactacagtgattttctaattattgtgcatgcttttgcgaataaaaaagtttctcaaaaattgtatcaaatttaaaattttaattaaactttaaacttttataaatatacaacctcacataaaagttgggatcccgtcctaaaagttaaaataatattcaaaataattttataaacatgtcgctcagcgactataaaataaaggcctaagtcttcctgaggccaaactctccaggtttaactatcttgatatgtacaatcatctttaagtcctgggctcactggtgctcaacttttgtcttttctttacctacacatgtaaa

SEQ ID NO: 53437 - DNA, 1360 bp, Cannabis sativa
tgggattcacagggggaaatccctccccagttgaaaactggcaatcagccaaacaaactctagccgacttggctaagtcatctactacagtaaaatgttctcttctaacaaaaacaacaaaacaagcagaaaaaacagaaagttttcctaaaattaaagaaaaaagagcagaacatttccaatccggggtgttctttgatcggatggcctccaccagcaccttcgaatcagaaataatggtgagattatcccattgttgcatctcggcccattgcaaactcaaaagaacagcctgcatctcagcctctagagcggaatcccccacaccagaagagataccgtgccaccactccatagaagacatatccatggccaccatagcacaaccgtactttccttccttgaaggaaccatccaccataacagtcttggtggttgtgattctcgactgggactccctttcggtgtaggtagaccgactatcattctccccaacaatcagttgaatctcagccaacctgctggagatttcccctcttagcaagttcacattcggcacataattctcagtgtggaacactttgttcctagtattccaaatgcaatccagaatcactccaatacagttgatgaaattgggacgattagtgtgatcaatcgaactacagaggttgcgcataacttccttcatattagtacccatcaccctatcgattctgataggccaggggctagaaaaccataaagccagggcaatactacatttggtaaagagatgcaaagatgactcaggggcagtatggcataaagggcagaaatttacctccacagacggaaatttgtccccagtaggcaaaacattcgaacaaactctccatagaagcaaactcaacctagggtgtatcttagagttccaaatccatctccacaagtcttctttttcaccaaaccgctcttgttgttcaacccaataggcaccctttacactgaactttcccaccaatgaattcttccaaataagagtatctgtggaagcattcacattgatttgtattcccccgatcttggtgcccatatcactgccaaacagatatcggagataacccaaattccacttcctggtacttctatacatcaaatccgccaccgatctcatgctcggagcctttgaccgaatgctctccatcaactctcggaattgaacatagtccaaccatggaatccatggttgccaccaaacatccacatcttcgcccgtagcaaggacagtacacgcccccttggatattgtatttctagctcttaggataccacgccataaaaaactgtcagtgaacttttcttggacactccaaaagga

SEQ ID NO: 53438 - DNA, 859 bp, Cannabis sativa
  modified_base (57)..(57): a, c, t, g, unknown or other
  modified_base (310)..(313): a, c, t, g, unknown or other
  modified_base (480)..(485): a, c, t, g, unknown or other
  modified_base (788)..(807): a, c, t, g, unknown or other
aacaacctagggtttcttaccaaaccccgtagttcaaatacactaaaataaaacttntattttggctctaaaacatacaccatatcgtagagcttcttgcaagctttgaaacggtatgtacaacgtccaaaacggacacccgagtgaaaagttatggcaaaaatatgatttctgagttcccgaggctgcgcgaaacggtgaacagttggccagaaccggttgactggttgatcaggggcaaaaatataatttttcaagtttacgcactcaccgaaacgctatcgaaacctgtccaaatcaccccaaactnnnnagggcacatatataccatacataccaccatacttacgtaatatgatctaaaatcgagcccgtaattggcaaatgccactagtgttcgaacttaagttatataaagttttaaactcaatttctaatccaaaatcacttcaatttcagcaagaaaacatcagaactagnnnnnngactacccgagaacaattctataaggtcagaacctttataactattctaattcgcaaaaccccccatacgaaaccaattgttttaaactaaaaatggaattaaacattaccttaagctttcttgctctaagaatttgctattttactactaccggagcttaggtcgctagagtttggattgaaaatcgaagaaaataaatataggagggagagaatttcgtcgaaaggagaagagggctttgttcttttacgtttactgttataaagttataatatataatatatagggtgactattcaatgnnnnnnnnnnnnnnnnnnnnatcatggttatattttttttttacctgtaatagcaggttactaatagggaga

SEQ ID NO: 53439 - DNA, 1643 bp, Cannabis sativa
aatctagatcttggtaaaataatccccaacacctggttggatcataagcatccccacttttaggcacgtatctggtagagtcattggcatccctgtttctcctttttgagttttgaccatcgttaccatcattcctccttgaacgtggtatttcaaaactgttgggtctttgagatcccatgggctctttgccaagacgatggattgtttccttaggttgattattgttgcattgatcatcacaagccattgaatgtgggtatataaagtttataaggaggaatttttctgagcttttatcacaaagactctcaatgaaagcaccaaactgttaacgcagattttcgttaaccgaaataaatagccttttgcaataaatatactacagaaattaatatataattaataaacacctgatatttttatatggttttgtagttaaaatctacacactccacgagtccttatcattaaggatattttttagtacagaatacaataataaattttgaataagtaatgttttctctcaaatttttttgtccccttttctcattgattctgccactatttataggaatataggtagacaattgctctttttgggattgattcaaatattactgttcatgaaacatggataatccccacgttatatttaatcacatgtgggataatagctaataactacccagctgctgacttggaaggttgtatctcgcttcatatgatttatcctccttgtccatcttaataagaaaaaatgctaactattgggaggtagttcaccttgtcgcactccttcattcgaatcattattgcgaggtggctgtctcgctatgtgtaacgcgaggctgttgtatgttattacatttattctgctcgagtggatatgaatatcccattcttgtctgtatatttcgaggcagacatatgtctcgtcaatctcagtttaataattattattcttgtctcgcttaagactatatagtcaacgagtttttgaatgttatcgatcaaacttttatttaataataacgagttatttattctgcatttaatgatataacattattatatcattagagttgtttcattttccttctgtaggacacgtgtcagcttttggagtatttctgaatttcgggtatagcatctttcattaatattcttattaaatttaaatatatgtatgagattatttatctcaccttactagttgggataaataattccagacagataggattagttggattaattatgtagacttttaacatgtctaaacactgcattaaacaaattaacttgtctaatccaaaccaatctaatccaatcttatgtactaaacgagcgtgagaatagaataacataggcattattatttcaccctctcacaattgcaaattcaattttataacatcttaagagagcgagataattatattcttgcttattcagaggtgatttcaagtttcaactctactagatatataaattttaattttttacaagtcgtatatattgacatattcatttttaatggaggatctgtgtttggtgaagtattaaatgctatattaggaacaaattttctaatatgcaacgaaaaaaacatgatggtataagttccaagtaacaac

SEQ ID NO: 53440 - DNA, 1394 bp, Cannabis sativa
tgagagaatgtatatgcaatcactctttttttgaagcttagagttttgattattggtcatcaacctgtggatatctattctactttgaatttacctaaagaaattgggaatctgatccatctaaggttattaagtattcctaaatgggaaataaaaaagattccatcttcttttggcaatttaagatgtctccagactttgagagtatggaccaggagttataaaataccaagctcaatgtgtgagttggagcaattgaggcatctacatatttattttggacatggtggcatagaatttggtaatttcttgaggttaactaagtctaaaaatttacaaacattggtaggtataggcaccaagtatcatctactaagtgatcttctactgttggagagtctcaagaaattaagtatttttgtggatggaaatttcaacacattcttacataatccccacattctcacattcactcatctattttcgttacaagtgacgaattataatactaccaacaagatagatattgttccattgatattaagctgtcctcaaatgtgcaagcttagattgtggtcacctatagtaagattaccaaaagtcaaccaattctccccaaatcttttgaagttagagttgactaggttgttccttcaggatgatccaatgccaacattagaaaagctaccgaaattaagagtccttgccatttctgaaaatagttttttaggagaagagatggtgtgctcaagaggaggtttccctcgacttgaatctcttgaccttactgttctatataacttgaaagagtggaaagtagaggagagtgcattgcctacacttgcctatttgcgtatttatgaatgcaaaggattgaggagagttccaaatggactaagaaacattgttacactcaataagattgagatatttaatatgcctaagaaattccaacaaagaatggaggaaggaggagacgatttctacaaagtacaacatgtgccatcccttgtatttaccaactatgatcatcaatgtacgtatctaatcatctatctattttctgttatttacacaattaattttatttgtttttttttctcttatttattattttgtaattaaaattttcaattataaaaaataatcttacttatttgcttatgcattttctgtattgacattactatgaatgaatgcagattgagaagataatgtgtttgctatatacaatcaaatcaagatgtagaggatgcgtttgccactgcctattaccagtgtgtatttaaaataatctgtattacatttttcttaattacattagtgactctttttcctaacttttgttttttgtgttaatctgttgatgatttgtaattgattgaatctagatt

SEQ ID NO: 53441 - DNA, 839 bp, Cannabis sativa
ccaacttttgccagcacaaaaatgtgctggaaaaagtgacatttcttgtagtgggtggtgtcgtcgaggaggactgagttggcacaactgtaggattagaacctccagcttgaaatgagtggtcaccgaaggaagcaattggcgcgagtcaagggctctgataccatgaaggaacaaagcagaggaagaagaagaacaaagtatgttaaaaaagaaagaaaatgcagagaaaacttgatttcattaatgaatgattaagtgtttatatacacaagagaaatacattctgtcaggaaaataacaaccaagaagctaacaacagtaataactaacttaacagacactaactaactgtcataacaattagttggtaatcaacccttaagctaattagtaaataaattattagcataactaattaatttgaaaggaccaagtgaaaaaatgtgaaaacaaaataccaactttgaactgcttgcaaaaaaaaaaaagaaaaaaacggaaacaattgtacaaagtcttactcaacatgtatcatacatagtgaattcgttacctatattcacacaaccttattatagtatacatttcaaataacaattgtacatattacaaaacaaaatccaaaagttgtactacagatatcacaagtccaaatcagtcaaggaggggtttcgaccttaattagtaggtttccttgaatatataataagaacaaagtggtcctccacaacgtacaaaaaagtcaaattaggtgtataataagttttactcgcgtgaacaattaactcgatcacgactcatgagtcctcttaagtttgattttatatctatatagc

SEQ ID NO: 53442 - DNA, 1266 bp, Cannabis sativa
atgagtgtccaatattacagtaagcgataaaacataaaagagacatacacactttcacccacttctttagatatcatgagtatatacgttatcctttataccatttcaaatagatataaatttgttaacaagtgatattacaaaagtccacttgaataataataataatatatttttaaaaattatatattttttttccacacttgattttcaacgtctcaaatgtgatattatattttgttaactaaacctaaactaaatcactaaagttagtttagtggtaaggaagggatgaaaaaaaaaaaaaaaaaaaactaaacgtaaacaaaatttcttttctaaatatgacgaactccacccataatttttctcctgacatttttagttttttgttattgtgaaaatttttccccattctttttttctttttttaacaatttgcttatgtggtttaacttattaaacgtacaaacaaaaactttaaattattattaatgtattttttttactcttgatgactgtgtcaaactattttttttttttttttttggagtatagaaactaacattatgtttatactatattaacaaatttttaaagaaaacggtcaatgaaatgaaaaaaaaggatatttgcaataattttttaagtttagaaaaaaaaatttacaacataacaaaagttaaaaggtgaaattctacaggggtctatttgttcttgaatactcttactaaagcatggttggaaaaatattattcaaaatattttactaattttttttttctaaatatttttgtattacaccatgtataaatttttaaaatttttttatatcatttaaatattatgtatagttttttaatatatttattcatataaataaaaaagtaaaaaatatcaaataaaaaaataaaaagagacaagggaaattatttgtaaaatatagacaaacactatttctcatctctatttttttatattttacgaactattttagcttgagatgtaagttgaaaattattattttttattagaccttaactaaatataacaataaaataattttaattaataaatctcttttataataaagtactaaatataatctcacataatttatcaaaattagagtttctaacgcacataattaggatataacctataaaactggatataaattaaagagtaataaaaaacggtaaaaattaaaataaaaaataaaaagtaagtttacagtgtaattttctccttaaaatctaacacgaa

SEQ ID NO: 53443 - DNA, 1520 bp, Cannabis sativa
aaaaacccgcctctaaatgtcaatttcgaacatagcgggtattttcacaccctttagcttctatttttataaatggggttgaaaaaactgcctctaaaggctaacattgtagtagtgaacataactgatacccaaccaatataatttggtgggttacagttataccggtacaaatttttgctggcaaaactgttacccgcgaatttttttttcgtgggtgtaagttttgccaacaaaaatctacgccgacaaaaaagtttgcgtttttaaatatttgcataattttaataaatattacaatgaattaaatataataaattatatttgaaaaaaatattattaaatgaaaagtggtattcacgtatataattaaatagtatcccgatcgagctactataaaaaatatgttttgagttgtaaagttagcaactaaagtaaaatattaaaacatgttcgaaaaaaagtcattttttgaagttaattatcaaatatatatggttttaaagaggggtaattaattatgtcatcgtcgtcgttattctgagtctctggacggtgtgatcacgatctagtactaggagcagggaatggtggaagtggatccataaggcaagttgaaaccaggaacaacccaagagatatactttaactgatcttggaatcgcatcatgtagagttgttgcgtttcatattgttgtttcaaatgttgagtttcctgacgtgcctcctgcacctgtcgttgtaaggcctcatactgctccatagtaatagtctacgagacagaagtaaaaggcagcgggtgctcttatggctccaactgtcttcagtttcatggccaaagcctctcagatgttgagatcgctcacccactacttgtgtcataacaggcaggtctcatgggtactgaatgtgatctatatgatcttgaggaggttgatcagcagtggtcttgataggctagttttaggtacattttataaagtattttaaaggtgtgttgaaactcattatattcattttgctcataattaggcttgttgtctacatgtttcaggtttaaatggtaaaattcataatatgaattaaaaatgagaagagatatgttaaatgatatgaatatatatgatgaattatcgaagaatggtaaagggaaaaaagttccttctaaagtgatgcgatacttttcgttgacacctcgactcaaaagattatatagtttgaggattacatcaaagagcatgatatgtcatcatactggtaaaaatcaaaagatgatggggtgatggacacccggtcaatggtctttcttagaaagaccttgatgcaaagcatcctgagtttgcaagcgatccaagaaatattcgactggggttacatagtatcattttaatattgacgggaatccgcatcgagacctacttatgggtacttaatatacgaagatggcggagtggtatagtgagcgaaacaccaacagacacaggcattttaaacaacattacactaaactagaagattgg

SEQ ID NO: 53444 - DNA, 870 bp, Cannabis sativa
  modified_base (130)..(136): a, c, t, g, unknown or other
ttgataatttattaaaatatactcactttttgaatggattgcccaatataccgtcactttctacttaagtataacatataatttaaattaatataaggggtctaataaagacatcatctataaaagtgannnnnnnttaaagaatataaaaatagaagtaaaaattaaaacaagtaaaataaaataggtataaaacataatttcctcaattttactagtgtaaattgtactttttttttcttatttgaaatcgtgtaatttttactttttaaagtataaaaatgagaaatgctagtaaatggccttatttctctcttaagtgaaagttaatgtcccttttttagaataataaagcaaatgtccttttttactttttactacctaaaatacccttgactatatataaggtattatcatgttgtggtacatcagtttgtttttcgattataattggagtatggtatatactgtaatggatgggtatattttatttaatgaatgatttttttggctgttcactttttattaataagtgttgatatacatcaacgataaaactagttatcgtgtatttatgaatatgaagttatgacatatcaattatttgtattgtagataaaaaaaaaattgatagaatattaatttttagtttgtggtatatacattttgcattatagtatatacattttgtgtactaaaatttaacattcagcaaaataaaataataaaatttggattgtataaaaatatactccaatcttaacctaatataccattgtaaaaaataataatatactagcatagtaaaaaaaatatatgtatatatgtacaatcttaaacatgaaaataatgtaccccaatcaaatatat

SEQ ID NO: 53445 - DNA, 3271 bp, Cannabis sativa
ataaataagatacctgaaagataaagaattaaaagaaatatgtttaatagctctggcttcctatacataaatcgctaccgtttaaaaatatataactacaactgggagggactggaaggacaaaacatggaagaagaaacatataaaggatttttaaatgatgatttcactgaaaaaaaacatgtgcaatggtatgtgtatgtgtacatacataaatatgccttgaattaatacacctgtgttcaacaatttaatgtgcacgtttgttgaaaatttacgttgtaaatacccataccacatagtcaccacttttaaaagtgcaacgtgaatcttttgtcagagaagatgaggcattcagagaatccccatcagataacttcttatcaacagaaggatcactgtgacatatgaatcggtagataaatctgttgtctttcttaatttcccaatgtggaagttcatcatgacgagcaatagagaaaacacgagcatcatcactcctcaaattgtgtgattgccatattttgtttttagaaagctgaaaaaatagataaaagtataaaacaaatgacttcattgaaactttgtgtacaaagctcttggtacagttgtgcatatgatgatcttgaaagttgcacctgtatctctttagcttctaagtcaatcagccaatcccagtgcttaaggaaactgccatgagaagttgttaggtggtgagtgtttgaatcaaataaatcccctaatccactgctttcagcacttccaccatgtacctgaagcattaaatatgatcacattgaaaaccttttcaaaaattcatatttttcatagttagaagaaaaatacttgaaattatacaagaagatacatggcataatagacctgagtcgccctacaagcagacaattagcctaggaggaaaagcattaccttatgatagatggtacagccactaagatggcgacagcctttgcacatgttcagactctagaaaagaaaaggaaaaaaattaaatgaaatgaaatggcatatcctagaatcactctctgatcactaatacagcagctcacacctgtaacatgggtggcagcacttgcgttgttaatgccttaaggatatcagttgcaagttcattgcgacgcatgattagtccaattaggtcagatcttcgaactgaaattccctatagacatgaaaaaacattagataggcctcaagatttcaatgggaacatataatttatgtattctatcactacctgtgtctgatctgactggagatagtacagaagacccgaatcaatatgactttgatacctaaagacgggcagcaaaatcttaagaaaaatgttttatcaaaatccacttagaaatctggtgtctgtgagaattaaagaatgatgtaacatatttatacctctcagacatcaaaagtgtgtaaaggattacttgggcacagtgttccgtagatgactacacaaatatcaaagagaggaaagatgaacatcaagaacataaatcaataaatgttttctacagcaaacaaattttgcattctggaattaatttgcacaaattctatgaaaataattgaacttacctggccattcggtgctttcccacttttgaattctaaaggcatcacattctcagttcttccatttctgtttgatcctacttcaactctaatagaagcatcaatcatccctttcaaaccatactttggagcccacgtcatctcctcgatatcaagtacctaaggcgtacagattagatatttaagaaatgaaaaatttcctaaagtacaacatcaacaaaggaacaacatacaattatcattcttcacaaaacaagttgtagcttgttcaggtagatgttatcaagcacacatgcttattaaaccacatgttaacaagatacgcatttaaagcacttgaaaagccaatcatttttgcattcaggataatattaaactcatgaaactatctagttgaaagaacgtacacatttatggaatgcatgttgtagagagctagtaacacgcataatgaacaaaaataaaatcaacctacacatgaatgatgttttacctcagatatgttgacttttttagatccaacatcagatccaaaatccacagtaggggtactaaagccctgccaagtaaattaagttagattgttaaaaaaaaatctttcaaggttctcagtgcagccatttgcttccgtaacatctggttaacaatgtgaaacatcatacacaaatatgaaaggcacattgggtccgtacccgacatttcggagtgaataaattatattacacaagaaagcattgagaatgatagcatgaggcaaggcacgggatatttcacctaaaatagagaaaattaaatttggagaagtgggacacaagaagacaacaggcaaagcacaacacaatgcccataaaagaaatttctaaaactaattcctaagatgattttctacaatgacgcatgaattacacctaatacatgcaagaccttgttgataaatcattctaaacactaaggatccctgaatatggggcaacttatcactaagagacaaaccatttaaatttactgattagtgacagagtgcaataaacaaataatgaaagcaaaaatataaaccagtggtaaataaataaaccaagattaacagacctgtggagatttgaagaggttaacccaattcaataatttggggatggcttcaattaatgttctgtatgtatccttttcatttactgcaatttcaaagataacatagttgatctcactcaaaaaccaatgttggaacataaatagtctagtaaacaaatgtgaattgaacaatatattttggaatgacatattcaatacctccacatgcatacaagttctcaatattttgttggagcagtgttcgtgcatattcctccaagaaaattactgtaggcatctcctttgtaagaccagcctaacaagtaaataaatttgaaatgatacttgtaaatgtgaaatgaatatagagactatatgcaccaagacttttacaaggtttcagctgaagtgtaaacctgaaatatctgatgaagcagtgtaccaattaatgctgcagatgaattttcattgcatcttatcctctcgtccaggacagttcgccttgggcaattgaaactaccagcaacctaagagtatatcatcagttagagaacagaaggaaaaaaaaaaaaaactaggccgaaataagcacaatcttgtgtgatga

SEQ ID NO: 53446 - DNA, 721 bp, Cannabis sativa
ggttgcagtggatgtttttcttttttgatccatggccgaaccactacctcccctgctaaaacttgaagcaggaggggtaggagccctgccaacaactggagtcccgccagactctatcatgcatcctactagcgcccttagctcccaatgccttgtctaccatttcaccataggtgcttttgtcgtcagtagtgatcattagatcgtgtctgatttttgcatttaacccatccagatacttctcctttttactgaaatcggttggcacaagtcccgaggccaacctcgccaagcgatcaaactaggtcttatacttagtaacagtcatgttttctttctaagtcaaatgggtgaattcttttctcttggcacttctgactgcctcattatagtacttggcattaaatagttcctggaacttctcctaggtcattgtcgtaatgtcatgaatcatggacaccatgtcccaccaaactaaaatgtcttcttgaaattgaaaagtggcacagaccactcgatcattacccatgacgaccataaaattcaggatcctggtgatcacagttagccattgctcggctttcataacattagggcctcctaggaaaactggaggtacctgtttacggaacctttcatatagtggttccatccagttcattgcaaccaccggttcggcctgcacagcaggggcaggtgccactggcatttctggaacagg

SEQ ID NO: 53447 - DNA, 506 bp, Cannabis sativa
agaagctcatcattccatgatgatttgtgcacacatattagttttgtgttgggtttcaagatttaccaagattttctttttcctttttttgagtacttatttaatttctggtacaacagttttttttttcctttagtttgagtgtagttttatttcattaatgaacagaactaaatttataattatgtaaattaataattttattcttaaattataatataaatattatgttcattcaacaataattttattatgaaagtataaaaaactatttattgttacttattacatttaatgttgttgggtatgatttttgatttctaatgcagctctatctagttatatcgtcttggttccaattgtattggttcaacaaatggtaattttctattaaaaaaaacgataaatatgttttttgaaaatgtcaacaaaaacagaagacgaactcatcaaactcttgtagtttaaacaaacccaaattatcaaccttagaatgctattattac

SEQ ID NO: 53448 - DNA, 1176 bp, Cannabis sativa
tggtttacaatgtgcaattcaattttttaaaacacaataacaagatctaattcgaattaaggaacgacatgttacgtataagtccgtttattattttttgtggttgcattataattgcataatcgttttataatagtttataaatattattatgcaggaattttttcattgacgggtaccaacaaatagcagttatacaaggtaagatttatgtaaatagttgcaaattagttttataatagttggaaattgatctgattcaaataaaactgatgaaaagcacagggatcacaattagtaagaactaaattgaaataacgaaaagatcaggagctcccaatcaatccaaatcaggtataaccaatacatataagttatattcagttgcatagtcgttttgttatgatttcaaaataaaatcaagcaacaactatgttaattggagttaagtaccatgttttttcaagttgatttacagttgcatcatcatttcataacagtttaattcaatttttacagaaatttattttggacagaagaaaaagagaaaacacttagacaaatggttagtttgcgaaataaatttaagggtttcttaaaagtttcatttcactgttattatagtttaataacagcaataaaacaaaaaaaatgacaaaaacagggttcgaaactggaaatacaagacttgaacagaggaaaggaaatagaagtaagtttctattctatttcataaatgtattttttttgtcataaaaatcagtgtcaaaaatgttcgtctacaatactaacattagcaataacagaatcaaaatagtttcaaaatcgttgccttgcgctaatgataatttcaaaatcacaggttaaagaagacattccattcctagtcttttgcaatggacaatttcatgagcgaataaactatgaaaattatgaagctagtggacattacatttcagtcaattgtaagtatgaagaattacaacggaagttgaaagaggttttggaatgcaaccaagaaaatgctgttttgcaactgaaatatcaagtcaaagaaggataccaaccgttgaggataaaggaagatcaaagctcgcatttctacatacaactaaaactaaaggagcccgacttcacaacatacccattgtgtgtgaatgttaggttttatgccct

SEQ ID NO: 53449 - DNA, 903 bp, Cannabis sativa
aacatcaacagatgctgatggatctccaagatcaaaagtggttatttcacttactttaccatctgctacaggtggaacttggaagtccttgtcaagcataaaactcgatgtctggtaattgaagttggcatttggagacaccattggccagaccggttgataattcacatcaccatgaccaagtacctacaattatgaactacaattaatcagatatgaatcacttgatatcacagaatgtagaaaaggcaaattttcttattcttaccagtggaattgcagcagatggtattggatttacaagatcagaagtgataatattgttgccaaatattggttcaccttccttgtggtgtggagcattttccttctgctttttcttcttcgagccagaattaagaggagttggcttctgcttatcagacttcctgcctcttttacgagagtcccacttcaaagagcaaatgacaaggatgaactcatcctgcatttttgaaaaatataaaaaggtattggtttcaatgtttagaccattgcattctcattcttacaagttctataatagctaattgtcagtgatcatacaaaatggaatacaacttattgtgatttagattttagaaccaaaattgaatcatgccaccttaatttcttgttgtaagaagaaagtttgcaccttcttactagaaagagtaagaaaaagaatcatcatttctttgtgcccaaactctttcggattttacaaactttttgatattaacaaaattgttgctttaatttttcatcactctggaaacatattatattagcactattagacaaccatattttccttcctaaaaagtcattgttttttataattgaaagatgtgatgtttgagtaattacatgtatcgtgtaatt

SEQ ID NO: 53450 - DNA, 821 bp, Cannabis sativa
tagcattagggcgttacaaaaacagtcaaaaagctgaaaataggtagtcatgaagtttttatttatgggaaaggtccatatagacaagagtaggacttatccgcatgcacttgttcatgtttatgttttaaattttccttttctcctttgaaagtggcaatattgtatggtgaacacttaacaatgtgtaacagacaaaaactgttactgttttgttatgtttagatatttaagaaaaaaaaaataaagtatatttggccaataaaatcaaaatctaagtttttcttacacaaatattcttagttataatcctaaaaaataatatatttttatatatataatcatataaatataatatttttttttatttctaataaataattataataaagtcacactaactagttttgctagaataatgtcatttagatcaaagttgttattctacccaaaaaaaaatttaaacttcttattatttttactcttgtaattagtctaaataaatgtttcatttcgtttagtttcgataaattttgttttttaattttagaattaaaagaatttttttcagaagtgtttagataaaaaataaaaaatatttattctaatttaaaagtcatttgggaagaacttaagatttatatcttctctgaaaataccttttgagaatctatttttacaattaagataatttattcctaatttacacaaaaaatatcttttttcttagggaaaaatacagaaaaatacaaaaaagaaaaaaaattacgaaaatactatgggccggcccattaaatatttatacagtccacatacaaata

SEQ ID NO: 53451 - DNA, 666 bp, Cannabis sativa
agagagagagagagaggaatagggttggaattttcgggttgtggggattattcagatggtggtttggcctggtggtggtcggagaatggatgggtggttgtgcgataatgaacagagggagatggtgggagatgcggctgagagggaattagggtttctagtttttaggtttcacgattagggtttttttttccagtttttaatttaattatgttttatatttttttatttcaaaacatttttttttacctaatttcaaattatttttttaattttttatttttttaaataattatttgtgtggaccaagaaaattgtgccatgtgtacactgtatacacgtggatagtccaatgtggtacttaacacctaaaaatgaatgaaaagtgctaacagaacatgagtttaaggggttttatcatcaaaattttagaaatgggggttagttgcaataaactaagaacttatggatgttatgccgcaaatcacactttttaaaattaacttgacattgtacatttgtgcttccaatccagacaaagcctcaatacaacatcaataatttcttccattgggtcatatgcttttggttctctgcaatattggttcacagacagtaaaactcacttttgttgcttttttcgcttccaacatatagttgtcttcg

SEQ ID NO: 53452 - DNA, 1183 bp, Cannabis sativa
  modified_base (1142)..(1151): a, c, t, g, unknown or other
tctctgatgagatcctgacctctttcagtagtgttctcattgaactgccttatcaggtcactggcttctctattgtggtggtgtagctcctcctggtgagatcaaaggatgtacactcggtcatccatccatctcaaaaattttcatctctgttgtgtaaatacatcgcaatcaacagcacatggttcttcagtttggccgacttgacaaacgacttctctaagtttcgctaacttgagatcttctccgaagtctacacggggtcactaatggatgcctcaccaattctcggccccgtctctctagcataatactagggacgaggtctagttctgttgcccgagggctactccatgtgggtccttccttcagtgggacgcatcagtggagggtcctccttaggaggcatgggtctattattcaaatctacaggaataattgtgtcgacctagcaagttatggtggccagattcatggcacctgccaaggtcacaggagtggccacatgcgtcaggttcgtcgaaactctagttgtgattggaacacgaacatcaggatctatagtcatagggtcttgaggaatacttgaccctatgactgtagctgttggttaacccttatttttgatcatataaattaacaacacactcggtagttgttggttagagcacccatttggtaagcatgaggtcttgagttcaactctcaacaaaagcacaaaactattgaccttggatttggccaaccgacagtgagttgaagttaatgctgatgtttgccacgtggtgcacaattagaacagaaatgtacatagacacaagattttacagagctttggcccctttagttagcaggtaatgacctactccccttttagttttattgatattgggaggtaataccacttagatcactatagtaatgagatataaagtggctctcttaagattacatgtgaaaaccaaagttagtgaatcttaagtgagagtaaagccctgttcatgagagagagagagggaacagatgagtgatcagacttagagcataaggctttgggtttgactaaggctctttatatagcggagcttacattcctatcatctcttagaaataggtaaataatgttatagtgagatttctcnnnnnnnnnnactcgagaccagactcctatttaaaggacacg

SEQ ID NO: 53453 - DNA, 1778 bp, Cannabis sativa
catgagagttatgagcacgaggtattcgagaaacaaatcactttcttgaatttctgtagcaactcgcaagttagggcgagatatttagctaaacgccctcctctcgccagatattccctgtttacctgacagacaacgatctgggaatcgctaaaggcttgtaaatacttgatcttcatctcaagagtgagtttcaatcctacgatcaaagtctcatacttggcttgattgttagatgcggaaaattcaaatctgagtgtagcatgtaccttaaaattactagggcttatgagtattatacctccccctgagccttcagtgttggaggctccatcaacatacaaagtccatctttcattgtttggtacgtcaagatcaattctttcttttataagtgccaccttagtacttggaaatttgagtatgaaatctacaagggcttgtcccttgatcgcggatttaggcttatacttgatgtcgaactggctcagctccactgaccattataacaatctacccgaggcttctggttctgctaaaacttgtctcagagggtagtttgtcaaaacttcaatactacgggcttggaaaaaaggttgcaatttcctcgatgctattactattgcgaatgcccatttctccatctgcagataacgagattcagcgtccaggagacgcttgctgacatagtacgctggatactgcttcccctggtcttcgcggattagtaccgaactaatcgcgtattcagacactgcgaggtaaatggataatatttctccaggcatcggcttggaaagaattgggggccgccccaaatgtaatttgtgggcctgaaaagcctcttcacacttctcagtccactgaaactttttattaccttttaaaatttgaaaaaactctttgcacttatctgaggaacgtgatataaagcgattcaaagcagcgactttacctgtaaggctttggacctcttttggtttggttggagattgcatttccaccaaagctttaatttttgtgggattggcttcgattcctcgctgatttaccataaagccaaggaattttcttgatccgactccaaagacacatttaagagggttgagtcgcattttaaatcgttgcagtatttcgaacattgcttgtaggtgggtgacatggtcctttgcatgttgaaattttacgagcatatcgtcaacatatacttccatggtttcgccaaccaggtctgcgaacatcatgtttactaacctctgatatgttgtcctgcatttatcaaaccaaaaggcattaccttgtaacaatataaacctcgatctataatgaaagaggtatgttcctggtctggttcatacatcagaatttggttatatcttgagtatgtgtccataaaactgagaagttcatgaccaatttgggtagaaagactcccttatgaagccacatgccaaaaggcgatctacttcctctttcagcgcttggaaccttgcgaagaagaaagacggaaccctacgaatgtgtattgattattaggagttaaacaagcttaccattaagaacaaatatcctttacctcgaatagatgatctgtttgatcaactgaaggggaagacagtcttttccaaaatcgatcttcgctcaggctatcatcagctgagaattcgagggaaagatatcccgaaacctgcattccgtactcggtatggacactatgaattccttgtgatgtcttttggactcactaatgccccagcggcattcatggatttgatgaa

SEQ ID NO: 53454 - DNA, 1852 bp, Cannabis sativa
tttaattatgaaattaagttattaatcatgatttgtgcatttgtggatatttatttgaatttagaatatgttaattatgttatgtatgaaatttcttgatttctgtaattgtgctcggttgtagtggaacgtggcgttgggcctttagagagtgacgtcttcatatggtttaagattttattaataggagggccatggttagatattggtggtctcaagaattttttgggtttcgaaatgaccagactacccttgaatattaataaacttttggattatgtataggggcaaattggtcatttttctagggattctttttgtctttttgtgagtttattttgaggataatactcagattttaaatcaaatttattaaataatgggttagatttatctttatagaaattagaaggaaaaacctagaaagagacaactctctctctctcgaattctctaaggaacaagctagggcttggatttctcagcttctgttgtaagattctagcaggttttgagtgtcctaattcgaggtaaactccttttagcttctccctctttgatttccttaagctcaagttaagtttaaatgtttgaattttgatattacgttgttgtgttgtagattagtgtttgatttggtgttctgaagttcaatcggggttgttaggtttaattaagttggatttattagttgtgttgatgtttgaacaaagttttaatttaagaactaaaacctcgctttctaatggtgatttggatttctgaaccaattgttgagtgttatttcttgatttgagttcattgaagtataagaaagtattctagaggttattgtgcaatttggggctgatttgaggtattaggagcatttttggggttccgtgcactgaactagaatttcagtttagggggacctataggaaccagaatttcggttggtccccaggaaaccccaccgaactgaaattgttgttggggaactggtctaccagttggggaagttttgcaaatcctaaattgtcttgtttttgtaatatttagggcatttccatgttatctatcgataggggaaacttcagctttgatttaagtccccaaaattttttttagtgtgtctctcatcagaattacgaatattttgatatagggccttgtaaagggtcgagcggctattctactcaggcttatcgacatacctgagcacggaaataaggtaagattagcataaatattatatatgcatgttgtgtttcagattgtatatgttttgggtgatttcatagcgacacaaccattgtgttaattcggaagtataggcaccatactgattaagagtgatattcaccccaaaaaatattaattggcactatcatagaggcacaaccattgtgtcagttcggcagtacgagcatagtactagttaagagtgatatcatggccaattatacttttgggtgttattgatgctatcaaagtagtacaaacatagtgtcggtcctgcagtgtgaccatagtgctggtagtgggtgatattatggtcaatagcaccaaccattatgatctttcttaatcatttggtaagtcttgtggcaaggtgcatgggcacctagacacaagttgataatatatgatttgttgtatgcttttcttactgagtctattagctcatacattctacttttatgtgtaggtaaagtgaaggcggaagcttaaccgaagtgagatccgagcccgagtgatgattgtacatgccaggatggcacgacctaaagtgttcagtcttgggacatcttggggctatattttgttgtcgttgagcaacaagttttaaaatattttcaaaaagtttgta

SEQ ID NO: 53455 - DNA, 735 bp, Cannabis sativa
tgcaaatgccaggcaggagcgagctggaaaccaggaaattccatagcatgatgcgagaaatactagaaatcagcttaggacaggtcgacccctaaggcatccacagaggtctacttgcaacgatagagatagtgcacacacttacttaagtaggggtagtgtgtaaaatctcttttgaagaagagggccaacgcaagaagagtcacatgagattgtctcaagtagagatccaagtggatcaaggtcaaggacccgcagaaaaagtagattaactcgagctcatgcccatgataggcgaacgcaagataagggtggatgacgatgttattataaaggtgactaagagagtattagtaactctcaaggttaccaatccaaaagttactcggggacaagatctgtgagtaattatgataaggcatcacgaccttaatctttgcaatcaactaaaccaaagatagcctgacttatgcgagcatttaaattgtaatgcgccagatttacacaattaagtaaatcaaaatgcatgtgtacaacaaccaaggaagcaatagcccgtggatccaatacaattgcgagtaatacaattagaaaataagttcaggaaataccgggatggagaatatggaaaactaccggggtacgactcagacgaagaggcagaaccattccatcttgatattttcaatttacaatttcctcaaggattcaaaagcccccatgttgcatagtatg

SEQ ID NO: 53456 - DNA, 902 bp, Cannabis sativa
ataattaaatttcatgcatattattatagatgcatttttgaagtcaatataagcatcccatcacaaacaaacaaattcctaattttgttgactttattaacttgatcatcttgtaaattttgatattgtgggaaatgagatttaaacttaaaaccttctaatggagaaaaaatgtggtataattggagtatgtgtctatgaccactaatcattttcatcttgtaaattaccatggacattttccttattatccaaaaaaaataacaagaaatagaataactaaaaattaggtaggaatagaataaatatggactataacattgggaccctctagacacaagttactcatattgttattaggcaccagttatgcttatcactttctagacatgttgttttacgattgtcaacaatattctttaaaagttatttcattaagttatattacatctgatatttaattgcactaatatcgatattgacacgtaagagagcgtactttatagtatttctcttctataaaaggttaattttacttttctttaaatcgttatataattgatcgaactgtacatgagattggtccaatcactatgtgaaagagtctattctagtttgcctagtttcttctttttcaacttagaatggcatcaattattgtataacaaaatgtggtcaaataattgttcaagcattcgacctataatatcattagaagcacttaaatttatttatttagatatatggtggttttggaaatttatgtactagatttgtaaaaaagttattttggtaggctttttatctatttcgacatttagaaaaataaatttagtccatttttttttcatgatcacggtagctaggctaattataatttttagaaaattttgagtagttta

SEQ ID NO: 53457 - DNA, 1192 bp, Cannabis sativa
  modified_base (357)..(360): a, c, t, g, unknown or other
tttgtaactcctcatatattacaattttatgtgtattattatactatatatgatataatataacctccaacacataatatatattaatttcatattaatatagaatattctacattttaatcttcattatatatttgttaaataacaaatatataacaattcgttgttcaggattcgtggccggtgaaacccttacatttcttggattttacagtgcaggatccattgccggtgaattacgagatcgaccacgcctctttcgggtttgcaccaccatcgtgtttatgattaaatttgaagtaaatagcgagcttgagttcaactctcaatgaaagcaccaaaatgttgatctcgctnnnngccaacgacaatgagtcttaattgtaagtgataaatgatataatttagatgtagtatgaaaagataaataaagaacacagagtttttaaagaggttcgaccccgagcagttcaataataacctactctttatttgtattgacttaagaacaaagaatacaatgattcttctcttagagctcttacaatgaaatctctgagtatgccctcttagattagttttttttcgatcccctgccaagtgagaatatatcactatttatagggctatgtgcttgaggaatggtttccctttgcttacaatttttataatcagtagattacacattacatatatagaatacacagattgagggattcagacatcttgccatatttctgtgatacgatcccagattaatagggattacccttgtgcttcacgatgtgaacactgaaattactaagtgttgatatgttattcggattgtacactactcgactgggaggacctcatccgtacaggtatacacggtgctcgactcgaaacatctccttcaaacatatatgtggaatcacttccacgtgtcattaacatgtgatgccacaccagagtgcaaaaattaggataacaaatacgaatactctttaaaagtaattgaattcaattcgtatcattctctgtaaggaatgatgaacaataaatacatgtcacatgtatttaaagaacattagttatgttcattgttattcgtatactttatgtttcaatgcaattttcttaatcttatttttgggtattcaaagcctactataaaattgttgagttttgtgccctaaataaaacccattac

SEQ ID NO: 53458 - DNA, 1140 bp, Cannabis sativa
catactcacacaacacaacacacaagcaccctacttgctccgtcacacacccacactacatactcacacctcaccatgcatacacccccacatggctcgcgtgcaagcctcctacttgcaccactacacaattgcaccttgccatgccagcatacacgcacggcttgctgtgagcgcccttcttgcttcaatacgcactcgcacatgatcgctcatatttacatgtgcaccccctcatgcgcacaattctcatccacatatatacaacttctccctcctatgccagtactctcgtcattagatcactaagggactaaacatcgaatcacacaggtgctccaccgtaggtcgaacggatgctccactacttgcataaaggctccatgactcacccaaatgcacttagctcacccaatagccatggctcgcacaacagcccatgggcttgcacaatagccatgggctcgcataccaagttgtcacaattcagcagtcttagtattttggccattactctctcaatatatatatatcaaaattgggcgattcaagatgcgttgaaaatatgagaaagagacctgtgaatcttatgtttatgacaagatccaattctaaacgtatcactatgaaaatcctctaacaattgtaacttagtaagttgatcttactaactctactcatgagttgttacggggttgacctctgagttgcacggatataccctgagacttgcaagcatggattctcgagattaatgagtcttaggccatatgcgttgattcagtcattcttcgaccgactcttacagtggatgtctctcgaccgctgggactaattgttgactaatctcgaaaagcagctctgtcaatttttggggttaacacttgcctccttgttacgaattttatatttactacgcaagtatacgcaatcaagtagtatctcacgcaagtgaggtcgaacaacagggaattggactaagtactactaaattatacttatgagtctatctggtaaaacaatactttttgtgaataaaatagtacaattcaaaaaattaaaaagaataaatgaagattaatcaagatgagagattagggaggtgaatcctgctgttaagttaccaatgttaatacctaa

SEQ ID NO: 53459 - DNA, 1670 bp, Cannabis sativa
tatatatatattttaaatttaaaattctatacttcaaatatttaacaaagcaaaaaataacttcaaattttgaatataatttacataactaatatttttatatatcaatatttatttttctacaaataaaattatatttcttctcaaatttttaaaataactacaaataataaatatatatacaaaaataaaaaaaatctaaaattttattttatgcacaataattttcttatttcttttttttttttacattgaaaattataaacataaaaaatatatatatttttttaaaatgttattctactcaaatattgtcatgattttaatatctaaaattacttataatttttttaaaaaatttaatatgaaattgtccaactaattaaattacttaatttatttacacaaatatatatatatatatatttaaattaaattttaataataaagaataattaaattataaaatgcacatatctcaaagatattattcatatatgctggctgagattttcggcaactagatctttaatgtaataatgatagcttaggaagagttaatgcaaatatttttacgtggtttgagcattaattagccttagtccacgagtctccgttattaataggtgggtgtttcttacagagaatgttctgttttattttcccgatcccctcatcaatattgttgaggggtatttatagcaattagcaggaagaagaaatgtctcaattgtcaaagtgccatagctgttacagaatacgctataagtgtcgtgctgattagagaagaaaacaacgtccaacatccagtctactatagcagcaaaagactcattgaagctgaagaacgatatccattgatagaaaagcttacttactacctaatcttagcaacaaggaagttaaggccttacttctaggctcatcctattcgggtatacaccgaccaaccattacaccaagtattgcaaaaacctaatgcttttggacggttacttaaatggacggtagagttgggtcagtacgaaataatctttcaaccccgaacagcagccaagggacaagccttagcagactttatagttgacttgacaggcaaagaagaaagtaacacaagggacaacctggagccacgtggaacaacaatgaagacagacctaaatgaaaatttcacgtagatgggtcagctacagatcagctgtctagtgtaggaatttcccttgtcatacctaggggcaacctctgcacggggcagtaaaatttggattcaagcttccaacaacgaagcaaagtatgaagccctcattctggcttgaaacttgctcgggagctgcatgctgaatacattgaggtctgtagcgattcacaatcggtagtaaatcatgtgtcgggagagtacgaggcctgggggagaaaatgatagcttatctaagcaaaatacaggatctgctcgcacaattcaagggttacaccctcagccaaattccaagagaagaaaacacaattgctgatgccttagcccgacttgcgagctgcacagtgactgataaggcaattcaattagaagagcccaacatcacttatgcagaggaaatcaaaatgatagacacaactctgaactggatgacatccatagtagcctacctcaatactggagaacttccaaatga

SEQ ID NO: 53460 - DNA, 1403 bp, Cannabis sativa
cacagcctcagaatcatcacacttgaccttctctaagcgatgtgggattacacagcttacccagtatttccccttatggatcacggaactactgtctgtcacacaatgtgatgaattaccttttaatatacagcagtgatgaattacctcgtaatacacatgagtgatgaatcatctcgtattacacggcagtaatgatttgcctcgtattacgcaacaacaatgcatctcctcaaaatatatgctcaataatgcacctcttcataaataatatggtctgaccaagttaaagaccacttcaaagactacttctttgtatttttaaatataaacggttatttatacttatctaaatgtacaatttatgtatgaagcatgagtattaactaagataagattgagtaaccacaatcttattcttataaatatgagttcactcaaagggaaaatggaataattctgatttatagaaactttgtcaaattgtaaatacaaccaaaactcaaaaataatatgaactcgtaaagtatgtaaattttaactacaaaattacgtaaaaatatttgatgttcacttattatttgtctcttctttttttgaataagtaattttcttaaattaagttgacaaaaaattatgtcaacagcagttaacagttaaatttaaactgtaaaatgttaatgacatcgtaattttaagagttttgttactaaaatttaaatttaagaatttttttgaatgaatattcataagctttattaaacttcaaactctgttaccaaacatgatagcagcttagtcgggatattaaaaatttaagaattaattgttaaggaaatgaaaatattaaaaatttggttgcaatttacacttgatagaatagtaggggagaaaaataagaccaactttctatttttccaagatttcctttaatggaataatcaatatgagctgtcataccaaaaattacaattattatttcaagaataaatataggggtaaatatgtaattttaaatcttattatcagtcggtgcatgcatggcttagctgtttttttctttttaataaatataaataaaatcccttaaaaaaaaataaataaataaaattgatttgccgtaggttaatattgaccaaagtcaaatttgaccaaatgataaagaaagagaatcttaattttattttttagaaaaaaaaacaattaattttgatttttaattttagccatcaatttttttttttattccttggcccccctaaattttgtgtaatattgttaagcaaaaaaacaaacaaataaatgaataaataaatttctcttatttcattttattttgggtaaatactattttggacattgtgttttacaaaagttactgattggaccttctattttgttaa

SEQ ID NO: 53461 - DNA, 1989 bp, Cannabis sativa
ggcttttctttgtttctctgctgcatcttatgtgacaggccaagttatttacgttgatggtggatttactgttagtggcttcccaaacccatctccagatcatgatgaggattagaactagaagattatatatacatttcaagatttacataaatatgcagtggatgcaactctctacctcaaataaattagttcggtgtgttttattggtcgatactgatataaatatgaagaataattaataatatctatgaaactatgtaacacttgcacgtacgcacaatattattgttttttatgggatttgcacgctagagcatctttaaggagctcattaaatttactgttacactattaataaatttggtgtgaaaaactatatttattccaattaggacaccaaaaattatattaagaaaatatttcttattattatatttgttagattaaaattttattatgggcacatatgtataatgtatatgttattataaagtgtgatataaaattaagttaccaattatgttatgtgtatcaaaagggtaataaattatcatggaaataatgtaaataccataagttaatttataatttgttaagggaccaaattagaaatactcaaaactcattatataataagcctataaataggttgtggtacccaagaaacactaagagtttctgtattctctccttctccatcagagaaaatacctaaaaaaatagtgtattctctgaagatgaaaaccttaaatctccaacaattgcatcaggttagtgcttccgctcatcttttatcatcatcatcttctttaattacgcaaaggttatataaatttatgatttagggttttctatattaaagcacttttaggaatatatttagatctctgatatttatatttgttgagtgttttataaatcttaacaagtggtattagatttacttttactgaattgattgaaaatgtgatgattttattgttcatgaaaatttggaaaatttggagattttaaaaaaattaaaaaaattaagtaattaagtttttgattttttttttttttgaataatactactgccgcattttttttctagatacaatcatatatatatttcgtttgaatgggttgatgggaatatacatatgtgtatatatattgtatttttggtggactttgattggtgttaattgttacagagttgatttgcataacacaatgaccactcaatatatatcttgatgtgtggtctagagacgaaacatgtagagaagtaatcgaacaagcttgggccatcaaactccgcggctccagaagttggcaattggttgcccgcttggacaatacccgaagatgcttgtcgaagtggaataaaactcattttggcatctgtgaagagaagttgaggattctcaataatcttctaattgagattcaaggccgtgttccgtctaaagcaaatctgaagttggaagctgatattgttcttgaaattgatgaggttgaggcaaggcaagcggatatctggaagtaaaaatctcgtgagctttggtatagccatggagaccggaactcgaagttcttccatgctgccacgtgatcaagaggaaacgcaattttatttttgcagtgtgtggatggtaattcctggctcgaaggaaagcaacccattggaaattattttcgttctaatttcatgtctgtgcttacttcgacatcccctgctacccataatatttatggcctgatctcttcgggtgttttagcagaggctaatcaggttttgattaggaaacctacggagaaagagatcaaggaggtggtctgggcaatgtctccccttaaagccccgggtcatgatgggatgctcgaaaatttttttatagatcactaggttacggtgggaaaagatgttgtggccgcaggactcgtttcttcgagactagagagtttgccaaagaaattaatcagacttttgtagtcttgatc

SEQ ID NO: 53462 - DNA, 919 bp, Cannabis sativa
  modified_base (440)..(442): a, c, t, g, unknown or other
accatttagttattaattttgtgttttatctttgaaaattgcttaatgatttagatcaccttaatcaataatatattattttattttgttatttgcttaaaattaaattagtaaattagagtttagttttattaggagtgattttttatattatatatatatatatttatttatagggtaaatactattttagaccttgtgatttacaaaagttatcaattggaccctttatttttttaaatttttttaaatgataataaatgataaaaataaaatggactcaaaatggactctgtggactctgtatttttcaaaatagtacaaataggaccctaaactaattttttgtcaaaataaaatttaatatttgatctacatgtgttatgacaaaactgtttaaattttttgtatctgctcgtgttaggaattgtcttcaagtnnnttatattaaaaaaaaaattgtcaaaaattaagctcatgattctatttttaccattttagaaaatacaaggttcattttgtcatttaataaaataaagagtctaatcggtaatttttgcaaaatacaagatctaaaatagtatttatctttatttatatgttaaattcacatataattattttttatgaatactaaatataattgttatatattatcttttatatttttaggggcattgaagttacatgcacacataaattattagctatattgatttttttttttggtttttgttttgaatgtgaatagattaaaaatatatttgaaagtgacataaacaatgtgccactcataactatgggagaagatttgggcatagctgctgatgattaatatgatgatatttctagtgaaagattgattgatatgataaatgcactttctcatgaggagaaaaagtttctaaggatgttctac

SEQ ID NO: 53463 - DNA, 1298 bp, Cannabis sativa
aacaaagtttttcaaatctataatgtagtgttattttataatatatatatatacatatagtgaattgaagtatttttttttttaaatggtaacttcatttgaggttgatcaaatggtaagagccgcgtaagggtgataatttgtgtttgcgggtcgtattcgtatcgtgttgtgtcgagacccatgtataacaagaatatactcgactgtcgacctgaacacgacccgtttattaatcagaaaataaaattcgaacacgatctgtatatataaaagggttgacacgacatgagccgtgtaatccgtttataagcatgttttatttaaatatgtcaatcaataacaagtttagagatattcaacatgtttatgacctgttaaagtacaaaaaataactttaaatatgtcattaacaaattagtttcgtgttagccatgtcaactcgaacacgacttgtttattaaatgagttagacaagtcaacccaagcccatttaaaccaaacccaaccccttaactttggtataaatttctagttgtgttatcgtatctacccattttgttgaccctacctacacgtctagcgaaaaaaccaaaatctcaccaagagataataattgttggccaacaacactaatttgaaagaagcaataagttcaaggctcacacaggagcataaagaggaacaaacttcttataaaaggcttaacaccaacgccactaaagacataaggtgcacaacactgaaagagctaaaaaaactaaaataaataaacctaaaccaaacaaaaaaattaaaaaaaaaaacaaaaaaatttacagttgcaaaggttattagcaacattaggagcactgataactttcaagaaaagtccacattcaacatcccattgtgaacaacactaaaatattttgattcatttgatcagccataaactttggtatttacgccgtaaattactcttaaaaatattctactccatccgactagtttcgggggttcgaatctttacctcacatttctatgtgtagtgctttagtgtaatttgtatccttttgtctgaaaatgtgcttatatgtataataactagttcatgaaatgtgttctcaatctttcaaaccacatgtcgtttatttgaagagttctgtttcaaacattctctacttctgcaatgagagccttcaaaagaaaacaagagcatatcaatcaagaatacaaacttcagactaccatttctgacggcagagaagatcgaatacaagacattgacgagtcgagaacgaaatcttaaactttca

SEQ ID NO: 53464 - DNA, 1054 bp, Cannabis sativa
accggtcgaccggttgctacaggctcccaggaaccggaattccggttctggattgggaaccaaaaatccgaccgccacacctcaaatcattcccaaacttcccaaaaaccttcagaacacctgtatacactataatagcctcaaaccaacaaaaagaacacaacaataaacacagaaactcaaaccaccattagagctttaacctagagctcataaaccccaatttgacataaacaacaaaacaaccacctagcctaaaccataccagcagtaaaaatcataacaaaacatcaaaatacagtttagaacaatctttaaacaagcagccacaaaaatcattcaattccaccatcaacacacaacttagacttgagaaaacataagaaaagatagctaggaaatgataccttaagttgaaaccttagaattcaactagaattctggataaacaattgaagactcaaaaattccttgctgcctttttacaaaaatcgaaagagagagagagaagcttgagagaatggcaaagttagggctttctattctcttttcaaaataaagagtaaatacacactttaattaaaatattttaataaaagggctgaaacaaataggacaaaagagttaatcacataatctcttttaattaatttaatttcttttccctttaaataaaaatcaaagattttaaaagaaaatggaataggataataattaacaagggcattttagttaagaactaacccgaaaaaaaccaacactattaaatctaacgatgatgccccgaaaaataataaaatgctttaatacccaaagtacgactctctaaaggcccaacgtcgctttccacagtttccgaacacaaacacagaaattgaataatttacataagatagcataataaacatatatgatataaaatgtatttccaaaatatgcatttcataataattaatttaatctcatacacaaaccctaattttttaataattcaaggtactaatcatatgcggtctttacacaaggcctggtctctgaagtcctttagctcctt

SEQ ID NO: 53465 - DNA, 1222 bp, Cannabis sativa
ttagcattagggcgttacagactaacatcttattccattcttgtcccaacaataaaagactaacatttgtccattttatttattacatgttaacgataattcttccgttagtttaaaaactgttagtcaaaaaaacaataattatcattgcattgagaattgacattgttctttttttttttaaagtttctttattctttatgtgcatgtattacaaaattatattaattttgttttaaatttataattttatgaaattcttttataattttttttcataaaattagtatatactcaataataattttttaattatatatattttatagtgtatttaattattaaaattgaacattttctcttacattttttttttcactgatggtataaaaacaaataaaaaacttatgtgataacaaattgatatagcataaatgtttatttaaaatcattgaatatatatatagtacatatataaaattatataattgaaaagtattataagatgcatataacaaaagaaatacttcttacactaatatgattggagaatgtaaataaataaataaataaataattcatttgaatataaatttcacttgtcccataacttatttctatccaaacttaaaaaaaaattataaattgtaaatttaaaacaaattaatttatttttttcctctatgcaaaaaaaaaaaaaaggaaaaaaaaatagagtaacataatttcaataaaataatatacttatatatttgttataaagaaatagtataattaattgttagtgatattataaggtgataattccagtgaaaaaagtaattaggttgctaaataaaattacaataaatgataaattttacaaatgaaataaaattatttttatacaattaaaaaagtaattagacaataaaacctactctttcaagagaaaataaataaaaatgtctccttcattagataaagataataaagtaaagtaatttaataaaataaaatatatattttttgatataataaaataaaatatttaaatagttttttttaaccccaaatatttgaattgttataacataatattttggataagttttagtctataatagactaagggccagtttggcacagctgtgctgtgggaaaaaggagctgtggctgtgctgcgagaaaaagtagctgtagctgtgctgtgagaaaaaactactgagtgtttggtaaatat

SEQ ID NO: 53466 - DNA, 1027 bp, Cannabis sativa
ctagcctcacgcttgagttgaatgaggtctttctcctacttggtatcaccaactcggtttggcttggccttcttcttcttttccttcaagggcttcgacacaaaatcctcaaggaagagcttgtacttcacatagtcagcctcagtggtcgacaaagtgatgttttgagcagcttctggcagttgaagaattttttgtgccctctcttgagtcccaatgtaataggaggacggcagtacgaggaaatttgctgaaaccgagtgtggacggtattcatgtcatgcacaaagtattactcatccacaaaatgccttattttactgaccccagagtccacagtacccttcagccatttctcgtccaattgggagaagtaaaaataccccgacatgctctgcttaggagttgacttcaggtcgaaaagccagttggtgtcgtgcagagatggctcaccccatccttgggaagcatagaggatgaaaagggcagataaatatttgatgcccttcaaagtgaactgagttgggctgaggtggtagtaatctgcaatcctcttcaagtacggaagcaaaggcagcattgcaccatgattagtatgagcacccaaccaggcacaatatccttgtgttggactagttgctcggtaatttagagaagggaaaagcatttgacacctcccaggtatccatccctctccaaattcctcatcttggcttgggttactatagatggacgaaaaacacaccgagcttctagggtaccttgccttctttgaggaacaacttcggtgtattcctcagtgacgtagtcaacaccttttactaagacatcaccagcctccgacacggttccctttccttattgtaatcaccgaagcacaatctccgagcaactccctcttccttgacttcagatggactataaaaatggacctcgccctgatcctccacctcttggacttcaatgtccccttcattatccccttcctcagcagcaggtcgaacctgttcagcgctcagcatcgtgg

SEQ ID NO: 53467 - DNA, 1358 bp, Cannabis sativa
cccaaccttggaagcaaaatctctcctttcagcgcttcagtggtgtatcaacgagcatttcttagtccaagaggtggaaacagattgcaaagccattactgatgctctctctggccataaagaagatatgtcggtttttggtgacatcattaaacaacaaatcaagaatactttctttatcttatttcccagctgctcggctctgccacattaatcgtgatgccaacatcctggccgataaactagctcaccgagctcttgggttagatgaagcagccgtttggattggagacgacccctgcaatttatttgattttctgtcttcctagtgggctcctttctttcaaaaaaaaaaaaaaaaaaaaagttttcaattcaatttttcaactacagttttgatattcattttctctccacaatcaaaaaccaaaatcgttttttctttttaaaaatttgatcttctccaccatctccattcccccaatccattgttaaaaaaattagagaaaatgagtgttaaatctctagccaataaagctaaaggtaaacgctctattaataaagacaatgattctaattattttgctctccccattagcaaatgtgatcgtcattctccttagaagaaatcaaaaattattgaggatgaaaaaacttatttccctgagactaagaagttgaagaagcaaccagacgaaatcattaaacttttatttccgtttcatttttgttttgcctaagcttttaaatattacatatgttatgggttgttttttacacttgattttattctaggttttagttttttcttatgtttgaatgtttgattagaaatattattattgttttgaaattattttagatttaagttgtttttttatttttagggttattttcaattttgcaactttcttattgtttgttttattattagtaatttgtattctttttctttttatattttgtgattttttttttatgggtttgccataaattagtgtatgtaatgtttttttacatggtgtagttgctttgttttattttctttgtttattagttttataatggtttcttttcaattttaaaacatttttgtgtgtgtacatatgtaggattagaaaacacattccattctttgttatttgtatattgtcttgcttttatgttttgtgaattgtgatattttttatgcttttgggttttttctaatttagaaggggaaatttcacttttcagctataataaaatactcaatatcaaattttagatcccttattaatttatacaaattaattcctttaattatatgaactttttatatccttttaaaaaaaaaattgttaaaatctgaaattgtt

SEQ ID NO: 53468 - DNA, 2484 bp, Cannabis sativa
tcttgtattaggtgaaaaggagagtacacacttgtcaggattaatttcttggccagatgctttgatgtagatatccaaaacttttttaattgaccttgttgattgatgatttgcacgacagaaaagcacactatcatcgacaaaaaaatagatgtgacacagatggagctgatctagagacttttaatccctgtaaagaaccgatgctttcttcatactgcaatagccttgagaaaccttcagcataaatgaggaaaagaaaaaagcgagagtggatcgccttaccgtgtacccttggttggaaccaaatctccatgtacacctccatttaaaagaaaagaataagaaactgactgtaaacaacagagtataagctgtacaatagttgttctaaatcccatcttcaacattacttgagccacatagtgcaattctacacggttaaaggccttgctcatatccaatttaattgtcgcataaccttttgaaccacgtttcctattcttaagagaatgtaatagctcaaatgccacaagaacattgttaataatcaatctttgagacaagaatgcactttgatattcggatataaccaatggtagaaacggttggagcctaaggagaattgatttggagactagcttatagagaacagtacacaaactgatgggacaaaattgagtgatgaggttaggcttcttaactttggggatgagtgttatgatggtcttgtttagtattgcaggatctgcaccattattgaggacatcaagtactgaaggagtaacaagagagccaacaatgtgccaataattggtgaagaacatcatagacattccattatatgcagggcttttatcattactcatagtattcaaagcatttagaacatctaaagccgtgtatgcctgtatggagctaaaatgatatgctgggaattctcatcaattatagttggtatggttgccaatatggtattaatagcttggtcatggccaccttggctgctgaagatggtttgaaagtagctttaaataatatcaatcagagcaagtgtactggcttgtgtgttgccatttgaatccttaagctttttaatgtgattattggtagatctggcattagcacgctgataaaaaaaatttgtattagaatcacctgactgcatccatgtaattctagatctttgatgccaacaatcctctttttttgctaacagctcatccaagattgactcagaattccgtagtgctgtaaaatggtcaggatcagttctagtagaattctggagagcagcaacatggtcatgagaatcttttatttctttcttcaattttccaaaagtagcatattgctatttctgcatatcagttgcacaattagagatgttggtagtcacttgagaaagtgggttaatggtgttatggttccaatttgcaagaatgatatcatcacatgttttttcctgcagccaaattttctctaagcgaaaacgagatctataagctggtgtgttaatctggtcaatcagtgcaataatggttgctttgatagctcgatgattttatttagaaaagtccaaatccttcaaagatggagcatgaaaagttgattcccagtgaacatttataaaaccatagtcaagtcgttccttaacattaccattcccctgacttttgttagtccatgttattctttctccttcatatggaattcgacaaagatgacaactatcaatagtggcacagaaggcatcaatttgtgagatacttcgccttggacccccaattttatcttcatttgaaatgacttcatcgaaatctcatagtacaagccaaggagactgtggggctatatcaaaacatcttcttaacagtgtccaggtataagttctcatagtgacacaaggatgtccatagaacccactaaaatgcaaagatggcccatcttaactttccacaaatcaatcaatgtggttggatgaaaaattatttagtgataggttgacatgggaattccataagagcataagaccaccaccttgcccttgtcttgtaacctctaagttgtgagtgaagtgtaatttattacgaaacttatttatactaccatactttaacttagtttccataataaaaagaacacagggagcctgctctttgacaagtaagcgtaaatgcctaaatacactcaggttccttaagtcccgcgcattccaacttacaaaattcatggttgtgagtggtgttgcttaacaacaaccgctggaaattcagactgctgctctcttgaatctgaaagattgttggaaacaggcagggccgaagaatagtcagtaggtgctgaagagtctaactgaccatgaatggcattagatcgataatatttgagaacattcctaagtgattcagagtcgaattggcatttaaactgtttgttaggattgatattctctgagtcaacatcaaaggcaatgacaacttt

SEQ ID NO: 53469 - DNA, 1203 bp, Cannabis sativa
  modified_base (1153)..(1156): a, c, t, g, unknown or other
aagtccttgatctcatggttgaccaaacactgctttacctttgcctacacaatagagcacccgtgagccccaaggcccagcaagacagaaaatgatacaatatgataattataataataattacacttcaaatagtacgccattgcgtatatataaattgtgccactgcacttcattacattattcaatataataatgtcactactataattgtttatgtagcatagacttacgtcttacgctcacacgtctttttacatttaaggccttactagggtttttctcagttaaaattactgagtctaacctggttatgccttacccgcataacactacacagatattcatttaacaaattattgcataattataacaatacgtacttagggtaataatcctaggtcacaatctaataacaatcgaatatcgtataactgcgctaccacgctatactctatgtgcttagtttaccggttggaccctctattttgttaattgataaaatagatcctgcattttctaaaatagtaaaaataggattctgagcttaattttagacaactttttttcttagtacaaccaacttgaagacaattcctaacacgaatagatatagaaaatataaacagttttgtcataacaccttttaatcaaattattattaattttattttgacaaaaaaaatcagttcagggtcctatttgtgctattttggaaaatacagggtccattttatcatttaacaaaacagaagatctaagtggtaacttttgcaaaatacaggatccaaaatagtatttacccgattaaaaaatatctaaatgtataacaatatatgttccttcttttatagatttttatttattaaaaataattaactaataaaataattatcaaaaaaatgaaaaaaaaaaaatagtatcttctagaatttttaaactgctatgtgcctcatattttatattatgccaaaagaattttaccttctttaattattatttttcttaaaaaaaaaattctcttaaaaataattgtgaattttaccaataatgacattatagtcattagccacacatactagggtcagtttggcacgattatgttgtgggggaaaatagctgtaaagacggcttagtttaatttggaaattannnnttaatcatgtttaattatgaaaatgatttatagctatttaaataatt

SEQ ID NO: 53470 - DNA, 1939 bp, Cannabis sativa
ccccactcgtgactctctctttgaagatcctcttcacgatggcaaaactatgctcaaaatttggaacctcaacaaggtaattagttaattgatgataaccaaaattaaccaaaacccaatttctatctaatatgggattcttttactaatagttattttttatttttattttcttggttttgttacagtacactggggttcttggatcattcaattttcaaagaggaggttgctgcagaaagactaggtgtaaccaatgtgcttctcaatgttgccattgtggtgacctaagttcaatgccaatgacaaaaagtggaaaaatagaaagaatctaattttcattattgggttggaattactttattgaagtaattgcatcatgatatgttctttttattatgtaatcgcatcattattggccattcaaaataattattttgcataaggcggaggctagaacacatctactttagaatttaagcagtaatccaggcatttaagcaagtatttatgattgtaaatttatttcataggccacatcagatgatttttgaggtccctcatgtactttatcagaggtccttaattttaaattcattctacaatccttcaatacaaacaatcagatttcaaccgtaagtatttcggtatttgaatgaaatgaggagcttcttctatttaacatatatgtaagtatacaacaattcttttttattattattattatattttagaaactgaatttgatttaaatttggcttctactactgctttggtctattgtcctacagattacaaggtttggaccttattttttttcataaatatctcgtggaaaagaagaaatggatgatcctcaacacacctgacctagatcaattgaatgagttatttgatgttcatagttttcttttcaagaatgctaattgatagttttcttttcaacacaccaggatcaattaatagttttcttttcaggtttaaatctttcctaacagtagtttaatcataatttttcatctatgtatttacatgccttcatgctttgcatcattatttttctttttgttatcagttgccatttaatttgtcttttttctttctctttttggattttttgggtattgtattagtgattattgatttaactttgcatatataccttttacaattgcaaaaaaatatgattctgacttttgtctgatcttcttactaatattctcataggcaccctcataatttgtatgtatgtgtaatttacttatctcccattttacttttttcttcaaaataaatgcaatccagttatgacaatatataagttggtcatggtagatatcctatattggggtttcagctattgacttgagtaaactctggagtaatttatttcttatattttagcattatgtaattagtatattcatagagatgtttgaaacagatttttgtgttctattatgccaccattaattattaaactactacgactttgtttctttgttctttagatgtactaagaatgcaaattttaactatatagaggaaatgtctgtatctttcctaaagcaagcataaattcatgggtaactttttatttatattaaaaataaaataatttattaataaaaataaaataatttatgagaaattcatggtcaccttttattaatataataaaataaatctcattaaaccaaaaaatacaattaccaaaatatcgatattagacgaataaaatgataatgagaacaatcgaaccgagatatttgagagacctcaattcatccaagagacaaagctcaatgccatacaattccaatacctcactcacatctcctatatatatactgcccaattcatacaaccaacctctcattacaattactccttaaccttctttatttactatccaaaggcctaacaaatacatagataa

SEQ ID NO: 53471 - DNA, 1335 bp, Cannabis sativa
ttaattttattatacatttgatcttaaaatatcgtttcagtatacctttatttatttcggcatgcagtagaggttttttgatttaatttttttcaccatcacatatgatgcaattatctgaaaccatttaaaatttttacagttctcaaaaataagattcaaatattttagtgcagatctaactaattttaataatatatatgtatgatagcaactattttaacttttattttagcagtgtaaattacatagaattttctaaaaatttacggttgattataaaaaaaacggcaacatatgcgatcataaaacatatattaaactaaaaagttcttctattgtgagtgagggtgtatcgaaatggtctagatgtaatacatattttccctatatttattaggggtgttaatttatccaattcacactattttgatcataatgcattcgatttgcactaagtgcgagtttcatattttgaattcaatccaatccgcataataacacaaatccaatccaatctacaaaagtacagattggatcggttactttggattaattactttttaatattgaattatttaatatttattaaaaaaaaattcacataactaacaataaaaaataataatgtattgttgatttatatctccaacaatagattaaaataaataaaacaaaaataacaaattcaaagcaagaagaaaaaaattatttgtataaagaaaggtttaatttagttttagattatattttccttaaataaaaatagaatatgcatttggtttattatgttttaaaatatattgtatcatatgtatttaattttttaaattatttacattaaaaattaaaatattaattatatgtatatattctatttaaaatatatataaatatgtgtgaatttggttggatcagttacttctacatgtcaaacgcataaatagggattttaaattttccaattcaatctaatccgtactttgcgaatcgtatggattaaattgaattgagtattttatgaacacccctacatatattataaatcaatacaataatataagttcaaaattaattagactaattattgtatttatcacacaaaaaatcaaaatttatattttacccacattaagagtttctagttgaaaacacccctataattatacccttttttataatttctcttttctaatatttcaagaaaactttctctttttttggcataagtctaacttggttggagttgtgttttgttattatgatttaatattgagaatgtaagtaaatggccatatttctaactctatagatagttaatgtccattttttaaa

SEQ ID NO: 53472 - DNA, 2998 bp, Cannabis sativa
tctggttacagttttgagcgccttggggtctaggtccggttacggttccaggtccatgtcctagtttcggtcccattctcacgtcctattctacttccattttcggctctaattttgggtcacagggtaccagttcgggtctaggttcgggtctgggattgggttcacgtctgggtctggcttcgtgtcctagtctgtgttcaggtccggggttggtcaccagatgcagacagcggctatgggttcggtccaagcactgggtccagatccgaatcacgatcttaggtcccagttttgttccatttcaggtgacaagtcacgagctgggtcctaggttcaagttcgagtcgtgggtcaggtactaggtccctgtccttgttccggttcctaggtccctatcccaattctatgtcacagtcccatttcttgtttgggtttttatcctagtctaggttcgtttgagtcctagtcttggtttggtttgggtctcggtctagatttttatcggggttcgggtttgggtttaggtcctagtcttggcagagtcctagtccgattctaattcttgttgtgattcagagactgagtttggatttgagttcaggtcggggtttaatccctggtctaagtttgggttcgggtccagattttggtctaggtatggatcaggctccgagtgtgggttcgggtccttggtgtgggtccaggtccatgttcaagtcccaaggtttgaactcgatctgtgtttgggtacaattctaggtgtaagtcctgggttccaatctcggtctgtgttcgagttcaggtttaggtccaggtctatgtttgggtcttattctaggtctgggtctgagtttgggtcctgagttcaggtccgatttttggttcaagtctgggttcaggttttatcctggtctatgtctagggttgtgttcgagtcccgagtctatgttttagtccagtttgtagtctgggttcgggtccaggtctcggtcccagtctttgtctttgttcatgtttgggtccttattagggtctagatcctggtctcggtcgctggtctcaggtctcgtgagggtttcggattaggtcaggtctaggtcccgatctatgttcagatcccaagtctcatgtcccaatcctagtcaagatctcagtccaggtcctggtcttagttggatatggtttgggttcggttctcgtctcaagtctgggttttattctcggtccaggttggggtcggggtccaagtcttagtccgaatcttggtacgggtgttttggaacctggtctgggtccaggtctgagtctgggtctaggtcccatgtttcgattctagtttgggtctgggtcggtattggggtctgggtctacgttcgtgtccatgtgcaggtccgaatcctagtttaggttaggggcttggtctgagtttaggatcgagttccaagttctgacgcccaagatctgatcctagttcaggggcccaatttccaagtctgggtcccccgtcgatgttcgggtccttggtcccagtccgagtccaagttcgtgtttctgtttgagttcgggtctggtctgagtccaggtcctggttagggttcgagtctaagttcaggttccaacccagttcttggtctaggtccgggtctcggtctgggtctaggtcccattcttggtttaggtccctagtcacaagtccccgtccaggtgccaagtcccagtatgagttcttgtctgagtatgggtttaggtttgggtcctgttactgtctcatgtctgggttctagtacagacctagtctgattccaattctgggtctgagatcgggtttggatcccggtttggtctgagttttggtctggatctcggtctaggtctcagtccaggtataggtacgtatccaggtccgagacctagatacaaacactgactacgtgttacgtcaaagccgtaggtccaaattcggttctctgtcttggatctcggtcttgttccattcccaatcctgggtctttggctgggtccttaatttgggtttggttctgggttcggggtgttgtgtccctgtagtcaggtcgtcagttttaggtccaaggtcaggtcccgtgtctcgagtctagggtcaagttttgggtctccgtcccggttttagggcatagtttcaagtccaagtgcctcatctaggtcttgatccctggtccagatctgggtccaggttcgggtttggggcccaagtcccccatctaggtccggatcctaggtcccgatcaaggtccaagttcaggttcgagtttggctccaaagttgggtctgagtctaggtcccagtatgggttcaagtttgagtttgggtccgggtcttgatctcagtccaagtccctatttgtgtccgggtcggaggcacacgatccgatccggcgggtcgtcccaccccactcaaggaaggtctagatcccagaccaggttctggtctgggttaaggtcttcgtttaggtcctgagtttaggtctaggtttgggtttggatccgggtctgggtcttggtcttgggttccaatctcggtatgggtattggtctaggcccgtgtccaggttagggtttagggtttggggttttgggtttagtattgagggatttagggtttaggatttagggcttaggtcttaggggtaactgtaaagagtttagggtttaaggtttaaggtttagggtttaatggtccacttcctgttccggttccaatctcgagtcacaaggtacgatttaaggtttgggtgtgggtcttagtccgagtcctggtttgggtctaggtccatgttttggttttggttcaggggttcaggtctgaaggtctgagtctttgtccccaatctaaacaccaaccacatgtcgagtctagttcgagttctggtatgggttctggttttggttcgggtcgaggtcgaattccctaatttagacaccgactatgggtcgggtccaagcctcgggtcttgggt

SEQ ID NO: 53473 - DNA, 1041 bp, Cannabis sativa
aagagctgtttgtgatccgttgtaagctcaaagtgctaccggtccaaaaagacgagccaaacttctgctatctctccttcaacctccatttaggacctttcgaccaatgttgtcagttttagtgttggggtctttgacctgtttcaaaatccacaaatttacacccacaaatttcccgatatttggccttgtaggattctttcaaatatcacgttcagccctgtgatctcttaaagctcgtttgttatacccacacttttaagacctaaacgtgaaattagtgtattagagttatcccacattattaatgtagaaataaattttcatatataagatcctctcattgccaattaattttaaaataaaatcatattcactttatttaaaataataaaaataagtaactgaatataagtgtattacatattgtaagtagttctattaccgaagtacatacatcaatctatatatatttatatataaataagaagaatagagcggtggcatagcactctatagtctctccaaagctatttttctcttttctccttaattctcttatttttaatattttattagaggataaatctacaaagtgatattttactattattttaataaattttttataaaaaatatctagcataaactaattatttttttttaaaaaaaaaaaattatgtatatttatataatattatacgttgttgttattattattattattatatttgttaaataaataaatttatatatatttataccataattaacaaaaaataataactactgttaaaaataaataaataaacaaaaatataatttttttaaatattactcatcaattaattagtcacatttttttttcttttttaaactataatcaatatatatcatatatttttctaattcttttaaccgccatgtatatataggtacacaattttgtcccgtgatgtactttcacggaatgtatttcgtggtacattagatgggtctaagggtattagatgagtatcagggtacgttactattttttaa

SEQ ID NO: 53474 - DNA, 746 bp, Cannabis sativa
tggtaataaataaaagatttggacatccacataattattaattatatataacagtttcttttttttaattttttttttaaaaaaagtaactttccttatatattaatattacaaaattattaaaaaaaaataatataaaaggaattaataacattttgctattgaatatgggagtgacacataataaaaaaaaaatatctgtatatatagatattttttgtgactctacctaagcattatcccaatacatatatcacattattatcaaatttattagtattatgttttttttcaatttcttttaattttagtggactttaaaaaaaattattgaccttctaactttagtttcataaatatcaattatgctaatatgctaactaataaatataaacatatataatttcaactatttatataattttatttttatttcatcgtcacttctcttattacaccatttatttatatttattaatttttattaaaagcatacaatatcttatgattttttttttttttgaatagatatcttatgatattttactaataagttaattgttttttttttcacacgttactatacttagttttagagcatatatatattatgcacgaaaataacattttggatgcagaattttacattaataatttacaaagtaacaaaccatttatctctaactaaatttatatatttatataatgcttttgcaagataatgtgatgtagcattttatgttgat

SEQ ID NO: 53475 - DNA, 972 bp, Cannabis sativa
gcgtttaaataattattgtataaaaataaatttaatgaaaaatattttttaaagttgtgggaaaattacaaatttagtgtagaattaaattaactcaaacttaaacaacaaacaattaacaatgacaagatttaaccatccacacactaatcgggagataaaataagaatgaatggagtaattgaaaccaaaaacaaataaagcaacaaaacagcaccaagatatatattggttcaagtcatatagatcgatgtgatctatggctttactcgagttttgaaatactactaaatcttctttattgattgagcaagaacataatacaatacagtcgagatcgattctctgtaagattctcacaaagtgtttatctctcacactcttatctaagaatcttctttatttacagaaaattctttatacaaaactcaaactcaatctctctcttttctctgtacctctctctctctacctctcaatctttttctatcaagatcacctctcgaaactcatttgaacttattcttttttgaaatgctaagtgttggtggtatttataggtttaggacatagatcctaaagttggtggctgaagatgttaagttgtgaagttagtgacgactttacaaacccatcgtaatagtatctctacgttagcataagttgaagtgctttcgggtgaggcgtacacttcctaaaagacagaccaaagcgtgcgttgaaggaacttcccgaataggaaaggcaacaattggagtcgactattagggactccctttcagggggaacaactgaccattcaaaactccttttcgaagggaggttagctttcctgaagactcctcctaagtggacatgataggcatctgttctagatggcatctatcactccacgagacttcttctggatagacaatttagacttccacgaactccctttctttttttttgaaaagggaatagacccacata

SEQ ID NO: 53476 - DNA, 2193 bp, Cannabis sativa
aaattgcaagaacatcatcatatgaaatatattctgtccttcttgatgggtttatcggaaaaattctcccaagttagaggaagcattctcttgatggatcctctcccggaagtcaatcgggtctttcatcttgttactcaagaagaaaatcaaaaagggaattttgatgcagaaaatgaccctaataccagccatgctttttccttccaaggtgacagaaacaaatctgataatcaatctcagaaatctcaaaatcccaagaaaggaagacccttttgcactaattgtaacatccacggacacaccatagaaagatattacaagatccatggatatcctccagggtacaataagtctaataaatccaaagatgctgttgccaaccaagttcaatcggctgatgaaaattgcaccaaaaatgaagaagcacacactatactgcctcagttaagtgcaactcagtaccaacaattgcttaacctccttgctaatcaacatggtaacttgcttgtgactgatcctagcacttctatagaaaattctggtaagatcttaacctattcttcatctaaaatttttgatacttcttggatcatagactcgggtgccactaggcacatttgtaacaacatgaagttgtttcaacatatcagtaatgtctcctctactagacttattctacctaataatgaaattcttttagttaataaaagtggtactattcctatctctaaaaatctcattcttgaaaatgttttatatgttccaagtttcaagtttaatataatctctgttagcagcctgactaataatgatttaatagaagtaaaattcagtgctgatagttttgttatccaggaaaaatcactcaagaatgtgattggaagaggtaaagaacacaatggtttgtacatcttggatgacacacatttcgccactgctatctgcaacatcaccgtgacagccgatgtgtggcattctcgaatggggcatccttctcataaacgtttggctttaatttgcaacaatctcaactgtaaatttgatgatgttcataagagtaatccttgttttgtttgtcctttagcaaaacaaagaaagctcccttttccaaagcattcaggttctgcaaaatgtatttttgatatgatacattgtgatacttgggggccttatcacattccctctcattctaatcacaaatactttcttactttggttgatgataaaactagattcacttggatttttctaatgaagcaaaaatctgatgctgttcaaattattcctaattttctatcctatgttcaaactcaatttcagtgtaccttcaaatgttttcgatccgataatgctcctgagttaacttttaaggatctttttgctaaatatggcattttacatgaatttacatgcgttgaaacccctgaacaatatgctatagctgaaaggaaacaccaacacctcttaaatgttgctagagcactttattttcaggccaaagttcccattcagttctggagtgattgcattatgactcctgcctacctcatcaaccgcactcctacgcctaatctcaacaataaatgtccttatgaattaatgtacaatgaaatgccaaaatatgaacatttaaggaattttagctgccttgccttcactagtacactcacggctcacagaaataaattcactcctagagcccgaacttgtgttttcataggattaccctcaaggtatcaaagggtacaaattatatgatttaaataacaaagaaatttttgtttccaggaatgtcactttccatgaaaagatttatccttttcatcgacttaacactgctactgatttagcagaccctttttcaaatctggttttaccttctaaacacatatcacatacttatgttgatgattttcctactgttatggatcacattacacatactaacaatccttctcaggttgacatctcccaacaggaaacaaatcaacaagaagattgcctccctcaagaagatgctgctacagacaacgataatacaacatcctccaatgcaccagaccaagtcctcagacgcaccagcagggtcccaaaacctcctgcgtatttgcgtgactatgaatgtcactctgtcatacaagacaaatcctctacccctcattgtctacaaaaatttctatcatatgaaaa

SEQ ID NO: 53477 - DNA, 1104 bp, Cannabis sativa
tgtgagatgttaatatcttcagtatgtgaaacataaattccattagtactgggactattttctgatgcacttattgttagatgtgaagctttaacgtttctacaatgattaaatgatatatgtgtttgttgtgcatttcgtacttttaagtttctcactaccaaattctcacaattatgaaaagttatagcctgtaaaatatttaattatattaataaaataaatataaatacaaaacaaaaaaatagatgtaattaggtgcaaatacttaccgttggcgcttgtttacacagctgaaaaatatttaagaaagaaaaagttagttacgttttaatattagaaagaaaaatatatattactctaaaaaaaaatttgatggtaataatataataagtgattacttacttgagatttgttcattttgcatggtttgttccaccatatatcaccatagccatctaaggtaccaccaccttggactagtaaatttttgacattgtcaaaaatgagccatcgactaccatattcaccataatctgattgctcattagatgcaactattgttccaagaatttcaaaattaagttgctcgaattggcatggaccaccgaattttataggcttgaggtgatactttttctcttttggaaccaccaaaattactcttcctttggtagagcatgctttctgccatgccctagtaaaagcctacgtaaatataagtataatgagtacatattcaacaagactaatgataataataataatataagtataaaagttgtttattatatcaaaatggtaatcgtacctgagtatcataagtgtagtttataacagacttattattgtttgggttaaaattttcaactacataagtagttgttgaggtagtagttctacctaagcaaaatggtactgaagagaaggagagcacgattagaacagagattatatgcagcaatgaagtcatggtttttatgattagaataaagatttgaaggtattgaattcgttttgaagtggattaatgtaaatattatgtgtatttataggaaagagaatactgtaatcctattaggattttgaatataatcctattag

SEQ ID NO: 53478 - DNA, 1363 bp, Cannabis sativa
  modified_base (923)..(923): a, c, t, g, unknown or other
aggtagttagggtgttacacaaaggtattgggtttgtatgaaaaatattttggggagacatgattgaagaagcttatggtataggaaagcctaaatgatcatttcaactacctttaccctaagcctaacattacaagcctagaaagactttctgattcttggttgtgcattaatttatattagtggagaatagtaagtattgtaagcctatggaagtttgggttagtggattgatgattgtaattggcatgcataaagtggttcaatttttagttaattgcattttatggtttcatgagctgaatgaaaataaagtgaagtatatcaagggtgtaagtgaactcaaattctggattgtatgtataagtaaaaattttcataatcatgttattaagtttacttaaaaattacttatgttctggagattgacttgtttaacttttatttttcgatttagtgttttactcgaggacgagtaaaagtttaatttggggaaatttgttaggttatttttagtattaaatttaaattaattttagtatattttttaatttagtttaaatcgtgtttggcgcatttcacgcttgttatctttttatttttgcagatttaaaatagaagaagattagaaaatatcaaaggaataagatgaaaaaaaaaaagataaaaaaatctcacaaaaagatagatatataaaatagagaaaattgtggaagaaaataaagctgaaacttcaagcctgaattcgacaatcttctgattagattttggaaaaatacaaaacataaaagttctagatctctcttttatctttctgtaacatcttgaatcgtccaattccgaccaacattgagagagttatggccaaaatactatcagtcaacgtagtagaaaaatcatcgtcgaaacgaagccatctggtnaactccaacacgggccgcggcccagcccttttgaggccacggcccgcctccctaaatgcacaaaaattatattttcctctcacgtgggctttggtggtttcctaatttgaataggcatttaacttgtgcgtttttatatctttttagtccctgaaagcttatataaagggtgaactagagttgatttcagtgaagcatttcagaaggaaaaaaatagcacacaaatgagtacaaatttcaaagaccaaagttaatactgaaggcattcttcagagggttttcaacgttcttttcttctcttttcttaaagttaatatgtgtgattttgattttataaacatgagtagctaaacacttaattagggttagatggatattatttgatattgctttatcgtattaatatgatttatttctcccccaatttttatgtattctat

SEQ ID NO: 53479 - DNA, 1373 bp, Cannabis sativa
ctggaatgctaatcacctccgaaagtattaccaatagttgaaaaataaagtttatgttctgtaaagtaaatttgtactggacaaatatatgcaacctctaatttcactttgtaagactgagtgacttaaaaattgattttcatgtcactcaggaggtagtaaggcatatcacaaggacaaatgtaaacagatcaaatttaaggaagttaaaaattatatatattcaaacataatataagttgtttagatcccaaagaaaagctttagaaagaaaaaaaacggagggcctggggacgggccataaatgtctccccttaagaaaaagaaaataaattgtcgtgaagaagggagaaggattggatatgtaataaaaaaaaaaagagaagataatgatagtaatggtgctaaacaagcggtttaatcaactcggggtggaagatgagggcccctgcgctcctctaacattgcgtctagccttttcttcttttcccagaagcggacaaggacctcttcaggcttggggtaaaaactgaggttaagactctggccattggtctgccaggccatgaagactacatcgtcaaaacgcttcttgtagtgttggcaggtgattggggccaggagggcatctctcttcgccttagccgcctccttctgagtctgctccttgaattcacgaagccccttcacttcaacagttaggttggctgtcgtttgcaaatcagcttgatgcagctcttctagagactttagcttggcggtcaattcctgcactgactccttggcatcccagagctcccgccttgcattggccactgccgcatccctgaccttcagcgcatcatccttagccttcagttcctcagccttcgcctgcagcgactcctggtggctccgctccataatggcctccttctgttgggcctcctcccggatagatctcctctgtgcctccaagtcccgaagactcttcatggcctcttccatgcccccaaactcagacatggtgtacccatggtcaagtagagtcttcaaaagacgaccagtctcttcagcaatctggaaaaacaagaaaaatgtgtaattacatgatgccaagcaccaaaagacaaaaagcccaaaaacacctctaacagatagaaacttaccgcgatcatgggtgcacttatgtccaggatctggtgtaccggttggtggaagcacaagccgcctatctcttcatgggaagttggactagaccggtggaaaaatggatcattagctctgaggaaaaaggagcaagagtaggcctgataaagccattgaaccagtcggtcaaaggatccaaatttagatcccagacgttcttggcgtactcgctgcgtgcaaaattg

SEQ ID NO: 53480 - DNA, 859 bp, Cannabis sativa
  modified_base (812)..(812): a, c, t, g, unknown or other
actaagcaagggcaaaattgtaagaaaagggattctatgttttgtttattaattgaaagactttattaagtctaattaaaaaaatatattagatgacaatattatttaataattaatttttagttctgatagcaaaagctgctaagtatgaccttgagattgatcaaatggatgttaaaacggcattcctacatggcacacttgatgaaaagatttatatgacacaaccagagggatttgacaatgggaatcccaatcaagtatgcctactgctcaagtcactatatggtttgacacaggctccgagacaatggaatttgaggtttgatgagttcatgaaggccattggattcagtcaaagtaggtatgatccttgtgcttactttaatcaacatgtctatctattgttgtatgtagatgatatgttattaattggtaaaaatagatctgagataaacaagataaaagaaaagcttaatgcggaattcaaaatgaaggacctaggatcagctaaaaagatcctaggcattgacataaaaaggaacataccccattctatcttcttatctcagaaaggatacctgcagaaagttctaaccaggtttggaatggaaaatgccaaacctgtctcaacaccattagctcatcatttcagactttcaaaaaatcaatctccaaaaacagagagagaaagggctaatatggattgcataccatatgccaatgctgttggcagtttaatgtatgccatggtttgtaccagacttgacattggatatgctatgagcatggtgagcagatttctcactgancctgggcagcaacactggtctgctcttaaatggactctaaggtacat

SEQ ID NO: 53481 - DNA, 1005 bp, Cannabis sativa
tagtaaatgaaagtttactgtgaagctctttacatggtgataatatttgtagcattaaaatatttctataaaagaagtttgaggataataataacttaattttattgtcaaaaaaataataacttaattttagtggtgcacactttctacttaaaaaaaaaggaaaaattttggtggtgcaccagtaattaggaaacatagatattcatggctgaggtatggtccaaacccaatattaaaatttgaaaatgtggacagacaaacaaaataaaccacataaatttatctctatatttgatatctactaagtttatttgtgaaagactctacgacaaaatctaaaatattggtcatataaagcatatatgaattcacatccatttatttggttatttaaactctttcaaacgaagttcatctaatttaatttgtaaaataatattaataataaacaacaagaaaatcattttaaaacataagtctagttcctcattcgaaaaaagagaaagaaaaaaaaaaaacataaaagtaacaaaagaatcatggtaaaaaagaagttcaaaaagataaataattaagctattaaccacaaacttttgtcctatttttttttttaattaaaatattaacaatgtgatttggtgtaaatgtgtaatgacttgtgattttttttttttctttctttttttggaaatgcatgagcatgacttatgatttcttttaagcaataggagataattcttgtgattttgtcaactcaagtgccttcataatgaaaagttgaaaaacaagatatatacgatttaagccttttcaattatttactgttttaactattcttttctttaaaccaattcgattgccttatagacaaaatctttgattcgtgtagtttgcaatttactaatatatatgcaattccaaaactaagagcatctccaaggatacactgaatttagtgttacactatcattaaatttggcgttaaaaaatatttttactcca

SEQ ID NO: 53482 - DNA, 1075 bp, Cannabis sativa
tagagatatcttgttagttaattatgttaattctatcatcactcgagagaggttaatagattatattagaattcttgaaactacaaattatataataaattagataattggtgaatttagattcataatttgaaatagggaaatcaatgttttatgcctttactttctaattaaaattattatttgtctgtttactttttagttattttattatttcattcttaattattatttattttaaattttctaattaaagtataaaatcaaaaaaatataataattagtgaatttaataatcaatccttgtggggtcgacttagaattaaaatttcggtataacaacactttacgcttgcaataaaaaattgtgtatcaatgtgtaataaaaaaagaaaatggtggtttctcatgaaaaagataatgggttgcacgagaaaaggaaaatcaagccaatacttacatttcacaataaggaaaaaatgcatattttaagatttcctgatgcaaagcacaaagtggacaatcgagacccaaaatatgaaagaattttttttactctccacatacattctcaaaatcagagggctttgcaaaaaaaacaattctatacagccgaaaattgatcacagacgagtgttgatacttacaaaattgaggtcgagatggtgcagatggtgctatcaaatggcgaaggtagtactgtgcatggcaacatcgaaggaatagtatgaggaaatctggtttgcttgaaggattttccagtttggagctctaaagaaaataacaagagagtaaaatgtgagaaaggagaaggcaaatgatacttataaccttcaaccctcgatcctggtcccttggtgatcctacggttcccttcaaattccaattaacacacaacgatctgacgactggggaagggtgtaaagaaacacatttatgaagggatgtttggagttatatccatccactacaagaccacttggcacgttcgtacgaataggcgtgctctgcgcaaatgtagcgtcatattgcaaaccttccagaaggaaactgaaaagagtatataatagcaagt

SEQ ID NO: 53483 - DNA, 1164 bp, Cannabis sativa
ggcagaagcggaggaatagctctcttatggaaaaatgagactgacattcaggtattagagttctcttcttcctacattgatgttagtgttcataacaatgataatatggtgtggagattaaccggctgctatggtgaacccaaccgaagtcttcgttcaaagacttgggatcttttgagaactctagctgacagaaataacctgccatggtgtgtaataggcgacttaaacaatgtctgctgcaatgaagataagagaggcggtaatgattatccttcttggttaattaatggattcaatcaagcactggtggactgcaatttgagagacctggagcttattggttatccttttacctgggaaaagggtagaggaacagacaattggattgaagttcgtttggatagagctatggctacacaaaattggttagaccatttcacttcagctaaactaatcaatattgatgtttcaagttctgaccatacaccaattcttcttgtgccttgtacctatgatgcaactacagtcaaaaaaagatttcgttttgaaaattattggctccgagagccaatgtgtactcaagtaattaaagaaagctggtctaattgtccatctaatgctattacggacaagatagcttattgtggtaacattttacaagtctggggagagagctttacgggcaacttcaaggacaggctaaaaaatctcaagaaagagatacatcattggaagaaaggaagggatgattattctgttcagaaacataaagaagccgagcaaaacctttttgaagcatacactcagagggaggttttttggaggcaaaggtcaaagcaactttggttgagggaaggtgatcataacagtaagtttttccatgcttatgcttctactcgaagaagaactaactcactgtcaaaacttcaaaatgctgctggtttttgggtggattggcaaagtgggttggccgatgttattacaagctattatacaaagcttttcacttcttctccacatacagctgaagagattactagaagcattcccacgactatcatagcagatcaaaatctgcttctgcttgcaccagtcaacgaagaagaagtcaccaaagcagtgaaacaaatgcatcttgacaaatccccgggacctgacgga

SEQ ID NO: 53484 - DNA, 713 bp, Cannabis sativa
ttacaattctcatgcagatgctctggcccgattggcctcgacaagagaagccgaattactcaatgtaattcctgtagacgtatttacccatccaacaatcaatcgagatgaaatgatgaaggttgatacagccaaaaaggtcacctggatgaccctgatagtagactacttgaaaacaggagtactcccagaagataaagtagaagctaaaaaagtgcgataccgagccgcttcatatgtcatttatgacaatgagctctatcgcaaaagctttagttagctattacttaagtgtatcaatgggactgagtgtgattatatactccgggaggtgcatggtggaatctacggcaatcacgccgggcgtaattcccttcctttaaaaatcatgaggcagaggtattactggccaacattgcgagcggatgcatctaggtttgctaaaaggtgcgacaaatgttagcgaatagctacatatatgaacagaccacccagccaattaatttctataacaagtccctggcccttcgcggtctagggcatagatttgattagagaattaccaaaaggtaaaggaggagtaaaatacgccgtagtcgctgttgattacttcacaaaatgggctgaagccaagccttttgcgactaactgctgccaaattgcaagagtttgtatacagcaccatcatctaaaggtttggtttaccttataag

SEQ ID NO: 53485 - DNA, 628 bp, Cannabis sativa
actagaatagaggatatataatatgcatgacaccttggcttggcatggcattatatattcttcctcaaattgataggcatttttagtgataaacaaaacataatgatcagtgcatgcatgcatggactatttggtataaaaatatatacatgcatataatatcgtttgtttgtataaaaatatttatatacttcataagatactagataatatgtatagatattctatattttgaaggtgggcttattttaattaatatttttagttgattgttgacataaattatattatcatcaggtgtaatatttaggtggctttgagaatttattacaaagccattattaaaagaaataataaaagggtttacaaataaattcaattctattatgtcaatatcttccctttatatataaattaaatcaccaataatagcataccatcaaaatggttcagtttcaaaatgttcttacgaaaataatgactattattatactccaagatagaaaaatagaataaggaggagaaattcactgcacacccaaagtcaatactcttgactccacaaatcttcttaattaaaacttaatttatttattttaaaaaaatattgtgtacaatacacaatata

SEQ ID NO: 53486 - DNA, 1931 bp, Cannabis sativa
gctagttagggtgttacactttatcaacatcttccattatatttttactagagaaattatattccatctgattaaaaacacaaaaaataaatcgaaaccactttcatcatacaacaataataaacattatgaaatcaaactaaaattagttttgccatacaacaataataaaaattatgaaaacaaaacaaaaaatagcatataataaaaataattgaaaccagtttcatcaatcaaccaaatacaaaaaatagctcaaaaaatactcacaaatataatcaaaatgacacacaatgcacgacaataggctaaaaataaaaaaaatatacaattacattataaaatggagcaaccccattactaggatacatccagacatggtctggagtgtgtactaatgcaggctgatcgggtcactgcttatgcctcccgtcaattaaaggaatatgaacagtgatacccaactcatgatttagaacttgccgcgatagtgtttgctttgatgatttggcggcattatctctacggagaaaaatgtaacatttacaccgaccataagagccttaaatacttctttaccgaaacagatttgaatatgagaaaggagtgttggttggagttggttatggattatgattgtgaaatcctttaccatcctgggaaggccaatgtagtggctaatgccctgagcaggaaaggtcccgggcaagtaaccagcgtgattaagatttcacctcagcttgtagatgacatggtcagatcaagcatcgagtttgctgtaggaaaacttcataatttgaagttacaatctgatctgttagaatgaattaaagctgctcagttaactaatccgaaattagtaaagatccaagaagaggttacagctggtcaagctaaagattttatgatatcagatattgggatgatattgtataagaccagggtttgtgttccaagaaatgaaaaactaagaagtgaaatcctcgaggaagctcataccactccatattcagtacatcctggcactaccaagatgtatcaagttattaaaccctactactagtggtgcgagataaagaaagatgtggtggatttgtatctcgatgcacttgtccacaaatcaaggctaaacatcagagactagtaggtttactaaaaccactgacacttcttgagtggaagtggaaggatgtcaccatggactttgtagttttgtcacctagaaccatggggatgtacaattttatttgggttgtggtagatcgatttacaaagtctcctgattttctaccagtaaaacaatctttacagtggatcagtatgcagagttaaatgtgaaagagatagtgaggttacatggtgctccaaaagtccattatatcagatagaaatttgaagttcacttcgaaattctggcagagtcttccagccgggcatgtaccaaactgaaattcaatatagccttccatcctcagactgatagacaatctgaaaggacaattcagatattggaaggcatgttatgagtctgtatggcagaaaatgtagatctcctattcattgggatgaaacgggacaaaagaaatacataggtccagaatcagagcaacggactaatgaagccatagaaaagattagggccagaatgcttgcctcacagagtaggaaaaagagttatgcagatccgaagcgcaaaaatgagaatttcaggtaggtgatcatgtgttccttcgggtgtctctgctgaaggggatcaaacatttcgagaaaagaggcaagttatgccctaggtttacatggcctttcgagattctcgaaaagattggactggtgtaatatcatctagcttttcctccaacactttcattgttcacaatgtgtttcatgtctctatgttatggaagtatgtttcatatcccactcatgtgctg

SEQ ID NO: 53487 - DNA, 991 bp, Cannabis sativa
attagtagatcttgattattgtctatttgggcagcccgttgattctagtctgccttgacatatttctgcaagtgcggattattctttctgattaagaattcaatttcccgcttcaggttgttgcattcattcgtgtcatggccctagtctgcatgaaaatggtagaacttggacgtgtctcttttacttacgtccttcttcatgggagcaagttttttgtccgggaccatagactgagttgttacgtagatcgtctctaggtcgtcagttaggacaaagaaggcagtgaacttggaggcattttctctaggggtgtgtttggctctgcctgtcaactttccctttttccctttttcccgttgccttgcctaccattgttattggacctttttctgcttggagctgagctgctagggtattatgggctctgagtaggtgctcctactgaggagacatgtggttggccctgcttaggttctatgatgtctacttgctgaatagcctctttgagcttgataaacccatcttctcggtctagaaactccgcaatagatcctacgaggccacatcttttaatgtccttccacagttctctgagtacctcgatgcaccccagtatggcggccaaccttcccacttcaattaatcttgcaactttcgtagcctgtgtcatgaaccttcttatgtaggctctgaggggctctcctagtctttgttttacttcgaccaggtcttctagatgtaatgggagttaacgagaggaggagaacttatcatgaaattctgaggaaaaagccttccatgaattaaatctccctagtggtagcttgaagtaccactgttgtgcggcttctgtaagtgtggaagggaatatcctgccctacacatcaccctgtactctttgcagatccatttgcatctcaaaatatttaagatgtgacaaggtatcctctttccttgtgtacatcttccaggtcagcatcttgaactt

SEQ ID NO: 53488 - DNA, 1515 bp, Cannabis sativa
actcattttatcttttattaaaatcaatctaatactcaaactataaagtccataaaagaaaaaagagggtttcctatctactgacccttttgccctcatcaatagcttagatatttaaatcatccaagggtattttagtcattaacaatccccattaatgtctgacatttctaaagtctaacaatgatgcactgttaataaaattctatatcacacacaaaacgtgaatctctaatagcccaacgtcactttccaccgataccgaacacaatcacaaaaacgaaaaattcacatatagcataattaatatatattaaacttaaataaatctccacaatatgtatattgtaaataataattaaatctcatgaataaaccataattatttgataatccaacatatcaacatagtaggtcattacaattatccccctattaaaatgatttcatcctcgaaatctaacctgaatagctctggatattgagccctcatgtctgactccagctcccaagtggcttcttctaatttactattcctccagagcactttaaccaatcctaaggttttacttcgaaggactttctcctttctatttagaatttacactggttgttcatcataagataggttcggttgtaactctaatgcctcataactaaggatatgcattggatctgacacgtgctttctcagcatcaagacatgaaatatattatgaatagctaacaacgttggaggcaaggttaatcgataagcaacatgtcctaccttctcaagtatttcaaaaggtcatataaacctaagacttagcttgcctttctttcctaagcgctcgattgccttcattggtgatacccacaggaaaacatgatctcttgattgaaatgtaatatcccggcgcttaggattgcataacttttctgtctactctacgaagtaagcattcgagctttaattttgtctattgcctcagttgtcttttgtactaattcaaggcctaaaatctttccgttctcctgttttacccaatgaattggggagtgacattttctgccatagagtagcccgtagggagccattcctatggtaatttcataagtattgtattggagaattcaatcagcggcaaatacttgctccatgaacctccaaaatccatgacacaagctcgtaataaatcttcaactatttggatagttcgctcatattgcccgtctgtttgaggatgaaaggtcgtgctgaacttcaaactagtacccacgaccttctgtaaactcacccagaactttgatgtaaatttaggatctctgtccaagacaatagatttcggtaccccatgaaggagaccaatttccttcacatataagtcagcatactgatctactgtatatgttacttttacaggcaagaaatgcgatgtctttgtaaaacgatccactatgacccaaactgagtcgtacattcccgtggtcctaggtaaactaaccacgaaatccatcgcaatgtcctcccac

SEQ ID NO: 53489 - DNA, 1211 bp, Cannabis sativa
taaacaattttattttgcactttaaaagtcatatgtaatgacttaatctgaaaagaaattcctggtctgtaagatttgtaaaactaagctacttgtttttacaatgatcattttctttataagtaattcagtgtccattttttccccctttaataaaggtttgttagtttcttgaccatttatttgctcttaattatctgctattcttacataatttatgtccacccttttgagtatttaaagaggaattgagggaatgagtatcttccaagagggctcaatgatatggtggatcatatagctggctttggaattgttgaaagattcttttagaggatcagtgtgttatattaccccaggtatatagtttaattgaattgtttagatcagtggcatttaatttaaagcatgaatcttttgttttccattctaaaacttatgataatgacaactgttagctggcactgttgtcatggatgaagccgtcgaggaggaggagctgcaccacaagcgccaaccgccggaggaagcggaagcggtcgcctgagagaggttgggatttgagaagaagaacaggtcaggggagggaggagaggtaatttattttattttttctcttttaaatttcagtataataagatgaggataatttagtaaaagcacactcttacaacttaaaaataaattctttttttttaataattcagaaattaaagaaaatatccagttatttgtggtatgcataattcatggtcccacccatcaccatctacaaaatattaaagaaaaaaagatagtagaagagaagagtacatattaatggagacattattatcatctaggattgttctatttggaaaacctttgttatcattatcaaatacaaattgttatatcaatggtggcaacaatttgaggagtttgaatttcaaatgtagagttaatggtaacaaaaacgatgttgatgatgattatgattatgatgctcctctttcctccattgactcagcttgtgctcttcttggactccatcccacctcttcaccttcccaaatcaaagcagcttttcgccacaaagtattttcttctccttttttattttaggaaaaatctataggacaaggacactctttcggtgtgttttctgtttattttgatatttaagaaagtttttttagtctaattttttcagaaaattcttaatactttag

SEQ ID NO: 53490 - DNA, 681 bp, Cannabis sativa
taaatacaattaaatataataatagtaattttaattagccaaatgtaaaatttataaattatactattataatagttaaaccaaaaaaaataatattaatttgcaatatacatattttttttcaaaaaaaaaactaataataacaataacaataataaagacatacaaagaaatcagaaaatctacaaatcagaaaacacatactaaataataataaagaatataaatcacaaaataataataataaaggcatacatattatcaagtgattacaaaccagaaaatacatattatcaagtgattacaaaccaagaaaagtataacaaaaatcagaaaaatattatcaaaactcaaaaattcatgcccgtccatggtgatgagccaactaattatcgtatacagccatacactctaaacatccacaatcaccaacctcgaacaaccaccgtcgtcatcaatccgcatcgaaggggacgtcggagatcatggcagaagacgtcagagcccatccacttgcacaaattagagataggtagagagggagacgagggagctatgtgagacaaaggggacggagaccaagggcatttggggcaatgaagccgacggtggagcatcgaaggggacgtagaccgagggggcttgggcaaagacaagggtccttcattcgttgtcccaggg

SEQ ID NO: 53491 - DNA, 1139 bp, Cannabis sativa
ttctacaataaagacaaaaatattacccaacttctctataaattaatacatttttataaaaatacattaaataatatatatttattggtttaaaaaataaatatatttatttatactatattatattttataaattaatctaatgaggtgactcttggttggactggtatggcatggcatacagacactcaaaatataacttttatatttcatgcaggccttcattttatgatggttatactttatatagccagctaagtgaataaatacataattacatataatattattttttcattagaaagaaatatatttgtgttataaaatattattataaatatttaaattaatatataaattaatactacaaatacttaattatattttataaattttgtttttcactattaagattctctttctctccttctcatcatcttcttcctcttttctttttatctatttaaaattatttataataattttataacatgttattagtacgaatttttatccaagtctcaagatgaatattttgttaaacttcttgagttttttcaaggtcacgattcattaaatatatatttatatatatttatttgaaataatttcaagaactattttttttattatctataaatttatatattatatatgtatgtatatatttttattgttatatgtctattattgaatttatatgtatacacatatatatattatgtattcttattatttataatatttacaatatattttatataatttgtctctatgatatgatagagaatatgtataaattatacatatattttggagattatgtatgtatcttcgataaaatcttgtatatatcttgaaaattatgcaaacatgttatatagttgactgaaatttaataaaaaaaagatgaataacatatatatatagaatatttcttaataggtaatacacatggataggtattaaaaaaaaagattctgtgtactctttgatggattatttttcagagttaaagaaaaaaataaattattatttgattttatggttggaaaaagaaaaaaaaattagtagctttattatttttttttttctctttgttcttattctaagaatattctattagatttagtgtttga

SEQ ID NO: 53492 - DNA, 1149 bp, Cannabis sativa
aactattgggagttttctagggtgtatgcaccaacacatatttagtttagattatctattttataaaagttaaaaattaaattttgtattttttaaaacaatataaaactataaaatagtattactagcgatttttaataattttttttttttttgatataactaactttaacatgaacagatacagaaattctaatcagtgttgtcataacacatttaaactgagttattaccaagttttatttagacaaaaaaataaactctaagggtaaaatttcaaaaaatacagagtcaaatttattatttaacaaaataaaaagtctaatcaataacttttattaagcacttgattcaaaatggtatttatttttttaatatttaaattagttacaattttaattattttttatatatataataatgcatgttatagttatttaaggtattttgcaaatttttgagatttttaaaataatttatagtatcaaaaataagatttaaattgtttatttaaagtgcgtataaaataaaagaagcacgtgtacaataaactcttgaaaccttagagggttaaattataataaatttatcaaaaaattcacaaaaggagttagtgaaaattttcctaaaatatatacaaattaactgtttgaactctatatttttaataatttattttgtactctttaattttataaaaattataattaatattctaaaattaacataaaattaaacacgaaaataataataataaaaaaaattgaaactaaaataagtgttttataaaaataatttcaaatataaccaaactactctccaatttataactgaatgaacaaataaaaaaaaggtaacaatttaatactcataattaaaacaataatatttttttaattcttaaaaaatatattttttaaaaaataatgtattttgttacaaaatagaatgtttaaaaatataggatcattatatctaaaatgtaatgtttaaaataatactaactttactatagctgaaggtattttggtcatatttaaaaatattttaaccttaagatcctaattgaatattttacaaaacataaggtttaaataaaaaataaataaaaaaatttagagctcaaattgataattcatcgaaatatag

SEQ ID NO: 53493 - DNA, 3614 bp, Cannabis sativa
  modified_base (3581)..(3585): a, c, t, g, unknown or other
tgagagagacacggcagacctgttccagcaagagactgagaaaggacattcgatgaacaagtggtgggtggtttctgaggcatcattgcagaaagcacaagcggctattacaggtggtggtggcttttaagttttcaaaaacataaaattgttttcaaatctcaaaccattcaacccctaaattttcgtgcatgttaaaattgtgaaagttttcttatttctagttctcggcctcattttgagtttattgctctttagcagtgttttatgactataaaacatcttacttttagttacaaaagtgactaaaagtaaaaaagttgtgaataattataaattatcatttctatgttgtgacttaaaggatcatgcctaaatatattagtcacaaaatcacaatttattgtgactaaatgtgttttaagtcataatacttgttgtgactaaaacgaaattagtacaacttgtatctaaatactattttttaatcacaaatagctttttattgtgactaaaagtcacatttagtcacaaaaatttatgttgtgactaaataattattactaaaaatagttatcttttagtgtgatatgctatttctctctaaatatatatatatatatatatataataaagaatgaaaattcttaatttttttattcttctttttcaggtcactgagctaccgaaaatattcaaagtagagatatacttaacaagttcagagaaataacaaagtcatttgggaatcaagaaatggattctgaaaaattagaacagctgaaaatgactaaagcaggttagtttatttcataagcataaaattaatatcatgcataaattaataaattatagatactatatgttattttgctactttgcttgaacaacataatttatgattttgtttacaatgaaattcttaattaattttacaatatttcataattaataatatgagcacaaaaaatatgcaaaaaaaattgcatttttgttacagtactttttttaactacaacattcatcttaattagttgtgattgactgaaaaatattgtcacgtcattgaatgtaatattttgatatatatttaaaaaaaaattaattttttttttctattaatctgattgaatttgttgtgtgtaaattttagagattgagaagaaagtgacaacaatcttgaggctactcaagaatgaagggcaaggaaagagaaagaaagccaaaaaagagacagaactacttggattggttgagaatttttacaaggattaccaatcactctatgaattgtatgataatcttattatatcacaaccaagaacaagagtaattcatggaagaaaaaaacacaaggaatgttcttctaattctagctcagattccgagtactattcgtctgaggaaatccacacaaacaaaggcgaaaaaactgtatttgaagctgtgaatcttgaagttcttgagatgaagaacaaattggcttcattgagtgaagaaaatgacaatttgagatcggaatgtgaagctaatttgactaagttacaaaaaatcgaggtcgaattggatgagaaagacagaggaattttagagcaaattaagtctaatgaagagttgagattggaattggataataaagaaggcgaaaactctcttctcatgaggaaaatcaaggagaatgaggagagtttcgagttgaaaatcgaagagatgagggcgcagattgattgtttgagttctcaaaaaggtgaattggaagaaattttagtatgtgaaagagaaaaaggtgtagctcaagtaaaggacttagtgaaacagatcaattttatgaagaatgaagttgagtcaattagaggtgaagttttggataaaatggttaagattgaatctttgaatgaagagttattggctagaaaggtgttagttgagaagaaaatggttgaagatcaaaagggtcaagatgatcaagtcaatgagagtgagcaagagaaaaaacagttggattacttgaagagcaagaaagaagaattggagtttcaacaagaggtaaaagaacactccaaaagtaataataagtcaatgaagggtttagctttgaataacaaggaaaataagcaaaaccctcaaattgtagcgaaaaagatggaagatttggcagagaaatttagggatggtttcgaaaacaagtttcggttacttagtaggagaatcttgataacagaacaattgaacactgagaacaaagaaagctacatgaagatgaaagagaagtatgagaaagaaaataaagccttggaagaaaagattgcaacttatgaaaatggacaaagaaatagtaatattaatatcaaagagaaagagattataacagcattagtagagtgtgcaatgagtaatttggagtcaattgttaggaattttgaggataaaaatgagaactttttggtccatatttcaaaagtgtcaagtgaggttaaatttgcaagtggtgaaatgagaaggctaaagcataatgtggattcattggtgaaaaagttagatggtaaagaagaagaggaggttttgttgagagacaaggtgtggaatttagaagctaaagtgagcaaagaaggaggtgaaaaattgaacttgatgcaagaaattgaccaacttgagaaaaaagttgggaaatatgagaagaaaattagagagaaagaagagaggcttttgtgtcttggtgatgagaagagagaagctataagacaactttgtatgttggttgaatatcatcaaactcgtttcgaccatctcaaacaactcctctcaatatcgagcctaaattgtatgaagactactgctagtgatggactcagaaaatccttcaaagtagctcattgtgcataaaaagaaattagagtgttttattactatttttctaaaaaaaaattacattaacaactactatttattagagctagttaccattcataaccaagttttgtggttgatgtatttagttaccaaaaaaaaaaatgttaaatatttttattgctggatgttatttgaattgattatataacttgttgtaatttcacatttttgagttgattggcagccaatcaaaaaagaatataatacattttatacaataattagattttcatggagacataatcacaagttctattgcttagagtgttattattgctttatctctatagtagttatttagttatataatagcttcatttcatgaacaaaataaattgtttagaaatgtatattagccctttcattgctatagttttatatattgaatttgtatgtatatgctgaattaataatatgtaaattttacaatttgttaatgaaatacttttgcatatcctattcctattagtattgtaaatctgtatgtatcgtattggcctgactcatatttttttgtgcttctcaaaatatagattgtgatcgttttattatttttacgaggtaggcccgacacggcccgtaaacctgatatttttgtaccatattcagatttatattgggggtaagttgaaaaatgcctcttttattcatcaattaatcaaatttacctnnnnntttatatttatttgaaacatacctctttt

SEQ ID NO: 53494 - DNA, 957 bp, Cannabis sativa
tctaaaaaagaaatgtttacctattattaacctgctattacatgtcaaagaaaaatgtaacgatgatagttacaataaaaatataatcattaaatgatcacccttgaaaatatatatgatacgctcgcttatgaaacatgtgaatatttatatatatcaataataatccatttataataacatgttaggttgttggactaaactacttaactataatatatgcagtaaaataatcgaatgtaaatgaacaaaaataaaaaataattcaatcatatacaaattttgcaaagagagagaccgatatacatatgtacgtatatataaaattgaaaacaaatatatacataatcatgacagagataaatattgctctgacactaactgttagatatttatatgaataatatgaactatatgaacaattatatgaaatgcagaataaatcgaacatatacatgatataactaaaaaaatcaaaataccttcaaccattaatcttttggagcttcaatcccacacgagctttggatctaaaaaaaaaatgaaactagttagtgtggacaatcgggcttctaagctctctctagtctcttatatggaatttactgtttgcacaaaatgagtgagaaactcagggaccgagaccttatatttataggtgagatactccaacaacatctatgtcacattaattgtcagagtattttaacaattaattcaaaaaatcaaatcaagttaaatgaatgattcggtaaatcaaaaactaaccatcaatatgatattgtgatcaaatattcatacttatcacatattgatttgttattttgacaatcaatattcatatatacttatcacatattgatttgtgatcaaataccgtcatcgagataatgcaaaatcaatttaaatgattttgtacaaatatagaaattgttagagattttataacaatggaag

SEQ ID NO: 53495 - DNA, 1299 bp, Cannabis sativa
  modified_base (27)..(44): a, c, t, g, unknown or other
aggttgttaatcaaacatacttgttannnnnnnnnnnnnnnnnnaaaataatttccaacagttacaccaccactcgccctagtgctctctccttatgcatgtagcacattcactctctcatcatcacagtgtttcatgagttgagtacagactgtgatagcaaaaaaagtcaccttgaaattaatcctacaagtccaaacatgtcttgtagtgttgaggattgatctagaatactttggtgtaagttcttcataaatcaaaatcattggattgaatgatcgattttttatacgaaaagaaataaggataccctgatagttcaccaagagataaatcattctcatcttgtagtatagctttaatttatgtaaatgttaactcaaattttattaacataaatgagacttgataattaatgttctatattaaatacttaataaatatatatttgactacgaattatgatataagagataaagattttttatgtggttttgtagttaaaatctacatagttcacgagtcattattaattttgggtttcttggttgagattacaatttagcagaatttctctaagttaaaaaattagtcgtcttttgtacactgttgttactgctgtttataagagtatgatagtagttattttttatcctatctaaacaatagttatgaaatgtggacattccttacgttttatttatcttttaacaggtgaaaaatacaaatataactgcctttgtttaaaataagaaaaacaactgctattgcagacttagctctcaaccccatcccaatgattccctccagagatgttattttctatgaaaatatctacccttttatgactaaaattctcaacccagaaattagcaaatttttccctgaaatagcatacatcaaacaatcaaatggcttccacaaccacagatcacacctcaggatctactacagtcaaaccagcagaatcacaggttttacctaaaacatctagtgacaaatcaactcccatggatgacaacaatactgcttccaacgtacctgccactacacaaccttcaaccaaatcaagttggcctcttcaaaaacctgcatatttgtaagaggacagttgcactatggccactcactccccaagcactcatcaccccttatccaaaaacctatcttaccacagactctctgcttcttttcgagcagcagtccttgctactacacatctcatagaaccaaccacttttgcacaacacaccattggccataaatgggcttaccagattaaatataactcagatgggt

SEQ ID NO: 53496 - DNA, 1532 bp, Cannabis sativa
aaaatatatatgtttatattttttaaaaaaatgtatatgttttatgcttatatatttaagtcaagttcttttttttatttttttattttttttttaatatataaaaaaaaattaaatataaaaattcaaattttcttaattgaactatccatctcccaattatctatagtaatattaaaatatatatacactcgttttggttttgtgtctatatcactttttcattatgttttattttttattttaaaagaaatctaaagtagtattttatttttatttttttttatttttatgatttataacagtaataaattaaaccattgcaaagttgtaatattgaattttgtcaaccaaaaaaaaattgacaaaagattttttatcaattttattgatttcaacctatttgtaaaagaatgaaaatccgtagagtttggtaaacttgggattgaaaccaattaataattaaagaaaaaattattaaccacatcaagtagaataaatatataatttagagtaatttacggtataaatatttaagtttaactcgcaattgcaaataaaacttaagtttaatttttgacggtaataatacttaagttatatttatagaactcggtaggtacctaacacttaaaatattatgtcattatccatgtgtcattttcttattgatatattttaattaattttttaaaaaagaataaaaatttaatgagttggactaattaggaattatcatgtggcaatttacttaacaattaatagtcaggtacctacaaaagttccagaattacaacttaggtattattaccgctaaaaattaaatttaaatatttatttgcaactcggagttaaacttaagtatttatgccgcaaattactctataatttaaatacaaaaaaaaactaaataggatatagataatagaaaatatatatatatatttaatttgttaatttcattaatctttctatagattgaatcaggcaagaacgaaaagaagagttaacagttaagcgatatattttttttattttatctttacacttttgggtataataacatcatgtgtacatatgaggaaaaaacacattatgtatacagataaactacacaaaaatttaacatacattaacatggcaagttatactcaatcttaactaaaaataattttgatttggaattacttgtcctatacatatatgttaagtttgtgtgtgcatatattattatcctaatataaaaaaaagattaatataccagtatacaacttatataaaccacataaatgagttcgtaattcaatattaaatttagttttttttttttatttcatcatatatttagtttttttaagtaaatattgtttttttttatttttttaagtgaataaatgaatagttatactactactaccaaacaatcttgactcaaactctactttttagtataacagattataaaaattctataaaaattaggggaccatggccagccgttaatgtagttctctgcctatgattgtagtaga

SEQ ID NO: 53497 - DNA, 1485 bp, Cannabis sativa
atcaaagagcattcggtgatctagcgacccaagatgaaggtcgattaaaacggggacaccaacctatccataacttctttaagccaatccgttagaattctaaagataatttcatagctgaaattgcacaggctgatgggtctaaagaggtctacgcgatcatcatttaagactttagggataaggcagataaaagtatggttgagtttcttatttaaaaccccagtcgagaaaaaaaccttaatcaagtgacatacatcccctcccacaatatgccagtattttctaaaaaatatacctgagaagccgttaggtcgtggagatttcagaggatggagttttaaaacaatctccttgatctcactgttctcagggattttgcagattaaatcattctccatatccatcactttatcgatgaagagagtatccaactccggctcactacctcgtccaaagtgaaaagagaaataaaattctcctggagatgatctccgatgctatctctatgtctcagccaaatttcttccgaagttactacactcccaatgaaattccgtcttctacgaatgatagtagaggcatggaaaaatttggagtttccatccttgaaccgaatccaattttcacgagatttctgcctccaaatcctatccattctgccttcaagttccataatctcaatctgaatttgagcttctaattccaccgtagatgtagttattggttcgttttgaagacgccccaattgacttcgaagagacatgagttatctgtcacaaaacccaaaaacatcctgatgccattttttgagctcatactttgtcgtaattaacttcttttgatattgaacatctgttatagttgcaggcacttttccccaagcttgatcaacaacttttccacagccatggctcgaggtccaaacttctaagaatctgaaaggatatcgaagctttggctcattacctcaaggattaagaagaatcggggcatggtcaaagccaaagataggaagattagtcacgctagcccgagggaaggcattgcaccaattagcatccgcgatggctctatccaaccttttcctcactctattacagacaattctagagttttgccaagttttagcacctccatcaaaaccaagatcaagtccacccgagttgaacaggaagtccctatgaaattctccttctcgcctagaaaaggctttccctccttctttctctgattcatcaagaatggcattttaagtctcccatgagaacccaatgctcattacaatcaataaatttatcagtgagccaattctagtaatctcttttttgtgagtagtacagagtaccgtagatacagaacaaacaccaagtgggagcccccaattcagctgaaatagatatacagaacccagcctcataagtttccaaaacttgacaattaactccccttctccaagcaacttagaagccacccgcagtgcca

SEQ ID NO: 53498 - DNA, 952 bp, Cannabis sativa
ttaattaattcaatagataaatatttgaatttaaaaagtagttgagatattatctcaagtggttgagagattctctcaatcggttatagaatataaaaatctataacagttgtattatttattcaaacaattatttaagatttaagaaagaatttaaatttaaataattagttaaataaaacttttatatggttgatttaatatactgtataaattgaattttatatagtttttgaaacagaagaatttgtacgtaactattgtgaaaggctaaaaagaattaaccaacaaacttttttctctctatcactaaaatgatagttctttgctcatgtgttaagattttatcaaagattttatatacactattatcctactagtgcccacactagtccttatgtgtggtaaaaagtctggaagatcaagatatgagttttgtcatcaccgtttcgaggatacaacatacaaaaaaaatcgaggaatatatatagacttcaagaggtaaatattcttctcatttatttgctttcagtttaatatgtatacatatatgtatggtgatcttaggcatatgaataaatgtaataaatgatagagcgtctattttggtaattatattattagttttttgaaatatcatttacaaaataataacatacattgaaggtaaaacgataattttaaataatgtatttttgtaaaagttatcgatcataactttttttttatcaaaaataaaaaaggattttgtatttttcaaaatgttataaaataatactttaagttcaaattttaccagtaatatttttaatataacaaattagaaagattgaaactaatttcttatatggcaggatagatgaaaaaaaaaatataattagtccggttataatattttcaacttagttcattattaagttttattttagtgaaaattaaatttgaaaaatta

SEQ ID NO: 53499 - DNA, 1643 bp, Cannabis sativa
atgaatgataagctcgttgtcaataagattgaatacatccttttcgagatatactgtcaaaatatcattcaactattgatctctcattttgttgtcaatttgttgtgggcaattaaaataattaaaagatttgtttttttagttaagaagtaaaagaaatatttttttcagcatgggcttaagcccacactggtccttaattgggtccgccagtgcttggataagacattccacttatccaagtataagtaaaccacgtcgctaattatcacgtcaatataaatctagtgcattgataattcgtgtgactaaatagtttgaagcatataatcatgattaatttttttttttttttttgtagataacaatatgatcataagtaacaatatgtttgcaatttaataaaatttatatattcaaaatataatcataaaattaacatgtgaaccaagcaacataaaataatttataatattttattaactagtaaataagattatattgcaataggttttattcagggcataaaatcccaacaaaaacccaattgcactaacataaaactaaaagtgcatttcaactaatctaaccttcttgatgtccatatctagtgtagtatgtagtattatcttagtaataggatctgacaggttgtattcagtatcaaccttctccaccattacatcttccttagtcacaaaatccttgatatcgtgagtttccttatctatatggttactcctcttagggttcatactattgtgaaataacgctagtagttaatccatgattggaataacaccaaaagcttatagaactttccttaggctgaataattgtctagtagcctttgaggccactttaatattcagtgccattagtagagttagagacttcggacaagtttttatacttctgcaaaaattattgctctactcctagagtaatcaccatcctaaattgtagattttctagtattgatgcaagtctaaaaatctgagttagtgtagtttaaaatatttaagcaccacccttatagactaacatatatgtcctctttaatcttaagttttatttgattgccttccaatgttcttatcctaaattagtcttatatctacgcataactctcactcatcagtaggtgtttggtctaatgtataccgcaacatacatgagacttctcactattgatgcgtaaagaattctttccttggctgttatcttttttagaatagttgaaactattcttaagataaatgaactctatatatggaagtctaatgtaagttgcttgtgaaggagtaagtaaatcactaggtataccacaatccataggtttttatgatctcaaacttatgatactaggaacaggaagtttgcttatgtctatcgaataaacccattaactgagtttccttcttgtctttatatttgaatagttttggttaatccatgtgaatggttgaaccatagttctcttggcttcgagtcttagttccttattaggacaatccatttcttgtttaaactaacaatgaattctcaccactagcatcatccaagtcataacaaggtggcttcttagaaaccctccctctacgatggggtattttgagtttctgtctaaatacttcagtcgt

SEQ ID NO: 53500 - DNA, 2143 bp, Cannabis sativa
  modified_base (2079)..(2101): a, c, t, g, unknown or other
cacttccttattcactccactggtggaagccattagaaacaaaactcactcaaaagtaaagaaactcacacaaagaattggaaaacactctaatgcagagagacaacaaacatactaaatactgagatttttttgttaagattttaagtaggattcgatgcatttatagagtttgccctaaagaattctagaaattgcaaacgtattcattgtccatgtgtaaattgctataataaatcaaaagaaaatattacgatgattaagaatcatgtgtatttaagagggtttaatagaagttatactacttggtattggaatgacgaacatttaactgattatctatatacattagggaagtaggaggtagatgatattgagggtaatgatttcaatgatcatccaatggacttacttgacaaaagcacatgaggaatttcttaatgatcatgaaaaattcgataattttctaagtggtgcagataaaccgttgttcgatagttgtaagaaactaaaattaccagcaatggtaaaattttacaacatcaaagaagaaaatggagtgagcgataaatattttactcaatttttagctgctttaaaaaatatctttctatttgacaattacgtcctgtaatctataaataaagtgaagaaaactttaaattatataggattgaagtatgaaaaggtcaatgcatgtccgaacgattgtattttatatcgtaaggaatatgcagacatggacactttcctaacttgtagtttatcccgcgataaaataaataagagtaagaagaataggaaacttatcccccaaaaagtgatgtggtacattcctttgatttcacgacttaaacgatcatatcgtagtgtagaacattctaaaaatttgattcggcatgagaccaagagagtgaaagatggaaagctcggacatcctatagattcccaagcttggaaaatagtaaactacataaattttgaattcaaatctgaaccaagacatattcgtcccggtctatttatggatgaagtaaatctacatagatctctaagtagtcgtcatagttcatggcatgtcttccttgttatgtacaatcttcctccatggttagtgatgaaaaggaaagttaatatgctttctttaatgatatcagtttgcaacaatttggacataatatcgatgtatatttagaaccattaattaatattttaataaaattgtatgagaatggtgtaaagcctatgatggttttaaaaaaaaaattctttaatctgaaagcaatcttattacggattaattgttagagattttttagcttacagtaatttattaggcttaagcacaaaagattatgaaggttttctgatttgttgcactaacacatgggctcgtcgcttggcaaatgaacacaagaagaaagtagaaagcattcgatggtactgaagagggggatatggctcatttaccactgtcagggaaaaaattctccaagaagtagaactactagattttaagtatgaaaatacgtaaaaaaataagaaaacaaatggttgttttcaaacaaagtcaatcttttttcatcttctatattggaaaagattaatggtttgacattgtttggatgtcatgcatattgaaaaaaatgtgtgagagtattatcggtatcctacttgatattctcggcaaaactgacgatagtttatctagtcgtttagatctcgctgaaatgggtatccgacaatctctggtacctgaaaagaaaggtgaacaaaaatatttgccccctacttgtttcactttgtccaaaaggaaaaaataaatagtttgcaaattattttcaaatatgaaagtacatgatggatagtcgtctaacataaaaaacttggtaaataagaatgaattgaaactaatgggtataaattacatgattgtcatgcgttcatgcaacatctacttccaattgccattagatcagtcttgccaaaaaatatttgagtgttggacacatgtttgtattaataaattatgcaggaaaaaattaaaaatagataaattaagggtgttcgcggtgcggnnnnnnnnnnnnnnnnnnnnnnnttcaaaccaacccgcacatgcggtatttccaatttcccaaac

SEQ ID NO: 53501 - DNA, 1753 bp, Cannabis sativa
gagccgtaacaggagttagtggcagggaataggttttaagaaatggatttgttcttagtcattttttggtgatgcactaaattttgtagttaaggacttataaacttgatttagtggttgattcagtggtgaggtaattgcaaatggtaaatatctatatttatatacacacaatttctctcacaaatgtcatacctcgagcaaaacaattgtatacgcaatggaagacccattatgatttcaagaaaaatcctctatacccaatggttttacatcttcatttagcaaattcaacctacaactttatgtactatatcttcctgtgcctaaatttaaaagcaataaaaacaaaattacatgcatgcatgaagtgattaaaatataaaataataatggtgatctattctagcagacaactaggtcattttatatagtcattgtataggttaaacctttagataaagacttgtatttatgactaacataaaataagaaaacttaccaaagcaatactcaaaccatgcgtgcgtttcaaactatttggaaaaaataataattgttatataagttaaattgcatgcaaagtgataaaagacaaaacaaataaaggaacaaaattaatatattattaattataattttgtcaatgaacacaacaaatgtgtagtcatatcacaataataaatgtgtaatcttcaccaatagtactacatatcagtactttgttttactttaaacacaacaaaaaaaattaaaatacaaataaaaaataaaataaaaatggtttttagctcttagctacagacaatgttattttaaatatatcattatattggtaaaactttgggcattggaaaaagacttgtcattaagcaacacaatcacaagtgtttagtcttatccaatggtaccacattctcattttagcaaatatatcctacaactttatgtactatgtatctcttttttttttctttatacacaaatgaacaataatatgcatgcaagaattgatttcttggtttgtaggaaattaaaatatattacaaaataaaatagaaatggtcactatcataaaatattaaagtttaccaagctacaccaaacaccatgtgtgtacttcaaaccatttggaagaaataataattattaatatgaataatttaaaaagatatttgcattctacagcgtaaatattattctatttacatatttatgtttcactattttatttgataaaataccgttagtttttgtaaattatctcaaacacacataccgagatatcttcagtttgtaaagtagactcttcagtttgctctgtcaattttagctaatccacgtggttagctttttttttctttattttttacgctctcttttctttttgtattaatatttattatttaataattatatatatatgatactacacaattattactctttcccttttcaagttttattatgtttaaaacttttttggtctttctttaacaataggagaaaattaggctaattagaaaagtaagtgccttatgtgaggtctgtagcagttgtgttttctttaactaccttttggaattttaactacctttttcaatttcaaatttttccctcttctgtatccatgattctctaactgttttctgggttttctcttcacaatcttcatctgccactccttccttccctctcgatcatcacgcctttcaccataatggactctctctctcactcaatccattccact

SEQ ID NO: 53502 - DNA, 1247 bp, Cannabis sativa
tagttagaccaatagtaatattaacacataagagggtgctagacaccactggtgccctttagcatttctcttatttgtgtagcaaaattccaaattcccatcaaattcagcaatgatcagaatgaacctcttatatttctcagctctcaaggtctaaataaaggccccccatatattaaattttatattttaaaggatttatttaataaacaaataaataatgttcaagagttccaacttccaacccctcaacttttagagattctaatcttcagaagcagggttcccactaagaaatttattaataattttaaggctaactttgtctttggaaagatcaaattaaaattaattttatataaattatatacgtgacacaaagctctcaaatcaaaaccactttattttattaatagtcactttttctcttctttttaacacaaatgattttacagagttacaaaaagacaaaggaattttttacttttttactttttactttttactttgaacaactgcaaagtgcaagtgttgcaataaagtacaatcataagtgtttttggtttgtttgtttatagatttagattgttgttagatattagtattgtctaatactattaagatatgttactttttgattggctagtgatattttctaaatgttattccattaaattatatgagtttcgatacttagttggaccaatagtgatattaacatgtaagagagtaagcaccactagtatcttttatcatttctcttacatgagtattattattagatatcagtggtgctcatggtattgcctgacaattagttagcaatgttctttaaaaattattttcttaagttatataagacatgatgtttaattacattaacagtgatatgacactgaacaaaataataataccaacaatgacttttagcaattctcatcaaataatgaatatgtttactctttatgtagaaaaaaaaaaaaagatgaatgtgtttacttttgcatatgaagtgacaaaaaggatcttaccatattccattgtatgtttactactttgcaagtgaatctatcttcctttaagcccttaatttttttttattttagggtatatatttacttttagaataaatataaattttaaccattaaactattattaacattctaataactatttttttttaatgatgataatattttaaggggtgtataattgtttggtgataatacttcatttattctttct

SEQ ID NO: 53503 - DNA, 967 bp, Cannabis sativa
actataattattgcatgatttagattatgaaaaactcaatgacttgtttcctgataaatatgattataataaactgaactttgaatattaaaacttcaaatctctcattttagttcttgaaattacttaaaaatattgattataagatcttcaagccaacttcacccactttaagtatatatttataagtgtatgtttattggtattttattagcatttagcatttatattagattatatattgattgcaattttgatttcattttcagttcactaactagttttatttttctcatttaaagtaaattgccgtcttattttgttaaaacttacgatatgtacacagtacactgaatcacgagctattttgaagtggatatattttcttttgtaattgttgatttttgtcttttttctttactgctcttttagctgttgaaagggtgaatatatttctatgttttgtattcttatgttttagaagatatcaacgctgtaatttgaaaaatagtttggcttgccaagtggtataatatcacaatactaaatcatgtagttttttgttgttgctcctcctcctaacgcttgtctttggtagtaaaaagtattttagtacttaaatctttttaaaagaaacaaattctctataatctctttcctattttagttgcttataaactttgggcaattaacatgcttggctaatttgtgttaggggtgtacatcaaatcgttcaaaccgctcaaaccgtccgcaccgcaaaaaaaatacggtttgaaattcttcgcggtgcggttgcggtttgaatttttcccaaaccgcgcagtgcggtgcagtttgcaattttgaattattaaaccgcgattcaaaccgtgttgcaccgcatgttttaaaattttaatttttatatttatttaattaagcccatacatatgagcccaatccaaacccataaatcttagggcaa

SEQ ID NO: 53504 - DNA, 846 bp, Cannabis sativa
  modified_base (629)..(648): a, c, t, g, unknown or other
tgatttgcaataaagttgctaattatttaacgactgctgcttgttcttttgcttgttgtagttatagtggggggcttgtcctagtttgcttttcaaacaattattttggacgatttgtctatttaatgaaactacaattttcttgtaaaaaaaataaaaaagaaatgttatctagaactctcctaagtattatatcattatatgcaattaagtattgaattacatataatttaaagtaataataatttttaagtaatatccctaaccaataattataagacgtaaactttaaaagatattaagtaccaataatgcataataacaatactctaaaacaaatcatctttcacactaactatttaagttttatttgtacatgtgaagattcatgaatacaccaccaacaaatattaatacacaatataatttagggagatagtgtacaaattgaaattctctaatattggtagagggatgtttttggtcttgagagcacgataaattaaatctaatatttttatattattctcgacattgtggttacaaaagacaatattcttcaagtttttaaaatttgaaatactttatactgtccaaacaaaaattcaaaatataataataataataannnnnnnnnnnnnnnnnnnnataataataataataaaggcatttgtgtttaaaatttatttttgaaattataaattattttaaaaaattagaaaactattagaataataactactttagctataatgtattaaattatcatataaaataaagtgaattgaattataattcctttatgtgctaaaaaaaaagaagagaaatctctcttagtaaaaaaaa

SEQ ID NO: 53505 - DNA, 675 bp, Cannabis sativa
taacaacttatgttggttcaaccaaaagggagtgtgattatcctctacttgagtagaagaggatggaacattaggagttatttctgaaggcatttcctctaacactactttactttgtgacttgaagttcttaatatagtcatcttcaaggaaagtgacacttgtagaaacgaacactttatcatcctttcaaccattattaaaacaaatcatacaaatcataattatatttatataattaaaacttaacatcaacctagtgttataaatcataaactaaatttatctttttaagaaaaaacatatatatatatacatttatacataaatataaagtctaatttaaaatatttttttgagaaaaaatagtaaaaataattatatagagagcgataaaaatataatgaagaatggagagtatcacatgagaatgaggaagaaaaagttacaatagcattttcatcactttcataaatctcaagagtctatcattaaaaaaattaactttttctacatcaaataatgcatgctaatgagtaaatcataaataatttgaaatcatcgacaacggtaaagttgttgacaaaaaaaaagtttggatgtctctaaattatggagaaatattaaaaatcgagaggtattgatgttatctattgatgttactgtcgaggtgac

SEQ ID NO: 53506 - DNA, 947 bp, Cannabis sativa
tttttgtagtgttcatcttggacccatttctgattccttgacttactcgggtaagtggtcttaatccaattcaagtgttcccttcaatattatttacaaatatcaaatgctatgcatttcaattttaatgaaaagttaatgttttgatataattatgttaactaacttactcaatatacggttgaacctcatcaatattttgtaacacgagacgatgtgcttcgtctcgattagcttggcttacttcggaaaaagttaaacccctaccccctttacttatttcattaccaattcgtggaatcaaagatccaacgcttgcaacatttgacaaatagtctgaacaaaattcaatcgattcttcaacgatgtatgattcaacaatacaaccctcaggtttgtttctatttcttacataaccttttaaaattttcatgtatcgttcaaatgggtacatccatctcaagtgcactggtccacacaatttgacctctctcaccaaatgaacagttaagtggaccattatgtcaaaaaaggaagggggaaaaattgttccaagtaacacaacacttctacgatttccattcgaagattttcaagcttagacacatcaaccactttacaacaaagagatttgaagaataaacataacctcgtgatggcatatcgaactttcttaggtaaaacaggacggatacctactggtaaaatgtgttgaatcagtatatgatgatcgtgtgatttcaatcctacaaaattcaatgtagtcgtatctactaaagctgagatatttgaagaatagccttcaggtactttcaactgagacaaagaattacacaaagagagtttttcatctttagtcaaggcataacatgccggaggtaaaaaagttcgtttaccaacaactttagggtgtaaatttactcgtatccctaactccatcaaatcta

SEQ ID NO: 53507 - DNA, 688 bp, Cannabis sativa
ctcaatcgtggtctatctttgattttagtatgtttctatcttcctttgaatattgttgcagatacaagtctttgttttggataattaatctatatcttctttattatgctttctagggttgagaattctcacttcaaaagatattgagtttgcattttgtataaaagatagaagaaggaagaaagtattggcttcgatatgatcaggtatgaaagatgacttccccttcgagaaaggacttcctttgatctttatgacaatcttttattatttgcttcattcatgattcaactcttgtctcatacgtatgaaagcggtgcgatagtcattttcactttcatttctactttagttatttaatcgttttgccattttgatttcgttattgtgttttagttctctttgttgaatgtttcggtgttcttcttctttaaatgctagatttctttactctgaaatacatagaatctcaggtttttttaattgacttattgttcttccatttcatttttaatttatttatgtatgtgtttattttattttgtttggttatattatctaatgatttgtttatttcatggatgttccaatttcgcaattcttttatttatctcaatatatgtttttttgctgtttttcttttaaatgttagaactcagaccattttttttaaaatgtgtgaacccat

SEQ ID NO: 53508 - DNA, 634 bp, Cannabis sativa
agcaattttaaggtattgaatttagctacaggagcataggtgtcaaagaaatctatcccttgttgctggttgtagcctttggctactaaccgtgctttgaatctttctgttgtgccgtctgggttatatttgatgcgatatacccatttgtttcctattacatgttgaccaggtgggagaggaactacaatccaagtgtgatttttctctaatgcatctatttccacatccatagcattgttccatattttgtgttttgaggcttcggcataggatgtaggttctgtgcattgggctgtagcaagtaatgcagcagtaaaaagttttgagaattttgtatatgagagatagttggcaaggggatatgtagtggaattacaagagtaagcttgtagatatgttggctttttaatttttctccctgtttttgtttttggtggggttttggattgtggttggggtggaatatatgggttgttattttctgtaacatgtcgtggtactgtagtgatattttctacagtttgctttgggtcttgagtaggaagagtggttgtgtcaacaaaatgtggtgagggattatgaaaaaaaattgctgatgttgtgattattttggttgttttgtaagggaaaa

SEQ ID NO: 53509 - DNA, 1848 bp, Cannabis sativa
  modified_base (26)..(38): a, c, t, g, unknown or other
tttaaaaaatattttcacttttctannnnnnnnnnnnnaaaactgattaaaaaagtgttactaaacgccacctaaattaattaaagttttcttttcggagctaggaaacacatatttaaacattttaaaaatatatgatagctatactaaatatttcctctttatgaaatatatgtaaagttaaatttaattgtactaataacaataacaacaagtatatattaaaataaaaattagaaaaaataaaacttacccaaaatctttatatttggcaaagataaatactaaaaaaaacctggcaactcttcaaagttttagtgaatttaaaatctttaaaactatatttatttaatgtgcataaattaaacttctcgatattcgatttatcttcttgagatgtttttgctttaacatcatttgcaattttgcatctatttttagttttttttttcatttctgttcgttccaataacaattctaataattgctcatattgcatttggagaatttctaatttttttgtaaatcagtctaatctctcatccatataattaaatttagcctctatttaaataaaaaatattatcaaataaactagtttatacataaataagactcatatatatatgaatcactatatacaatcttttttttacatgttatgcccatattttaagtaacaatatgatcacgacacatgtacaataaatgaaaaacaaatcagctcggatattgaaaaattaaatacattacttaaggatttgatctatctcgtgggactcactccaaaagtataaacattgaagaggtaaggacatagtcttggaaaatattaatcacagttataaattgaagtctttccttaagtgtgactaaggatgtcaaaataatagctcactagtagacgaacgagatcaataacgtaggaaggatcctcaagtggcaaacctttcgaaagaccgaaatgctggaagagatcctattaaatgggatttcgagcgagatgttaatgaagataaaattccagaaagatggaatcgcggtgcttacgatccaaaatgttccactggtggagttagaaaactaccaacttcgtgaaagattggccaaatctaactgggaaaatataaatttagaacgcaaagtggttgtagtaagagcaacacaaagaaacgcacctcctgctcaatttggctagccgacgaggcatcctcgagaaagacctcgcggttcaaaggctaggaaagcatcatgagcccctttgataatcagaataatctaattgatccccagaaacaacaaccagagtatatgagaaagattccaattgatagggaagggccctagaaccctaggaatcctaatatttattaactacaaaattacaataaaaaattatttatcttatatttaatatttaaatattacatttattactgtcattaattcttagtattaaggatttaagtctcattaacatttattgttaacgaaattttagattaacacttaaaatttaataaaagaaaagaaataattaagagatcatagagatacaaaaatccctatatatgtagtcttagattgtcttatctctctatctatttttatgtctcgtcacttaaacttaatacatcattcttattattatttaattaattaattagttatagagttatatatatatatatatctatgctacatgcatatacagacattctgttttacacataaaatcacacacaaatcaatgatgtgacaatatcttcaacacgcaattaataattctgtcagaatttgagggaaaataaaaacacacttgccactagtaataacatcatctccaaa

SEQ ID NO: 53510 - DNA, 737 bp, Cannabis sativa
gaatatgaagtagaataggaggtgctcttagtaggtttaaggatagttgaagttgtaaaagttagggcaatccattgttttagcaattctcagctaattgtaaattaggtacttggtcaatatcattaaaaaaaaggaattaaaatggctaaatatttagaaaaagttcgggagaacttgagaaaattctattattacaaaattgaacaaatactaagagaacaaaattcaaatgttgatgcttttacaaaattggcatcgcaacctaaagtagatgaccttaatttggttccaattgagaagttgaaagaaccaagtatttgttagatggaagaccaagatatggatatgattgacacaattccaacttggatgacgccaataatgaactatttattaactgggcaacttccatctgacattaacgaggcaaggaaactcatgtataaggtaccatggtatataattgtagaaggaaagctttaccgaagaggatattcatgttgggattttatgccctaaataactcatttcaatataatcttatttgttatcaatagaagattagaagtcgtttatgtatacatgtattattcatgtttatggtttaatatatagtttttattaaatctagatatatagtcatttacaattacagtgatgtcaacaccgtggaaggtaattgtgattatatgcttcaaaagattatgtctcatgattcatcagtgcacaggatt

SEQ ID NO: 53511 - DNA, 1175 bp, Cannabis sativa
  modified_base (31)..(67): a, c, t, g, unknown or other
caacataaaatgtgatttttgatctttattnnnnnnnnnnnnnnnnnnnnnnnnnnnnnnnnnnnnntagggtacaaaacccaacaaaaatgacacagccaaacgatcacggtgaatttccacatcaaaattagaggatgggatgggtttgccatcaataaaatactcagcaaaggatgctacgaaaacaccacaatcactgaaaaacaacaaatgaaacaccaaaaaaacaccataagaacaccagtaaaaaaaacaaaatcacataacaaaacataacactacaaaagcagcaaaaaacattgaacattatacactaaacttacgatgtgacctgctccggtaaaccatcaacaacaacaatcgggaacggttccatcgtgctaaacttagattcattgcgaaggcctctaaagtctaacatagataaataatagcgtaaaataaccgaaaaaggcctgcaagcatctttggcagctgtcatataccttccagaacacaatgaattgtacagatatatccgccgcttagatatgtttaaacgaccacaaattcaatgatcctgtaatttgacattaataggcataacaacgtgatcaaccaaatgccaaggagtggcacataatatcttaccaccacggatgtactgtgccacattatgagaaagagacaacaccgatatattattatttttctcaacaaacttatcatacaagtttgttatgctagaacgaaaagacaatcagttgtggtgactttgattttcggttcagcagcgtactttattttcttacgaagatagtagaaaataatgtcaatgtgctgcaaataagaaaataaaaaagccttcagtcatataaaaaactaacataacaacacttaaaaaaaaaaaaattaaaaaacaaagaactctcttcaatcagaaaaaaaaacttacagaacaacacttaaaaaacagaaacaataaaaataaacaacacaaacatgtaaataaaaaaacttacaaaattggtaaggaaacaattaggatagctaaggttgtgaaaccacatcttgttgctaatgtcctcaaccccaaaatgaaatggcagaaatattgtgtccttacccttacaatacacattagttgttgtgctaaaaaaacaaaataaaaaagacatcaaaaaaaaaaaaaa

SEQ ID NO: 53512 - DNA, 601 bp, Cannabis sativa
agtatatggctagttttaattttataaaattagtatgatctaataataacacatcaaatgtaatgtagtcaccgtcaacaatagagatgaaaaacaaataaattctagtatttacataaagaattgataattctatgttactatttatataaaattttatattttgttttattttatttgtaagggaaatttcatttttattatatattaatttttttttctctttattttgtaagtgttctactagtgcatcggaagtgacaactcaactctcagtcttgaggttttcttttctgatattatagttttattgtctagtgctcatagggtatctctgcatgcccttaggatagacaattaatgaactgttatagatggaagaaaattctcctctgattacgtaattttgttacctttgttattttaacttgtatcgatttttcctaaaaaaaataaaatctaattatagtaagaaagtaccagctttataaattaatacaattacatgcatgtattggctaagaaaagcaaatccaaatgttccaccaaaaacagcacctttaaaaaaatacaagtgagtctaggcctatacattaattgt

SEQ ID NO: 53513 - DNA, 1275 bp, Cannabis sativa
  modified_base (1127)..(1128): a, c, t, g, unknown or other
ttctttgatgacatcctggtttatagccctgacgaagctacacacatacaacacctagagcttgtgcttcaaactctccttaagcaccaattttttgctaacaagaagaagtgttcctttgggcagcgacgtattgagtacttgggacatgtagtgagtggccacggggtggcggtggatgatacaaagatcaaagccatggtggattggcctctccctacttcgattaaagctctacgagggttccttggtcttacggggtattaccgcaaatttgtcaagaattatggttctattgctcggcctctgacagatcaattgaagaaggatagctttgcttggtcttcggcagcaaccgaagcttttgagtctctcaaaacagcaatgacaacggtccccgtgttagccctacccgattttgccaagccatttgtggttgaagcggatgcctccggatatgggttaggagcagttctgatgcaagaaggacgacctattgcttatttcagtcagattctgaagccgcgagctcaacttaagtccatctatgagaaggaattaatggccattgttctggcggtccttaagtggcggccatacttgctaggtcgccgctttattgttcgtaccgatcaacaaagcttgaagttcctcttggaacaacgattggtcactccggaacatcagaaatggttggtcaaacttctggggtatgattttgatatccactatcgcccgggggtggggaacagagctgcggatgctttgtctcgcgtgcaacctctagaatgctctattcttactactactacttggttggattggacggtgattgaacaagaaattaagcaagacccttttctctctcgagtagtggcagatttagaacaaggaaaggatgtcttgggttttacattcgagaagcagcgtttgttgtatcggaaacgacttgttttggccgccacatcatccttgattccacatttccttcgggaataccatagctctccaatcggtggtcattcgggagagtatcggacttaccttcgccttcggggagatgtttattgggttggtatgaaggcgcaagtgggaaattttgtgcgcgcttgtgaagtgtgccaacnnaacaagcacttggccatgtcaccggggggtctcttgcagcctttagatctgcccgcccaggtttgggaggacttgactatggattttattgaggggttgccaaaatcggaaggtgttgacacgatcttagtggttgtggatcgtttg

SEQ ID NO: 53514 - DNA, 1655 bp, Cannabis sativa
gatcagtttgctggccaggaaatagtccttcattgaagatgacatttatagcaatatagattcttccttggttattttcacacaagtaacctttatgatatgaggagtaccccaagaacaaacattgttgagatctcatctccattttgtgagcattgtaaggtcttagatgaggaaaacaagcacacccgaatggctttaggatagtgtagtcaggttcttgtccaaacaagcactgataaggactgatattacccaaaactggtgtaggaagtctgtttattgtgaaagttgcacaagagaaagcatgccaccaatattttaagtcaagaccagcctgagcaagtaaagtgagccctgtttcagtcacatgtttgtgctttctctccactcttccattttgagcatgagtatgaggacatggatgactaaacagtattccttggtctgtgaggaattttgcaaaaggcttgtactcaccacctccatcagcttgcacaaccttaatcggtaattcaaattgtttttccaccatgcttttgaaccgaataaacatatcaaaggcctgagatttgactgttagaggataaatccaagagaacctactaaaattatccacaagaatgatgtaatatctatacccttctttcgatgttatgtgggatggtccccataaatcagtgtggattaattctaaaggttcttgaagcatgactattggacgaagaaaatggcaaagtgtgacttttacctaactgacatgcattgcaaaattgcaaattttggatattacccgagtgggacaatttggacaacagattactaagaattgctttggatggatgtcctaatttttggtgccaattattaacatcatttactttgtaagtaataaagatagatggtgaacttgaataagaacatgtacttttattattatgatgaaaattacagcaatgtagagatttagaaatctcattattacaacagctaggggaagtacatgtcatatgagatgaatacatctctgaactagcaagaagacattttgcagaagcagtagaagaacaaggagtatcaccaaccaagtgtgtatataccaccatgtttatttacgtttccctttgagaagcacaacccctgtttgcttgtccttcacaaaacaacaatgtgtgtgaaattcaaggaaaacattgttatcatcagttaacttggatatactaactaagttctcagtaatttggggaacatgaagaacagattttaaagcaagggaagagtagggcaagaaggttgaacctgtatgagaaatcatgagtttcttaccgtttccaacagccaaactctcagtgccattgtaagggagagactgagctaattgagtgttatccgaggtgacatggtgagtggctcctgtgtcagcaaaccattgacaatcatctccaaaatcttggaccatagtagtagaataagccataggatcatattcaacttgccaattcttgtcgaacctgtaatggcaaacatgagctgtatggccaatttttagacacactagacatacaactctgtttgggggaaaacgagagtatcctcttcctcggccttgatattgagaggagttttcttgatttccaattctgttagaggaatac

SEQ ID NO: 53515 - DNA, 1055 bp, Cannabis sativa
aattccttaaaaaaaaatgcaaaaaatgcaaaaaaaaaaatatatatattttgaagtgtaaaaaataaaaaataaataaaagcccttttttataacaaatcaaaatattaatggtatttaaattaatttattaattcaaaaattttattcaaattaatataatggaaggaaataatctaattcttttattattttaagatatcaatattactctctttaagggtagttatattacttatagaatagcattataatttaaatcctcaaaacaaacaatgtaatatttcacattaccattcccttgctagtattaacccattccaaatcgccccttatattaatctcaactgttgaagtcacaatttattttttatttatgaaattatatatttactataaaataaaatagtaacccacgtccaactaacaatttgaatttaattttttcgcatcataatttatgcttagtattataactaaaatatacattatcttctttatatagaaaacagttgggtggaagagtgatgtcctatctaaaatatttactatatatttgttaattatatatctttttgggtaattttataatgcgttttttgaaatagatgccctgattgaactcttatctattttgatatttacaaaaaaaaagtttgatctgattttttttttttcataatcatgtacgttataattatttaagagatatcttccaaaattttaaagaattcaaaataacttacaatataaaaaacaatattcaaacagattattttatacgcttacaatagatattttgaaccatattttcggcatgttaagaggcggtttggctttacagtttaaaaactgttttttgtttttaaaaactgaaaacaatttttaaaaactattaggagtcgtttggcaaaaatttttaaaaattgttttttaaaaattgacttttaaaaaaatagaaaacagaaaatatcaaaatgttgttttcaattttcaaaaataattttttttttgtctaacatattatattttatattttgctcacatactcggat

SEQ ID NO: 53516 - DNA, 3390 bp, Cannabis sativa
ttagctacgggggcataagtttggtcataatctattccttgttttttattaaaccctttggcgacaaggcgagccttaaatcgaatggcttctccttgttgattgtactttactttatatacccatttacatccaatggccttgtgtccatcgggtaatttggtgacaacccaagtgtggtttttttctagagcctcagtttcatcatccatggctttgaaccaatgagtgaactgtgatgcctcggaatatgaacgaggttcaacatgagaataggctgcaagagcagcggcacggaattgtggactaagtttagcataggagatgaactttttgattggaaaagcggtggaggcagtgtggcaaatatagtccttgaaatgtgatggtttattgatgatttgaccacttttggactggtttttgattaagaccaggtgtggtaattgtgagattgttaatgctcacatcaggttttttagtgctcatatcaggtggggaatcaactaggatgtcaattgatatatcagattggcacttgtttgggttattaacaacaataggtgctgtagtaatgttgaatgcaggggctgaaaaagtatcagcaaccacgggatctggtgtggttttggaagcagctggtgtggcaccaggtgctaatttggcaagcggaaatgctgctgttgtgggagaatggccagaaccacgatctgttggggtgtgttgttgggatataccaattttttctgatgtattttgtgtgtctagccgtggtaaagattgagagataggtagacatggtgtgtggaaaaaattatgaatgtgagaatgagatgtgtgaccaattagaggaaaaatttattcataaaatacaacatctcgagaatgatatatttattttgtctcaatatcaagaagggtatatgctttcattccttgggggtaaccaatgaaaattgaagcacgacttctaggtgaaaatttgtgcctagtagacgggagagtaaacacataagctagacatccaaaacaccttagatggtcatattgaggtgatttgttatggagtttctcatatgaggtgcaaccttgaaatatagtagaaggagttctattcattaagtatgttgcggtataaatgagatatgaccaataaggaaggggtaagttggattgataacaaagagttctagctatattcaaaatgtgttggtattttcgttccacaacggaattttgttgtggtctttccacacaagaatggtaatgaacaatgcctttggtagcataaaaagagtgcatattgagttctttggcattgtcggatctaatagcttttatggattttgaatattgtgtgcaaatcatgttataaaatgtgggaatgatagattggacatcagatttatttttaagcataaaagtccatgtaaaacgagatttgtcatcaacaatggtgagaaaatacttatatccttcaatgcttatgacattgaaaggtccccaaatatccatatggacaagatcaaatatatcattagcaaagttatggtttgatatgaatggcaaccttttttgttttgcaatgtgacatatatgacaatgctgatttttggaagcatttgaactagaaagaaactttttattggttgtatttgaaagatacattgagggatgaccaaggcatttgtgccattggtctccattatttgaagaaaataaaaaacaagtagaacttgcaataggtatgaaatcttggagaagaacatagagctttccaagtcttttagcagtcccaatcaccacattcggggaaagagcctgtagagtgcaaaaatcagggtgaaaatagaccttattagtcatatcactaaggagaaatgtgggaatagacaatagattgatgttaaaggttggaacaaataatacatcataaagagtgagatgtgagtttatttgaacggttccaatccctttaacaggtattttattgccattaggaagagtcacatatgagggaaaatctttgttagaaaaagatagaaagaaagatcttgtaaaacacatatggtgagtagcaccactatcaattatccaagagtgagtataaagaaaagactttttaccagccctgttagaagcggcagcagctgtattagggtcctcacgggtctgtccttggcttaattgttggctaaggagagatatgagttgttggcattgagtggaaaggtcaatggagttgttgttggtttcggatgtgttgacagtagcattattggcagcactctttcctttttcagacttctttttatcgccatatcccggaggaaaaccatgaaggaaatagcatttgtcaacatagtgtcccggtttaccacaatttgtacaagaaggtcttggtttctttgaacgattgggatttgtaggtgatgaagggcgagcggatgcagccatggaggacaaattcgaggatgatgaaccaaggattctttgtctctcttcttgaacaatcataacaaaaacccgagagaggttgggaattggttcatagagaataatttgagccctaactgaggaataagactcatttagacctgtgagaaattgtaagacttgattttgattgtagtaatcaagaaatactttcattgcaccacaagaacaagtggtgttgggttgaaattccttaagctcatcccatatagacttgagctttgtgaaatatgtggtgacagattgatcaccttgctgcaaacgagtgagttgcgtttgcagctgaaaaattctagggccattagcctcattgaatcgttcttgaagatcgtgccacatatccgtggcaagatcgaagtacataatgctctgtgcaatctcaggagacacagaatttaccaaccaagacattaccatgttattacatctattccaagaattgagcaagggattaccagaaatcggccgaggaagtgtaccatcgatgaaggctgatttgttcttagctgtcaatgccatggtgatgcctctcttccaagattgatagtttgcaccgttgagcacagtggagacaagaacaagccctgggtgatctgccgtgctgaggaaaaaagggcttgaaacatcctcgtgagctaggcgatcaatggagggtctacgaagtggaacagtaggaggaggaacgggttggacaggggatggcaaatcaggatcgatggtggcttcttcctggggcggacgggatctggaagttggagctcgacgagtagccatggacgggttgatgttttgcgcggaagtggagtcgggattggactccgaggtagtgttctctgctgtgggcggcggaagaccgtcttgcgagcgagtggagggccttgccattgaagcttg

SEQ ID NO: 53517 - DNA, 769 bp, Cannabis sativa
gagtagggaacttaaggcataagtgtcgaatggaggtaatcgctccaaaatcgactagggccggtcggctaaggatggcattataggcggtggggcagtccaccacgataaaggtgcagtatttgaaggtgctttgcggggtgtcaagacatagggtgacgggaagccttacttttcccttcgggatgagagttgtcccgttgaactccgtgagttgtgaactgctgggcaaaaggtccctgttcgtgagcccgatggccatgaaagcttctttaaataacagattcacgaagcttccgttatccaccaatatcctagccacaaccttattggggataggagtttctaagactaagggatcatggtgggggaaacgcattgacttcgcgccttcttccgtaaaagtaatgagttgatccatgagcctgggcctttgtgctgggatttgagtgacctcccatacttcatcatgcttaaggctctagcatagcactttaactcgtttttggtggttcctccgatatgaggcccgctagagatcatggtaactctcccatttggttagggtggtaatccgggcatctactgaggaggtacccctctgggaggtacttgtccctcgagcgtacccccaacccctccctgaggtacgggggctccctgttgggctgggtttaagtgtggtaacctgtttttgatccactcatacaaatgacccaaccgaattaggttctcaatttcatccttcaagtttttgcactcgtttgtg

SEQ ID NO: 53518 - DNA, 1862 bp, Cannabis sativa
gtattaaaactttgatataacaacattgtacgcttgtagtaaatatagtatatcaagtttttggtgccgttactggggattgaaaattctttaattattgcttatattattaataaaaattttactttaaattagatttttttttattttgtttgttgctttgtggttcagtttatgcgaagaaatcgaagtgctacaccactcacactgttgaatcctgaaattgaaagaactttaaagcagttaaaagcgaagaaaaagttagatttcaccatggcaaccaataacaatagttgccttaataacaaccaactagcatgcagctgatgcacaaccacgggtcgttcgttattattgctttctagtggtgaatgaaaatctgacttgtattgctaatctagtcattgctggtaataattttgaattgaagcatgctttaatcaatatgttgcaacagaatcagtttggtgggttggctactgaagatcccaatatccatctagccatatttctggaggtatgtgttactgttaaaatgaatggtgttactgatgacgccataagactacgactctttcctttctccttaagggatagagcaagaatttagttacaatctctgcagtcaggttctattactacatgggatgaaatgggtagaaagttcatggtgaaattcttccctccatcaaaatctgcacagttgagaagtgagattgggcaattcatacagcttgattcagagcaactttatgaagcatgggaacgattcaaagacttattacgtcgctgcccacaacatgcctatgagagctggatgcaagtctcaattttctacaactggttgaatgggccaactaagactattattgatgttgcttctgaaggagcattattgtctaaacctgcaactgaagccattaatttactggaggagatggccactaatagttataattggcctaatgaaagtaatgctccaagaaaggtggctgggttacatgaagtagatcctacgacaaatacggcagctaaaatttctactttatctaatcaagtggcagccttagttaattagaggtatacatcaactatagaaaatgttgctgctgcatctacaccaaagggcctgagatgagtatagaataaacacagtatatggccaataaaccttacaataacagctaccggggaaatccaatgcttaactactaccattcgtggttgagaaaccatgagaatctttcttatagtaacactgaaaatgtcttgcaaccacctcctggatttaatgcacaataacaacctgaaaagaaatcattagaagatattttaggtacttttatgatagaatccaacaagaggtttaacaagaatgaagcaaggttggacaacatagaaactcatatttctaacatggatgcttccatgaagaacatagaggtgcaagtgggacaactggccaatgttgtgagtgctttgcagaaaaatagtagtttccttagtgatatagctgtcaatccgaaagaactatgtaatgccatctcactgatgagtggtaaagcactagatgggggtgtaagtcaactagtcctgaggttgaagacatagtagaagccaaagaagagactcctaaagacaagcctcctgaaaagtctatcaagaaagaagatcttccaatgtgtaaaccgccaattccttatcctcaaagatttatgaagaaaaaacttgatgaggagtttgctaagttcttggaaatttttagaaaaatcaacatcaatattcctttcattgatgcattagagcatataccgaattatgttaagtttatgaaggaggtgttgacaaagaaaaagaaattt

SEQ ID NO: 53519 - DNA, 862 bp, Cannabis sativa
  modified_base (708)..(718): a, c, t, g, unknown or other
tacaatatgatgcataattagttttatagacattaatatttcttgagatttctgtgtattgacactattgcatagtgagagcatatataggtgtagttatataatctaagtgggagaatattaaaatattttatgtggactaacataattaagtattgctcactcagtgttgtattagcatataatgataactatataaatcggtaatgcataatattaccattagaccataatgagatagacataacgtactaacacgctcagggcccatagacacgctctaaaacgtctttggtcagcctattggaccaagacaactaattctctcacattgggcatgtaggcccaatcaacccataatttcttataaagagaattgtgctctttattgggttttaaggtaggatgggtgttgctatagtgtagagagaatggaagagtagtgttcatcacacttaaactctcttttatatgtgtggctcaaagagttgtaatcaacatggtcattgaaaatcaaggtcaagattggagatatatttagggaaattcacaaaatactagaatttgagttaaattttagaaaaatactgtcacacgaaaatattttcaaaaatactatgtttttataaaacaccagtagaacacagaacagaataactcaaaataacagtagaacaactataaaacactagtgaaaacttaacacannnnnnnnnnntatgaaacttataaaaaaaatacagtaaaaaagtgtaaaaaataccgcctggcagtatttttataaaaaaatagcaaaagttaatataccatgtaaatttctctatatttattattatgctaatactttaaaattaaatgtttg

SEQ ID NO: 53520 - DNA, 1685 bp, Cannabis sativa
aaaatatatttaactaattttattaaacaataaaataagtaaataagtttagatattttaattgataagataataatttttgtgtatgatattaattaattgaattgatatctaatttaaatttaaattaaatttaaatatttaaaactaattatctttcaaaaaataataattaattgatttatttaatagtattaattttaactattaattaactttaacaaaaaaaaattgttaaactaacaattctcgttaagagtgatataaattttattttgatattatgtgcatgcaaaatgcaaataattaatttttgtatatatagacgttaccagttttaatttcaataatctcaaaacacaacatgcatgcttgatttaattaaaatgttttaaatacatatatatttatggatgttttagttatatatttatagtttcattatttgaaatatatatatacatttatatagtttagaaaaataaaaataaataaatgaaaaattggtggcacctggaccaccggccagccgctatcggaatatgttgtttgtcatatatatatacacacatatatctatatatatttaatatctatatatttatttatatatatataagagagaattagaaattaaagcagcctcatatcatcatcaaacgttcatcacactacacacaatcactcattcactatcacctttctaatacctatgtatcatatcatcatcatcatctatatatatatatttattattgtggcctttttattactaccacccataataataataatcacccataataataataatattattaataataataataataattaacctcctataaacaactcttacgttaccattttgtatatgtacatatatagatatttatttctccttttttttctttttttgttcttggcaaaaattttaagaatgtgaaatgtgatggaaaaattggaataacaagttaggtgtatggtaagatttgagattctatttcaaaattaatatttgactatgagaaaaatagtcaaagaatgtatcttggttttagcaaggtgaccatcttgagatgagacaagtgagtagttgtcgctgtcaccttaattaggcccttactgtaaaattttcgattacgtttcattagacgatataagtagtttattatgtagctaggtatattttcgatatctttaagtcgtagtatatttgagtataatgctctaatcttttaaacctcttttgtatttagaatgctaaatttcagtaaattagttgctatttcattttcaaaattgtaataatataatacacacattactaaatgcattattttgtatttcaatagtaattaatttgtttatgttgggtgtgtaacaaaagtttcacattggctagaaatgaaaaagatcatagatatataaggatggataatatctaaggtcttttgggaaggtgcccaaaaaattgaaactgtgtgagcttaagactaaaacagacaatatcatactaattcggtaattaaagtagaagaatagggcctaacagcttggagtaacaacttggaggtctaaagctcaaatcccaagatcactacaagaaaaatcacttttaccagcatagtttgctactacactaataaaaataattgttaccagcgcattttgcaaattgc

SEQ ID NO: 53521 - DNA, 1187 bp, Cannabis sativa
  modified_base (814)..(814): a, c, t, g, unknown or other
aattcacctaaggtgacatttttcaatggaccacctttggttaacctgtgaagtctatcatagcctatatgaccaagacgtaagtgccatagatacctttcgtctttattatcgatcttttaccttttgtggtttttaggtttagctatcttaaacaattcgttattaagcacaattggttcatatggtctaagaacataaagcctttgttctgtaaatgcaacacaaatttgaatgtcattacgagaaatgatagaaccagaactcaaaaaattcaatttattcaatttgaaatttagaataaatagaacattgtctaaattcaaagttctgttctgaaacttgtgttttgcttttcctctagctctaaccaatactatttcaccattaccaactttaagtttaactctccaaattttaaataatttcaattttcaagcaattgcaatgaacaacagacatgattagtagatctagaaacaacaatctaaatggatttgtcattctctaaaacacatgattcaaaaactaaagcattaccattgttcttagtgttgagaaatctgggacatttttattcgaaatgttccttctgttcacaatttgaacattgaatgatatgtctgcttaattgtttttgagttgtttttattgctagttcaatctgttgtgaaagataatatgaggaagtggaggaatcactttctctattctttttcaacagagcctgaagtagtaggattgtcaaaggaattattctcaatatcttcagctttctttttgcctttatctgcagtactggagagggacctcnttgcaagtgacaatgtcctttcataagcactcataagcacgcaattgagcatacaacttgtctatgttggacgagtttcaattgctaatcataaaagatacaacaaaatgcttaaactcaggtgataagctgttgacaataaattgaactctttgatgtcttgataagaaaattcccagcgtagttgctttctggaatttcaagtccatcatgaaaaagtgtgaagtgatactctgaccaagagtcaactttgtacttttgagttcatttgtaaaggcatatactaatcgaggattggggtgtgggttgaacattttgacactacaaatatcaataaacataaataaatttttggttcaattaaattcataca

SEQ ID NO: 53522 - DNA, 1932 bp, Cannabis sativa
cagttaagaattcgagaagaggattacgagtttctggtgatgtcttttggacctcaccaatgccccaaatgcattcctggatcttatgaaccgggtattcaaggattttctggaaaagcatgtgataatgttcattaatgatattctagtttattcacaattagaagaagaacatgaattacatctcagattagtactttagcgattatgagatcacaagctttatgttaaattcaaaaagtgtgagttctggttatcacgtgtctcattcttagggaacatagtggataaagatgaggtcatggttcattcggccaaaattgaagctgattaggattggccaacaccaaaattagctactaaggttggaagctttttgggtctagttggttattatcgtcaatttgttaaggcttctcgaatatagcgaaacctttaacataattgacctaaaagaatttgacaaaagtttttaggagttaaagcaacacttaattactgctccagtattaactcttccttctgataaggaaaagtttgtcatttattgtgatgcctcaagacaaagtctacgctgtgtacttatgcaaactggaaagataatagcttaggattctcgacaatcaaaagaatacgaatagaggtaccctactcacgatctagagctcgtagaaatagtatttgcgctaaacatttagcgggattacttttatggtgagaaatgtgagatttacaccgatcataaaagtctaaaatacttcttcacctagaaagacctgaacatgagacaaaggcatttgcttgagctggtaaatgattataactgggaaatcctttatcatcttggaaaggccaatattatagttgatgccctaagtaggaagggtcaaaactagatgaatagaatgaagcagatatctaagcaactggaaaatgaaatgatctgagctaaaattgagtttattgtgggactgttagctaacattaccttgcagtctactctcctggaaataattaaagaagtgcaatatcaagaccctaatttagtgaagtcccgagacaagattttagctgggaagaccaatgactttacagtggataataatagggtgttacaatgtatgaaccgtgtttgcattcctacggatgatgatattgagaaagaaattatggatgagtctcacacaactccttattctgtttgttcagggacagcaaaaatgtgtcaagaccttaagtctatgtgttggtggcctggaatgaagaacgatataacatagtatgttgcaaagtgtttaacttgccaacaagtgaaagctaaagaccaaaggtctgcaggtttgttatagccagtaaaccttctagaatggaaatcaaaagacattgtcatggactttgtagtgggattacctaggactgcaggacaatacgactctgtgtgagttattgttgacatgtttacaagtcagtgcacttcttacctgttaggacaaatttctccattgatcggtatgcagaactatatgttagagaaatagtttgtctccacggtgtcccaaagtccattatttctgatagggatccaaagtttacattaagattctgggagagcttacatatagccatgggtactcaattgaaattcaatacaacattccatcctcagacagatggacagttcgaaaggaccattcagattttagaagacatgctacaggcatgtgtgttagactttgaagaatcatgggtaaagtaccttcctctgattgagttctcgtacaacaatagctatcaagcaataatcaggatagctccttatgaactactctatggaagaaagtttagatcacttattcacttggatgaagtaagtgagagaaagttctcgggtcccgaagctgttcagagaacaagtgaggcagttgacaagat

SEQ ID NO: 53523 - DNA, 1078 bp, Cannabis sativa
tgtgtaggtaaggacaatgctaaagctgaggacccgtgagaacgagcaggtgaagattttacatgtcggggtggttaggcctggagcgtacgatcttaggggatatcaaggcttttgctcacagtcgctaagcgacaaaacttttgtatatgtgtatagcaaacttttataaatgtattttataaacatgatcccgggattttatatgtgtaatactttaagtttctaattaaataataaatttttaattaataacgatttgcaataacctcgttgattagcaacgagttgcacagtacattaaaaatcacgctaatacgcctatattagttagggtgttacagagaaaatttctcaacaataaataatgaaagaaaggataaaaataaaaataagaagatgtgtgtatatatatacacatatatatatatataatatcaactttgggataaaccaaccagccaaagctcctatctcaaaaaaaaaaattaaaaggtcaatttaatcttacactacctcaaaattcgatggaaacataagacaatagaaaaaaaaaataataaagacaaagagccaatgcaaaaaactcctaaaccaaaaatttacaaagcaaaaccctagaaagagaccttacccactataaagtgatgcgacaattgcagatcagctgtcggtgttgttgaagacaatcgaggatagtgaaaacatcaaagaaaccaacaatcagatcagaaatttaaagataaaataattaaaattatttaaagaaaataaatataaactcaaatgatgatattatttacaaaagtttataatgaaagagagaacctcaagggaagagaaaagaggccttgagaatgcagtgaacaaaaccagaagagaaaaccaacgaagaagagagaagcctccctgcctgtttttagttctcaatctcaacactaaaaaaaaaaatcaaagtgagcgattttttttggaaaatgataccgccaaattttttggtttagtatgtaatagttttttttttctctctttcaaaaaatgtgtggactttttctattcaatttaatgtcactattat

SEQ ID NO: 53524 - DNA, 1321 bp, Cannabis sativa
  modified_base (234)..(236): a, c, t, g, unknown or other
agccagcattaacttgatgcctctgtctgtttttaaaagattttaattgggagaagcaaagccaaccacggtaactctacaattggcagatcggtcattagctcatcctagaggagtcattgaggatgtgttagtcaaggttgacaagttcatctttccagctgattttattattctggatatggaagaagataacaacgtcctaatcattcttgggagaccattcttggcaannnccaagctttgatcgatgttcagaaaggtgaattaaagctgcgagtacaaggagaagaggtagttttcaatgtgctaaaggcgatgacttacccaaaggcaagtgataactgtttctttgttgacctgattgacacaattgtgagtgacaaaaagttgatagatgatcctttagaactgagtctaattgaagatgatttgacagagcaagaaggaaaagaagtaattgttatgttaagattcctatgggccattgaacagaaaatattatgaagagttgggagtagtaccaaaagagcttgcgccatgtactaaaaaacctccagaacttgagttgaaggtgcttcctagtcatttacgatatgagttcttggggaaggataagaagcttccagttatcgtgtcagcctcactttctaatttggagactgacagattgcttagagtactacgggcgcatagcaaggccattgcatggacactgggtgatgtcaaagaaatcagtccctcaactgtgatgcatcgaattctaatggaagaaaatgccaaaccaacaattgatgctcaacgtagactcaatccacccatgaaggaagtagtcagaaaggaagtagtgaagtggttagatgctggagtggcctaccccatctcagatagtaaatgggttagtccggtgcaagtagttccaaagaaaggggggtgacagtaattaagaatgaaaagaatgaattgatttctacaagaatagttactggttggaggatttgtattgattataggaaactcaacaaagcaaccaggaaagatcattttcctttgcccttcattgatcagatgctagatagattggcggggcaagaatactactgttttcttgatagctactcgggatatcatcaaatagccatagcacctgaagatcaggaaaagactactttcacatgtccctatggtacttttgcttttagaagaatgcctttcagattatgcaacactcctactacatttcaaaggtgtatgatggctatcttttcggacttaattgaatcttgcattgagatctttatggatgacttctcggtctttg

SEQ ID NO: 53525 - DNA, 1018 bp, Cannabis sativa
tttttttatacctgattattccttctaatttataaatttttcttttcctttattgttgtgtgggtaatttatgattttttatttcaatatcaaacatgtatttgggttaattaaatgattggatttttgttaatttgttagttggaatagtaataatttgatatatacataaatatatataacgttattggttttctaaagtttagtacaatatgaggaattcaggaccactaatgcataatatttagtgtttacgttcggcacaaaggtaagtgactgatgatatttatatgttctgtactgtgaagtggcagagtatcaaaattgcataagtagtaatcgtttgttacatattctttgctcacatacgatcacagacaagtagtaaatctccctctccttttttagacttctatatatccatctgtcaatattagtaatattgcaaaatatcacttttttttttttaatttattatcttatctatttttcattgtatgcagctgttataaaacagatatcaaaattgcataagtagcaattgtttgttatatattttttgctcccatacaatcacaaacaagtagtaaatctccctctccttttttagacttttatatatccatctgtcaatgttattaatgttgcaaaatatcactttttttttttatttaatctcttatctatttttcattttatgcagctgttataaaacatagattttggagggttttcatctgcggaggacctttggcttgggtgacacactgaagaagtccatcattcatattttttgcgcagaggtaatataagtgaatattaaaatttttgtttgatattaagttattattgtgaaaattacttgtctatattaaaatattgtagtataatcagcattacaagtttttgttgagatcatgtagtctgaaggtttcaccgtatgtttaggatcataaaaaaatttacaaatcacttctgaattcatgtcagatgttatatgtaaaattctttactcttt

SEQ ID NO: 53526 - DNA, 1252 bp, Cannabis sativa
  modified_base (300)..(301): a, c, t, g, unknown or other
  modified_base (584)..(595): a, c, t, g, unknown or other
  modified_base (728)..(738): a, c, t, g, unknown or other
ccagggttgtaagcctcactcctgttagctggatgaagctataggaagtcttcccatagcgagatggtcacctcgcttactcgttcttgagccgatctgactcttacacttagtttgttcattacacactaagggctttcacgattgatatgcgacgctttctccggtgcctcgctattcgtatttagtgacatatggtttctcgctaatacactaagtgtcagtttgtacattgattcctcgcctaagaccttacaatcagcgagttgtaaatatactctgatacttacgtaattaatnngttattccataaaaagatattgcctcgattcacattcccattatcttgagacgtgtcctttagccgaattttgggtataatagagttcatttgcaaaggcatgtaaaatatgaggattggggtgtgggttgttcattttgacactacaaatatcaataaacaaaaataaatcatttggttcaattaaattcatacacaagtttagaaaataataagtaactaaacatgtttgcaaaaataccaaaataaaacatattcatttattttccaaggtttccaacannnnnnnnnnnngtcccgtttaggcgagagacaaagatatcatttattgaatagagtagtcagctcatctaaaatgaaaacattctagaaaccttttattcgatcaaaaagagaatacgatgtcgtcccgtttaggcgagagtcnnnnnnnnnnntatttcatgagcttctaccattgtctcatactttgtaagtcttacttttagcagccattattgggatggacgttactaaataacaaccttaatacttatctttcgagattctacaacgttaaattgctaatgaatgaacatccattagggatactaaaacaagaaccatgtagaaccaacaatgaagatcgaatatctctttgattaaagctcattatttaaaatgtacttttaattaatcacttatgctaactatatattttaataataaaaattacttaatataacttggtctaaaattaattttcaactttaattaaatttttagaataaaataaatttcaaaaatatatataattttgaaatataaaaatataataaaataaatttctgaaaaatatctaattgaaattctaaaataaaaatttccaacataaatattttaaaaatttaattaaataacaaattaagtattttgaactaatccccttaatttgataaaatatccctattt

SEQ ID NO: 53527 - DNA, 1258 bp, Cannabis sativa
  modified_base (59)..(66): a, c, t, g, unknown or other
agaaaagtattttttatagaaaaagtttattataaatcaaacattatgaattgaacaannnnnnnnaaaaaaaaaaaaaaaaacaggcgtaagattacgtagaagaagaaacaagtatgagactataaattaaattttttcaaaatgtattatttttatatttcaatcatataaagtcgatgtcatcattttagttcctattgataatctcaaatttctaaacttaacactcaatttatcgttctattagttgatcaataaagtgccacatgtaaatatagtattgaccaaactaataattcttttaaaaaataaaaattaattaaattgaattcatattattcaaaaaagaaaaaaacattatatatacatattaaatgaaataaaaatcaattttccatcttttccaaccatatcatctttacagattaataataattttttttgtaaggacattaacaataaaccttgattctcgattcaaatactatttttcaattcttttttcacatacattcaaaattctcattacataaactttctactaatatttttcaatcaatgaaacgaaaaagacaaactttaattcctgcatgaaaaatcaaactctcaatcccaataatcaattgaaacaacatcaaattttaagttctcaaaatctataaaaataaataataataaaaaaaaatctcataaacacaaactcaaacattagaactccagtaaaacactaaaactcaaacattaaaaacacacgtaatataaaattcgaactcagaacttaacacacacatcaaaataaaaattaaaccataaataaagatttatgctactattttttcgaattccaatatttattagcaacaaatttaatattttaagtatttatgtcacaaattttttaatagtttagttaaaattttaataagtaattattattaattaaaatatataatttatttttttatatataatttaaaatattttatatatccgccgcaaagcgcgtaatgtttactagtgataacatatagctacttattatgagataaggttacgtttatcttaaaatcgagcaatgactaattagattcatcaaggtactatatatataagaaacctaaaaaaccagttaataagcttagaacaaatgaatcgatctatacatatacatatatatactagcaaaaagtacgtgcgaggcacgtatactaaattttatgttagttttttttttttatattatttaaaagtgata

SEQ ID NO: 53528 - DNA, 1460 bp, Cannabis sativa
tagaagactatagaagcagaggcagaagcggcttggttttcaaaattgactttgaaaaagcttatgaccgagtcgaatgggaattcgtggacttagttttgtgcaagaaaggatttggggaaacttggagaaaatggatcaaaggttgtatatcatctacctctttctcagtctttgtcaatggcgcacctaggggaaagttttctgggtcgcgaggactcagacaaggtgacccactttcgccctttctatttaccctggtggcagatgtgctggggagaatgacgaataaggctgttagctcaggtaatatttctggatttttggtaggaaaggagagagtccaagttagtcaccttcaatttgcagatgatacgttattttttatcgataatgagcaatcattacacaagttgttgaggctagtagaagcattttgtgctatatctggactaaagattaatatgagcaaaagtcaattgttgggaatatgtacggatgaggagattgtttcaaagcttgcaaggaggattggatgtgaaataggaagttggccattgcaatatctagggttgcccttggggggttcgcctaggaaatggagtatctgggaactagtgctggacaagtgtgccaaaagactcgatggatggaaatgtgcatttttatcgaaaggggttaggttgactctcattcagtcagtcctatcttctcttcccttatatttcctatcattatttaaagcacctaagtcagtaactaaagcattggagaagatgatgagagattttttctgggaaagtagtgagtctacaggtggggatcatctagtggcttgggacgaggtttgtaggcctcgacatgagggaggcttaggcattgggaggttagatttaaggaacaaaagtttgcttatgaagtggttgtggagatttcccttagagcagaattcgttgtggcatagggtggtggtcagtagatatggtaaggctgataatttctgggactctaagaaaggaagtcgtctgtctcctaaaggtccgtggagaaatatatcagatttgtatgacgagtttttgggtttggtacgttttaaaattggaagaggggatagaattcggttttgggaagacgtttggattgacgattatcctttggccactgcattccttgatttagcagtgatttcaaaggggaggaacactcctataaatgaaatgatagttgacgaggggttaccaggtagatgggtggagagttggaatttcaaattcagaaggcacttaatggatagagagttaccaagctttatttcattgatgcaaaaggtggaacatgtaaaagtgttaagtatctcggaagatagccgtatttggaaaccagatccatctggagttttcacttgtaaatcagccttttcctggctgacatcaaatccatcaactaggggtttggattgg

SEQ ID NO: 53529 - DNA, 1725 bp, Cannabis sativa
aaaacccaacattaagttggagaatacaagggtcattactctggcaaggggaccaaacaggggcaaaactgcctcgtcgaggcaaaaacacaagacccataatctgtgtaacacatttaaataaatcaatataatgtttaatgttattcggcgaattgttatatatcttgtcattacgggctcgccatatcgtatccactcctcttgtcttcgagttccaacgaaaagttacccaatcccgaacccgagctcccgagtctaaaattggcatgataccccatggggaagacctccataggtcgtaagcaaaattatagtagaggaaaatgtattccatagattcctcaccctccccacaaattgggcaatcgaccttctcaatgtgcattctcttaatgagttgagcacgaacaggtagagcatttgaaaggatgctccaccaaagaatcttatgacgctccaagactttcgagttccaaaatttattccacaaggcaggagcaacattgcacaacggatcacgatcaagagcttggactaggtaggaaaatttagacgaaaacaaaccactcggctccttagtccaaacccatcgatcactaccttgtccactaggcttttcccaaagagggagtggagcctaggtatgtagtccccgttatcaaggagaaaatctgctactttctccaaaccctcaagcctagtagaggaaggcttagggtagtaatcttggtcattgataatccacaggtcatcccaaatatttgtcaatttcacatccactattacttttcaagcacctttcttgaggatagatatcgatcgcaccacattctttgagaaccaagaattcatatttttagaggaacactccaagagcgatttacctctcaagtacttggcttttaaaattcacaacatagcgattaatcctcattaataagtgctcaatcccatttggctagcaagaccttgttcatttttatagtctttctaaattcaagaccaccccgagatttagggaggcataaatggtcccaaacctttaaataaattccacgattattttgttctctcaacccctccccaaaaaaaaatccccctaaccataccatcaattttagtggcaaccccaccataaattccacggtttaatgaagctttcataatttttattttttacatagagggattttggtatttcattaaagtcatgacctacgtcgtgtcgttttaggccaattttatatttttttagttagttttggtggcagaatacttcaatcaaaccagatagctaaacagtactactacctcttcagattccagaatgtgcggcgatgtcaccaactgggacgaagagacttacagggaaaccatattgaaggatagggagattcaaacccgaaccgtttttagaaccgcttgggctccctcccaaaaccctaatccggactccatcgtcgtcgcctccagtgacggatcactcggttcttactccatttcttcaattatctctgaccttgtacgttcatccttttctctatctaactataatccttaacctctcgaaatggcgattttcttcttataaataatatctgaccattgcagccactgggactagggaacaccaaagctccacagtatgtatggcgagttgattaaattttttttttttttgagaaaattatgttgaattgagctgagtatggtgttatgttg

SEQ ID NO: 53530 - DNA, 1383 bp, Cannabis sativa
  modified_base (798)..(809): a, c, t, g, unknown or other
  modified_base (1148)..(1149): a, c, t, g, unknown or other
aacgtactaaaaatactaataatagtgtgtttatataggctaacagagttacctaaaagatactaaaaagatttaaaatttaaacttaaaaaagataaaaattgtgtttagctgcatctacacttgaaaatgctatattttttttcgtaatcattttatctttttcttagaattttcctactgcaacggctgatggtattttggtcataactctctcgatattgcttagaattggacgattcaagatgtttcaaaaaactgaaagagagatatagagcttttattcacaatgtttttttcctgaaagtgaaagaatcataataaaaaattagcttaaaacttcatacttgatttcataatacaaatggagcgtgttgagcatctaaaacttgaatttttcattcaatatttcataaaaccccccaaaatccatgataaatcaacgatattcatatttttctctcatttcaacccatatgatatacttgaccattaaaacttggaataagaagaaaacaagcgtaaactcgaacaataaaatataaaaaaactactaaaatatgttctaaactaccccattaaacaagtataaatctcgtttatcaatttctttatttttttttctctttcccctaatagacccccctccttttcaacttctctctctttctttgtcttgctttctttctctctcgaaaagtgttagggtttatgccctaaaaattctataaagacattttttggttattaatatagagttgaacattttaatatatgcatgaatgttaaattattaannnnnnnnnnnnaatcatttatatataaatatcaaaaaattccttattcatatatgaggctgtgacttgtcgctgtacaaagaactaagatcactttgctatgaataaaacagtcaacaccatattaaacttatgtaatctcggttcgaattactgatgcagtatgacatcaaagtgaaggtgttgtatataatagagattatatataacaaggactgatatgaataaagttatttttatctaacatatcatttactataaaacctaattcatatcataatgatgatcagcagtagatcagcacaaatcttgagtaatcatgaattcctattcatgttattagtttctttnnttcactcgttaaagtttctcaaagaagatgattcttacaacttctgttttgggaatgtaataatgtggatggcttgaaacatgatttacaattatggaatcatgacttccctgacggatcgaatattggtttcctttaagtgttgattttagaactagaaagttgcgcacaaatttagatggaatctaaattacacttccactagtaaactaatggtactaaatgataaagaag

SEQ ID NO: 53531 - DNA, 1283 bp, Cannabis sativa
  modified_base (279)..(279): a, c, t, g, unknown or other
  modified_base (557)..(558): a, c, t, g, unknown or other
  modified_base (1214)..(1216): a, c, t, g, unknown or other
gaagaataagtggttgaaataaagtgacaaaattgtaactataaactggtccacttaagtgtacgaccataaagtttattttgcccaatcttttattcttttttaatccatataattcagccataatccctaattgaaacactataaaaaaacatgtactctcatcgcatcctcttgcttctcaacttaactaatgtcaatttaactattgttttcaacctagatgagagagttccttcctaagtgattttagcgtccttcattgttcttccatattcnaaccttgagtgaatgagtgtcatgtccacacatagcaagtcaagtactcaatcatagtgagtaagatggtggtaaccaaactcgaaggagagaatgagatccaggttcagatcttgataatgctatgctttagaaaggaatcaagggctatggatcttgagcagaatgagtcattatattctgctgcaatcaatgtaaggttttcttaaaccctttattttcattgatttagagaattcatatttaggatgttaatttaacatacttgttagtaaatnnagatactggtaaaatatttccaacaactggcctcagagccaagttaatgatttactttcatgtaatatggatttaaaatgatgaatattgtttgtttgttgatttggatgtgttcatgtaggtttatgtgttatttaataattgaatgttttttacaaaattttttcatgaaaataattttatttttttaaaaaaatattttatttggattccttgtgaaaaattaaacaattttggctataacggaactcgatttcaataaaaattgagaaagttatggttgtttgaataatcggatgccatgggtgttgaagtatggtgcttgcacgcaccaggtacttcggacaaggagagagatgctcgcggattcagacatgcattgtctgaaatcctcggtcaggtgccttcaaacaccacggcatgcgtctaggaccctacacccctgcccatgtcacatgctgcaagcgccgagattgctcggcagatgaggctgcaattcttagtcctccgcgtgcgttagggctacgtgcagccttcctgggctgcacgtgcagccctccgaggcagccactccccaaaccaaaattttgtgggattttttcaattttttcgagtttttccaattcaaaccctaaaaatcaaaataaaatattatnnntaatatatttaaacttaaatattaattttaaattaataatatttaaataatatttaatttttaatag

SEQ ID NO: 53532 - DNA, 802 bp, Cannabis sativa
attatggttactcacttaaaatagcgagtattgaaaaaatataataataaaatgtgaactcacttagaatataattatagtggttttggtctacctatctcttgctttgtattttcttattcagaacaactcccttttgaatggaggtagatttttatagagggtgaatgttacaaaatcatggtcataatgagatcgtacagctataattgacatatttaattacaacagttataaaaaaaaatgcaatgtctgaattatggtgcttgaatgcttgattgtttattgtttagtgtgttagcgccttttctactgatattgtggttttacaaaatatttgagattcctttttaatagcgcaagatcttttttagtgaaatctttctcccaggaaagggaaaatttatcccattatcaattacatctgttttagccttgtaggaaataatggcaattccgaaactgccccctacaccaacacccaacagtcataaagcaagggcataatggtacttttctctttgtgcggatccaaagagaatattctctctcaaaaaccgaatatgcctttaatatcagatttgctttttcaaaaaaaaacctactacatttatttttaatataaatgcattcttttcttttattgaaaccctagcaaaccatttattcttttattcaaaacatagcagccagcccaacacactccaacagcagcctctcttcttcttctctccttcttcctttgatctttggaaaccctagcagccgaacctccacaccagccgaacctcttcttcttcct

SEQ ID NO: 53533 - DNA, 900 bp, Cannabis sativa
tatttactttataaacgcaatccgacgaaaaattgtgataacaatccggccacctatatatagcacacacaatataatattaataaaatgaaaaaacctcaaaaaaaatttacaaaattgaaataataccaatgtacattaataaaatgaatagaaatcacatttatatcttaatgaacgttgagattcaacgttttctccgctaaaatcggtggccggagttataccaccacctttttttaaaataggttcgggtaaagtacaaatgtcaatttcgaattagatgggtgttttcacaccctttagcttccctttttataaaatgggttaaataagggaagctaaaggcccatattgtagtagtgaatgtaattttccacggtatcaacatttaattttcttagaaaaaaaaaatgaacaaatcaattttccttttaaaattatgttaaaaaaaatattaattataaatccattatcacataaatataaaaataccaacatcaatgattcaaagacttactaataaactattttagcctcaggaaaaaaattgaaaaaattaattcttaactaacttaacaaaacttctaattttttatttattgttaattttattatgaataatctatatattttctctatacgctttttaaaagaaaatatctctataataataataaattacacatttaaataaaaataaaaaaagaagtaaactgtttaaagaaaaaaacgtgattttcttatcaaatatacatctctataaacaaaaatcacataattcaaaataataataaataaaaaacaatatttattttcctatcttactttttttaaaatattattacttagcaacatttaatatcttaccaataattaacacataaattatgaagatca

SEQ ID NO: 53534 - DNA, 1034 bp, Cannabis sativa
  modified_base (759)..(762): a, c, t, g, unknown or other
catacaaaagtgtcacaatggaaattcaactaactttaatggtgattttggcgtcttaaatttacaatcgtaaataaaattaaaagaacattgtcacaaaacaaaataataaattaagtaaataaaaataaaaagtaaaacatattttttttttttgaaaaaaatacatattagaacaaaaatatgtatttgattatgtactcataaaagacattgttaaatgaagttaggatgtagagagagagtatgagtgttgagtgaatattgatattttgacttttcaaatggcaaaattatcttcttatcacaccatatttgattttactaaggataaaattgattatcacactattatgacacttttataatagtaagatatacatcagctaaatatttaataataaaaaaattattataaacaaaaaaatatgaaataatcccctacatatgtcaaataaaatttttgtacaatcaattatctttaatttttgattggccaatttcctttcctatagttaaacattgtattccatactgtagaaaatccatatatgtatatagatccattaaaattgaactttatatgcatctcatcgaatcatatgtgcgattggttcttaacaaaattaagacataatatttttacttgcaacctcatcacatgacaatactatattatttttttgatctttgcttagttttcgtttttttttttgttccaatgctataaaatatgttatgtataatatatatatatannnntttttatatatatatattatatgtgtattatgtgcatatataatactaatatgttataaatagcttcaactttgtcctaatttgatatgatgtggtgcactaccaatatctttacatataatgtagttatatattaagattcatggttttgatgatatttttttaattttctttgtttcctttaacttaagatatcattatttaacagaatattgttattaattgattttacaatattattatatataattaaaaataaaaggctaattagt

SEQ ID NO: 53535 - DNA, 697 bp, Cannabis sativa
cttgcaaatcattgacccacatagtactcgtgagtaaagacgagcttgcatctaattgatccacatatattacgatactaccctgtatttcaccactgtacctgaaccttcttggttctgttatttctgttaagagctaataagttagttataactaactcagctcataactcctctctatataaatatattttatcttctttgtaattgttacagaaaatcaataataaaaagtctcgaaaagttgttaaagcttcttctctctatactctgttttttcctcatatggtatcagcaaaaacaattgctactacatcaatggcacgacccacaactcgttctcaagatggtgttcccccatccacacatgagaacaatcaatcggagtccgatcccgatgcaacttccgctcaacctgtcattgacaccgcttttgcacctcgacgaaattcaagaactcgaagccagaatgaccatgacgaaccagctcactcttccccaaatcccattgttgatcttcccgaaccccttgttcagtctcgtcgaacctcgcctcttgattgattagctcatgaagatgtctcgagtcccttcttcctcagcactgcagatcaccctaggttaatcttcgtgtctagtgttctcaatggcgccaattaccagtcctggaagaaaggcattacaatggccctcactg

SEQ ID NO: 53536 - DNA, 902 bp, Cannabis sativa
  modified_base (513)..(518): a, c, t, g, unknown or other
ttttttttttttttttttttagtgaaatagaaagagaaagtggaaagagagtaatgggccattggtgggcttgaaatccagctggataaaggggtaatgtgacgtggtgcataggcaacaaaggacaaggtcattgttttgtactcaataattggattaattagttatacttatacatacatacatacatacattacatacttgttcatattcaaccaaattctattttaggatcataaaccatatacatgtatcttttgttacaataatttatataaatatatattgagttacgtaatatgcaacatttagtagtttaaggagtcctaataccatattatactactaattattttttttaaaaaaattactactaattcatttgaaaataatgaattaattgaagtatagataatatgattgtgataaggtgagtcatctgtggagtgtatgactctatgtggtcccccaactccataatattttttaagaaaatattattattattattannnnnnttattattattatttattttatatgtttgatattacttatataggtactattcctttttattttaaataagtatagtatatattttttatttttaagggatttttataaaaatattagattatgagtaaaaatttataattttactgttacactgaattgttttataaatatactatctttttataaaataactataaaacaaaaaaaaacaaaacaattaaaacaacaataaaataactaaaaaacaatcgtagaacaatagtaaaaatttaacacaatacacaatattttttaaaaagattctgccctacaataaaaaaaaattaaaaaattaaaaattttagtatgtggagcaaaattccctatttttaataataataata

SEQ ID NO: 53537 - DNA, 768 bp, Cannabis sativa
caaaccgcaaaaccgacaccgactagtaaacggactgttaaaaaaccgagaaaatggcgccacatcataaccgaaaccgtttaaaaaaaactgaccacactgctgtaactggcggtcggttacggtttggccaataagttggcggttataaccgtaaccgaccattaatttcacatttacttacttttaatatatattatatcttcaatatatattatataatattaatatatattaaacgtttttcatttataattatatatataaatagttttattttatattttttgtcaggaatctttttacttttttcaatgttactttatttatatatataatgttattattataatcaatcacattcactcctctctctcaccagctcacctcactcactccacccacgcggcacgcctcaccaaaccaaaaccaatcaattactcctcaactctaacattttatctctctactaggttaccacaaactaaacacacaaatcaaaagaaagaaagaaggaaggagcaggaggaggagcggctggagccattggagtaaaaacattaaatccaattttatgggccttgtaaagcccaaaccgtttcaaaccgtttaaaaactgtttataaccgcggtcggttacggtcagttttttgatgttaacagtcggttacggttttgtgaacaatcacaccgtaaccgcctggtcggtttggcagcaggtaaaaaccgaccgtaaccgactagaccgctgtaactggcggtcggtta

SEQ ID NO: 53538 - DNA, 1606 bp, Cannabis sativa
tggtcttaattttgttactaatattttttttatcgatataggagttaatacattatttttcaataagtattttgtgatatatataattaattcaaggatcatttataagtgttatctttctataagggtcaaagtgtgacctttcaccactcaaattatgaatattacatatttgtcacggcctagggctcgggtcgtgacaatatagcaattcaatagagatgttattataatcatgtattactttaaattttcttatgtcacgacttgttaaacgaagataaaaaaagttaaaattgatattgtgtgttaaaaaatttaaataatatatattataaatttttataaaaagaaaaagcttcatttcaaatttcatccttgccctctgaacacattgagagggagtgtttcattacagcatcattcagataatcaatccttatggttatggcactgagaagattttttcctaaaaacaagaagaaaaaatgtcgaaggtatttgatcagttgatgttgatggtactcttatcttaatcttacatgataaagtgcaaggctatttcttgttagttgataggtttaatctaattagttttcttggagaaagaaaataataataataataaaaagaaacatgttattgcatgtgataatgttaaagctaatactgtcattaattagtacattaatctaaggtcattaatgactaatatctacttcttcaaagtacagcacttgatattggtattacagtactgtaagaacttactgatttactctttcttttaagagtcacctgtattagttttaagggttattgtccaattaattttttttttaatgcagctgaagctatcttacttggtttccaacattacttggtaatgcttggcacaacaattttcattcctgcttctttggtgccctaaatattggaggtggaaacgtaagttatgacaagtgttatattagcaaactaaggaattaaaggactttatattgatttattgttgcgtcttaattaactcatggtaatttttgtaggaagagaaagcaaagatatatatatggttcaaacaatattgtttgttgctggtttagacactttgatttattgttgcgtcttaattaactcagggtgctctcattgtcacctctactctccacattgttgtcggttttagtggcctttggtgtaatgaggcaaggtctgcaaaggctatttcaatttattgtgtctcaaattctcatttagttggtttgcaatgctgtagttagttcctcactaatcatggttacaatttctgcttgtataggttcttagtctgttgtctgctgttcccgttggtagctctgtcaggttttggtttatatgagtttggtattcctgtggtaactcttgtaagaaaagcagagtaggttatttatgtataggtgttgaaagaaatactattgggatataattgttatacttttaggaattttaggtatagtcttgtatttacatgtggaatttttattgaattctaagggattaaattatcgcaataacggatagtgagtgtttgttgtcgacaacgacgagacttctctttggagtcaaa

SEQ ID NO: 53539 - DNA, 3363 bp, Cannabis sativa
actccctcccccacatgcactcacagctcgcgtgcgagtcccccatgggttcccatgcaagccccccactcgcacacaccacactccccctcacatgcactccctcccccacatgcactcacggctcgcgtgcgaggcccccatgagctcgcacatgaaccccttaccccttacaccatgccaagctcacccttcacaactcacccacagctcgcatgcgcacctcacgtgggttcacatgggagcccccatacactcgctttgacactccccgcacacgatgcctatccacacatgtatagtctctccccctttcacttgcgggtcgaacggatgctccaccacttgcatgaaggttccacgactcacaaaaatgccccttagctcacccaatggcccatgggctcacctaacgccccatggggtcgcacaatatctagggtgctgaacagcccaacagcctgccgactcgcataccaaactgtcacaatttggtagtcttactattttggccataactttcttgatatagatcagaattggacgattcaagatgcaaaagaaagataagaaagagatctttgaatcttatgtttgtgaaaagatccaattcttaacatatcactacgaaaatcctacaaaaattttaacctagtaagtttattttactaactctactcatgagttgttacggggttgacctccaagttgcacggatataccccgagacttgtaatcatggatttccaagattaacgatccttaggccatatgcattgactcaatctataataccctaggattataaaatggattagcgaaaccctaactagttaatgatgtgttattaaggaattatgttattatataatttaatatatgagaatttatattatttatgccatgttaagaccccattgttgtgctaggggcattttagtaattttgacccgagaaggttaaatattgaaattaaattattaatgtgcttatgggactatattattatatagtatgcctctgtcgtctttttcaggtgtgttctgacaggttggtgtggtattgttacaaccgggtatttacaattttgggattaattattcacattaaagttatgtgtgagaaatctaaaaattaattgggtttatttatgtgtgagatgactttaatgcccttaagtgtttatgtgtgtgctttttggccttaagggcaaaatggtcattttgacctctaagttatatttgataaaagttgatatttttaggaaaaaggaaatggaattttctagtttttacacctcaaacccgaatgcccccttttctcttctctaaacctatttcaaaatttaagatttcttgagaagtgcttgtattgaagctttgtaggtgaggatcttgagcttgcctttggattaatttgaggtagctatctatagctttgatctttgattaatttgttgaaattttattgttggaagatcatgaaataggttgaggatgagcttaggattttatgttggtgttctctttatgatttgagcatgtttatacataatctttgattatatgattgaattgggtttcggttgagctttagatgagatttttgaagtgtttttctagctctaatccatgtgtttttaaggtgttggctgctggaaaaaaaataataaggttgaatggtttgaagctcaagttcttgagcttgagttttgttaatttaaagcatgattttgtgttgttgtgcaatctgaaattatggggtctaatgttgaattttaatgcatgaattgttgcttttaactccctgtttgattcttagaaaatctattgtttggttttaggttttggttggttactggcatgaattagttgagtttggaagttgaaattcgtatgaatttcgctggttttctgggtttggaacccaggtgccgcggcatggcttctgtattccgcggcccatccctctgagtggaaccttggagttagtcccaagttccgcgacatggcttttgcatgccgcagcccgcctcgagtttctgggcaaattcgagtgttaactttgaaaatttataactttgtgatccaaactctgttttgggagttctatatactgttggaaagctcgttctgagctctatgtgattatctatattttgaataccacgtatataatttataaatgttgaatcaggagttaaccttatttgtgtaaatcccagaaatgtgattaggattacttgcacctggtcagaagcacccggggatttggaatctctatttttgcgggacatcaggtaagacagtagttagcactagagttatgcgcggtggtgcttatattggatatgatatatgtgattaattagtaatcgggattagggttatcacccgaacatgagcggtttactagcttagggttattaacctagtgatatatgttgtgtaaatgctatgcaatgctgagtatatgagtatattaagatttagggttatgtgttcaaggcataaccaggttggactcagtaactagaaccgacatgaaccgttctaaggccttattggatttagacgtgtgagcgcaacacgtaggtctacgttacgtagacataaataggcatgtgagcgtaacatgcaaatttgtgtcatacaggcatatgagaatggcattaatatttatatagtgtgataaatatgacattaatttattgtactatcttgctgggcttggctcatgggtgctctactttgtaggaaagggtaaaggtgtttctgatcaaccatgagtatgggagctggacggtgcatgtacatgttcgggtcacactaaaccaagcgggttggggtctaccaatgatgtaatttttgtgactctgttttaccgcctaggtcagctagtgaaaacgaacttgtaataatattttgtaaaatatttttgggatcccaacacatgaaacctttagtttataaagtttaaatttattacaagtttcttttcttctatttgtaaataaagtttaatttccacgctaattttattagtaatcctgcttaggggattagggtttcttaagtgtcttgggtagcgtgccttatagttagggcgttacaatttggtatccgagcgccaaggattttaaacttcctgtagaccggctgaacatgtacattcatcgttagagacaagctcgactcatggtgcagtaggtgttgagagtaaatactttactacttatgtgatcatttgtttaccgtattccattttaggcagtatgcaagcatctagagtatttatgtgttatgtgatgccatgctttaaatgctatatgattaagtgtttatttatatggaataaatagtt

SEQ ID NO: 53540 - DNA, 1906 bp, Cannabis sativa
  modified_base (439)..(440): a, c, t, g, unknown or other
ttcattacgtgtggtgacaataatcttgcttcctcgtgcaccagattgaaaagagcttttcaaaagatcccacaactcgtaattctcattccagacatcatcgtgaacgaaaagaaatttcttcccagccaaagcatccttcaaatctttctgaatttgatgtagctcgtttgtttcgcatttttttccaacgatcttctccaaaataacttttgttattttaagaacatcaaaatcatcagatacagttacccatactttcaagtcaaagtgttcttgaacattggcatcgtaatacacattctgagcaagagtagttttaccgattccacccatccctactatgggaataaccgaaatcttttcgacgacatcatcatgatcacacaacaatagcttaagaatagcctgtttatcatcctctcttccataaacttgnnaatcatctaacaaaggggcatgtggtctgtgtaaagttgttttgtggtcaacatttttcaaaccaagatgttctgactgttttaaaatatcctctagagttttaaggatatcttctatcttagatttcacttgaatgtggaagaggttacttggtgtgcttttgaggtcatctttctccaccctgagtcgcagagtttcagtactgatcttgtccatcacgtgatgtgcttcatagattaattctttaagcgcatcaagccaattccttacgttattgtctcgaagttgtttctcctcaccatcgttgagcagtgcattagccgatagcaacatagtcttcaactctttgagcaacttttgactgagttcatttcctcgaaagaagttaataacctctttggtagcaagcctatcaaataggacattggtgaaactagagagaagagctccttcaaccattaagttggccatactttttgcttttgagaaagagagataagagagagagaggaaaatggatcagagagagagagagacaagtgctatatatttttctattttgtaagaaaaagtgatccattaatttacagaaaaattctacaatgtactttttcgatgcgcccttatctgttttggtatttagaaaaaaaattaatttgattttttctttttttctatttatgatcgtatacgttgtagttatttaaaatattttttttaaaattttgagaaattcaaaaaaatttaacacgctgaaaatagagtttaaagagtctgttgcacgtgtgtgaaataaacagtttgaacatctatattgtaaattattttaaatttcacaaaattttataggatatctaatttccactgacatgaaagataactaatcaagtaatcacttaatttaacattttttttcaatatatatatgaaaataatattattgcatacaaaatatataaaaaaaatctttaaatgtaaaaatataaaaattttataaaaaaataatgaattatgtaattatctcaattattttttaatattatgaaaataatattattgcatacaaaataatataatataatttaaaagactaaattataatttaattttaataaataatttctacataattttaagaactatatatatatgtatatagtgttgcttatctgttattttagaacaatgatgttttaatgttgttgttatagtaacgtgaaagtaatatttttttaaaacaaaaatataagtgaaaatctatataaaaaaagataaaaaaataattgatgaaaatgtaaataaaaaaaaaagtccttaaaaaaagagtagagttttcatttttacaggtttaaaggtataagtttgaaaaaaaaaaaaattatcttatggaaaaattttaagaaaagttgagaaatatttttcccatatttttttttaactttctcttatatatttttatatatat

SEQ ID NO: 53541 - DNA, 748 bp, Cannabis sativa
tcgcggattggttttttatggccacagggttttaagttgaacccgaactcgcccgccaacccaaccaattttacttattcttacatatatatatatatatataatatattaaaaatgaataaataaataaattttaattagaaatgttggactaaatcgaccaatattacaatgaaaatatcaagtatattgaaaaaagatcaatccagcattgccgaggtatgagttgaaaaaaacactgtaaaaaataaaaagaaaaacattcaacaagaacttaacattgtaatgaaaaaataaatttagtgcccccaaaacatgattaagatgaattagagagagagtttatagtctattccataccgtcaaataattcaataaggtgtacataatataatacttatgagcaagcacatgcatatatgactcaaaataagaagttaaggcgagaaaaagacacagaggacccgtgttctctgagcccgaaactcgtgaacccaaactatttcacgagtcaagtccaagtataattttttgaacccaaaattcgcaaacttgaaacccgcgaacccaaaacccaatcaactgactcgatgttcagccctactgtgcatgttctttttattcctcattagtaatatcatgccatataattcttgataaattgtatcataaaaataaataaaattactgacaataaagaaaatactaaaaaatagtctgaacctttcttttcgggccttttctaata

SEQ ID NO: 53542 - DNA, 800 bp, Cannabis sativa
agcagcaccagcaggagaaaaacaaacagcaacagaaaaaagaagggaaggaaaaggcagcaaacaagccacatcaagactgggtggttccaaagaatacagtctctatggtagctgcaaaacaaccaggggacttgaaggaagttgcagagagcagcaacaatacgtttcatttgctgcaacaaactgagagcagggtagaacagcaggtatctactgaacacaatgtgattattttttctgatgcagttaatggataacaataatatagggtgttggaatgtgagggggttgaataaaatggagaagcagaatactgtctttgaattgtgttgcatgaataagttaggagtttgttgtttgttggagactaagctcaagaataataaaaagttagtgagatgatggttaggaagttcactaactgggattactatactagcacaactgttgaaaataggatcttggtgatttggaggagaagttttactcgagttattgttgttagagaagacccgcagtttcttcattgttatgtgaagatggcaggctatactgaagcaatgaacatcacttttgtatatggctttaatacaggagaggagataaaaggtctttggaagggaataatcaatcttaaggtcacttctatgccttggttaattacaggggactttaattctttgtttgacttggaggataggaagggaggcaaggaagtcactttgaatgatctaaaagactccactgagtggctggctcaaagtcatatggacagactccttaagacaggttcgggt

SEQ ID NO: 53543 - DNA, 1317 bp, Cannabis sativa
  modified_base (26)..(28): a, c, t, g, unknown or other
  modified_base (289)..(291): a, c, t, g, unknown or other
  modified_base (752)..(753): a, c, t, g, unknown or other
aaactagaaactaaaagtttccctannnataaaaagcatggcaataccctcaacaacacaaaaatgggaagaactagtgttcccaattttccccaaccgcagaccggttctataaccggaattccggttgtgtgcaaaaaactataaaaaattcacatctcaaccaaaacaaccccaaaccatatcaaactttccagacctgctctatacatcccaaagagcatatccaaagcaagaaaacaaagcttcatgcacaaatacaaaaaatgccattaaagctccaagcttnnngttcaaaactcaagcttggttaaaacccattcacatgcatcaaaaagtacttgaatctactcaaatatacataaacaagcctctgaaaacaacaataatcaaataccacaagcacagcaagctatttcaacatttcaccattgaaattcaagattttgagtctaaagctttgcacaaggttaaatcccacaaactaaaaacaaaaccagtttagatcaccttaaataaacatatttaaactacaaaaaataacaacaaacatgcacagcagctaccaacatttaaatcaccaagcatgcacttatttttcttcaaaattcaagaacacatcaagaaggttactagaacttataccttagcttgaacaacacttagaattgatgaaaaatactagaattgcaaagaaaaaacccagccttagtagtcccaagccaaaccgaaatagagagagagagagaganngagagagagagagagagaaaacttctttattttgcaaattttccaatttttgaataaatgataaaaattgcataatctattctttagttaagccaaaataacattacataaatcacattatcaccaaaataataagtccacaaaaggacaaaggcttatggggaaaaatgactattttgcccctcccacactaaaagggttaaaaagcacttaagagtattttgggaaaactctaaattcccgactaatcccgacattccaaatgtctaaataaaccggcccgctatacaaaatactaaattgtgattctactgagccatacaccgcgttccatgttgccaggcaccgataatgtaaaattatgaaatttcactatatgacttaaaatgcattcagaatttaaatgtaacaacaaaaataattatttaaatatctataaataattttcataagtaaaccttaaatatatgctaatttccaaattaaactaagcggtctttacaattccctcacaagagtaccccttgcccaaaaatacattagacttggtaagtatgagcttac

SEQ ID NO: 53544 - DNA, 846 bp, Cannabis sativa
  modified_base (721)..(723): a, c, t, g, unknown or other
cagaacctccaacacacacccacccaattgagttagccccaagtggttatttcgcatgcttaattaatctttataattacttactgctcaattaattattatttcattatataatatatatatatatgagaaatgttaaaggttagcacattcctacgtattaatatcgcgtaattaagtatcagatctcatataataatttgtatggaatatcgctaaccaatcacaaggtgacacatctagaagatactagatactactagtgtttaataataataatcaatatatattaattaaattaaatgccccataattatagtgaattaatttaagtgcctaattataaatgtgcaacattttcatttttctcgagagatatacttttaatgaacattacttataaataggtattattaaaacaaaaaaaaaaaatatactttatttttcaatctaattacaaaaatctctaatttttattgaattgtattagggattgtattattctattggctagaagaattaataaaaaaaaaacagttttcataaaaaaaaaaaaaataagaatttgagttatatatttttttatataaatagaaataatgtaaaaagatatattattttatatatattttaattaaataactagattaagtatagaaatttaaatttctcttttattatttgtcattgaattaaaatctaataatttaatatttttaannntaatatttatagttaaattttttagtaactataattgggtaattgttccatatacatatttatatatatatatctttaactacagatataataaaagtgactatgtaacaacaatctttggtt

SEQ ID NO: 53545 - DNA, 664 bp, Cannabis sativa
  modified_base (314)..(314): a, c, t, g, unknown or other
ccctgaactcgaaaccctaaacctataacaatgaaccacgaaccccaaaactgaaaccccaaacccgaaacctaaacccaaaactccaaaccccaaaacctaaactccaaactccagaaccccaaccccaaaaccccaaaccctaaaaccctaacaccctaaaccctaaacccccaacctagaactgctaaccttaaaccctaacccctaaccccaacaccctaaaccccaacactcaacacctaacatccaacacccaaaccctgaaccttgaacctagacgcttaggtggcttttggttagaggtaatgaantggaatggaaaggaaataatttttgttgtattattttgtttggttgtatttgaaagttttaaaatgtcattcccatggaatgccctttccaccattttggtggaatgactattctattttcaaatggaaggaaacaccattctaatgtaacatgagaaaaaatttaataatttttttaccaatttttaatgcattttaaattttattttattccatttctattcccatgcccattcccttgaaccctaacctggaaacctagaccccggaccctaaaccttggacccccgatcccgacccttgacccctcacaccctgaactctgaaaccctgaaccctaaaccttgaac

SEQ ID NO: 53546 - DNA, 2286 bp, Cannabis sativa
atatatatatatatatattttgtgcattaactaactagctacataaattttgtaactagtaactatttattaaattcctcctaattactagttacatgaattaattagtaactagttacaattttatttcttttgaactcttttaataattggattcgtttgtaagttttgaacttaagaatcaagaatcttaattggaggaggacacaattatttacaagtgttgattgatttagagctagctagaggtatactttttctataacttttaatttattaattaattatcaataggcatgttagatgagtttgaatatcttaaatatttattcgtagtgaagtaggttctatgaatgagtatactgcggtcggatgggtagaatatatatgcatgttagaggagtttggatatcttaaatatttatccgtaatgaagtaaattctatgaatacatgtatttattgagatttatgccctaaaagtaagtaattaatagagaatatattacagaacatatgaaatacaattataagataaataaatacataaattataaaagtataattaataaatatctaaaaatttcttatttgtatggagaaggtataattatataaggatatacaagagaattaagattatacgatatgaataaaactagtcagtaatgtattaaaataaaaaagaatttaatatggaactactaagtacagtttactatacaatatactatagtgtgtatgattatgattcggatcacatatatggatagacatgtagtaaatgtgttgtgtataatttgattatgcatgattggtctgatatgtaataacatcttttattaacgtattgtttgccatgaaagagttattcatatcacaacgatgatcattagtaggtcaatctgaatcctgagtatacattaccatcaaagtcctttacgactacaaactgcttctggaacatgtactgcatatcatttcagttttggatagagccagacgataatcttttccaccagtcctcgacaaatttggacaatgtcaatgaaaaatacgaacatttcccatcttcactgacttgtgccacttgcatcagctgattgtacttggaaaggtgggccttgggtgtccattttgcctccgtacgactccatttatgatattcagaaattttttggcagttatgcctcaatgattctcttcacacatagttctggagcctcatcttctgagtcagatacgactccacatttcttccaggccaaatggtctgtgagttttgttaatgcaactatgtgatcttttagccacctaatatgatcatctgggagctcacgtccatggattctgtcgttgatattgttctagagatcttctccatgaggtctagccttttcacctcttgctttttccttattttgcatttagacggtccctgaggtccgtcgttaacattctgtcttttgggtctagatcttccacaggtatactctggttaacagaattgctgaaatagtttttccatcgctaaacattgggcctttatacctaaatacccaacctattgttctgcacgactctaccatgcagattgattggttggcctagccctagggctcgatcatccctttaattcttttcgctgggtgggtcaattgtgtttctgttgttccgtggagcattgttcgtgggtttttgcaaaagggtacccattacacccttccttttataattgttggggtagagggtcgaactctaggatggttaaattcttaacatgagggttttcatcgaggtggttagcctgagcttgtagtcgtgctagagtttcttacatctgttgggaggcttcaggattaaccttcttgctttgggtatatgtgagcttttgctaaagtcgtattactttaggatcttgctcgtagtactcgatcttcttcatactcctggttaaggtttttgtggcagtcatcttgagggtcttcatcatgattttcttgattatcttcatcgatgggttcttcatcaaaatgttttgcacattgtggatcttttctagcgtgtcgaccattgacttctgagatgtttctttgtctcctatagtacccgcatgagtgtgtacttgaacatcatccattccagagtcttcttcatcctcacaagcagttgatttcctggtggttttttattagccaccattattgtaaatgataactttggtgaaaaatctttcttcaagatctcaatgaaagcaccaaaatttttaccaatttttttcaaaaac

SEQ ID NO: 53547 - DNA, 1595 bp, Cannabis sativa
tcccaatctgagttcttgtcctagtctaggttcaggtctcggtcctagtccgggtttgggtccaagtcctgatctcagtccggttcccagtcatgggtttgagtacgagttatagtactcttgcaggttttggtccgggtctaggtctgggtttgggtttgagttcgagtttcagtctgtgtcttggtctggctcttggtctaggtctgggtctgggtttgagttcttgtacggttctaggttctggtccaggtctcgagtcacgggttctaagtcacaagtcttggcacaagtctgggtctgggtttgggcctgggtcttggtattgatcccggtctgggtataggtctgtgttcggttctgtgtctagatccagtttttggtctaggtccaattcctattcaagggtactgattctggttcttgttctgatttcaagtcttgggttcgagtcagggtttaggtcctggtctggaaatggttccaagttcgggtctcggtatgatttcaagatccagacaccgagtacgggttggatccgagcctggggtcgttagtcaagattcagatcccaatctcgggtcccaatctcattttaattcggatcttaggtcccggtctatgtccgtgtctgggtccgggtctgggatcgagactggggttaggtcttgcgtcccagtcccagtcctgggtccaaattgttgttctaattttgagtcttggtccccaatctaggtctaggtcctgggtctaggtttgagtctccaatcccagtctgggtcaaggtcaaagtctgtgtctccgttcgcgttcgtgtcctgagtcccgatccgagttttgatttaagtccgcgtcccaatccgggtttgggtctaggtcgttgtcagattccagttctcgaactcaaacccaaactcggactcggacccaagtttggggtacaagtctgggtctgggtctgggtccgagtctgggtttgagtttgagtctgggtatgggtcctagatccaaacactgactacgggtcaggtccaagccccaagtgtagatgtggatcacggtctcgggtcccagtctagttccacttcgggtcccaggtcctggttcgactctggggtaggactctgggtctctgtcccagttttgatgcccgtgtcctaggtccaagtccccaatctaggttagagtcctaggtcccgctccgagtccaggacccgatcggggttcaagtcctggtccgagtctgggtcagagttccgatctttgacttgggtccagatctctggtttgagtcctgctccaggtatgggtccgactcctgagttccaatctaggtcggggttccaaggcccaagtcaaggtccgagtcctaggtctcggtcttggtccatgttcgagttcgggtcctagtcctagtttcgatttcgatttagtgtcttggttcggttcgggtctgagtctaggtcggggtctaagtcctggtccgagtcttggtctgagtcaagatttaggtccagatcccagtttgggtctgggttcgggtccaggtctgagttcgggtcccaagtgcgggtccagctctggatctgggtcac

SEQ ID NO: 53548 - DNA, 956 bp, Cannabis sativa
tgttgtgttggacatcttaaggtgccaaataataatattccattattattaataataataaaaaatagtaaataccattttgagccacatgttttgtaaaagttaccgattaaaccctgaccatgtattttctaaaattgtacaaataggaccatgaactcaattttttgacaatttcttttttaatataaccaacttgaagacaattcctatctctaatatatgcataaaatataaccagttttgttataatacatttaaatcgagttattattaacttttattttgacagaaaatagttcaggggtctatcatttaaaaaaatttttaacaaaaagagagtctaatcagtaacttttgtaaaataggatccaaaatggtatttattcaaaaaaatattgtacaaaaaattatacataaaaaaacccataaaagttattgtaaaaaaagttgaaaaaaaaataacaatcattcataacaaaaaaaaaaaaaaaattatatcaagttttgcatttgtgcattagagcataatgctaaaaattgatgcaaatatattacaaagtttttttttaccaaatatagtataatttttacatatcccattaaaaatgttcttgcaaacttatatataataataataaaaaaatttaattaaaattaataaagatatgtatattaataacgaaaaatattaagggaaacattaaggtgtttagcatcacaaattgtagcacatcgttattggtgcatttcaatatctggtcctagaaattttaattcaataaatgatttagaatattgctaactaattattgggtaccacatcgacatgatattaaacacttaagcttgattggtttgagatttgaaaacaattttatatttttgaaaacttaaaaggtgggggtccacataaaaatagttgattggtatggtgttttcaaaaactaaatttg

SEQ ID NO: 53549 - DNA, 4216 bp, Cannabis sativa
  modified_base (1823)..(1824): a, c, t, g, unknown or other
agttgtttacattgtgaataagaacgcaagaaaacacaattgtattaagttcgaatgaaaatagtacaaggcatttaagataagaaaaaacccaagatgggttacaaacttgttctttacgaaaaagccactaggggaaaaccattaagtcatcttcctaaacaaaggatgagagcagaagttgataaacttgataaaaaccatctgcacgtagcttggagaaagaccggctacacatagcttgagaaagaccgactacatgtggagagccttggtctctgcataaacctcattctcctcattagaggatcccattttagcagtcgagaccttattcctagcctcaggaaattcctcaatcccataaagaggttggcgcaaaggtcttctggtgcaggtttgagtcttgggttggctggattctctgatagaaaccacgccaactcccctcctagattcattcgaaaccatgccaaccttcttctgcgattccttgttaaccagaggaggacctctaagatcgctcacaagatctatgtctattcctatggagacgaagaaaaaaggtcaatggagcaacaaaaaacatacaaaattaatgatatgtataaactgactcaaaccaccattcacaagggatgatactcaccttttaggatcacttgtgaggatctcccatagcgggctacggaattcccctagtttggattggtcgtaagctcttcagccttggaatccatcattttcggttccaattcaggcttaaagttcttgggaacgaatggaaaaaggtttgtgcatcctggtattatgagtttgggagagtgaacttctgaactcagaagggacattctagcaggaaagagatgatccattctgaaaatggatctcactaaaaagcaagaggtttgtgaaaaatgacaagcttgagccgcccttttatacacaaagtccagtgacaagaaagctaaggattgggaaatttaagagttggagggcagaatatgaagggatgattcataatgaccctcgaaacggtacaaccgccagaatcaaaggacacatttttccaagaagggattttgacgaaaatgccctttgtaattaataaaaagcacttcttactaaaaaaaaaatttaagggacaattgttatacctaaaattcggctgcaatctccatggaggacgcgtgtcacgataaggggaatatgaatcgatgcaatcgcttcatatggaataactcattaattacgtgagtatcaaagtatatttgtaacctgcagagtgtaaggtcttaggcaaggaatcaatatacaaacttgtgcttagcatattagcgagaaatcatatgttgctgaatgcgaatagcgagacatcaaggatagtacacataggaagacaaaagcgacatatatcaattgcgaaagcccttattgtacaaactaagtgtaacaaccggatcgactcaagaccaagtaagcgaggtgcctgtctcactatgggaagacttcctgtaacttcatgtagttatcgtcaatgaggctcaaaaccctagcaagtgagaagttaacattcaaatgagcttcgaagaactctttgtaaataagaaccgaggtcgacacaagaaatgcatcgtcgacctcagaaagaaaaatggccccagctcactattggggtcatcggaaccaagcttctgtcgagacaactccagatacagtaattaaatgtgtttagttcacaatcattttgacctagtaaaagtgggaaaatcacagctatatgattttcaaatcataactgcatttacactacgtgatatgtnntcaaatcccatgattttagggatgattgttgtaaacatattacagtcaacttcgtaattcactgtccactatgtaattataatgagtttcaactaagatgaaaagggagacgaaaaaactcatacaaaggattgccctgaaaaaacaatcaaaaatctgaataagattgactcgtggactgtgtagaattttaactgcaaaaccacgtaaaaaactctgtgttcatacttttatttttacatcttttattttttctgtttgaaatcactactgtgaggctcaaatttggttaacgaaagtctgcgttaacaaatagttagacttgtaaatacttatcatgttgtaaactttaactttaataatataattaaattgtatttttatttcaaattaaatctttattattataattatttcaacaaaaactaatatataatcactaataaaaattaatacataacaattaaaattataaataatattgagaatgaaggaaataaatacaaaattaaaaaaaaattgtagccggctgtgcaaaactgtcagcaataatatagtatataccgaccagtggcggacccaagatttaagttaagtgatggcaacacttttttttgtaagtgagggggcatttttttttttttttacacagtataatattttaaaaattgatgcaaatttgttttttagcattaaatgtagtataaagtaaataaaaaagtaacaataaaatattgagttcaataattaaaaaactaaatacaagtctttattggtagaagttcaaaaagtaaaattcaaatactaaagtaaatatgtttttattgagattagaactcaagaattccaatatgtatataaaatagctttaccattatacgcaagtttgtattatgtccataaactatcacttttattgaaaaatatattttgtaactagctgaaatgtatatatattttttttttcatttttttttaggagggcaattgccctacctcgcttctatgtgggtctactcttgttgctgacgcttttatactgtcacatatactataggtgtgatagaaatcaatagttttatagtccattaagaattaaattgaaaagctactatggctagatgggaaaaagggagaggtcataaatttgaactcccaagacctttaaactattaagttattaattgattgcaaaataccattgcactcaaaaaaatattaacaattaaattgggaaaaataagaaatattaaaataagcttaaagactatttattttacttaaaaaccctaggtagttgtgtcgaactacatatgtgaagaaaaaaaagtacataaggtacatatatatatgtaaaaataatcaatattgacatggcttcgtatgcacataaactaaataattatgaatatatgtacatcgtcgatatcctacctagtcaactaaattgatattctcttattccaagattgtatattttttgaaatttaatggtacattaatgtgaaataaatatgtgtatatattatatataaatattgctgaggcaaagatctttctagattagtaaaacgttgatactgacttcatattaagcgtccatttgattgattttaaggcttttttggcaagttgatttatgcaacttgtgtttctcttggtggtggtgagtatatgttcctttagaaaagataatattccaatttgagccaactctattgcgtcttactatagttaatatatagatagagccttaattattcacacaaaagccttagtcttatttactataagtgttgtgagtacgtaattaaacagcaacatatagttgtgagtagtgcacatcacgcatgttccattaatgtgcaacgacaataattttatttattattttttttcaaaaaaaaaataataaaataaatagtttattggaatacagtagtgaacatactttaaggttacatttagttaagcattttaaatagtaatattaattcagttataagtcttctatcaaacaaactttatatatgataatcatcttttagcattagcaatttaattgtaagctaaaaaagtccataatgtgtaaaacaaaaataaaagtgcactattgatcaattgcatttcttgaccaaattgctaatactaaagtatgaagatacttaggccaaagtggtagaagggcacttagctagggtgatagttttgggttcaaaattgaatatgtagggccagtttggcacagctgtgctgtgggaaaaaacaaatgtagcagtactgtgagaaaaagttgttgtagcaaaactgtagaaaaaagctgagctgagtgtttggtaaattataaattttaaagtactgtgaattgttaacatctattataatgataatg

SEQ ID NO: 53550 - DNA, 977 bp, Cannabis sativa
ttgttcttaagttaatacaaataatgaggattaggctattaccgaactgctcgggactaaatttctataaaattcttgtgactttatttgctttactatatttcactcatattaaactacttgtcgctttcaaaattagactcgctgtcattgactaaaagagaggtcaacacaatccaaaaattaaattgttactattacagcgatagtggatagaacgattgatagaggtgattcacgaagacgaatgatgctgaaatatatatatataaaaaaaattcttccataacttattttattaggattaacttgtaattagatttattaacttgttgacacttgggctaattttacaatatttgtgtaatatataattgtaaatgatttaattacttatctgaaatgaaattaagtatattggctaatcataaaattaatttaaattatatttaatttatcttttaaaaaagtaaatatttaatttaaattaaaataaaattatatttaatatcaattaataaataaataatttaaataaattaaatttcttgatttacaatagatttttaactggaaaaaaaattattaatgatttggcgtcagtttttaggcctttaacgagggttatatgtgcatatgacgtcaattatatgtatatacccgatgccatattgtacatatggtgtaggttctttgataataaccgatgccatagagaaacatttaccgttggttgtttggagtcctacaactttgcttagattagcgtcggtagcaaatttttccaaaactgactctaaaatgccttaaaaaccgcctctaaagcccatatttgtagtagtatgattaagaaaatgtcacaagtgtgtgacacattttaatctagtgggggatttttatatcatttaataatataatatgtagattaaaatgtgacaatatatattattatgtgaagaatatatattaagtgtttg

SEQ ID NO: 53551 - DNA, 995 bp, Cannabis sativa
caagaactcatcaagaattcatcaaggaattctacaagaacacaaattgaaggaggatgtcgatggctaggttcaaactagagaagttcattggatcaactgattttgtaccgtggtaagagagtttgaagggtttacttgtgaaccaaaaggtggcaaaactacttagagatgaaaagttgctggctgagaagaagctagaggaaattgtagaaatggaggagatggcatactacaccatcattatgtacctgtccaatagagttagaagaaagttaatccaagaaaaggctatgaaaggattgtggaataaactagagtagctgtacatggcaccatcaatatcgagcaaaattaatcttcctgaaagattatacgagtttagaatgaactctccctttccttagataataatattgataaatttaataaaaaaattgttggtttagctaacattaatcataaggtagacaaagaaagtcaagcaatcacattgcttagatcattgccaatggcatataaggaagttaaagcagcaatcaagtatgacagggatgtgatctcattggttggtgttcatgcggcattaaagtcaaagaactttaaattgcaaatcgagaaggagactaggaaagaagaaaccaatcttgcaagaggaagaagtccaaagagaggatcatcaaggaacagccagtcaccatcaagattgaagtcaaggatcaaagacaatcgacaatgttaccaaagtggaaagattggtcacattaaaagattttgcaaccaattgaagatgcaatttggtttcagatcaaactacgatgacaagagatgcaacaatttccagaaccagtattcaaaatctaataattagggaaatcaaagaaaagactctgcagctgtggctggagcagtgaagatggaagttcagataaggaattattttctatttcaaaaaataatactagtaaaaaagtggatccttgattcaggatgca

SEQ ID NO: 53552 - DNA, 1155 bp, Cannabis sativa
tttttaattttattattatttattttatattttaaattgaaattattgtaataagaaattgatgctttccattttaattatggtaaactgatttacatattacatttttcgtaaagtttaagaataaaaaacttttatattaaatttacgaatccagcctatatatatagacactctcaaattttgttatgtgagttttgcttaagaatatagtaaattacaatatatgtattatcaaatacgttacctaattaaaaaaaattaaaaatataaaaaatacgtatatatatatataatcacattcaaatgacacaataatgtagcaataactaaaaaaaattcttaaagatcaaaatctcaaatcccattttaaaaattaaaaaagaaaaaaaaaattattacctatttaaaaaaaattaaacatacatgtattacacttaacatcacctaattgaacctagataaaaaaaaaactttttatacgtatattgcatgtaatatcaatctagtatatatatatatatatatattttattttgcatgataatgagattaattagaatattttattatatatatacatatatttgttcatatattgcactgtaatatatattttacactgattattctatatttatattgtagttcatttttgaaaaaattaaaataatttacaatgttaaataaaattcaaatatacaatttattattatatatattaattttagcaagtataaattagtatatttgaactcgaattttagtattgtaaattatttagtttttttttttaaaaaaaaattgtaacatcctcgtttcaaacttttattgaatcttcttcacgaactaatgactcttatacacaagtgttttcaacgtgttttatcctcactcatatatttcttgaaaaaactttccaggaagtcaactatcatgaaattaccccaggtcaagcacttgtgaagttcttttgtgatgaactatcagaaaataaaatgcacattattaatataggcagtaccaattaatctatttaaactctctttaattgtgtattcccataactatacagttttagttaaaatcatcacacttgacatttttcaagcgatgttgaatagcacaacttactcaatatttttctgtatagat

SEQ ID NO: 53553 - DNA, 1615 bp, Cannabis sativa
tttgcagcaaccacatggcaatgccatttacactgttttccagggaatcgcctcccaacttactcctgagcagagccatctttcaaagaaaagtttcacccatgctgaggttaattgtgctctcttctaaatgcctcctgataaggctcctagaattgatggctttaacaaccaattctaccaaaagaattggcatgtggtgggtaacatggttactgatgcttgtgctaagcttcctaaaccacgaggcagatatattccacttcaacaccactctcattgccctgattccaaaagtgagagagccattcatgcttaaaaatgtccgccttattagcctttgcaccacaatatacaaaattatttctaagaccctcgccaacagaattaaacaggttctcaaccttcttacatctcccaagtgccttccttaaaggtcgccttatccatgataacattttgatggcataggagctccttcatgccattaaagggaagaagaaaagctcttagaggttgtgttatattttgtgtcataaataaaattcatttcaatataatgagatttattaattaataaaaaatcaaaaattgcttttatgttacatggttcacatgatttgatttatttgatgattatgtttaatatataattacttctattaagtccataatatatataaatatatatatatacatatatatttgctcattttcttttctctctgtttgtgttcttggtgctttgcaccattaatgttgttcatacaagctttcacctttagctcatttttaacatttagaaaactacccacatgagcttctctctctagattttctatctatagaatttagagcttctgacacttagtctattgttgtcattatcatctcgtaagaaataaaaactcgaagtagacgtcgcaccattactgtcgcgatatagggagtgaactactataaatttactgtgtctctcttatataaacttaactacttattcattctcgccaatctagcaagtgggtgtggtttagaagtctagtccagatttctgagtcaacacttaataaaaataaaatataaaaaactatatcttttatatcaaaaatatattatataaaaaatatttaagttagacttaattttttttattattatttctttccgccgatggaataaatctagcacttataatgtaaaaatgagagattttttaaggaactatttcagaaatacacaagaaaaaaattacataagtacgaaattttaaacatttttaattatcgcttttaagattttatttacataacatatttatttacaattcatacggttttttaatgttttcatgttatactcttattattttattgttagttttcattatttatatattacttttatattatttgtatgttattttcatattatttacatataatttttttctgttgttacactgtaaaaaaatgtatgtaaaaaaaaaatttcaacataaattgataaaaagtgtaatttttttaccaaatattgtactttgtgtatttttttttttttgtttagttaagaaaattaagcaaaaaactcaaattatcataataataataataat

SEQ ID NO: 53554 - DNA, 545 bp, Cannabis sativa
ttttttcctctaacctgaaataaaacccagaaaaacaacaaatcaataaaaacacaaaacgcatcaatgggcaaaggagacaaaacgtccacgaagctccatcgttcaagccctctcatcgaagctcctggttattgatcagtttctgaccatggtggttatggaggtaactagaaggaagagacgaagggggagagaagaaaaagggtcggggtgggaatggtgttggctttggagtgggagttcctggtggtgggtttttggggtaggagttcctcgtggtggtcggttgagtatggcttccatggccatgcttgttgctgttgaagaagaagatcaatgagagagaaagagttgaacataaagagagaaaaaataaaagtaaagaaaataaaataaaatattaaagtttctatttattcttttaatattttctataaaaaatattaaattgtttaaattattttaatttttaaataatttattttattttttaaaattttaaatgaaaaatataatttggaccaataatttgtcgacatgtg

SEQ ID NO: 53555 - DNA, 1329 bp, Cannabis sativa
tcatcaagagagtcttcatgaacatctttaaaatcaccaatcagatttcccaaagcagtagccaacggcttggacttgcttaagaaaggcaagcgataaacttggacccaaaatggcacaaaaatgaagtccttcttagagacattttgcagaacagatggagtgtacattactatcaagtgattttggaagtgccaaggttccttattaagaactctaattttatcccctgcacattgaaaagttaccttaaaaatatcatctccataatcagaaatggtaacatggaaacgccccttccaatgaccccccatttgatcaatgaaggttggcttgtgaacatatgtttcagagagaaccgtgacaaacaggatatggcttggagattgaagtggaggaggctcaacatgttcagagaaagcaaaaacagatgattcttcctctgttaaggataaagtggaatggattgagtgagagagggagtccattatggtgaaaagtgtgatgatcgagagagaaggaaggagtggcagatgaagattgtgaagagaaaacccagaaaacggttagagattcatgtatacagaagagggaaaatgtgaaattgaaaaggtagttaaaattccaaaagttagttaaaaaacacaactgctacagacctcacacaaggcacatttaaaaacaataatagatgatgttgaaatacttcaagtttaattttagttataaataaataactaaatttaattttttttctgtattattaccgaaagttaaaatattctctttaaactattaatattattaaatttaaatatttttgtcaagtttcattaaattttactaattcagtaattatttatgtataaaattatgttctcagatattaatatcaaatcatattcttaaatttttatccatattaattttttttttaaaatttaataatcttaatagttcagaatttttttttaataacctttaaaatttacaaagatttggaaattagccttaaattaatttttaaataaaaaataaaaatttaatgacttatccattaacttcacattaaatccattaacttcacattaaaagttacttaagttctaaaaatataatatatgtattatttaagaaattttatttacgccctaaaaacttttaaacacatttcattttaataaaatttatatcttttaagtgtactaagtttttcttcccatttttatttttaaaaaatatacttattaaataaaaataaattatattttagatattaagacaaaaaaattatatgatttttttaaagaataaaaaataaatatacat

SEQ ID NO: 53556 - DNA, 1080 bp, Cannabis sativa
  modified_base (43)..(43): a, c, t, g, unknown or other
  modified_base (230)..(253): a, c, t, g, unknown or other
aaattgggccttaaaaagatgggggccttgtgcaatggcccangctgcccaatgcttgggccggccctgactgaagtttgcggtgcatctctcgatgttgacagtaatgatattagtttggttagaaaagatatgccaaatataactattgatacatcagtgccatttgatgcaaataatatggatgaagaagcttagggatgtaggtattttttttatttatttatttnnnnnnnnnnnnnnnnnnnnnnnnattattattattattatgaatactttgtttataaattttagtacctttgttatggagatcaattttatttattcaaaaacttttattatgatacaatgcttatatttattaagttatttttcgtctaaatctaaaaatttaattatatttaaacattgtttttataaatttgtataataaaaataacttcaaaaaataaattaaaattgaaaattcaactaattttttttactagtaacacttttgaaatatcactaaaagtgattagttagatggcattttaaaatgtcactaatctattatttggtgtcatttttattaatgccactattaatttattccagtgacatttttaaaaatgttactaaattttaatatggacaaattaatgacacttttcacaaaatgtcaccaaaatatatcaatagttacattttaaaaaaaatgtcactaattaaaatattatttattctcattatagtttcatttttttaacaaatgtcattaaaatatcattattgtgacattttttaaaaaaatgccactaataaaaatgtcaccaattctgatcattctgaagcataaaaatttaaacaatgaaaccgcctttgatggctctataagctactaactcccaatcaataaacccactcctatcaaaatgtaataagtacattctattaattgagaagaactcaataaataaataaataaactatattacaaaaaactcaaattgaacttttaaagaaagacttatctgataaattaattctatgtgattccttcatacgagccttacaagtgagatatgtcaaaatgacata

SEQ ID NO: 53557 - DNA, 1116 bp, Cannabis sativa
aatagcgctccaaagtttgttatgagccagtgtagtggactttcagggttcttggagtaaatatttgcctttgatagagttttcctacaataacaactatcaaagtactatagggatggatccttatgagatgttgtatggtaagaaataccattctctgattcattgtgatgagactaaagaacgaaagtatttgggtcctgagttagttcagaccaatgaggcaatagagaaaatcaaggctcggatgcttgctacacaaagcaggaaaaaaagttatactaatcctaaatgcagagagacctagagttttaggtgggagaacaagttttcctatgtgtctccccaatgaagggagttaagtgtttcaaaaatagggccaacttaaggcctaggttcatagggccatttgatatacttgacaaagtcgggcagacagcttataggctagccttaccactaccattattagttgtgcataatatattttatattttgaagatgaggaaacatgtatcagacccgactcatgtctttagctaagaagccctagagctatagtcagatatgtcctatgaggaacaaccggttaaaatactcaataggaaggaaaagtttcttcaaaataagaccatagcattggtcaagatactctagaggaatagtaaggtggaagaatccaactaagagttagagtttgacgtcaggactcaatatttagaatggtctaggttagatattgaggatgaaatccttcttacggggggataattgtaatgactacatacttaggatatggattagtaaggcaagtagcattaactaattttattatatgattaaatgtgattattatatattgtgggctctattttcaagaaataaaaattagggttatacttctcaattttggagattttattacactctaagtgtatcttttatgttatatgtgaaaatttatatttttgtgatttttactcattaacaatagaaatacgatagtttggccattagagtcacacaagttagtttagaacctttgatttagcgaggtttatttatttgatatttagaatatcgaagttaggtagggttgtggtgttggaccttttt

SEQ ID NO: 53558 - DNA, 1415 bp, Cannabis sativa
tgagcgcaggtaaatatctctagcagcctatgcataattgattagcatctacaaatgtcgattacctgatcagggtggaagacagaacatttgaccaggtacaagtgtgtgatgccgagctatttacaagaaattaattacttcagaattatcttgtaattcttagacacaacgacaatccctataatcatggtattgaatcagagaaatatgacaacccattgtagtttcctgttttgtgtattgtaattatgtaatcaatgtaatttcttattttacacattgtaagcaaaaggaaaatcatccctcatgcattgagtccttataaatagtggcttagcctcactatgaaagggatcgaaaagaatttcttcaaagagagattctatagagaaaataatgatctgagagaattactcagagatcaattgtaagagatttcaaagaggaaatactttgttgtttctcttgagttaatacaatacaaggggagtaggctattaccacgcccacggggccaaatctctttgaaatctggacttctttttactttgtcgtttttgttctcttttaattatattattaatcgcttattaattgactcacagccgttggctaaaagcaaggtcaacatttggtgctttcattaagagcaaaaatccaagtgttttgtcttaagttttggcaggcttacaggatggttgtacaaactcgtagaggtcttgctgatcagggtgacccgatcgtgacagatgacaacgtgcaaactcttagaaacacgagaggaccaccagggacaaaccccgagcaggtcagtacacaaccacctactgtgggccatggagtgacttcccccccctctggctgggatcacggatcacaccagtcgtgagtcgtgcaagagactgggaacaccagttcagcggccgatcaatccaccaccaacactgaggtcccgtctaccactaatgctcagaggttagtcaaagatgatgccgaaatccaaaatctctgagcagcccttgggctattgcaaggtcataataacgcgttgcaccatgatacagaggatctccgtggcgctataaaccttgcattcgacgagtaaagatgtcagtttatagaatggagggatagggagatgaaaacattgagggctcagcaggccaccgtattaataagaagcgcctaccaagttgccaataaacaactggcattcgcatccagtatcccttcgggcggatcggaagggtatgcaactgggcataccgcacaaactcgaaatagtcagccgtccaatccacgaccagaggttgaacctgtgggccaaacggtaggctggcagatcctgccggactgtccctttggtggaattatacacaagaactttgccccaactgaaatctctggccaac

SEQ ID NO: 53559 - DNA, 2884 bp, Cannabis sativa
aatggaggcttgaagcggggatgtcacaagcaatgagctgcacagtacgtttaaaatcacgattaacacgcctatgctagttagggtgttacatattggcttcttgatagtgaagcttcccaccatgtgacgaatgacatcaactatctttctcttcatgctccatatgatgggaccgaagaattaatcataggatatggttcatctcttccgatctctaatattggttctttctctatctctactccttccacctttttaaattctctaatgtattacgtgttccctctatctctcgtaatgtattatctatctcccaattttgccaagaaaacaacaccgcaatagaattcttttcttttctctttcgtgtcaaggaatgtgtgcaagggaaaacacttcttcaaggtccaactaaggatgggatttacgagtggaacccgggtcctcctcgagtcttcaccaattttaaaaagcccattcacgattggcaccatcggcttgggcatccgtcaaattcagttcttaggactttaagtaatatttttctctttccatctcagatttctcaatgtcttattgtaattcttgcaatatcaataaaagtcacaagttgcctttttctacttcatctcttacttccagtgcacctcttgaattaattttcactgatgtatggtcatctcctatttactctcgtgacaattttaaatactatgtgatttttgttgaccactttactaaatatacatggttatatcctcttaaaaagaaatcagatacctttgagacctttattcgttttcgtggtctagtggaaaaattcttcaagaaacaaataatacaagtcttttctgataatggtggggaatatgaaaaactcaatccctacctaacatctcatggtatctcccatcttacctcacctcctcatacgccagaacataatggttttgcggagcgtcgtcacaaacacatagttgaaactggtcttgcattactatctcatgctcatcttcccttacattttggcctcatgcgtttgctaccgcaacgtatcttataaatcgtctccctactcctacacttaacaatgactcaccatttttatgtttattttgtcatgctccaaattatcacaaactaaagaattttggttgtctttgttacccatggcttagaccatatgctactcacaaacttgataataggtctctcccttgcatttttattggttactctccctctcaaagtgcatactactgtcttcattctcccacaaatagaatctacacttctcgtcatgtaaagtttgtggaaaatgtgtttccatatactgacctctcttctacaactacttcattctctcacactaccttggatgagtggtgtaatgtccaactcactgtccttactccacccaccccaccgactccacccaatgttccaccaatagagccacttaatgaaaatcatacaaatactcaacttgcacaagccatggcaccacaaccatcaccacatgcctctcctactgcctcctcttcatcttctctgccatcattatctccacctccaacatctccaccaccactaactcctcctccttcttctcgtactattgttacaagattacgaaataacatcacaaaacccaatcccaagtatgtgcatcatcttactactgctgcctcttcaccttgtgaacctagaaatatcactcaagctctcaaggatcctcaatgtcatgacgccatgaacacagaaaaggcagctctcattcgcaatggtacatgggtactagtacctcatcatccctcccaaaatgtagtgggatgcaaatgggtttatcgtatcaaatacaaacccgataataccattgaaaggtacaaggctcgactagtggccaaaggctttcatcagcgttttggaatcgattactctgaaacgttcagcccagttatcaagccaaccactcttcgactcatgttgtctcttgctgttactaatggttggttgatacggcaacttgataccaacaatgctttccctacaaggtaacctcactaaagatgtttatatgtctcaacctcctggtttcattgacaaagattatcccactcatgtttgtaaactcaagaaagcaatttacggtcttaaacaagctccccgagcttggtatcaagggagttacgttacattcttattgagttttggtttcccgcaactctgtggcagattcatcactttttctttatacacatggtaatgtcacatactatctactagtgtacgttgatgatattatcatcatgggtccgacttcttcaacactacagagtttaatatctacacttgcgaatcagttttctctaaaagacttgggagccttgtcgtattttcttggagtggagtacaacctcactcaaatggcttgttcttgtgtcaaagaaagtacatcaatgatcttcttgaacgtgcacaaattgtagatggaaaatcagttcccactcccattgttactcatcctcctttaacactcaatgacggtacgccacatgataatccaactgagtatagggctcttgttggtagtcttcaatatctctctctcactagacctgatgttgcctttactataaatcgtctctcacaatttatgcacaaaccaacagaaattcattatggtgcactcaagagattgttacgatatctaaatggtacttctcgttatggcttagttatacatcacaactctccacttcaacttcatgatttttgtgatgcagattgggctggagatcgtgattcatacgtgtccactactaggtacattgtttacttaggtcgtaatactctttcatggagttctaagaagcaaaaa

SEQ ID NO: 53560 - DNA, 1635 bp, Cannabis sativa
gggcgactgccccccctcgctacaatgtgggtccgcccctgtatatagctatatatatataaatataccttctgattgacaattggacaactttgaccttgaccataatatggtaaaagtttcttataatacatcacagatttgtactttgaaacttgaagctcctcaaaatcattagtcaatgaaaaacttttgcctgtaaaaaaaaagaattttatcaattaattctgtatttatatatatatataaattaggaaatgtttttcaaaatgagacactcaaagtattgttaatcctaacaaaaaaaaaatataggtcatttgcaaatttttaaaaattttagatcatttaaatatttcatttcttatataatacaaataagaaaaatatatttatttataataatgaagaaatatttattgtattatatgccccaatttaattaactttagataattttagtttactataattaatatatatgttgaattaatatatggaccaattaccattaaatgttggaaatgttgggtaaccgtctccattaggtgctcttgctgtaatggcaatcatcttctcagctctattaattacaccaaattaaacaaataaattttactaataatacaaattaatttcattttttgtagtgaaaatatcaacataataattatatatatatatacctcattatattatgtttgagaggactttttcctttgtaaaaatgcgttgtttgaagctttttctgtccacaaaaactactatcgttgatccatgggctaattttggctgctaattaatttatcaatttatgattattagtatatgtatataaatatatatattaattataatggaaatgatgaactagctagagagatgagagtacttacaagatgatatcattgttggcttaggaattatattattgaaagagaaaccaaagctgttcatctgtactgtgctcatctttcagtgccaaataattaagattattatgattaattataacttgtttctacttaaacatctttataatccaaagggtatagctatttatatatatagacataattgattgagtgagtaattattcttaatataataataattagacaatgtgaaagtgtgaaattttcttaatgattttttatgtttaatttattttttaaaaaaataaaataaaaaagtagctatgagttgttagtatgcatgcatattatgaataatgtacatgtaatggatcattaattcaagagggccatgtgaaattaattaatttactaattattaattaattaaggaagtcaataccataaataaaacttccatctcaaacaagcctaacatatagtctgtaaatatgtgatgaagtccatttatataaattttaaagtcaacgatcgatcgatgcaacaaattatatatatagagaaatgcaatatatacataaaaaattactaattatttataaaatactatcttatattagtgatatgtaaataccactaagattttttgagatggcacgaaattgacacgaccctaaaaggtacgaccactacaaaaaattttatttttagtcacataaagataaaaaaaaattaaggctaattataaattattattatt

SEQ ID NO: 53561 - DNA, 1293 bp, Cannabis sativa
cccccccccccaaaaaaaataagtctttatacaatactttctagtcaaataataataaatttgtttcgtgctataaacatctttttaaatttttaagaagtcacaagtttaacactccacatatttatttaatttttgaattttttttttaaaaataactaatatcattgttaaaatttgaaccacctaacaattatgtgtaaggtaaaaaagtatgatatgtcattgtattaaaattattttaatacaattacatatattattttacattttaattttataactttatataaatcatttacaatatagagacatttttttttagaaataactataattcgtaattaatcttctaataatttaagagtaattaaataaggttcttttatatacatcattcccaatataatgaatttattataataaatacataattttttaaggaatttgccaatatatattgacatttcactttctggtaggcacatccacgatcgatgtttgatgttttactttctattaattaggccggctggcttgtaatatttatatgatatcgatatgatttatataaaaaaaatgtattaattattaaatatatatttgttgtttaagctcccctatgtttttccaaaaaaaaaaaaatcgtatgtataatataaatagatacaactttttatgtgtagtcgaacgatatataattgactaagatttatctatgtgatgataagcatgcacgattaacaaattcattttagaggtatataggttatatattataaatatagttggttcctttaacataaacgtacccatttttgttgcgtgggccactttttagtctctaattacgacgtggtttggttgaaatcttaaaaggggtttcaaaagaaatgaaataacatttctcacacaaataaataaataaataaataaaacctaattagctataaaacattactattaaacaccgtgtctagcactatcaaaataaggcacacccacaaggggctattttgtagcaaaaatatgtcttggggcttgatcttcagccaaattttgtaccaaatacctcattagggtggcgagctactttggtggtggcacttttgtatttttaaggtccaagtttttgtatcttagattatgtccaattatgtctagttatatctagcatgttagtatgctgtgattggaaataattgtgctattaatgttcatgtcacttgtttttaagtcttttaatgtaaacaacggtcgttgtttttgttctgttaagtcttgtttggctcg

SEQ ID NO: 53562 - DNA, 767 bp, Cannabis sativa
taagcttgaaaatttaatacaaacttttaaatttacactacacacaaatcaaatgacatcaattttaattactattatctcaaaataagactgtaatattgttgtagaaataactcaaaatattgaaaatgttgtcacttcaattttttcataccggttttttatgctcatatataacattatcctattcttaatataatatatgaaactgaagtggattatatatatatatttatctaatattaatattaaatgtgactatataacataaaatatttgtttgatatttttttttacattaaagttaacgatacagttaaattaattaattattatatttttttgacaaaaaattaactttaaaaattttaaatttaatttaaaattatcaacaaaattaaataattttttttttaaataagtcttaatttaaatttaaattccatgttaattcaataattaatcataatttataacaaaatttattagctagttatattatttaaaatatctaaatttatttatttattttattgtttaataaattagttatatatatatttttataaataaatttaaaactaaattaaattttatatatttacaaaatattattaaattgcattaaatttaattttattattatttaaattaataattaagtaattgcaactctaaacaaacctacattacattgctactaatacctagtatatatatttatataaaacacattattctttatatacatgcagatacatgtttgg

SEQ ID NO: 53563 - DNA, 1043 bp, Cannabis sativa
  modified_base (26)..(35): a, c, t, g, unknown or other
  modified_base (62)..(71): a, c, t, g, unknown or other
ggggcacgatttagtatatgtcaaannnnnnnnnnggcacgatttagtatatgtcaaagttnnnnnnnnnnaattactaattagcctataatttatatattgtatatatagaataattctataatacatactcttattttgttttcatagtataggaatattttcttaatccttgatgtgcatgacttttgagtgtgcacattaattatatacacttacatatacccagtaaaaatattaaattattaaaatagtattgagctgaggaaaaaattttacacctaacctttttttttttttgaaagaatacctaacctattaaatatagatattaaataatacattttaaagtagtgctaaaccaattaatattaaacatatagtatctttctttatatttgtcatactttattttcttaatcacataaacactaattaatatataattaattaaccataactaaactaagagaaaatatatatttttttttttgaaaacagaaataaatttataatgtcatactactaataaattttatattttaataatacaaaataaatgagatttttttaaattctaaataaaaagattaattaaataatacaactatttcaaataacaacaactaagagattagtattattatttgaaaataagataaccattttttttaattcattcagttttttacttatgaaatttatttaaatagatttttttactaaatttaattgaaaaaaaataactatcactattactaaagctaaaatagttttctaaaatatgatatgaaataaattacaaaaaaatatagtcatgaacaatacaaaacaaaaataaaaataaaaattaaaaaaaatagaatgtgtaattcttcacttctttttaaaattatcttgttttacctatggataaaatctttgtagattatacatggggaatttgaaaaaatatacataccttaaaattttatgcctaaactaatgcattttaaaatttaaaaaatatgaccactttataataaacccaaaaatacccctct

SEQ ID NO: 53564 - DNA, 1511 bp, Cannabis sativa
cataaaaattaactctataccatagagttatcagtgtatatgttggcaattatttttattgggatcaattcatttacaattgttgatgaaacgtgggcattccccatgtttcacttatttgcacatggaataatatctaataactactcaactgctccttctctttatcctttaaacggttatgctgactaagaatgtcgcatctcatcaaatatgagttatccttcttatccgtcttaatagaaaaaaaaaaattctaagtgtagatatgcttcatcttgcagtactcttctatttgtagtgatgatgcgagatgaccactacgtcgtgtagaacgcgagacggttgagtgttagttatctaccctgcttgtgtacgtgagtcatcgattcataagaccttgaatatcttgtcttatacatttttaatactctgtttcatctagagctgaacatattgtctcatttactaaatgagttaatagttattattcttatctcgaatctacctatgtagttagcgagtttgaatatttctatcaacttcacttcattggaatgagttatttaaattgtatttaatgatggactatcattattatactccttgagttgattcatattccttctgtaggatacatgtcaatttctggtgcatagccaaatttcgggtataataattgtcccctaaaaagtacttttaaaatgatcctaagggtatatcgcatgtaacccttttgaaaaattgcattctttgagttttggcggttcagaactttgaggcacatccttgagcatttaatgtcctaactgttcctatttttcaaagttcccatccgttagatcagattttctttgatcaaacggtgatcacttatcaggtataaattcgttggatcagatttttgttcttcaatccttcgagcatttttccaaaaaactttggctttcttctttccaaatttgtatgccctcattgtcgcttacatttttcctacgtattacatctgatcacatttccagttctaggaaacatcacgatctagcttctcaaccttcgagagttcacttgcaaagttctcttttgcctagaaattcacaacaagacagtaagtggcacactctcttttcttagtgattttttcttatgtttggataattttaattctgtttgtcatgataactctagggctagaagattttaattatacgattcgtaaatttttggatttcatttctgctatgttattccgaaaattgggatattattagttttaactatgtcccaatttgtctcaaaaatcacaatcccaaaatccttagaatcagtttgtcctcaaatttatgccataaaatttagaccttaaattcatatacccaaaactattcttgaggcagatgatgagaaaattagggatcacctcatgaaaactagcaaagattaaacttctattcgttttaggcaatttttgcaagagataattgagggtaagcatcactatttgcgagaag

SEQ ID NO: 53565 - DNA, 925 bp, Cannabis sativa
actccttgctaccgttgctccagtttgaatacgtagtttcagagacatattgctctttattgtcagagaattggagaatattgtgtcttgtgtttccaaagcagccctctatattaaaaaagttgatagagtcctacctcgagactgttcggtcatccattcgtcatcgtcgtttgctagaagagcttaataccctgcgcgaagcatgtaacgacttggatcataagatagaaaatttggcagagcatataagagatcgcgactctccaccacgtacttggactcatgttcctttatgatttaggggtgtagatcccctttttttcttgtagtctcttttagttttggtataaatatttttttatatatatatagatgtgtattaatttcttttcatttttacaaatatgggaatattatatatatttttttgtaaaacttctagaaaagataaaagaaaaaaaataaaatagaaattaatacatatgatttaaacattttatttaagaagaataacttcatgtcatacacaatggtaacaagagtagtgaggtaattataagatttcattatccaaggtttggacttttatttattatagtcataacttaagaaaagtatttcttaatgtattttatattagtaacagggagtgtcattcctgtgttagtatctaagagcgtgcagtagccactgccttttatctctttgataatagtacaaacttagttgcatgcattcctcgcatcacatggtctacagctttcagaagtatatcaccttcttggaacgtccttggtcgtacaagtttttcatatgccctagatacacgtcgttggtattgcagcaaattattttgggcttttcccgacgttcatcaattaattccaattgttctaaccgtgcttggtgtacatccattccc

SEQ ID NO: 53566 - DNA, 911 bp, Cannabis sativa
ggagatgaccgaatatatcttacacagttacgaatggcagcaatggagtcatgcatgtctttcaagccttcattcacaattaaatttattatgtgagcaccacacctgaaatgcatgaactcgccttcaagaagagatccattccatgcatttaccctcctcttcaaaaaggcaatagccacatcattagctgatgcgttatcaacagtcacagaaaaaaccctttctattccccaaccgagcaaacaagcttccatcaccttaccaattgtctcacccttatgattaggaatttgacaaaaatttatgattcttttttgcaaactccaatcactgtcaatatagtgtgcagtgagacacatgtaagacatttgagtagaggatgtccaacaatctgtggttaaacatactctttgtccatccttagttagctccatctttagtttcattctttcctcacaaaacattttgtgtatgtccctagtaaccgtaaatctactagggagttgaaacttaggttgcaactcttgaataagttccttaaagccttcaccatctacaacactaaaggcttgctcatccttcaccacaaacttagctaaagctttccgacatctctccttgttgaaagtgaccgccaacaaatttgacccactactaccatcaccaccactttgaaagctaagtattttttgtttcttatccgagaccctatgtggatacttcttacattggttgttcaaatgagtccacaaactagttgtaccaactctcctactatcacaagcataattttttccacaatagttacaagtgcatctagggtcttttggatttccatttgggactttagtgaagtgatcccaaacggtagaagttctagaaggctttttcttatttgagagttgttc

SEQ ID NO: 53567 - DNA, 1892 bp, Cannabis sativa
aaaaaaaaaaaaaaaaatagcgtttatagataaataaagaagttagacctcacggtcattacataagatatttcttaatataaaagatatctcaaccatatcagtaatatttttaacgaaagcccacctagctaaattatgggctacaaaattatacagtctaaaaataaacgaaaaattacagctaaataaaagattagagaactttttacattgttggatataattatcaatactcaattggaacaatttcctttcagggcattgacagctgtttttgagtcactctcaatcataacaaaaaggtatttcatcataaccgccgtctctaaagctaactgacatgccgcaacttctccaacaagtgggttatcacatggaacagctgcccactttaacgtcacaaatgattttgacccaatcatctggaggaggggaccaaacatgagacacaacagccatcgtcagagcaaataaaaatgacccataatctgcgtaacaagtagagatagaatcaatacagtgttgaatgttacccagagaattattgtgtaccttgtcattgcgagttttccaaatcgtatccaccacaattgaagcatagaaaaataatttgtctgtatccacccctttcgacctcaaattctaaagaaattttacccaatcccaaacatgagcaccagattcaatgataggcataaccccccaaggggatgacctccaaaggtggaaagaaaaattacaatagaggaagagatgctccatcaacttctcaccttccccacaaagaggacaagaaatctcatcaacctgaattctcttagcaaggaggccacggataggaagagcatcaaaaagtatacaccaccaaagtaccatatgacactctagaattttagcattctagagtttgttccacagggtgggggcaataatgcaggcggtggctcgctcgagagcttggataagataagctgacttagaagtaaataaatcattaggctcttttgtccacacccacctgtcactaccctgaccacagagtctaccacctttaatgatatccctgattgttgtcgggttgaaaagcattcgaagctttggaatatcctagtccaagttatctaacagtagttttgcaacttttgttacttcccctagcccagtggaagttggctttgggtgaaaatcctgactatgaatagtccaaggatcaatctaaatgttcgtctcttccccattagatatcagcttacacgcacctttcttaaggatttccttagttttcacaacattcttccagaaccaagaatttaagtttttataggaacaatccaaaaatgacttgcctctcagatacttagttcttaaaactttgcagcataacgattgatcctcattgatgagggcccaaccccacctagccaataaagcctgtttcatttccaaagtcttctgaaagcctaggccaccctaagacttaggtaggcaaagacgatcccaagctttcaaatagataccttagttgccctgttcacaaccccaccgacaatctctatccatacaatcaaatttggatgcgagtttcttagaaagcttggtaatttgcatagtgtagactggcatagcaagtcctaccgatttgatcaaagtcgcacgtacaaccttagatagagttttcaacttccacccgtggagcttcgaaaccaagttctcaataatgatgttaaaattagcatccttttgattggacctaaataagaggaatcctaagtatttaatgttgctaatggcaatgttgagcccaagctcttggagaatgcctcttttcataccctcacttgtgttattgctgaagaagatggaggttttaagcttgtttatacgttggc

SEQ ID NO: 53568 - DNA, 837 bp, Cannabis sativa
aacttctatttgggacttttcggctaatgtgtacacccacaaattttttgacgtgtgtatacctataaatttctcgatatttggccttatgtgattctttcaaatatcacgttcggtcatatagtctcttaaatgtcgttcgttatacccacacccaaacgtgaggaaggtgtattagagttagtcatacattactgatgtgtggaaataaattatcatatataaggaatatgctactcctcttattaccaattaattttgagatgaaacttcatttatcttagcttctttcattctgaattctcataatatttatagttaaatttatttattaataaactattgatgagtaataactattgagaaatatcctataaatatataaatatgcatggattcataataaatttttgtttgattactttttttttggtaataaatttcattgatttcaaaatactgtacaaagcaagtgaagaatccccaaataagccaaatgcaagcaaaagatagccaacaaaaagctccaaaataggactcaaacaatttatacatggttcaaagcctaaaaccacttaatactataattttgatttttgtgggaataaatttgcttaccctattatgtacaagatatatgcttgacatccctagtaataatctctatattaataactttacgttcccaaaaaataatattaattttagttcaccaaatcataaagacaacaactagaatagtagcttaaaaaacaaccttgcaaaaagcattttgcttttagtaatccacgtcattaactggattattgaccttacaattgtgacagtcagcagtct

SEQ ID NO: 53569 - DNA, 640 bp, Cannabis sativa
tactaaaaataacctaacactctacatcctctgatgacaagataatatgtgtgcgaggtggcatgaagtcaggatcagttggaactttaacaacgctccacttccctttcctccttataaattcttctactaaaaagtggagacatataggtatttgagcccagacctctggcttgaatgtttccttcttgtccacttgatctatgctaacattttattgtgatccagccgaagacagcaggaagatctgatatctgtttcccttgtttgttttttttttttttgatcaaattcttctaagttatttttgggtaaaattcgaatctccttctggttgtgttatcaaattctttgcataatggaattcaaattatttttttgagttgttattgtgtaattttgagttaatggaggttgtaatctttctctttttttttctcatttaccttttaattttggattggtcaggattagatcgttttttctcgtctacatttcgcccttctcattacacaacttgtacgatttttttggacttgaaatcatgcttggagaacgaaaatagaggagatatggaagctctggtgcggttgaaaacgaaggagaaagaagaagatgaggactgttttgtttagtctgt

SEQ ID NO: 53570 - DNA, 733 bp, Cannabis sativa
atttcattaagagaaattattacaacacttatccaaaatccaaatattttgttccctaccaaagttccaaatgactagtataacaaatgtcaattttctctttcattttcatctgttttttaccaataaaaataacagatttttgaaaattgcattaagagaatgagcctgcaaaaaaaaaaaaaaaatgcatgaagaatagctgtgtaatatagcacaaattacatgaaacaaaaaaccaaacttttaaaatgttctatacctaaggcattggaaaatagaacaaaatgattgataaaaaaatgagtgaaaatgaagctaagtaatgagctaagaaatcttgcttatacgatgatatgtcacgtggaatggaagaatattaatatgtgtatatatatatatctcttcattagtacggatgtgttctcttttttataatcggaatcagtcatgggcatgggcatgtactgatacagactaatttttttttttcttttcttttttaataagaataaaatccgaagaccattttattttgttgggcttgaaatgtttgttgatatttagttttattgatttaaatgtttgttgtagatgtcatcgggaaagcgcagtgttgaggaagatgacaagtcacttgctaagcgcacaaaggcctctgacaaggggaaaaatgtagttacaaatgaggtaaatttaacatgtatacgtaaatgtgtgctgtcacataatt

SEQ ID NO: 53571 - DNA, 752 bp, Cannabis sativa
aacccgaccacagcaaacccgccatacccaacccgaaatttgctggacctgaccaccccaaaattgggtttggttgtacatccacccgaaaatctgtgtatggagtgaattgaatctgagcctcggtattatagtggttattaggtgcgactactcgattttaaatgtcattttctatgattggtattgagagctaggggtctaatggatggtgtgatatgaatttgatgcttagttttgtgattatttgtggtctatctactttgtttatatattttgataatggtgacgacatattttattttaaaagctaccatgcatgaatttttattaaaccaagggtcttttgatataagttattttcagactgggctttataagctcaccccctattttttcccattataagaactcactttgatgctagtggatgagaatggtactgttgaagaagaaatcgttattagttaagtcttattttacttattaaactgccaatgaaactgattttgtatttaagcttgaatggatggtctagatgacttaaattagctatgtactagttagaaatgaggaatgatgaatgctagttattattttagtattttgttgacttattaaactatcaattcagtgactacgtaactatggggatattattgttcttttatattaatgagtagtcctaattttgttagtaatattttcttattgatataggagttaatccattatttttaaataaatatttt

SEQ ID NO: 53572 - DNA, 637 bp, Cannabis sativa
acctctaaccaaatgccacctaagtgtggatttcatattttggatccaatccaatctaatccgcagaagtacggattggatcggttatttcaaactaattactatttaatattaaattatttaatatttattaaaaaaaatatatttttatatataactaacaacaaaataaacactcctagtaactgtacattatatgttaaggtttaatttttgtactacgtaatttaactaagattttctttttattctttgaacaaaagaatcatttgtacattatattagctaattacaatatatatgaaaaaaaaaattatttacaatttattatacattttgttagccattaaaaacatattctcatgtttacatacaaaatatatataataatacataataaatttgtatataattaatattattgttaatttaatttgttattattattactaattgactaatttaattataattttatcatatctaacttttatgttatcacaaattcaacttcatattatatgtaatcttttcactaaaatataatgatcatataagtgttaataataataaaaattttaaagttacatataaattttatatatattactatttaaaaaaatttatttttatattt

SEQ ID NO: 53573 - DNA, 557 bp, Cannabis sativa
cattcgttttgaaccaacaaagagcaattaaccaagttgacaataggttttccaacaagccttataaggagctctagggaatctattgattctctcccagttggttggaccgtaggtgcgatgatttacttcgcgggcgaggtctctgatccaggatgggccagttgcgccaaggaaaagaataaaagaagcatgtgagtccttcatgcatgatccacttgactcgggggatatagctcagttggtagagctctgctcttgcaattgggtcgttgagattacaagttaggtgtagctaagcggtcttgcataacataattagaatacacataggactttagtataaagagaccttaaagaaaatggggttagatggaataactctaaaaacatgcatggttaatctatgtgggttcacaggtgatagcgtcacaagtttgggtacagtcgagctccccctcacaaagggagactcacatttattagtaactttaatgcaagaattcttagtggttgaccttccctcagtctataactgttgaaatttattttaccag

SEQ ID NO: 53574 - DNA, 621 bp, Cannabis sativa
taaaataagtatagataaaatagtaagaagagagaaaaataaaataacaaagtaattttctactctctttaaaatctgattcccttcacattggtcttggggtcctatatatactaatttcataacccaataatctaataataatggtgtctaagtgggtgaatggctcctaatttatgtgcactacaagagaagtaggtaatcatattgggccgtgtgcgcacgaatctgactttgttgaggaattgattgcagcttcattgtaggaagaacgtgggtcagttactaaggagcaagttgatatgtgtaatgtcatgtcttcatattatgaagatgtgtatagttaacttgattggagagagtgtgtgtttaaatttgccaccaaagttgttgatttgaagatattaaatggattgttgagttggtccattttgtgataatttgggcttctccaagaattgggctccattcatattggctttcaagctttcaaaaatattactattttattaatactattttgctcaaatctaaaaataacataaaatcaaaataaattaaatatttcagataaaaataaattaaccattaaaactataaaatatttaatttatattaatt

SEQ ID NO: 53575 - DNA, 1936 bp, Cannabis sativa
aaataccaactaatacctcatatcacaagggtcaaactaattggacagccaagtgtagttgaaaaaactcctccacgccaatccagaaactctgtcaaatatcagaatttgcttctaattgatccacaggtaaaaaccaattaatatattttcattttacttactgcctattaatattgacctatattatatataatgtttgtagggaaaccatatcgaagcaactatttatcaagctgatattcaagccttgcatcagacattgcacatgacaaaagcatacgcaatttctaatgctaatgtcaaagattgcaaattggattacaaaaaatatggagatctccaatgggtcataactggaaaaactaaaattaaagagctccaagaaaattatgatgatctgttgatgtctacttacaactttgtgcctcttagtaatatacaacagtatattgatcttccatctaaagaaaattaagtaaggtttccacacttagcttccctttttcacaatattacatacttctactaattataattttggttcttcttagatttgattgctgctgtcatagacattcgtcctaaacgtcaaatacacaatcgtcatggagaagctacaatccaagaacttgttcttgtggataatgagtaagttatttcagatttctttttattatataatattaatatattattttattaaattttattatttactttgtaggtttaacatagctacacttacaatgtggaataattttgttgacaacgaatgtgctgcaatctcaaacatcattcataagaaaccaattatgattggaacacgactcaaagtggtttgctacaatggtaatcaaataattattactttttttaaaaaaaaattcataccaaattattctaaaacaaatttaatcttgtaggcatgtcaatatccacaaaaaactcaagctgctttttaattgaacctcagttggaagttgctaaagatcttcgtgcctggtaagatataaatctatcatatgcttcctaatgctttcatataatcactattaccttactaatgtatgttttttaatgtttcaaaaattaggataactcgaaacaactgcatcctcaatgagaggatcactcaaaaagcatatcttcttcctgcaacaaatctttcacctccttcttctgatcaaattactgatataagcaagatacatgacatgttaaacatggtaaactccttttaacttctccttttttatcatttttattttgttcttttattattttctcaattagataacattacaatgtaatctcccatttcagcaaacaactttctgggtcaaagcaattgctaaagtcacaaattatggccaaccattttggtatatggcatgtcccctttgtaacagaattactggatctgaatatggggaaacttttcactgtctatattgcaaaaacaatgatctcaaagcagtccctaggtaattagatgacttaggcattttctcaagttttttttccttttcaaattatatttttactaacactcatgtcttgcagatgcagaatagatgttgaacttactgattcatcagcttggattacagcaactgtatttggggaaattgcagaaacattgttctcatgtaatgcaacaaccctgatgaataccaaaattaaggttttctcactcaatccacaaatatctttttacttaagataaaataatcagcttattcttttaaacattctcttactaataaattaaattgttattttataggcaagtgatagcattcctaacgaacttcccgaactacatgacaacaaagagatactagcttacattaaggcagtcaaacaggactccactgaaggatggaaattcaacatcacttcgttccttaatacaactccactctcaaatgaa

SEQ ID NO: 53576 - DNA, 1070 bp, Cannabis sativa
cagatcatatcatatgccatgtgtgtgtgataattagttctatctgcaaaactcatctggtttattagttattacacatggatttgtaagtttgatacagtattaagctttattcaaatcatgataactagactataaattagtattgactttctttatctttctattatgaaaagaaggcaaatctagccttattcatgcactagtggactaggtcacttgatgtaatgtttatttgaatccatttataaaaatcaatttgtattagattttggaaaaatgtatagtacatcccaaaaaagagtgttatgataattttctatctatgcctttggtattcataagaatgtactactagaataatcatataatgtaatgtatacttgccttcaaatttttgtaagcaagcatggaagtgtaatgattttgtataaaattataatatcggtgattgagtttttcaaatattttcacttgtcttctctggtctcaaaaacagggttattgttattggactaaattccccttggatacatgcattttgcgatattgattcctttaaaatctcttccaattaatgtcaattatggagttgtattatatttatcatctttattaatattatttgtcgccttcataaatatttatttatcttagattagacatgactcaagcctacaacaacaccaaactttttaatatatatatttattttaatgttttccggctaatatttttgttcattccttaacgaaatcacatgggtgtagtacccatcaatggacccccacatgattaggttaaaggctttaattttatttttaattataagaaaaacacctttgaagctcctcatttaactattgtttttgtttgaacatcaacataatattaaattattaaggccatgttgcatgaataagataaatttaaaataaatattatttaaatttttatacaatatcaattttaattaatttttgggtaatatcattttagaccctgagttttacaaaagttaccaattggattctctattttgttaaatgacaaaatggatcttatatttt

SEQ ID NO: 53577 - DNA, 1403 bp, Cannabis sativa
aaaagttgacgactgtcttccacaatcaatttcactgttagatcatcatctacggtccaacaaagcaaattatatttttctatattttttggatcgtattattgttattttaataggatctccttccctataaaaggagagctccacaagatcattttttaagttaaaaaaagtagccataaggtcagagcatctctctctagaaattagagtatctagactgagccattttttgtaatccatatcatgagaaataaaattcaaagtagacgtagctttatgactgtcgcgatacagggagtgaactactataaattactgtgtctctctatttatacttaactcataaatatattgtcactaatctagcgagctggtgtggcccaaatatctatgtcagatttctgcgttaatattatatattttattacataagtaaaataaagtattaagtaaaatagtcaactaaaatgcatcgtaaccaaaatactatttatatatattgtaaaatataataaaaatatgtatatttaccaaaacacaagtatatccaattcacaagtatatccaattgagcccttcgaattaataaaaaaaatatatggagccaatgtccctaattattttcttgctaagttttttaatatttttaaaccaaaattattaatttttttctcactagagtctttttctcttcatttttaaataatttaacagaaatctccaattcaaaaaatctataaggtggcgtttgcttagagtaattaaatagaatagaaataaaataatttttatttcattcctttggttgaattttaaagtatggaatgtcaatctatttccaccattttggtggaatgactcttctattttgaattagaaggaaagatcgttccaattcaagataaagaaaattttaataatttattattattttttatgtattttaaattttacttttattttattctattccattcatgttcttattttattcatattcacattcttattcatatttttatatttttatttctcctaacactactacaatgtgggcctttagagactatttttttaaccaaatttataaaaagaagagctaaagggtgtgaaaatacccaccaaatttgaaattgacatttagaggcagtttttttgataaaaactataggtatagaaattaatatacttatgctgtcggttgggagttgaaaattttaaacttattttattatacctatggcatcggttattagggaaataaccgacgtcataggtgcacacgtgtcagatacttgtgcacctatggcgttggctatttcctaataactgacgccctgacgccatagattctgtaacaccctaactagcataggcgtattatgtgatttttaaacgta

SEQ ID NO: 53578 - DNA, 953 bp, Cannabis sativa
aagttaatgagtattgagagattacaccataaatgatatttccttataaaaatgaccttacaattaaaaaaaacaaaattaattcaaagcaatccaatcaaccgcccaaacaaaatccaacgacccatattaatcctactcctaatagaatgtaaatttcaattattttaaatagctgtttgagtcattgagtccttaatatcgttttttcatctcacctctctctctctttcctaagctaattgaatacatttgataaccctaatttcgaaacttttaaagctcaaattgttcttaaactttgttaattacccaaaattaatcatttctttgagtgattaattatgacttctccacaagtaattggtgatcctcgttaccatatatcaccctatagatatagttatactactcaacctaacacaatagaagaagagccacatagtactcgtttctttaccattaacttaaatgccaagttcattcttgctccacacccatctattatggaagttgaagatgaagaatctttattcgacaacgacgcgggaaatccaactgcttttttagaaaatattggatggatttcgtacgagacattgatgaagagcgacgttactgaaaccatagttaacgttcaaggcatgcttgctgaggtctatcttccttctctctcttttattgtcgatggcattattgattgatgtaaaaaaatcataaacaacaacgattatgatcataatttgaatgaagaagtcggtgttaatatttccgttgaagtttttgttgatgaactacctcaacttgatgatgacgacgacgacgatgatgacgactttgatatgaataatattcctattcgctttgtggcggcaagtgaagagtcaatcgagaaattagaaaaagtttgggttaaagataatccaattttttgttcgatttgtttggaggat

SEQ ID NO: 53579 - DNA, 2213 bp, Cannabis sativa
agccatttaattatccttctcataaccttatattattttcaataccatttaattaattaatcaaagtcaaaagtcaaaactcacatcctctcttctagcaaccctacaccaccgccatcattcattttcatttttcttcaccttaaagataagtcaatactcaatctattaaagagaaagttggacttggattcttgaaggtttagaagggatttctcttttattagagtagaactcggagttgaattggattgaattatgctaaaagtaatgatatgtttagttttagaatagattaaattattttctttcgagcacagttttaagttcggtctcaataaaaaaataaaacagagcacctaacaatatatcttcacatactaagaattacgagatcaccccttttattttgaggtgacggaaggatcgtaccattcaaacttttacttttatcatttttctaaaaagttagagaaaattgcaatcaataagaaaaaacttcacaagcttttaattaaaattaaattagaaaataaaataatattatttttataaacagattatatttttataaataatatatcatatataattaaatatatattaaatataactaaattcgtaataaaataatttattatatttttatttaataaataattaaaatacttgaataatataaaattatttatgttaaataataaattttcatggtttctactcggtgcgtagtgcatacaagttgatacaagctcagaaagaaaattggattgtaactgattcttttgggttctggcgcaagctctggaattctaccactgctgaaagctctcaacttggtatagcaagttgcttcaaattgtttgcccaccttgactcaattaagtggcaagagggtcctagttcaaatcatgtgtctgatttgtcaaagaggtgaggaaactattttccatgcgcttatttcctgttcattcacttctaaatgctggcagaggcttttggctggggttaggctgattgttgctgctgatttttacagttagtttgatcaaattttgcaaagatacagtaaggaaaagtgtggggaaactgttatatatgttgtgttgggggaggctcaaaacgagttggtttggaaccaaaagtatgttacggtagatgatattcttatctcatctacgagttgtcttgtacaataaaaattaacccaaaatagaggtacataggcttcattttcagtttttaaagctgtgatggagttgaatttcaagttaagccgcaggagtatacaatcaaggtaactgttgatgctactatttttcgtgatcgagctgggtttggttatggcatagtcactcgagactcttaaggggaattagtgatggctaagtcaggcagttttgctagtatagacagcaattggtataaaagaaacgctaagctagattaaaactcaagtatgccagaaagtaaagctgaagtcagattgcttggtagtaattcaagctattcgaatatatttctttaataaataataattttatttttatgtataataacattagatatataagatttctatactcagtcaaacagtgtaatttaattaacaggaatataattacatattacactacatagccaaacacagtttacacatgtccctacaatcatattctcattttttgaatattctctataatcatattattttgaacatctcgtaccaaacacacccttaagacttgttttacgacatagtgtaatatatcacatgtataaattaatttataatagtaaatctaattaagactaattagattgtgatttaattaaaacatatttaaataaaacaattatttattaaaaaacttttattatacaaatttaagttcatgcggatccccatttaaaactaaacaattttagtttacaaacagactaaatatacatcataatattttgtttataataatgataatattattggtatttaaatttatttattaatttaaaaatgctattcaaattaatataatggaagataatataattcaatcctacccatcttttctaaggtattaacattaccatcatcaaaattaataagggaataacattctaaggctaaaccctcaaaacaaacaagatagtgtttcacattatcattcccttactagcattaacctattctaaaaatgttttaatcacaa

SEQ ID NO: 53580 - DNA, 3271 bp, Cannabis sativa
tatataatgtgatgattcgtaacatcataaatactatagggttgattctttaaaatttgaaaaattcttcaaaataattaacttgtccatagtgctctaataattgttggtagattaaatagttgacttgataccaaattcaagtatttactttcacaatgttatattagataatttataacgtatttataattgttatcaaccacaaaaattcaatattatagtactgtacattaaattttggttttaacatttaaaatatattgtaggaataaaagtgaacaaataagcctccatttcaaatataatttgtgctgaaattgccaaaatatagcattgctagctactgatttattactcacctttttataacacccccaactcccaacataaataaataagcataaagcatatgggaacctaataaaaattacattgtacaacagcatataatcctagttatagaagataaaaatattagtctctaatcatcaaaaacaatattctaagttctaacattgcaacacctaaggagcaataataatgaacaacaattatgcatcttgaagcaatttagtttcaagacaacatatattattgttttatggggtgaataaatagcttaatgccaacttgtgacaattttatgatttaacagacatttcagagcaattgctctcaaagaatgcctggtgaagagctctaacacactgctctgcttcatcgtcatttacgatcaatgagatattaacctatgtcaatacgaaaaccgaaagaaatcagtgaaccgaaactatgtttgttccactctttacaactcgtcgaaatatagttaccttagatgcaccctgagagatcatctgaacattgaccccgttagttcgaaggacacgaaatgcctgtaacaaagtaaaacgagtaaactctttatgattcgcgaacaaaaatatgctttggataattcgtaattgctataagtagctttagcttttataatccagtaccttttctagtattaacgatgatttctggacatttccgatgagtgatatgattgatctgtgctgaagaagtttgacgacagcaatcttctccaactcttctacaacgtggtcaagttcctgccgaacattagattagatgagttgcaaacagaacaaaagaactctagtgttcagcatagagcagaatttagtaacaaaatcatgtaatgaggatgatgttgtgtcgtacgcatgcctgttgaattagctctctgctccaaagcttagaaggatccaatgtcaaagatatactgacttcactagtagctacaacatctacagatatgcccatatcttcaaatatcgaaaacacctagcatggaagaaagagttcttgatattagataacagcaagatgaatgagtcaaaacagaaaaagtggcaaataattatgctcactttagcaaggaaaccgaattgaccaagcatgcgagtgctggcaatatccaacatggtaacgttccgcttcaagacaatgctagtaagtacagcctgcaattcaaaaggatacgagaataaaacatagatatatggtgaaatactgatttcagcgccagttgagttttgggcattcaattcttctgactataccttagtcatatctctattccgggtgatgagagtgcctggtgctttagggttataagaatttttaactctaacaggaacatcgccctctctggctggtctcatggactgtggatgcaagacctgcaaaaggaacaaatttctctcaaaactcaacttcatttcctccctaaaagtcttaagagtatcttattcggtttcaagattgacaccatgtagttgaatctaacaaacatgaataaaaatctaatgtggttaaattatttgtaacaaaagatgcatcataaaataatttcataatcaatatgtaatgccagttgaaaacaccgaaattggactaataaagcaatgcattcttaaaacccataattgaatacttggcaacaacattcagcttatgtttagaaagaaaaaaaaattgataagggctagtttgcaaggcatctctagagaagtataaaaacagcactagagtaccgccagcaaaatatgatgatacctgagcaccaaaatatgcaagttcagcagcctcatcaaatgtcaaataggggacaggttctgcatgcgggtatatattaggatcacaggttaaaacaccatcaacatccttccacacctgaaatagattaataataataagcttcttatagttaacttatttgaccaaagcaaagacagtaacttggtgtaaacgtgcaaagctagaatcctactccacacccaaaaaaaaatagtaagtttgaaacaaaactagcattagctgtcagtgaattaaatagattaaactatgttttgttcgtagaaacaaagcctacacctgaatttctcgcagccctaatgcttttccaatggtcgtggctgttaaatcgctaccacctctacccaatgtagtcactgcacacgacctccatccctacaaggcaaagaggaggagctattagcatttgcaataatttacagtgatgtaaaagaatccatatgaagtaactagccagcaagaacaccttcccaaggaagccagtaacaattgggattgccgggtcacttatccaatcattatataacctttgtttaagggctggatatgtggcctccataatatccgcatttgtgaaatcatctgtagttataaaaccaatttcaaaagcatcatactgcaaaacagagcaaattgttaaagtttgtcaccacccgtttctctagaagaaatgaaattgagaactaaaacaggccgggccactttaaactagttcaaatgcaatcacaaaggtgggggagtggtggtttcgagagcgtataaaggtattggttgtagttcaaataatatgacaccattattctaattagtttacatcaaagacctcagagattaatagcaacataacctaagccacagtaggttttcaagaaaatgggaaaccacttacttggcgggccttaacaccaatcttatttaagtaagctgcaaatatccttgttgacatgcactccccaaatgagaccaaataatcttttgtccgcaacgttaactccttcatcatggcaatccccttcagtagctgttccaattcttccaggaaacctgcaaaaaattgattcacaataagcaaaaaagctaaaatagacaaagacaaagcaaa

SEQ ID NO: 53581 - DNA, 1774 bp, Cannabis sativa
gattgtgatctccttgtgtcaatgtccccagcatagtctgaatcaacatagcccataacaccttctctgtttgaactctggccatacattaatccagtgtttatagttccctttaagtacctcataatccacttgacagcattccagtgctccttccctggtttgctcataaacctgctcactacactcacaccatgacagatatcaggtctggtgcagaccatgatatacatgatactgccaacaacactggtgtatggaatagattccatgtaggtgatttcatcttctgttgttggtgattgtgagcaagaaagtctaaattgttgtgacaggggtgtgcacacaggtttcacatcagcaaaaccaaacttttctagaattttagcagtgtaactgctttgagacagtttcagggttcttttctttctgtctctctcaatttcaatgcccaaaattctcctagcagggccaaggtctttcatctcaaattccttgtgcaacaccctcttaactttgtctatttcacttgagcttttgctagctatgagcatgtcatcaacatagagaagtaggaacacaggatgcttctcattcttgacatacacacagctatcaaaaacacttctcttaaacccagatttgatcacatagtcatcaaaccttttgtaccattgtctaggagactgtttcaaaccatagagggacctttttcaatagacaaacatgatcctcctttccttttcttcatagcctggtggttgtctcattagaatttgttcatcaagatcaccatggagaaaagctgtcttcacatcaagttgctctagttctagatctccactgcaacaagagtcaataggattcttattgaagtgtgtttcaccacaggagagaatatttcattgtaatcaatgccctctctttgtgtgaatcctctagcaactagtctagctttaaatcttgccacttccactcctggtattccttccttttgttttaaaatccatttgcaacttacaaccctttctaccaacaggaacctttactaagaaatccaggtattgtttcttttgagagaatcaatctcatcatccatggcagacttccactttggtccatcactgcctcttatagcctcctcataggttcttggttcaaactcaccaatctcagcaatgttcagtgcataatgcactacatctgcaaagccatatcttgctggtggttttattgctctcctttttcgatctcttaccaattcataatccatattgctgtcatcatcagggtctgattcactctctgcagtttcttgtccttctgcagtggctggtgtgaattgaggagttcttgcaggtaactccacctcaaactgaacatcctcatttctttcctttgctgagtctgtagatacttgtagagtgtctttgtacattttgttttcttcaaacactacatctctacttatgaaatacttttggtgatttccaggttctatgctccaaagcttgtacccctttactccatctggatacccaataaaaatgcactttctggccctagcttcaagcttatcttgcttcacatgggcataggcaacacaaccaaacacccttaggtgatcatagggtgcattgtgtcctgtccaagcttccatgggggtctgaaacttgatagcagatgagggacatctgttgatcaagtagcaggctgtgaccacagcttctccccagaaatttttaggcaatccagagctgagaatcatgcatct

SEQ ID NO: 53582 - DNA, 1096 bp, Cannabis sativa
aagtctaaatatggagtgttttgaattgaattctagactgaatctggaccaacaaatccttttactgaaaccgttctccaacaatgaaatcaagaaagctatgtttagcattcctgactcgaaatctcctggaccggatgggttcaattctggatttttcaaagtgatgtgggctgatattgggaaggaagtttgcaaggctatctctgatttctttattacaggttacatgccagccaagcttcactcatccatgatttcattaattccgaagaatgataacccaactaaggcagttgactttcgtccaatagcttgttgctctacattatacaaatgtgtgtcaaaacttctctgttctagactggccaaagttcttccctcgattactaatcagaatcaaggggcctttgttcaaggtagatcgattgctcataatgtgatgattttgtaggatcttttaaagaactataacaggaaaaacatctctcctcggtgtgctattaagattgacattagcaaggcgtacgatacggtgaactgggaatttcttgattgcttactgccagcgttcaatttgcctcagagatttattaaatggctgatgacttgcattacctcgacttcttactccataatcatgaatggaagaattcaaggaaaatttaaacgtgaaaaagggctgcgtcaaggtgatcctctttcacccttactctttgtccttgtaatggaatatttgactagattgcttcaactagctgctaacaactctaattatagatttcatccgctttgcaaaaagcttaggcttatcaatctttgctttgcggatgatctcatcatctttagtaagggttctcaatagtcaattgcagctttaaggtatgttcttgaggagtttactaaagcttcggggttacacatcaatcattacaagtctcagatttttcttggtggagtcagcccgttgaacaaacaaagcattattgatgaattaaagcttgttgaaggaaagttccggatgaaataccttgggattcctttgcgtccaactaagtggaaagccgaagattgtagcataatcatcaagaagatc

SEQ ID NO: 53583 - DNA, 922 bp, Cannabis sativa
  modified_base (873)..(882): a, c, t, g, unknown or other
gtaattgtataacattttttgtttcgatttctaaaaaaattatattttaacttttttttttctttgagtatattgtaattataataaatattttatatatatatatttttctttgaaaaaattaataatttgtaatgtgaaattatttgcacgctaaataaaaaaatattaatgcaactaattgttcggatcatactttcaacagccaattaattattattcataatttaataatgtttttgtttctcaaaaatgtgtacatgaaaaaaaaaataatattggaacactctttgaatcatactttaagtaatgcaaattaaattatttatagataaaaacaatgtatactaaaactaaagtgatgtcttaacgctattttcatgagagttcttttagtgtttaaagatagaaaaaataagcttttggacaaatgtgtaatatcttgttcaagtcatggtgattcgcactaatctacactcaagattgtgagtgagtgtatatatatattcttctcttgcgatatatatgtgttgtatttttcttcttctacttttatatatatatgtaattaatatatatagtgtatatatgtgacatatatatatatataatcaatttcttattttaatcttcgtattattttacgagttataacagattttgatttttaatctctaacacatattattcgtactaaatataataaatttcttaatcactacctattttacttctgtgtggtttacatttacctaactagaaaagtaaattattaattatgtattcacgatactttaatattatacttttaggaaaattttattgacaccataaaatttttgaaagacattctattttaataatttttatttnnnnnnnnnnttatatttttaattgtactaagtttttttttttaattttt

SEQ ID NO: 53584 - DNA, 1254 bp, Cannabis sativa
  modified_base (152)..(154): a, c, t, g, unknown or other
aaaaaaatcctaatcctatatctaatgatctaatatatttattcatttttgttacaatatagtaatatgtaatattaaaaaatatatataatttaattttattattgtatatattttaaaaaataatatgtagtaaatatatttttataatnnntattagctaatttattatattttgtcattttcttaattttttttaagaagggacatttactaaattagtttctaaatttaaggtcattttgcatctcagctctttattatatttggggtaaattgaaaaatacctcttttatttatcaattaaccacatttacctctgatttatatatttaattgaaacatgcctctttttatatgtattgtatgcaaaataccttgacataagagagttacatggagaatatcttgaaatgactagggataaaattggtacagtgtttaaaaaaagagataaaaataatagactttaagaaaaagaaggtaaaaataaaagtgaactatataaaaagagtataaagtctaatttcctcattatatttagtcattttcttaatttttttttttaaaatgacatttggtaaatacaaaatttccatcataataaatattttatgtgcatatttattatttttattattttttaactatatttaattatactattaaataatatatgtatttttttataataataaaataactttttctattaaaacattaattaaatattaaatttattttgaatgtgtataatgcttatacaaacaaacaaatacagatttatcataaaacttgtttttatatatctccaatgaccaataggtgatatcaaacgtgatctggacatataatgtatatacatatcaatatatattgaatcatatatagaatgaatataaagaataatgaaatagacttattaggttccatatatgactttattgtgatttgtaccaacctcatttgtatggctattgacctatatattatttatatatatagttagggtacgttttgcgatgagttaagtcaatatgcatatttgatccgatcagcgatcaacgttggcatactacgctcataatcttccacttaactatatacaaaaggatctataatttatatatttatttaatcatatattcatttgagttgtactggcttaatttcaaggaaccttacctggttggaaatctatattaaaacacaataaatctctatctctctctgatctctctctctatatatata

SEQ ID NO: 53585 - DNA, 812 bp, Cannabis sativa
aatagtaggacacattttgaccactatatcaacatgatgtggcattcatatcagtagaatatcaatacctcatgggtcgggcttcactagatgaacccaaagttaatatgttatttgtatttatcccatcagtgggcaaggttgatgtattagaaccctagctctataaatatatgaaaattcattcatgcgaagggtgagaatctcattccttgaatgcttaggaaaattctagggttcatatacttggtaaaatacttgtataaattaaaaaggcttttctaaccatataataatactgactcgtggactatgggtcattaatccttgaaccacataaaaattcttgtctcattcttagtttttgatctatttctttagttttattatattttaaattagtttctaaaaatattgataaatatgttgtattgtactgtaaagtattatttaatacaataatatgtatgatattaacttgtattaataggtcttctaaaattatattatctttatcataaactagacctccaccacacccttctctggacccgacgtcagactccgattctagacacaaaccttgacctcagatcctaccttagccttggaccctagacccaaatgacagccttatccctatccctggaccctaaccttgctctggccctggacctggatcccgaacttcgaccccggttccaaacttcgaccttggaccccaactcagacacaaaccctgaccccgaacctaactgcagaccttaattctcgatcccagactatttctaaatattataataaaagctaat

SEQ ID NO: 53586 - DNA, 686 bp, Cannabis sativa
ttcgttgaagccaaaggagcttcttcttgtgctgcagcagtggcggctggcagctaacacaaccaggggagtcacggcaacagcaacaggcgcagatcacggatcctctaaatattttgatattaggtatgatttatttccctagcattttttaattttgcaatcaatggttaatactcaatataaatgtattgtttcatgttcggtgtcataatgcgttgttggataatgaatgttataaactgcacattctcgctcaagagatctgttacctattgcaaaattttcccaagttgactttataaccgtggattgatggtacatgtatatttatcaattagtagtgcagtatcaaaaggttgtctgggatgaagattggttttgtattttacttcttaatgcataactcacttaggattgaggggactaagagtaaggcttttaaaagattcataaacgtttataatttcattttaaataaagaaatctcccatttttagtttgaatccaaacaagaaaaaaaatcattaatttagatattttttgttctcttttatatattgttttttggtgatcgaattcgacatttactgattttcaaaaaaaaaaaaaaagtggacatttatttgattaggtaactattgtttgagaatttatatataaatatctatatatctattctatat

SEQ ID NO: 53587 - DNA, 1180 bp, Cannabis sativa
agctgtttgccagctgttgtaaccaattactgttattgcattcatctatataatggctttggtctcatcagtttcagatgagcctttttacacttctttcatatttccatctttctctctcttaatattcttacattcattttcttgcatttttaaaagtaactttttggttactaacagtgttgataagcaactaattagttacctttacataacaaaattatttttgtatcatataatttaaaatatatttttgttacctcccaaacttgtttgtatacgtcttaataattaatcagttatttttaagttatattatggtaatttataatgtaaaatacatttagctaactgttgactgtggatttggccaaccgacgcggagtttgactaggatcgaatttcgcttatgattgtcacgtacgaaataataattaatatagagacaaagatttataaaggtttagcccctttgttcaggtaatgacctacgccctttttagttgtattcactcttgagattatactaagcaaattacaggctgaaaccttgtaatttctaactgtggctctcttcagtattacaatgagaatgtgttttgtaggtgaaaattatgaagaaagagagatgactctaggatgtagtgcttatgagcatgattgagacttaggatttaggtccaagtcttgagcgtacttgaggcttccagtcttgaacgtgcatatcttgccctttatatagtgttagggcttacaagtgttgcgtataacgaatataaaactatctctttaaaatagggaagttacatgcatatttgaaacacaaaataaataattaataatctctaaagaatagggttgttacatcctggcgttgaatccctagaattgtgggcagtttgaactgtttcgaagtcgtaggaatgatgaagatgatttggatggcttatggaaaaacacaagtgttgaagtgtatttgtaagcttggccggccagccatgttgatgggttgcccgctatagaggcttatctcccctggcgagccagctataggtccggccaggaccttggaggttcgtgcacaattctttctttgttggtggcgttgatgctaggataaacttacggttagaatatattttaccaggacctagagttactaactagtatgtttttaaca

SEQ ID NO: 53588 - DNA, 601 bp, Cannabis sativa
atttataggctctaatggcctggtgtacaaagtgatcccatggggacaagatgtcacttttccgctgcatgctacaggtgttagaggcagcttggcttcccgtacccttgtctagtgtaagatggtccccagttgcaggttgtaggagggtggttgcagtgtgtggtcttcaggtgcacgtgcatggtccacggttgcatgcgtggtggtccccaggtacaggttgtaggagagtagttgcagcatacgcttggtcaggtcttcagaaagcgtgtacgctcttcccttgcacgccttgtcctttgattcctttctcaatgtcattcttgtcgtcatgcattcacctctcaccttatcttcacaccctcaatgccaccttacacttgacacccttctcccatacactcaactccccccacattaacacacactcccccacatgcacacacggctcgcatgcgagccccccacttgcacacactcctccacatgcacacacggctagcatgcgagccgcccacttgcatgcactcactccactcgcacacactcccacacatgcacacacggttcgcatacgagccccccactcgcacacact

SEQ ID NO: 53589 - DNA, 1504 bp, Cannabis sativa
tgttccatttggctttaccagtagcaacacaacttatttccggaacaccttcgatgttttcgatgcggggaagaatctaaaactcctgagcatgttctgtcttgattctagtgtggcaacgattgggggtgtggtcagtgctccgtcgatgtgtaagtggaccaatacagtaaattcttctatttctctttgacaagctatcccatgaggcttttgaattgatgagacaaccctttggtggctgtggtatgataggaattcatttttatttggtaacaaacagtcaagattagatgttattccaagattagttactaaccatctggctgaatttaaggagtatggtcagcgaggtctttatttgggattggatcctgcaaacccagttgtaaaccgagctactcgatggatgccacctccccctcaatctttcgctcttgcgacggatgcttcggtggtttcggggaggggctttgtcagattggggggaagtgctacgggatgtagagggtgtggtttggttggtgtggtcatcaggagtgttaggggatttctctactaatgtgacgaagctatttgcccttcgtctgggtttgactcttgtgttggtttcagtatctccattattaatagtgattctactatagcaattggttggattaataagctccagattaattttagtttcaatcgattttattagatatctattctttattagctgttgttggtagtggttcttgtagcgccattccacaatcagtgaatggtgttgcccacacactggcaacctctattactagtttaggagattgtgtttggatagatgcttgtccacgatttttgagttcttctgtaacagtggatttatcttaatgaagtttatctttctttcaaaaaaatcattttactcgaaggtacttaaaaaattattttgaccaaaaatcatttcaatttaagtattggtttcattttaatttatataaaatcatatataatacactttatttatttatttgagattattttatatatttttacatatttaataattttttaaaacactaaaaaaatctttatttaagcaataaaagagtattatttaacttttcaaaataatttgtgtatcatcaattaaatttgtataagtaaattattttttaaaattattaaactatgatttaagaaatatatgtaaatatgaaatacttttcaatggatattacttattgatgactactgtaagatttcaagaagaaatcaactaagaaactgagagagtaagacacaaagaaacataaagcgacaaagctcactaatttcattaattaatggagtatttatacaaagtctttttgagctgaaaaacagtctaacaaactaaccaaagatagtttgaaaagtcgttagaaagcctaactaacttaacaaactatacttaatatttaatgcttacatccccctccaactaaaggtgtagacaccattttagtttggattttca

SEQ ID NO: 53590 - DNA, 1829 bp, Cannabis sativa
  modified_base (32)..(49): a, c, t, g, unknown or other
  modified_base (1134)..(1141): a, c, t, g, unknown or other
  modified_base (1399)..(1401): a, c, t, g, unknown or other
  modified_base (1734)..(1738): a, c, t, g, unknown or other
aatagtggctgctaagagtagggcttacaaannnnnnnnnnnnnnnnnnagctcatgaaataagaatgaccttcactttcgcctaaacgggacaatattagattctcttttagattgaataaaatattgctagagtggtgtccattttatatgagaacactataatgaatgatatttttgactctcgcttaaacgggagactacatcaatttgttggaaactttggaaaataattgaatatgttttatttttggtatttttgcaaacatgattcttacttgttattttttgaatctgtgtatgaatttatttgaaccaagtgatttatttctggttattgatatttgtagtgtcaaaatgaacaacccacaccccaatcctcatctattacatgcctttgcaaatgaactctatcgtgtgaagatgtctcctagtcagagcatcaatacacacttgctcatgatgaacttaaagttccagaaagaaaatctactgggaattgatctatcaaaagagtaatgggttcaattcactctcaacagccttccacctgagtataatagattcgttgtatcatacatgatcaactttaactcattcgacataggcaagcaagacgctaaactgcgtgcctatgaacggactttgctgcttgcaaggagggctctctccaatattacagataaaggtaaaaggaaacctgaagatattgaggatgacacctccgataatgttgcttctttgagttcaattttgagagctagaatcgaaatggaaccagaaattgaaacaattaaagaacaacagagcagatactcttctatgttctcactgtagagagaagggacatttgaaatcaagatgttccagacttgtaaaccattggaacgaaggtaacactttagtttttgaatcatgtgttttagaaaatgacaaatcaatttggattgttgattctagatctacaaaccatgtttgttcttcattgcagctgcttgaaacttgggattacttaaatccaggggagttgaagctcggtccaagccaggggaaaagctcgcctcaagttttagaataaatttttgcttttagacaatgttttgtttattctaaattttagtagaaacttgattnnnnnnnnatgtttacaaacacaattttatcaattgaattttttgagttctatttccattatttcttgtcatggcattcaattatgtgttgctcacatggaacaaggactttatgttttaagaccgaatataccagttgcgcttaataacgaactttttaatatcgctaaacctagaaaccataaaaggaaagagattgataataatgataaaacatatctatgacatttacaactaggtcatataggctatgatagactttacannntaaccaaaggtggtctattgaaaaatgtcacatagggtgaattaccagtttgtgaatcttgcctagaaggtaaaatgactaagcgttctttctctataaagggagagcgtgccaaagaacctctagtgttagtgcattcagatgtttgtggacctctaaatgtaaaagctagaggaggttatgagtactttctcactttcattgatgatttctctaaatatagttttctttacctatgcaaaagaaatctaaaacatttgagaagtttcaggaatttcatgcttcagctcaaaactaattaggcaaaacatcaaagatcttgcgaactgatannnnnggagagtatatggatatgcagttcaaagattatttaattaaacttggtattgaatcgcaatatactgcccctagcactccacaacaaaatg

SEQ ID NO: 53591 - DNA, 2118 bp, Cannabis sativa
atgtctggcgtgggtccttcctcttcatcaggcgatgcgcaaccatgaacctccagccgacccattattaaatctgtttattttttattttctttttactttctttttgtttgtatatccctctccttaattactcttttttaaccgcggagacaattaactttgtcctggctgcggggagctttttagtagttgaataggatacttttgttgttcctttcttagagacttgctgtgatagactgtttaggggctggttgcatttcgaaacatctggctccaacgactagtgtttcaaccttttcccttagccttggttatctcctggatgcttcaaaaactattttttatttggcccttcctttctcggggccgtaatttattttggctcgcttcctggaaggttgcttgttcagcgctagccaagaaatgacctctctccgtgaaataaggtcttccactgtccccttttaggtctggtctttccacaaagtcaagcttcaggagcattgtctgccattgccttaagcattttccttactttggtccttgtcagctgctcattctaatattttatgcaacttgctgggctaaactcttcgtgaaacccgtggagatgtgtaagaagggactcagttgtgtcttttcgattttgaattttttttgccgaatgtgcttcttttctctgggttcgctttcgagcttagcttctaagggaagaactcaagcgtatttctctttgaggagactttggttgagtgcgttccccatttttgttgcatgttgggctgaatgattttggcaaatggaagtaggacattgtagccgtcgacaattgaatatatcgtaccccccaaatgagctgggaattctggggctcaaattcttggtcatttgctttgcgtctgacttgtgtctccttccaatttctgaagaggagtattgggcatatctttgcctcgtaccctccttccagagaggtttttgggaagtgcgcgaccacccgcaagcctttgggaagtaaaacatgagtttggggcgagaacctaattgtatatccaacaaccctttttatggcgcaaatcccgcaagggagactctaggatgtttgtagcatggggagccattggttttacgggaggaaagctaggcctgcacccttcagcaatcttccttggtaggaaagtgttttaatgaaaatcatgttgagtctcgtggcagcaagcttttggatttcactaagaaaggtggaaagcacgcatgagctgggacattaaagttgctagtaaacaccaaagggtgaagtattgttgggttcgcgagagtcatgctaaacttttgtgaggcaggcttcgtcttccaggaaggaaggctaaagtcacctaaatgttcaagcctagactttgcatgaaaggatcaagggagaaaacttcacaaggagtaggatagacttcaagtagttcttccaagtttggggaggaaggttgaagacgtattatacccccagtgatctttcttgcatgagaaatgcgtgcatgcgagagtcatgttgaatttttatgtaacatgtttcgactttcgggaaggactgctgaagttgtataaaaattcaagcttagactttgcttgaaaagataaaatggaaaagcatccagaggggtaagacagacttcaagcaatccttccaatctgagaaggacggttgaagacatatcgtacccccagtgatcttttctgcacaaaaaataacgtgcatgcgagagtcgtgttgaatttttatgtaacaagcttcgacttctggaaggaagggtgaagttgtataaaaattcaagcttagacttcacttgaaaagatcaaagggaaaacatcacgaggggtaggatagactttaataagtccttccaatctgggaaggagggttgaagacgtatcatacccccaatgatctttcctgcacaagaaatacgtccatgaaaaagtcatgttgaattttaatgtaacatgcttcggcttccgcgaaggaaggttgaagttgtataaaaattcaagcttagacttcgcttgaaaagatcaaagggaaaagcatcacgtggggtaggacagacttcaagtagttct

SEQ ID NO: 53592 - DNA, 1132 bp, Cannabis sativa
  modified_base (1076)..(1076): a, c, t, g, unknown or other
ttgtatcactttcaaataacatagaaaaaactagcataaaatttagtatacgtgtctcgcaggtagtgtttgttagtatatatttttatatatctatatttatgtagcttaggatcaatgttggtatctagtcattttccactattggacatcatgttctattattaaaaaaaacaacactatactaccaaacacatgtacaattagttaggacaaagtgacctaaaatgacaattaaataataataataattgatgaattgtttcactaatttaataagtacgagaacattttggtctttgtataagcataaaaaatttggtcttttttaattatttgatatatatatgttggctaagtacaaacatataataggacaaaaataacatcaactataatagagaaaaacattgaaaattgaaagtaaccaaccactcaactataataacatcaataattactaactgaggaagatcataggccggccctgagctaagcataggcgaattaggcctgtgcttagggcccacctaactcaagggctcaaaaaaaattaacctcttttaaaattttacatttttttttattaattttgaaaaataccatttttttaattgagggtccaaaaatatttttttttctatggcccactaaatttcaggaccggcctaaaagagacgtgtgtgagaggatgtgagtgttcaatacatgctcttgcgtgagtgtgttaagaaaaaagtgcctcaactagtattgtattccagtaaatgaattgaaaattacataaaaataatagtaggacattttagcattaattaatgagtataaatactgtaagagcttactaatggaagtaaagtaaagtttggaagagaatgaagaagagaggagatgagaaatgtagagcatattagtagagctttagaaataaagagtgctaccgtcaactttctattacaacttcttaattaacctttatgcccgaaaatatatgtcggaatatttctttttagatttttttcgggagtgttcgttatgcttacaacatcattcttgtaaatttttgaaaaatttcnaatagtttacagtgccgaaaatacgtttaaagttttttgaactcgtgtggtaaact

SEQ ID NO: 53593 - DNA, 631 bp, Cannabis sativa
tccactacatatttgacacgctgacccttatagtacaatcataactttgtctccttatttttgggatcacttgtatttcagagccattagagctcaagtataaaagccccatttaaacacttgtaaaagagttggaaaataatcatttataaggaagtttagagattcagtacaacaccatttttctccattgatgttgtgagtttctcttaagcttttcatctttacccttttgcatttgatttcctaactaaagtttagtttacgagtttttaccgtcaacagtaatacatataatatatattttctaaaaaataaaaaattaaagtattatttactttattataatttcaaaattcttttttattttaagtaatatatattaaataagtacatatattttagtacacaaaaaatattatagtgtttttattaaatttatcaaactattttttaaatttttttttaagcagcgtgagcagatttttgttttttttttttttaatgattatagtgtttctttggtggctttatcttaatgtgatacatgtaggtataaatttaaggctaattaaaatttttgcccctgaactttaacatgtactaaatcatgctcactgaattttaaggt

SEQ ID NO: 53594 - DNA, 1006 bp, Cannabis sativa
acaacacaattcacatacaactttaattggttcaaatggcagtactgagagtttggctactcaagatgcctcttcatatgttcttgattcagagtcagattatggtcttaacatgactttacttactgatgaagctcaattacaagatagtcatgaaaacttcatagaacatttatcaaatggagtggtaaatggtatctcagaactcaaaacagttggctttcaatacaatatggctattccaatgcctgattcacttagtctcgattcttcgaagcagaatccggtgagtcagaatgtttcaagctcttctactcttccttactttgaggttggagatatgcaatccaatactctcgaaccatctgttttacagtgttttgataaagagtttaaaaccatttctccaattccacatttgtgttctcatccatcttttgagggtgtctcttcattgtctcctgatatggggcaacatggaattggaggccttggtatgcaaggggaagaatatgctattgataatgatttgtttgctatggaaagccattcaagtaacttgtcagcatcaaaggtatatattattagtatgtggagtgtagagtattatgttatatacattctatgtagttagttactaatgtcatttacattgctcttaacatgtaatagggtgcacatgacttgccaaattatcccttatcttcttttgcttctgctcctcagatgataatgacaacaactggattgcaatctctatcacaggtctctatctattaatattattctcatttatatattgtattggatatggtaaaagttagaatatcttagtctaatctgttgattaggcattaagtttcattagttgctagttgaaggagataagtacatttgatgcattgtaaattggcttgtgttttcccatacaggccccatcaactactcctgctgcagtagaatgtagtccaactgcaaaacctcgtcccagggcacgacgaggcca

SEQ ID NO: 53595 - DNA, 2184 bp, Cannabis sativa
tttgttttcttattctataaatgaccaccactaggtcgggttccaagtccccttcacgtgctaaaaattttcaaaaaatactaagaaacttccttcaaagtcctctaaagttgatcctaaaatggatttgaaaggcattgcaaaaaaggaaatgggtgatgttgcagagccttctagttttaaaaaaagacatctttcagctaagattgaatctcgtaaggcaaagagaaccaaatcttcaaaatttgtcaaggatgtaagttgtcttcttttgttttttgatttttgttagtttttttcttgttgttttgtttttcgtttgctgtttttgtttcaatttttttccccatgatgttttaggttctctctgattctgactttgaggatgaagttcctgatttggaattgaagcctaaagttaaacccaaggtttgtttagcttttgtatttttttcatttttttaagttgaatttttttatcaaccattgttttccattttgtttttgttttatctgtttctattcacagtttttatgttttgtcacatttttgtgtgtatttctttatgtatttctcttgatgttgtttttgtgttattttttagttttttttagtcctgttactactattaactagctttttgccttattgaaccaaactacgccatgttactatttctcagtttgggttttcttattagttgcttttaagttttaaaagtgttttttcagggtgtattgttgtttttgttctcattttttgtacgaaggttttgtgtttcataacattttttccttatttttaaatcattttttttattgttcttgacttttttaaacagttattttaatgttatttttcagtagttttattgttgtttaattttattttacagttaacaatttttgtagtaatttcatgttttacttattgttgttaacatatttttttttcggttgttcatcttttaggctgtttatgtctgggtgtttttaaaatgttgttttgtggttgatttttggttttttgggttgttcatataaggtgtgtatttttatttttgtgttttttagtacatttttgtttttgttacttctgtagtatattgtattttagctttttagttttttttttttattatttttatgatgtttttgttggaactgttgtaggaatggtattacatatatgaccaaaagaatctgtttcttgcaaaagccgtctccactgcttcatacatggttataaataatattaagacttgtctttcttctaagaagcttgaaatgtttttgaaaacttgttttggccatttcattaagcttcttgatttcaaagtgcaaccgcaagtttttcacgggttattgttgcaggaagggaggttcagcagccttatgatgctgaattgtgggttatgattcgtggtgttaagattaggtttagcattgaggagtttgcattgataactggtttagattgtaaaagtgattgtagtgtgttggattttaagcaagatgttaattgtctttgtatgaaatattggccaacctcaacctctattactaaagaatctgttagggaatgttttaccacaaagaggtgaggtgattctgatgaggatgctgttaagttggcagttctttattttgttgaatggtttttgcttagtggtactaagcataaaaatgttcatcggtccattttttagatgttgttggcagttctttattttgttgaatggttttttcttagtgatactaagcataaaaatgttcatcagtccattttagatgttgtagacggtggtaggtatgatgaattttcttggggacagagttcttttgaattgactattttatcattgaaggggaagcttgacagttgggttgaaagtgttagaaaggcgaagagtttaggaaagaggccgagtgtattttacactttgattggttgtcctcatgtatttcaagtttggttttatgagtgttgtaaatacatgaatggtaagtactgccaaaggaaaatttctgctattccaaagattattcagtggacttgtagcaaccagccgactttcaaaatattaaagactacgatttttgatgtctccaaagacaaggtacttcaatttgttttttttttcttgatttattattagatgttttgttgttgtttttttttta

SEQ ID NO: 53596 - DNA, 1429 bp, Cannabis sativa
gaattttctaattgttgtttttcttttttgtttcatattttgttgattttttttatgttaattcgttatatttttattgattttctatttccttgttttattactctgaaatggtttcaaattgtgtaactgtgtaggatgtaactttttcagtatgttgtttattgagataatgttattcttagtttacgttgtttagttctttttttgtgtaactttttcagtatgttgtttattgagataatgttattttttgtgtgtagtttctgttctgttttttattttaactgtttggttgaatcatttttattagtattttcttgtttgtacagaagtggtagtgttttgtgtgtggtttatttttattgtgattatgttattgttctatgttgttttgtttttgaaattgtgcgggtctcaagtttataatagattgagaaagttgtttgattatttatttagttattttgctataaatacgattagttatgttttatcgaatcacatagaggaaatatcattttgagtgggactaaaattatgctttccaattcaaatcagtattttagtttctttgttgaaagttcttacatcaatagaatttaatacaacaattaggtgactaatagaacatatttcattgtttcagacctgtttagattaggtgattaatactttccaacaaataagtttgactcaaacaactttaggagcttgctcaaattagatgttatcaaattgtaatgcatattttcttttttaactttacttccatcaaaatatttttttgcaggtacttgtgaaaacctattctgattgatctggagaggaaaacctattctcaagtttataatagtttgagaaagttgttttgattttttatttagttattttgctataaataaggttagttatgttttatcgaatcatatggtgagtgattttgagttcttttttttgttttgggctctggattttattgtgcagctgtggaagtcttttgtttttggttagttttatgtgttcatggagtttttttttcttttttaggttgggatggttattttcacaatctatatcaagaagtttgttatagatcttttctggattgaatatagatacaataatgtgttacataatgatgagagttctttaatttgctttttcagtttttgcaaatagtttcaaatttgtatttataatttggcttctgttttgtttgcattaataatgtgttacagtctttctaatttgtatttataatgtgttacagtctttctaatttggcttctgttttgtttgcatttattacccaaaacttggaaatggttaatattttctgcaaattctctatgagtttttttcttttttccaattgctagtttctatttttttctgttaatttttttttatttcattaattttttgc

SEQ ID NO: 53597 - DNA, 788 bp, Cannabis sativa
aaaaccaaaattggattttataagttggaaaaatgttccaccaggtcaactttcccaactagcttcaccaagtatgtctctgacttctgggactactagttttttacctttgaattcctgttgaagagggttccaatgctatctctggacttctccactcctagtaagaattccaaactttacatctctttcttcattttgttgtgtgttgactctatttttctaatggagacaacctcagttttgcagtcaacaccaagcaaaaactttcccagatcttcgcattaaaggaaatgcaatacaagaagatccttgaagacgtctggaaggtagaagatttggttacgatggagaaccccagtagcgttgggctcatagctgggagccaaattattgaaccctatagcagtcgagagggtgatcgtgaccccttaaccgctcccaaggaaattactgctttggttgcctttgttaggctattttagcctaagtttcaattactttttatagttatttttcttttttgttattatttttggaatataattacgcttattttgtttggtttcaggttttgacacttggaatgtataaattggacaaattttggaaaacagtgatctataaaattgagaaaatttttgtcaaaaaataaagctgaaatttgacgcctgaattcaattatgttttgttctgattttggaaaatgtcaaaacataaaagttttagatctctttttcaactttccaacgcatcttgaatcagctcatttggagtttgtatgtgaa

SEQ ID NO: 53598 - DNA, 1543 bp, Cannabis sativa
aatagtagtttgcttatgatgattcaccctaaaaaatatagcaaaaggtcgaccttctttatttttcttgtaggtagtgtcagatgaaacaacatcgccgaaatcaattatatgccagaattatttttgcatcaacccaaaagatattttttattaactcatctttatccacctaaatagcatagaagaagttgggatcttctaattgcttcccctgaaggtaccacatgcatctcctaacttcatgtgaattattcgtaaataattcttataatcaacgtgagtaatttcaaggctttcatgtcatccagttctctttgtcattagttcccaactttcgtttggagcaattcctgaactgttaggatatttgaaattctatttttcaactttatttttagcctattatttatgttatttttagagttaattttcttctttattatcactttttagaatagaattatgcttgtttcctttaatttcaagtttcgacacttggaatgtataaattggtcaagtctcagaaaaagataatctataaaatagagaaaattgtgtaaaaaaataaagctaaaacttcaagcctgaattcgactatgatctgataatattttggaaaaagtcaaaacataaaagttctagaactctatttcatcttttcggaacatcttgaattgtctaattttgagaaatatcgagagaattatggccaaaatactaccagtcatcgcaacaggaaatttctgaagaaaaaaaaaagataaaaagatagcaaaaaaaaagatagagttgcgatttttatattgtttaagtctgaactttaaatctttttagtatcttttaggtaactttgttagcctatataaacacattattagtgtttttaggggtttttagagctaaaaaaatttagaaactcttaagtagaggcaactcaaaagaaaattcaaaagcaatcaaggagtacgaattttggagaggaaaattgatattgaaggctttctcaccagggttttcgaacatgagtagctaaataattcattagggtttagatggatattgtttgacattaatttttagttttaatatgatttaatttcccctcaatttctatatattttattttattcatacttaatttcttttaattgtctggccaaatagaaccaaactttgatataggacgagattacctatttggtttggatagtttataggatttttgtatttaatgcattttacatgtttaatttatcacgagagtagaaaatttacatgtatttgatgtttatatatctgagaagactgtagattatcttagtaaacctgctattgcatagaattcggtaatagaaatataatcatgttaaaccataatcaatagatgcaattgaaaatcgaaagccctaacttttattcatagttaatttccttattaatttacatgcttcttattttaattttctcttaaattttatatagtcaaatcgaagtaaaaatttaattttaaagtatttaattacaatcattgtgggatcga

SEQ ID NO: 53599 - DNA, 635 bp, Cannabis sativa
ataggagggatggttttagtttgagtgaggcttgtagtagtttttactagtccgttaaggatcccgcaatatctacaacccaaagagagaaaatcacaatggaacaagcagtaggagtacggtggagataccccggagggagctgagacaactgtctcaaatggttggggcggttactaaggcacgatctgcagaactaaaagtggtgggaaagttgaatctgggacttatttctgatggtcaacagccaagtagcagctttatggaaggtaaagttgcatatgggacaatgggaaagttaagtaagtttaatgggattggtgggcctttgactaatggggataaaactggtaatgggtcggagattgatgtgagaccagttattaggctagacggttgtgatgggtattctaaagtctaaatgggtgctgagtttattagcttgggagatggagttggtgacccgacccacgagaaaaacaaacctgtggtagggattttaaataacattgtagtaggtggaacgagaaacactaagagttggtggaagtgagctttgagacaggggaaagtaaacattagagattttattaagaggcagagagttatgagaagaagagggatggggataatgt

SEQ ID NO: 53600 - DNA, 1301 bp, Cannabis sativa
aagagatagatattttttaagtttaattattttaaaattttaataaaaaaaatataatgattagctgtatggtttctatattatataaataatacaaaatttaagaaaaaaaataacaaaaaagtgtcaaaaattgagaatatgcggtttgttagagagatatacggctaagaggattttttttaaatttaagaaaagaattatttaatattttaacattttgaaatttgaaatcttacacgattaacaaaggattgttttctttaaaaaaagattgtttaattttttgggtttaattattgggtttacttgttaacacgttaacagtctgttaagttaatcgtgtaaggctaaataaaaaaaaatgaatagttaaaaaaaatcgttaaaccaacaaatgacgttagatagacactttttatatataaagatatgtattgtaacatatatttaatcaatatctttcattgtccttgtattatttctacgatttagttgtatatatcttgatttatcttttattgtaataatatctctaataatcaaaagcttatccctttccaacggaagaggagataaatcaagattttgagaatacaatgatataagagattttatgtgaaaaccattcatgggtgagcatggtggtgtatattatgtgatttactatttaattatatgatagtaatatatatgatatatttatatatgagttatatatatgtgacatatatgtgattatgtgttaatttgtatcatattaataaatatagtagtatataatatgatatttgaatttatatataatgttattatatgtatatatgtgaaacatatattatatataacatgtatatacgagtaatatattatatatatatagagcatgtgatataatatatattagaaataattattttttatgtatttacatgagacatgcatatataatatatattatgtttatatataatatatatcatgctattctaaaaatatatatataatatataccatgcatgtatattaaagtgtatatatgttatatatatgtgtgaggtatatgtaacatatatagttatcaaaaattatttttcaatgaaacaaaattcaaattttagtagaattttgtacagaatctaaattttcaattaaaaatctaattatcaaaataaaatttatttttattaattttagatattatagtagcctttaattttgaaattttgatttttttcacaaactagccttatggttaattatgaaatttttaattaattttatttattttaattataaga

SEQ ID NO: 53601 - DNA, 649 bp, Cannabis sativa
  modified_base (615)..(624): a, c, t, g, unknown or other
aaaaaaaaagaaagaaagaaataataattaaaaaaaagaactatttccaaaatactcaaaaaaaaaaaaaaatttacatttttacgaaatttatgagcttttaataattttacaaactttttgttatagactgatgtttacatattatttttttttttaaaaaaaaagaatcgttgttttcacgttgtataaatatagtataacattgcgaaaaatataaaaaaaaaataacattgaaacaacataaaatcataaaattataaataataaaaatttgtaaaataaataaattttaagtgtattatataaatttctcataaaatatataaaagccgtaaaagaaaatcttgcactaaatttatagaaaatagcatatgaatttcaaggagctctattttacaaagccaaatacaacacacaaaaaagagttattttaccacaaatttgtagaaatatttaaagatgttgtcaaatggtactatttttacttttaggcacaacaaaatttgtgactaaaagtaaaaaaattatgactaattataaattatcattcctatattgtgactaaaagatccatagttaaaaatattattcacaaaaattataatttgttgnnnnnnnnnntatttttagtcacaatacttgttgt

SEQ ID NO: 53602 - DNA, 1470 bp, Cannabis sativa
  modified_base (27)..(60): a, c, t, g, unknown or other
tactactactactactactaataatannnnnnnnnnnnnnnnnnnnnnnnnnnnnnnnnntaataataataataagatgactgttgagaagtttttgatcaaagaaaggtttttttttttttttttttgaataaggatgaaattgaaaaaatgtaagaagtcctaaaattaattggtaaatgagaaattttaaaattagatgaggacaattgggtcaagtgaaaaattcattaaactaaaattatagcttcccttaaaagctaaaatctcaaagttagggtaggccaactttttctaaaagctataaatttcacttaaatttttgaaaaaattattttttaaattttaccaaacacatattaacttatagttttttctaaaagtgattttagcttttttaaaagcttcaccaaatgggaccttatgcaaagtaggtgttacgatgtttagcttttttattatcttttttaaagaaaaatatcattcaacggtttaaaagaataaaatcgtacaagtcaaaaattaaataaataaatagacccaatagatcaagcataatcaaagttgcatagatctcaataggaattaaatgaccaaacaaccgccaaattaaatctagtatttagaaaaattataatttaactttttctatataatgatctttattttagttataataggcataccactaatttttaaataaaagctttaaagtataaaaaaaaaaaattaaataaaactataaacactgagacggacctagaaccaaaatctagagtgtgaaaaattaatatttacaaaaacattttttttttttgttaagtttacaaaaacatttattatctacaattttatatgcatatgagggtaggtagtcaatagtaagtcttactgtatataaatatgtaaagaagaaaaaaaataatttgagagtaggcaattgttcacctacccactaaggtaagtccggcattggacacacgtacaatagagccagttggtgagtattgacgcaaaaataggccaactcgtttgtatgtataaatgaaataaaagttagaagtgaccaagtaaaatagtgagtacacacaagtatttatagcagtttatttttttttattgcgataatttaaaagttatgtccacttcaagtttttattttcacgacaatggttacaaaaaaaataattaagtctgaaaactctaatttctagagacagaaactaaagagatgctttgattttatgaatatttttcagatatggaatgaaaggacattggtcacgtacctgtcgtacggtaaaataccctgttaatctttatcaagcatctgtgaaagagaacaaaaaaatagaaacaaattttgtctatcaagatgatagtcttttcaaaaagcctttggatattacgtacttagtgttagaattatttatttgtggactaatataataccataatcacaatcattaa

SEQ ID NO: 53603 - DNA, 1451 bp, Cannabis sativa
ttttttttttatcataaagtaaaagaaatatgcaatatgaattgttttatgatctagagttctgaccctcctttttaaaaattctaatggtataaactagaatgtggtgatttgagcattagtagtagcttttcccatttaaaatatgacgacttatagttttttttttcattccaaataatatgttcttctaacttaaaactaggcttcacatatttgttttaatgcttctattatgtcgtaggccacccttgggttcaagttggtggtgttgctcctgacaaacctcttgattccgctgttttatagcgcttgaaacaattctctactatgaacaagctgaagaaaatagccattagggtgagtatttatcagtcaactaaactatataattatagcagtttaagatgtgtacataaggttaatcattcattaaattactattggttagcttttttatttccatttatatttattgcaaagcacaagcatgtattgcaattaaggtacgattattatactacgatccatgtccatagagaaaaaatgtacattttgattatgtttagggtattctattctttagtgcatgacttgcaattgttgtccatagatgtcgataatagtggacagatcactcttgaggaactaaagaatggtttggaaaaggtagatgcaaatctcaaggattccgaaataagtggactaatgcaagcggtaagtaatgattctgagtaatgattctgattcagggaactgtaataaggcttgtaaaaattgtataatcaatcttgtttgctatttattgaaacctattccggttgttttgttaaaaaaaaaattatttcctgaatcgttctttccgatcggagaatttgaaatgagaatgagaatgcgaatgaatgcagttgacagaaagaggaaaaaaataaaaagaaaaaactgaccttaaagtgggaatataaacaaggattcatcttctttcctctaactactacaagttgatgaagttagattatagtctaatatatcctttgtaacaacttcaaagattgttagattatagtctaacataattatccatgtaataacattctatataagtgtctgatgtatgagtgttattagctagcttatcatgtaatgtaattctcttgttcccccacccccacttttttttttctttattttcttcccaatatatatttggctcagaaagcatagattttagtttcacatttatttgtgcattctctctctttctattggaataaaagaataaatatgtatttatataattattattgtttttcttaattgaacaaatataaattattattattgtaattcttgtaattttttaaataaataattaaattttaaataaaattaatatttacgtgcttcggcacgtaacttctacctagtatatatatatgttataaatatta

SEQ ID NO: 53604 - DNA, 1558 bp, Cannabis sativa
aaagggatccgtaattttgagcacttagaaaaataaacagttttcattctttgcaatcaagagcctgttcttaacttttgcaattcagattaataaaacataaggagagtaggcaattaccgacatccagggtcgaaccactttaaattcaggtgtcttttctttacatttattgcaaattctggtatcattaacagtatttattgttatgattttggtttaaatctcaattattacgactccgcgtcggttggctaaaaatccagtcaacaataattatggttttatttttggaagtttataataatatatattttttgtatcaaatttgcaataatgacataactactattattgacgtgccacatcagctaaatctgacgtaaatgatatttttttgttttttctttatttttaaaagtaactttttagttactaatagtgttgataagaaaccacttagttatctttgtaaaagtgaatatttataccaaccccatttattcctcgcatttctcattaggttctcgtttgtgaaaagcaaccttgttctcattttcgaggaatatgttttcccgtgtctcatttagttcggtgtaaacaatataaattaggatgtatttctcatattttttttctgcttatttttatctttggacgattccttggattcatcctttctcttcccatgtgactcattgctcttgctcgtgtttgcaatgtctgtttctggttgctcgagcttggcttattccccgagccatcttttaataactttagctcgattcgagattcttcctttcaaacataaataagtgccctgtcgttgtattcatttatcgatttgactgggcgcccttgcaaatcattccacaactcccctcccacagttaacaagtcagtagtaactccagcttggagtcctattaactatatactgcattaaagttttttatgtttgctaatgtcgtgctgaagcgactcaaaaaagcctttagggactccccaagatgttgcttgatattcgtcaacgacgatgcttctagtcttctgtccctcgcggcctgaaatcgcttttcgaattctttagatagttgctcctacaaagtaatggaatgatttgtgaacttatcaaaccaactactcgtcgcccctgtaagggatgtagggaacaatatgcaatgcaagttattagaaacattacttgcttgcattatagtgttaagatttttcaaatatgcaaccaggttagtgatttcattgtattgcctgacatgagggttcttaagggcccgtttggcacagcttttgaaaaagctgtgaaaaaaatgtgtttgacaaacaatcaaaaacagctttttgaagaatttttggagaagctacagctaaaagctaaagctgctccaacccaatttttagaaaaagttatttttattaaaagacgataataattttttttgtatgaaaaaatcatatttacttatttattacatattaaaaaaaataaaaataaactaattataataaaataaatattattaaatctcttattttatta

SEQ ID NO: 53605 - DNA, 947 bp, Cannabis sativa
tgatgatgaaaatccccttagccagcagccctaatttcaccacagaatccttccatatacgcctcacgaagccatcaagaatgttgacaggaggatttgcaccaattacatagcaaacaagggatggttgtcagtaattgacttcatcctcaatgtcagcaaactcaatcttcactttgtttttcgaaccctgcactttctcttcacttttcaactccgagcctttgaacgcagtttccagatttcgaacaacactagatctaagtattgggggagaaggattcttcccagtacttacatcctaagatgccttatttgcaacatccaaccacacagaaaattcctgctgaaactcactttgttggaacgcttcagtcgcagcaggggagggaagctcttggtattgttccactggttcgaaagcctctagaacctctaattcctttattccaagtatttcatccatggatctggtcttgatgaccctatctgaagatgaaggacctgtcttcttgcccttagctttaactttcccggccaatttcgcccttttcgccatagctccggtgggtcaccaaaagagagggagaggcgcgagaaaggacctcaaaataataataaaaaaaaaaccaattaaatagtattattttttatttctttaattttcttaattttttaattttttattaattttataaatattaatgattaataatcaattaaaaaatatattaatattaaatttataaatattaataattaataattaattaaaatatatatatttattaattaagaaaattatatgcacccataacacaaaaaaaattgattttcttttataaatatctacataattatctatatccttattccttaattataattctatattaactatttcaaattattagttaataaaaaaaattcataaatatacatatatc

SEQ ID NO: 53606 - DNA, 910 bp, Cannabis sativa
  modified_base (211)..(212): a, c, t, g, unknown or other
  modified_base (811)..(811): a, c, t, g, unknown or other
  modified_base (840)..(845): a, c, t, g, unknown or other
taaacaaaataatttggaaggctaattactaataatatatctattttttatgtatttaatatatataaaaatataaaaaaaaatctagaatgcacctctttaaaagaaatgtaccgattcacttatatctgttttggtattcgaataattttttagtcaattttttttctcatgatcatgtacatcataattatttaagacatcctgtaannttttaaaaaattcgaaaaaaatttaacacaacgaatataaagttcaaacagtgtgttgcactcgtgtatattttattttatacacatgtgaaatagattgtttgaacactactttctatattataaattatttcatatttcttaaaattttgtagaatatcttaaataactataacatacacgaatatgaaaaaaaaaaaagactgaaaaattcttctcagtgctgaaacaagtaaatgatgtatcagtacatccattttaagaaaatgcattgtagaagcacctaaaaatatatacataactttttaaggattacaactccctacgattacgaatgactttgttagcttgaagagtataagaataactattaaacaataaaataaaagaaacatacgtgcaacatattgttagaatcttatttttaaaatgttaaatttttaaaaattttgcaggatgtcttaaataactacaatactcaatcacaaaaaaaaaaaaaataaataaataaaagggatcatccgtgcgtaaaaatcatggacatgaaaatgaaacaaaaacataaggagcttaaattttttaggggcttttttattttnacactttaaaataattttttttgtatttnnnnnnaattctacataaaaatcttattgcaactagttctgcaacttaatcgcaacaaaaaattgtatagc

SEQ ID NO: 53607 - DNA, 745 bp, Cannabis sativa
tattactagaatagaaatcccaatgagaaaagctattcaccatcattgcttgaagcctctcccctttaactttattttcaaccaaagcccctactcctattttatttcttctcaacacttccgcaactttctcttgtttctcttttttattcatacccctaacattccaacaacttatattgcaaaaatccatcaatcataaactgtataaacttacttcccctatttcttcaatttgttcccccgttagaatcccaaaagaattcttaagaaccttctcgctagagtccaagcttttcttgttgagcccgagcccttgggatttcggttttttggagctttccaatccccatcattttccttccctgtaaagtcacggttctggtctgctgcccctttaaggtttccttcagacaaacctttgttgctttggtcttcattttgaacttcatgaaaaatggcagctgctatattttcttcagcagcagttttaactactattaaagcttcaatagtcacaccttctgctgtttgttgagaaactttctctttggcagcttctttcggcttttctaccttcttacattcagccataatgtgctcgaaaccaccacaatgtttgcacttcaccggcaaccattcatattctatttcctactcaaccaattgcccatactcattaacaaaccaaaaagttcgttcaggtttatcagtaatttccatttcaacaaggactcgagcgaat

SEQ ID NO: 53608 - DNA, 2254 bp, Cannabis sativa
attccttattttgatcgaataaaaaattactaaataatgttctattttaaatgagctgacaactatattcaactaatgatttatttgactctagcctaaacgagacacttacatcattgatcaagaaactcaagtaagtttgatcttgaatagtttaactccagcttttttttgccctttacttcaaactacgtcatcatgaacaagttaacaagttgacttttgattttttgattttcacgagttgatcaacaatcttcagacatttgagagtttgattgggggtccaccaaaagaggtaacaaagctccaagttatctcctttatgtggacctccttaggacaaatcttcttctcttaagattgtatctcttgtgctccttaggactaattttcttctcttaagattgtatcttttgtgctctttatattcctctgcaaaatacttgttctgcccatctcggttaggttcgagatggactttgattgttgttgtctcgacaattactacctaattagatacttttgacttagccttattgaattgttaggtgagacttaagtatacaattaattatgacacattttgaggtaatctaactatcacattcttgttcatttatatatccactttatttccaaatttatatccatgtgtcgtgtccatattggctgcacgaaatatggacataacagtcgccccctaaaaaactctttttgggaatagaaagggctttttatttgatatcggctaggtaaaatgatattttcctgaatggtaatgagtgcgtcctttagcagttttattctctcgagaaatgatactctgccattaaatagtatccattcaactgacaaggggttttccctcgtgtttttgaatgcctggagagattttagactgtttgtttgaatttttgatcaaaatcaacggtccttaaaataatatcgctgactttttcaccaattcgatgagttttcattgttgctaattatttacatgactagggaatggtaccgcgcttcgcgcagtttttataacaattgagaattacatatattaaaataattttatattttatagtaaagtttatatattttatgatttaaatttatggttaattttatagctgtggtacaatttaaattactataaaaataaattggtcagtatttttttttctcctgatttaaaaaaatatgaactattactgatgtcaaatattcttgatactgacttgtgatctttctctttccatcctatatggttaatataaaactgatttggcacattagagtctaacgtgctttagttatatcaatgcaatgtgtataaaataaataaatattttatcctctaactgtttaaaagaaaaaataagaactgtactctctaaatatattaacttttaaaaattatttaaataatcagattaatgaaagctcaattatttttacatgtgcacatgcatagttagagccaagaaaaatgtgtttagatatattatattaaatgaattaattataatttttattttttaaagctattatacataattttaagataattaaaaattatacgtttcttattatattttgaactgtatattatgagttaatagaaaaagtataaaatatgtgaagattaaaaaattaacccaattatattacataaaggatttgttgataattaatattcttataagttatatttatattacttattttacttcttattagtgttaatattatgaattgtagatgaagatgtttataagttattaatttttaagagaagttttctatctattaattaagatatagagattaaaagcataactccccaaaaattagaaaaaaattcaaaatttcatatataaaaaaagaaaaaatacaaagtaaaaaagataggatgtcacatgatttttcttagtttttctttagagaaatgctaaaaggcactactggtgcctaggaccctccaacgtgtcaatatcgctattggtgcaattaagtatcgggccccatatagtttaatataataatttttatgaagtatcgctaatcaatatagataatgaagaatctcaattatatattggatttgtctcttcaactaacaaattaataattattgttagtttatattaaatagaaaaaacttataaaaatctacaaaattaaaatattataatactataaaaaatagaattacctctttttatttggagattatatatagatatagattata

SEQ ID NO: 53609 - DNA, 914 bp, Cannabis sativa
  modified_base (540)..(559): a, c, t, g, unknown or other
atactaaaactcaaacatttaaaacacacttaataaaattcgaacccagaacttaacacaaacatcagaataaaaattaaaccataaatgaaaatttatgataatatttttcaaatttcagtattcattagcaataaatttaatattttgtatttatgtcacaaattttttaaaagtaaagttaaaattttaatataatgttattaggtaattattattaatttaaatatataatttattttttatatataagttaaaatattttatatatccgccgcgaaacgcgagatgtttactagtgtaagagaattgtaacattaattagggatttttgtctccaaaaataaacattaagtatataagtgtataaaatctgaaacattaagtatttatggcgcaatttaccctaaataaaattttgctaatcatgtcataaaaatctatcatattaatcatcaatctagcgagattgtgaaacacccacattcttcaacctctctcaattggcaaaaaaacaccaaatatatatatatatatatnnnnnnnnnnnnnnnnnnnnataaatatatatataaaataaagaacagagaaaataaaaaggaatcaacttagagattaaagtcctttatcaaagaaaaaaatactataaatataaaaactaatatctgttataataacgggaaagaaagaaaaaatcttctaacccattaattataattccatattctaaatatatagattatagtgagatatgcattcatttcatgattatcttcttatcttttacaaaccacccctcatcacaatattgtctatataaatatgtacagaagacacacgatatatgatcaaaaacactatctctctactatattgcttgtacaaacacgtactattaattattaaccatggaa

SEQ ID NO: 53610 - DNA, 1671 bp, Cannabis sativa
cccccccttttattagaaccggtttttaagttattatttatttttactcagggaatcaaaactattttaatttatctatcagtatttttgaaattgactccctcttgttttgttttaattataaccgatttctaagctataatgtgttatttgtttttactcattttgttgtagaatcagttgtattttaatttatgtctcatatagttttttatttagtcatttcagaaaatagttcttgaattatttattttagaaaatcggttcttgaattatttattttagaaatcgatttttatttaattaattcaaggatttggttataaatttagttatttcaagaatcgatttttgatttagttaattcaaggaactaatttttgatttatttatctttatttagctcatttttttgtataagtttttatcttggttgttttacgaaaccagtttctttatctcatattcttaactaattgataaatataacatgtttctttatcttatattttgagttattgtgtgttatttatttttattttgttatgtaatcggttctgtttagatttatgcatcagtattttaagattcgactcccaccttttttttttaattataactgatttcttaggtattatgtgttatttgtttttacccaatttattgttgaactagtttggtttctaatttatgttctattgttttaagaactggttttctttttattttttaattataatcaatttgaattattctgtcttatttgtttaaattcattatattatggaatcagttctattttaattataaccggattgagctattttgtgttatttatttttattcattataacattgttgtagaatcggttctattttaattataactggtttgagttattttgtattatttatttttattcattatcttatataattgattttactttaattataactaatttgaattattttatgttatttatttttattcattattttatagagtcgttctattttaatttatatctaagatatctaactccgacgacgatgacaactccagcgacttttcttgcaacggtaacttttccagcgacaataattttttcggcgatacttattattagaagatttattaaatttatttattgttttttttattaatattttaaactttaattattttttaatctcatatctttttgcattatttatttatgccatataaaaataaactccactaaaatttctcatgaaaaaacctctttttttaaaccaaaacttagaatacgttattctaaacataaggcagcaaaaacatggcattatcaacaccataaaaagttaaaaaaaaataccaaaacccatacaaaaagggcaaacttagaaatgcaatatttttcaaataaactcttaaaaaaagtgtaattttctgtttattgttggtaaagttgcaaaaaaatcgttcatttatttctgttagaaaatattgttgtaatcaaatgtatcaaaaactaaaacagtaaaagaaaaggtattaatgtttttactattagtttattaaacttataaactttccttctctcagcaagctggaatagctcagctggttagagcgtgtggctgttaaccacaaggtcggaggttcgaaccctccttctagcgatt

SEQ ID NO: 53611 - DNA, 1868 bp, Cannabis sativa
  modified_base (1162)..(1175): a, c, t, g, unknown or other
tcatcagagaaagctcggctcacgattcagtaagcccgtacttgtttagtattatatgtgattatttaaccatgttaggacgcatattagattatggttatttatttttgcgttgccttaaagtccataagagcggtattaagtttttttttatgatcgctgtctaacctgcctggcttatgggtttgcaggctaagtcctatataatggatgcccagcaaaatacaagaagttagggtaatagggttgagaccagaggcggtcagggaaatcaaattccctagaattaacatggtcgcggctgaggccgtggcagaataaagggtggtcaccttgtaaatccaccacaagctcctttagattgggagcacaggtttgtggagatgcaagatcgaaatccgccaacaagaagaagaaattccattggtgccagcaaaacaacttgttgctggcaactgtatggagctattatacgagaggtttcataagcaagcacctccagtgttcttgggaggtcctgatgtgatgaaggttgagcaatggctcactgtaatggagcgaattttgaatttcatgggggtagtcggtaatgatcgagtgacctggacaacttttcaattccaggtagacgctctcgtgtggtgggagttggtgtccctcacccgagacttcactgtaatgacctaggaagcgtttcaagatctgttcaacgccaagtattacaatgaagtagtccgcagtgttaagcgaaatgaattcactgagttggtgcaaactgagggtatgtcagttattgaatataccacaaagtttgactgtttggccaagcttgcctcgggtattgtgccaacaaatttcagtaagaaagaaaaatatttggctggtttgaatgtgaaaattagacatgatatggtgatcactactaatgaggcaacgacatatgcggagatggttgagaaggttgaacgagctgaggatgtggttaagtttctcgaggagccccgtatgactctgagtgttggtggaaccccactcttcctactcctgcttatggtagggatggtggtgattccaccactgacaagaagagaaaagttaccccagcatctggtggcacggggcacagcaagcggttctgagggaaccaaggcagaggtggacnnnnnnnnnnnnnntaccctgagtgcccacgttgtaagaaacatcatcccagagagtgcaaccggaagataagctttcagtgtagcattgtgggacatttcatgaaatattactctcaggcaaagaaagaagagcagaagttagagacaaaacccgtacttgctcaggtgtttgccatcactcaagctgatacaacagccactccttctatggtgataggtcagcttcctgtcaacaactccttttatattgttttattagattcgggagctacacactcatatgtggctacacaggtaattgatcttttgggtaggccttatgattttctggaaagagggtttggaaccctaatgcctagcagggacttggttatttccaataggcgcattaggtctatgccagttagaatcgaagatagggagttgagtgctgaccttattgaactagaattaacggagtttgatattataattgggatggattttctctccaagtattcagccagtatagattgtaagcagaaaatggtgacttttcagccggagggtgaagatccatttgtctatgttggatcggttctggggtctcagattccgagtgtttaagtattaagagctagggatctactacacaatggatgtgtaggatttttagcagttgtgattgactccagcagacccaaacatttgggcctgaggtagtca

SEQ ID NO: 53612 - DNA, 802 bp, Cannabis sativa
aacataaacaatattttcatgttcaatatggcctgtggccctttgtttttagaacactacttgttttcatgttccatgtggcctgtggcctttttagcacactacttgtttttagccccaaggccttaatgttcgtttctttggcctataagccctttgttttttaatactactattatttggtgctgttgtttttttatgatggattatgtgaccgattaagcgctcttttatcctggctatcttcttatggccttgacaagtaagggtctggatttactttgtcaagccgaagtatgcctgcacaacttaaaggtaggtttagtagcttattctaagtgttaaaatttctttgcataagttctttgtgctagtttgatgcattgtacgatatgggtgccccccaagtaagtgaccatggagataggtctcttggtcacttgttattcactaagttttgcaaaccttgcatgtgttctttcttggggtgctatccacagtacgcatgtggaactgaaagaataactttaagaagtcaatcttgtgagaaagtagtttagacacaataaatagaacataaacattgttttttgttcattaattggtctttgttgctgtgtaacttacataaattgaatcttcaagcttacattacacagatttagcttctagatgttaagtggctacccttgcttaccttgcatagtagaggccactattgaagaaccgtgggagaccatgccaaaaaggccaggggtactagctcttttatactctaatgttgagtaggtagaactgctac

SEQ ID NO: 53613 - DNA, 704 bp, Cannabis sativa
taattaatatttataatttattatccatcttccaattaatgacgacatgaaaatttaagaaagagaagaattcataattatcttctcaatttattcattgtgcttatagaaataaaatctagtaaataattaaaggtggaatactctgttcgtgcctgaagaaattatgaggatcaactttggtcttcacacgtaccaatctcttaaagttatcctcattgtaataccttataccccaatgatcagtaattggccaattgaagcacatgttcttcttgttaatccccaaatcaagatctctataattgacataagcttgtcttggagagttggaaacataaggtgtcatgtactcatacacctccctaatccaatcaatgtgcctttctgggtctttgtctccatctgcccaggtagttaagtactgactcatgaaaaggattccctttctgtgagggtatggaattttcgattccgaaatcctactcatcattccacctaatggagtccaaaccatagcaggattctcctccttcaacatccttgtccacaatccttctagggctttctcaggtattggaactgagacaaaatctgattttgctttgaagtaagttctgaatctattttttgcctggagaaggctttgtactggtgttccttttgggtatccatccacataaagaactgattcaacccaactc

SEQ ID NO: 53614 - DNA, 902 bp, Cannabis sativa
attagagtggctgctggacagaaccctgagtgagcatcctgctagctttctttcattcatgggctgtctattcgaaggaatatggaaggctagaaatgagcttctattcaaaggaggtgtggtgaacatccagcagcttagaaactccattatgagacgatactcggagtccttattatcaatggagacggatgcggctttagatgcaacaatgcctggtgctgtcagtaggcaaacaatctgcaataacgtggaactgttctgtgtctccgatgcgtcgtggaaggaggataaggcaggccttgcggttggtttgttggatagacaacgcaacaaaacggagtggtttgcaaagcaggtggcggcctcatccgcggctgaggctgagttattagcaatccaatgggcgatgcagcttgtggttcagagaggatctaagatttatgctggtgcttcagatgcaaaagttttaattgatgctttgaagaaacgaagatgtccccctatttggcaattaaaacctctggctacggaggtactgaatctgtgtaagttatttgatgaatgtaatttcttttttatttctcgtagagacaatgttgcttgtgatgatttagcaaaatgggctagacgaaatagccagattagtcagtgtaatggctacattttcagggagggatcccctattgtgattaccaactttttattgcaatgaactccctttagttctttcaaaaaaaaaataaataaataaaaatagataaaaaataagagagatttatgaagtgaagaaagaacgatacttttattatatagccatatttaatataggctaattaggatttttaccttccaaattttaacatgtaccaaatcatgctccttgaacttttttggctgtt

SEQ ID NO: 53615 - DNA, 1782 bp, Cannabis sativa
catgctaccttggtcacgagtgatgaggtgagagacagttttgggattttccttatcatagcgggaacttatggacagtgcgagtatcttggctagagaacctcgatgcatgggtgcacttatggatgcttgtgaggaagacttggcaggagttgttcaagagacaaaagtgtacacgaggcacatggtcgcgcgaaaaatgagcccattgttactcgaatcgttggaaggttgaccttggcttagagaagtcaaggtgctacacgggtgtttcgctgcctgaaaaggtgagcccgtgacagttggtatcagagccaagttcatcttagtgaggggtgaacctggttggcctatcctagaggggatatagacatgtggatggattgagatggtctgaatgctggaacaagatgtcattgagctagttagtcttctaaagtggattagtagactaagatggagttgagactgggttgtttttcttcgtgggaatactggacatcctagagagaagacaatgatggttgcttcgaattaaatttagggatgctagaaaaacgactaccatgtgcaattgtagaggcgcaacaaaatgtttgaaactctttggcatagtacaaggttaattgggtagtccataccgtatgcttggtacactaggccgagtttgcctgagtgacaacgtaagccgcaagaggcacttttgttgaaaaagaagctcgttggcatgggtgtagaagtagtgcaggaggcatcagattcttgttagttacgatagtgatcaagagttgatgaccgagatggttcaaattggaataaacatggaatgcttcagttcctacgtttgtgtcaagagggacgcaaaccaagggggcaaatgccgcaatcgtcagaggatgatcgtacttggaggtgtttgcatgtgacttttatttgatccatatgggaagcgctaagacagttgagtgggatgtgttggcttgtaaaagcaccagtgggcatacgtcacacaaagacattgataaagatgtggaattgtggaatgaatgcatcgaagaagccagcagggctaagaagactaagcgcacgcgttaagatggcgttagagtttgagtggaggccagagggctgtgccaatgagacttagtagtcatgtgagtctgcgaaggacaagaggggtgctagagtttgcatgaagactagagggctgcttacatcgagggagccggtaaggagtgatgctcgctcgaatcaattggatggctgagtggacaatgcatgcatatggaaatcgacaaggggtgctatttcagatagttaactcgagagtcacatcctgcgggatgcacttttacatgggatggggtgcatgaagagttgggtggttaggcttttgcgtgtgggcatattgtcgaggacgccgacagatgaagtgggggagagaccctcacggttcactcaacagactagttattccttacaagcatcgagatgagcatcatggagattaattgttgttcaagatgtaaattcaagaagactcgggacacaggcagtgccatttatctagggtgaaagtctgcacgactcaggtactaagataacaccatcgcaatgttcgcctaaggtgaaagttagtaggactaaggtactaaggcaacataaaaatgtcgaggagcaaagagtcagaatgactgaggcaatagttcaacatcatcatcaaagtaacatttggaatggagggatcgtatgcgagtatgcggttagcttgcgagctatacc

SEQ ID NO: 53616 - DNA, 1678 bp, Cannabis sativa
ttacacaacacatgtcagcatgaaattcaaagaacacattattatcttgagcaaatttagagacactaatgaggttctttgttatttcaggcacatgaagtaaattgttaagtacaagaggctgtgtaaaagatgaattggaaggaataataaaggattgaccaatatgtttaatagacaaacctgaaccatctccaatgtgcatttggtcctgtccattgtaatcatagcagtttgcaaggtttttggcctgaggagtgcagtgatttgtagctcctgagtctgggtaccaattagtatcactgtgttgttggcagtggcaatattggcctgaggttgggatgttgatgctgaagtttgactgctattcgaacctactggaggccctgtgaaattcttatcaaaaagataaaggcagacttgcacaacatgaccaaatctaaagcaaagttgacattgtattctagtgctgaagttcataccagatcgaccaccacgattgaaattgaaattacctctggtgccaagattcagacctggattgtgatttggaacctgaccagatccattgaagaaccgtgagttgcctctgccaaattgttgttgctgtctgaacctcctgaaagcaagattagcttcaatagccgaatcttcttcaccagtgacaatattggcactcagatcaacatctttccctgacttttcaattcttaattccgaagctaacaacagagcttcaatctcttcaacagtgtaattttcgattcgagtattggaggagattacgaatgtgtcgtattcactgggaagtcccttgaaaatagctgcaacgtgatctcgatcactgagaacttctcctacaaaggcaagcagatccactatttgtttcaatttgagaagataatcattgagagataatgagcctttctttaagttctgcaacttagttcgaaattccagaattttggaagagacttgtaatgtgaagtgtttttccaatgctctccagatctgatgtgaggtgttgcagccaaccattcttgttaagagactttcagtcatggatgatagcaaccacgaaacaagaagttgatcttgaatttcccaatcgacatatccaggattgattctgttagcagctcgatcttcattggttagaaattcagctggaggagggtctttgatatatccaagcaattgagttcccttgatagcagcaagaacttgttgcttccaaagaagaaagttgtgatcatttagacgaatcgaaatgctgtgattgaaaaacacagatcttgagaattctggttggttcttgatctggaattaggttgaactccatggacagctggatctgcttgattgttagctgagttgtttccaatcgttgccatgtttgcaaccagaggaggaaactcccgctctgataccatgttaaatcttctagccatgaacaaaggttcatactgaaaacatagtaaccatgaaagaacagaaagaagaaatgagagaaagaaagacagagaaagattgaatgaaaagatctccttaattgaaagatagaagtacactggtttatatacacaactgttgtaactaactgaaacaaacaaactaacaaatacaactaattcataacagaattaactaacttcctattccaacattaagaacacaa

SEQ ID NO: 53617 - DNA, 1064 bp, Cannabis sativa
tttttttttatcttttagtgagtttaattggatttaataatatgatttttaactcttaccgtagttagattagatcaagaatgtcatttaattaatcattttgtattgaatagaaaagtcaagagctatacctttctcttcctctctctcgagctgcttagaaaaccagctagggtttgtgctttttctactcaattcaaggagtttccagaaagtctttagtgttcccatccaagttaagcatcatagttctcccctctctttgattttctaaggtttatgtcagtttatgcatgttagttgggagtaggggttctgtgttgttgagtggtgtttgttcatgttttctaagttgaattaaggttaattgtgttgaattgggctaggtttatgggttgttgtgatgtttgagcaagatttgagtttaagaactcaagctttgttccaaccccttctcacatctgagaaatgggtatttctaggatctaatggcctgagttacatggtgatcccaaggggacaaagtgtcacttttaggatgcacgtcgcaggtgtaggaggtggtcttgcacctcatacctttgtcaagtgtcaggtggtccccagttgcaggagtgtgctccctggttacaggagtgtggttcctggttgcaggagtgtggtccctagttgcaggtgtgtggttcccggttgcaggaatgtggctgcagtgtaccctcagttgggtccttagaccttccaggtatgttgcctctactactcgtacctccttacttttcgaatttgtagaaggtgtggttctacatttctccattgcacgccttctcctttgattccccctataacagtatcctctttgatgtgcattcaaattccaccttcacttcttttcacacaaacaacatactcggcactttgtaacgctttcacgctgacaggcttacatgcacacacgtacacgcatgctttcatgcatgctcacaaacaaacattcgcacacatgcatgctcgcatgtgagcccttgtcttgctgcccctcgcagcaacattgcactcgcacatgt

SEQ ID NO: 53618 - DNA, 541 bp, Cannabis sativa
atgagagagataatatatgtaattatgtattgagaaagatggtatgagtttcttggaatatattagggcatacctcacgattagggtttcatttgccttggctttagctagggctttttttattcttcacactcattcttctaagttggttaatttgattttgactaagaaatgtatagtatttattttttttatatatatatataaaatgatgtatattatgtcattgttatatatatgtgagctattggtaattatgtacattaatataataaattttttaatttattttttaatttttacctaaaatttaattggtatggttgatttatcaacaatacagccaatatactaattaggaggtctaattttatcataactacgcttgtttttttttttaaaaataatctttttatttttacaagtaaaatataataattattaaattaaaataaggagaattaaatacttaattcactttaataattatataataacatgtcatgagggatggtacagagactctagatttaaaagaaaa

SEQ ID NO: 53619 - DNA, 677 bp, Cannabis sativa
acctacattggaataaggagagacaattgacacccctaactttttttaaaatatatatagataggtgtgtgaagatatatcatatgttacaaatgtggagtgctctaagagtatattttatattattttaagtctgcaatcagtgtaacatcctcatcaaattaggatatatagcttatcgttcaatcgaaatatatgttttatcaaactatgaattgctaaatttttaactcaaattacataagacaaaattactatcagaatttagattataaagttataacgtattcaaatagcatactcagtatattgaattatcctttctattattaataattattgctagagctaacgaatttaaaaaaaaataaaacatcacaataccaaactaaaaatataattatattaaaatgacaatcttcaaaataaatattaatatacaaacttagatgtattaaaatacattttaataagtgagatttaacttaaataaaaataatttattgtaattatttgccatgtaggcatgtatgccaaatattcttgtgatttcatagtaattattcgtgaaattagagaattataagtttaaaactgtgctataaattcggaccgcgagaatctgaacaactgtatcgtaatcggggaaattgtttttggtggtctggttaatccgg

SEQ ID NO: 53620 - DNA, 1412 bp, Cannabis sativa
tttaaatttaatgtattttttaagattctttttgtgtgtgtgagtttgttttttattttatttttttaagttaacacaaatatttgttgatgcccaattatatattatatggccggggttgttgtctcattgttttctcattgttatttagttgtttaaataagaaaaaaaacgagtatatttttagttattaaagctaacacaatgtgttaaggttcaattaatttttatgtattaaaatgagattgttatcgttatcgtgttgtttattcgttgttatttgtttaaccaagagaaaaataagtatatgtttagtttttttatgtgtacatatatttttgagtagatgtacaagtgttttgtagttgtttttaaatttattttatagattattggtattttttctttcttgtagtttgttttcatgtctatgtaatttgcatattagagtagttatacaattatttatttgttattattaagttctttaaccaagaaaaaaagaatatactatatacacatttctttatttgtgtgttgtttttatttatttttaaaagttgacgctatgtattgatgactaattaatttttagtttaaagtgggttgttattgagttgattattcgttgttagttagttgtttaactaagagaaaataagtatatgtttgttttttactggtatatatatatttttaagtcggtgtacacagattttttattttttattttttagagtttatgcaacctatggagttgttttgatttctatttaattgtcatattatagtgaaattgttattaagttgtttgttggttgttatttagttgtttaactaagaaaataaaataaaattatatatatttactggtaaatttatgaaattcacataaaaacaacgaaaaaaataactttctcgtatttttgtaaaaaaaattataaatctgtaaaacgtaaacttttttcatttattagtatttacaaaataatcccaaataataactaaaataaaatatcaaatcaaattatacttaataactatatatttagtttttcttaagtacatacttttttgagttgttgtacaagtgatttgtggttacttttaagtttattttaatttactaagattatttgtttttgtgtgtgtgttttaagttaacacaatttgttgatttctaataaattttcatattaaattagaattgctatctcattgttatttagttgttcaactaagagaaaattagtatatatttaattttccataggtacgtatatttttgagtttgtgtgcaagtgttttatagttgtttttttatttttatttttgtgatttttgttttttttttttcttttgagtttacgtagtgtgttgatgtttgtttaatttgttagactatatatata

SEQ ID NO: 53621 - DNA, 1056 bp, Cannabis sativa
gatcactcctcaaatgcagcacctgtgtctttaccaaaagctgttttccaatctcaactcaatgcctctactgtacctttttccaactttaatctctggcacaatcgtttaggccatccatcaaagcaaattgtacaatctgttatggccaaatgtaatatcactcctatcaataaaaatacttttgatttgtgtacagcttgttgtcttggaaagcatcataaattaccatatcctaattctgacactgtgtatactgctccattacagcttctacacactgacctatggggtcctgcccctatggtctcttctaatggatatcgatattacattagttttgttgatgcctattctaggtacacttggctctatcttcttagaaccaaggatgaggctctccccacttttatcaaatttaaaacacagattgagttacaactcaatcacaaaatcaaagccattcaatcggattggggaggagagtttagagctttcacttccttagtggaatcttgtggtatcattcatagagtctcttgttttcactcccatgaacaaaatggggttgtggaaagaaagcatagacatatagtagagtctggtttgactctattagctcatgcctctatgccactcaaatattgggatgaggcatatcgaacctctgtctatcttatcaatagaatgcccaccaaagtgctcaataatttcactcctcatgaaaccttatttcttaccaaacctgattactcagcacttaaaacctttgggtgtctatgtttccccaacctaagaccctataacaaaaataaaatgcattataggtccactccttgcattttcttaggttatagtctcacacaaaaaggttataagtgtctagccaaggatggtcgaatctatatgtctagggatgttttattcaatgaaacaacatttccatatcaaaaacctgctgctgtcccacaaaatccctctctgtctgcagtgtctacacctgtagctccaccaatatcatcctcaccacctgtcctatcctcacacatacatccc

SEQ ID NO: 53622 - DNA, 1982 bp, Cannabis sativa
aaaacaattttgaaagttatttttttagtttctcacaatctaaactataagtcctaagagtaaatgtgtacaaacattaaatctacactatgagttaaaacataataccacttgaagatttattagggtattcttgattctttttgtgtaaatcgaacattcaatccatgtgatgatgatgatgaaagatgtcacaccatgattttccaaactagttttaatacgctaagacgagtgtggatacatatgaaaattaggattgataatgtatttatcacagtgtgtactcaactcatgaaacactgtcattgaatgagagagaaaggaagagataagttgtataatttatgggaagttggatcaaaacataaatatccatttctccatcaacgtaaccaagaaacacacaagttagagcgtgacgccaattttgtacgctctacactaggatgaaacacaaaataagtagaaccaaagactgtaatagtcaagaatacaaccatacaatttttcaaaaagagttaaacttaaagtgacagaagaagagattctattaattaggtgaactgtagtaagaactacctcccctattactattaggatatagccaacaaggtcattttgttagtccttagagtacatggccttgaataccatgagcaatatgtattcaacttgatggggttttcagcctgatggagctaattggcccataagatgcttggcctgatagcttcttaccatatgcctatggtgtataatgcatagtactattcaacccaaccatgtcattaggctaattggaccttgtgtttctttgtttatacattctctagctttccactgtgtcattagtctcaccatgtcaccttgccaatttttgagttaatatatatattatattgaacttgcaccaaacaaaatcaataataatttaattatacatattgtttacccaaattttgatgatggtaacatggcaaaaattatggcacatgacatgaggataccaggattaaattgatggagaatgtgtaaagtcatgactgatggtcatgactgttagaaaagaagtcggacagtcacctttcccctagcttaagcaagatgacttaccctagggggaaggtgttgaaacttattttaccaggatctagatttaccaacatgtatgtctaattataaactatgatctaacatcctaaatatgattttcctaaaataatgaaataaacacatataaagttatagaaaatcttacattggtggcagtagaatataatgtatccttctgttcagatctcaaacccttgatcctttctgtcgtagagtatgattaagatctggacctagatcttcttagttgacatatttctacacaatcttctacactatcttgagtattgtcttgaattgtgtgggcaactcctcaattcactttaagggtcaaaaaaggagagaagaagaggatttcaaaataagagccatctatttcaatttataggatatctagggttaggttttaaaaaagataaaataatagctttaattaacccttatggccgaaccctagtggggccctataggatttcaattttgccattttatttaaaaacttatctttttttcatttcaaaatgccatattttaattctaactctataaatgtcaaatctatctatttaataattataattacttatcgtataaaattgccatttaacttacttattaattagaccttacaaagtctcttgattaataaataaaccctaaatcctctctttcttctcaaataagtccttgcttagtgaaaattcacaaacaagacatagtcttattcagaatatgctctcaactagtgtggtgactatataatcaagctcgtaataagtagttctagaattcaccaaataaatttcctatcttattaatttctcatgactccactatagatttagaattacactcctgattacata

SEQ ID NO: 53623 - DNA, 602 bp, Cannabis sativa
tgtgctcatcgcgtcatttgttgttattataatggaactttgcaaaagtatctacaacactagaaagttcccccgttattctatcccatatagtttgaatgaatgtatcctcaacgtcctcgaactaaaacttgttcataggaattgtattgcgaacaagaaacttgatataattgttaaacttgttgccatagtcgtctacaggggctccagtcgccatatgaaatctaaatttcaatttttgacctgcaagctgcttggccagttcttgttcaatattttttcccttatacttttccctaactccctttttttgacctccacttgaacctgcattagccattctacaaatacaagctaaaaataattaattaattatactattaacaaaagaggcatgcatttcatttaattaacgatgacttctatgttacaatactttaaagtctacaagtcatcataatcatcatcatcattaacaggtacattattttcattatcactatcactagtgtcttcatcatcagcataaacaatgaagccatctaaatcttcatggttaggctgctcacgacccttgttggtcacttgaattgggtcaa

SEQ ID NO: 53624 - DNA, 1109 bp, Cannabis sativa
tttaggttgttagctggcgtttggttagatataatgcaatggaaaagaaataattgttattccatttgttttgtttggatacatattaagtattgaaatgtcatttcaatggcaccttctttttaccactttttattttgaaataggaggaaaaaaaaaataataatttttttatcaatttttttttttacattttttataaataataatatctttaaaataaagaaattcttgaaacattaagacaaaaaaatagaaatgaaaaaaaaaacattagacttaagtaattataattaaatttgatcttttctaatatattttttttaataatatatagtaataaattaaattaattaaataaaaacttaaaaataataaagaatcttatacaattatataaataatataatatattattatatattatacataacattaataatcacttaaatttttataaaaaactactatgttttttaaaaaaaattataaaatagaataagactaatttaatcaattaatcaatcaaaaaaaatatataaattttgagacaaattaaatgacaaaagaaaaaaattacttttaatgtgagattattaaaacaattaaatttagttaaataatatattttcttagtatattactctcaaagaattaaaaaaatacaaagaaaaacttatgtaaagccacttacactttttatatacttcctttatattaatatataaatatagaaaatatatatataaactatagaaaagtacctacactcattattgatcccgagttgaaatgagacatagataaaagaaaaattggacccttactataaagataaatagtatttttaaaaattaaaaaaaaaaacatattttttaaagggattaatcaccacatactaaaatttataacttttttacttttatattgtggggcgaattttttaaaaaaaaatactgcgtactttgttaatttttcactgttgttctacgattataaaatttttagttgttctgttttgtttttcactgttgttttataaaaatacagtatttttgaaaaaatttccatataataatatttttgtaaaaattaatccaaattctaat

SEQ ID NO: 53625 - DNA, 2229 bp, Cannabis sativa
aaaatgaacaatatattattattactgttgtattgtaaattagtagtacttgaaacatcaaacagccctataatttgaattgacgaggaaggcgaccacatttggtctgtaatctcaaaatttctcttgaaaaagctttcaaatgtgttttaacacataaacatccaattatgagtcaatatatgcaaaaactatatttaaataatccaactacgattacaacacttatgtgaacaatcacttagacttggcagagaccaatgtaattacacgatcaataaactccacttctacggctgaagagaaatcagtagtgcatttaaactaatagggaaatacttaaatacatagaattaaaaatatattaaccctaactacttttctcctagagccaaccagccatatctgatattccctttatctccaatatgtgaaatgcagaaatatttattccccaataagactgatccacaggattcacttgtgttgatattcaagcctatctatttaatcaaacatgaaaatgaaccaactctgtctcatagcaacaaaactttgccaaattaagtcagtttatgctctactatatatcataaatcatgcaaaagatcaataggaaagagagaattataaaaatattatagaaagagaggagagagagaaatattgactctaattgttatatatgatatatatatagagttttgccaactaactaatcataagaaaaaactatatatatataatgcaaggaaattattgaattaaagttttcgttatgtcaaacgtttgaacactatgtagtgttttactgaattttctaggttgtgccacactttactaaaggatcacttgaaattcaaagcatgcaagaactttaatctagagctttcataagtggagcaatgagaaaaccgacaatattaaagaaaacttatgcttatttatttttctactattaattaatttattattcctctacaactagctagctagttgagattaatttgtttgctaacatgatttatcataagtgaaaattgatatagcaactgtggttattgtcgaactgttatatgtcagttagttagtggtgctgtacttgttttgttgttacagtttggtcgatatgttgcttactgtatataagctcagttgagctatttttgtaaagtctaatcaatcaataatacatatatataaattatatataatgcaataccaatttacaaacgttgtatgcagctagcataataagaatattaatataattaaacaattgatgttaatgcaattcacatgataatctgaaaagattcaatctttaacatctataccctaatattaagccttatacccaagttgggaaaatgagaaaggaaaaaactttacttaccagccttcactctctctcaatatatatacatccaatggaacataacaagataagtattttgaaacacactaagataagaccatctaaaaatgactatgaataaagcttaattactttatagagaaaagagttttcaaatctcataaaactgatttgatcatcagagtacttgacaaaattttagtacagaaaaaagtttacatactaaaacaagctgaaacaaactccttttgctcatgaaaataaaattccaaattttgaaaatttcaattggtgatgaaaatttcaactagtagttttagaaagaagcttagtgtttagtgttgatcttcttaaactctatttaaaacaaaatacataatatatcaaccaactataattggtaaaacaaaatacatactactctacaaacaacaaacgacatttcaaacactacattttctcaaaatagagtattaaataatcttaatacaaatgaacagatgagaaaagctagatcttctaattcctgaattttaatatatcttatcctacttgtttcacaaaattttacaatctaaaagttaggcaagattaataatttttgctcaagtatgcatccctaaaataattaactatgttgaccttcgtaaattactaacttagccgatgcaaggccttattcctttgaattactactattactatcttaatttgagaggaaaaaactaagccacaaatacagaacaaaataaaattcaaatatatcgactataataggtcaaataaaatacacaatcttataaattaccaaaatataaacatattttaactcaccagaaaatgaggagaac

SEQ ID NO: 53626 - DNA, 886 bp, Cannabis sativa
acaatataccccaaagaacaaaaacaaggcaataaaacaacctaacatgctcagaatcacaaaacaccattagagagcaaagcttgagttcttaaactcaaagcttgctcaaacaacacaatagccatcaaatccacatcaattcaacataataaacctcaattcatcttctgaaaaaaaaacaaccctaacagctacatcacctaaactcacaaaaatgaagcataaccttaacttaaagcttaaaaaatccaaagaacaaagtgctagagaggttaccttgagttagaacactaaaagcttgctagaaattccttgaattgatcaaaaaaagctcaaaccctagctgcttttccaaggagctcgagcgagagatgtgatctttacttctctattgttaatttttgaataaaatgaaataaaaggatattatctatttagtaataagacatattcagattgctaatttagagtaaacccacaaaagacaaaatttttctttagggcaaaataccatatttcccccacttaagccaaaaagtcactaaaccacctaagggtattttggtcatttccaaacctcggataactccccacatttccgatgtctaactatgtcgccccgttatactaaagatactaaaatgtgattttaatggccgcgttccgatattgcggggcacaaaacatgaaaaaacatacaattcttgatgtgacatatattatgcattctaatttcaaataaatctccataaaatgatcataattattattcaagtttcataaatatatcctaattatctgctaattttaaaattaaagttaagtggtctttacagtctcagtttctcaattcctacgtgagtacacccttggttcttgacct

SEQ ID NO: 53627 - DNA, 1421 bp, Cannabis sativa
ttttttaataaatattcatatatattttgtaaataaataaacaaataattaaaaaaaaataaatgaataaatattctatgttcgacaatccactaaaatagtatgtgtctcaatattataactaaccactattcaagattttaagggtgcatggttgtgaccaatattagggtgtccattgtagaactacccaaagttatattatgatttaataaaagtgatttaataaaaggataatttttttaaaaaaaaaattataaaattgcgatccttacgattttttatattttatttacaaaaaatttaattttttagtatatttttatgttatactcatgttattttgttgttgattttttttattattatctgttattatttatggttattttgatattgttttgttatttttttgttacttaaactttcatgtggtttttttgttattttcttatatttctataaaatactgtaaaaatattaataaaataatataaaaaatttacaaaaattaatattttaggtaataaataatataggaaaggagtgttaaatggcaatgtaaaaaatatgtattaaaatttaacaatattttttctttcacaccaaatatatatttatctaattattaaaatactatggattataacttggtaactaaaaatataataattgtgttccaatatattaaatgtaaaattaatttaaaaaattaacaaaaagctttaattttttttttattgaaatacattaaaactatattacatatatcaaataagtagtaggagcttaaataaaaaatatgatatttattataatgtaaattaaatcatattatattctatattaaatttggtacaatatttagtatgtgccaaatttgatttacatcatacactagtattaaatctaatttaaaaagtagactaaaaaatatatatacatcatctttatattgttattgggtaccagtagtactatatctaatacattttataagtggtactttataattggttagtgatattctctaaaataatatacttaaaagtaaattaaaatatatatatacattatctttatattgctattggacaccaatggtatcatactcaacaccttttataagtggcatcctacaattagttagcgatattttttaaaagttatttatttatgttatatagaattcgttacttaattaccccaataataaaatcacggcactaataatacattttagcaattcttataaatactctccaaaaattcacatcatgctaaataaatgttattaatataatttttttgaacaaattaaaatattgttttaaaataacataattataaatataggagactacaccccatcaaaatgggtgtactgatgcaactcctaattgtttcagtatttataagaa

SEQ ID NO: 53628 - DNA, 1109 bp, Cannabis sativa
tcaacaacactgttcaaagcaacataaaagatcccagaagaaagaaaattcacatcagcaaagtcaaatgaacatctccgtttgagattatccacaaatccacgcgtagaaataaacaaacctgagaaaaactccatgtcagcaaacagagagaattaaagattatataatatattttgcaaggaaggaatgactcttaccgctatctcggactttgaagccgcccagacctcgaggaaactcagattctggaaccgctcaggtccaagagtctgccgagcgttatccctccgttcttggagctgcctaaactctcattgttcttggatattggaaccgctcaggcatcaaagcaccttgacatttcaatttccttcaaagagatcgtaaatatcgaagaacaaaaccttattctcacaataagagttctcagatgacaacataaaggctataaattcttaccgagaaagagcccccaatactaaagattacagattgttttaggaatcatagcaccaagaaatcgcataggccaatccgcggagacggcgattagcggcatgactgcacaacgagaaatcgaatggcagtaagaaaaaagtagtgatgaggatgctcaacaaagaaagaacaaactgatctcactcaccctgtcgtcgttctcgttgccggaagagagtctaatcggtaaactccaaacgacatctttatgttttgaatcagaaacgtctgtataaagtacaccataaatggaaaattaaacgggtgaaacggttcaattatggaaatgaatggaagcagtgataaattcgtaactgggaagtacccaaaaacgccacctcctttcattatgtgtcaacgctaatgcatatactaaagagatggtaaagcatgaagccctacaagagagaaagttactttgggctttgatggtatctcaaaacggcaagcccatgagtcccaagtaataaatagcaccgattgctattactaacggaagtacacatacggcctaacatatggaccgtacagtgggtacagcccaagaaatagagtggagattactcttgtccccaaatttgagcttatgatgggcctacaagcctgat

SEQ ID NO: 53629 - DNA, 2640 bp, Cannabis sativa
aaagagtgaaaactaaccgaaaatacaacccgaaacttagactaattttagcctaacagttgcattaaagtcaccatttgattttaccttgtttaaactctaccctagcaaagagatgaagtttggaactaatcccacctaaaagtatcatgagagaagtttgttgtggcccgataatatgccttctgttggatgatataaactaacgggaatctttttaaaagaaacctccactagttggttttgatcgagattcatttgcaatcttggattcattaataaaaatagttgatgcaataatattgggcttcctcatcatcttatacaaatttgaattgactccatctatgcaacactcaccttcacaaatttgaaagtgaagttcatttttcttttgtgattcatattcttggactattgagcttgctgccacaagtcccttggtaatcagatcaaacttcaaacctccttaaccttctatagagaatcaagtatggcttgtatcttccataatgaacggtttatattttacaagatggtcatcatgttattccatgttgtcttcatattctttttaacgtagtggtacaaactctaatactttttgtagcatccttaagagtgctataaaaatattgatgaagaacacttaaacatacatgtttaatgaccctcacttttctctattcaccttcttgtcactctgggttgttcatggacattatctacttcacgtgcctcatttcttccgccagacaactttaagagaagttcatgagctaaattcaagtcaacatttgattttaccatgtttgaactttcccttgggaaagtcatgaagtttgggataaccctcctaaaaagtatcattagagacattttcatcttctacatcttaaattattctcaaatgtactcttgcaaattctttgcatagtactaaaaaggttgtttaacaaaagttgttcaagaatctccttatcttctcctcttatgtatctatctcatttgccacagcttaattataagagcctgaattttgagagacattgtaattcaaaaatctcaaattttgaactacacttgttgtgactctatgttatgccttctactatatgataagaagcaagggaaatattttttaaaaaagctccactagatagcttgttttgacctagcttctattgtaaattacgagtctttagtataactagctagaacaatgatactaggcttcgtcgtcatcttattacaatttgaattgagttcatttgtacaacactcacctccactaatctgatagtgaatgtataatctaagatgatgaatgtataatctaatatgagagtgaatgcagcttctattgaagtgattttttggctaaacattaccatactttaagatggtgttgtacacatgcacgtgcaaaacattgcatcaatctgccattaacacaacatgttgctttctaaatacacagagtacatttttcagatgaacttgtttttccttcttcagcacttacccttgcaacttaattagaagtttatttgttgtgacaaggattccaagttaaaacaacgagaaatatatgtccatggcatactgctcttaaggcatcaattatatcaacttacgcatccttttggttctttgagaggaaacttgagattaagctaaagaggttgattcgtcttcaaattaacagcctatagggcactacaaacaatttcaatctcaatctcaatattaatactaaaattatatcatttgtagtgacaatttctaatacaacatagtatgtcactccaacattaagttcacacattggttgggaaatacaaccaccgaattgatgattttacgcatgctccttacatactcatttttcttgtaataaacaacatttgaagtccactttgggattttggactgaaaaactctactagaaagtcaaagaattgcttcccttctgtaaaaaatgtaaacatctttgacacttcgcagtatcccaccaacatattatcaaacaggtcgggatggtccaaataacgcttctaaaggggttctaagatattttttcttttttagctgtagcaatactttttattttagtgattgaaaaaatttgtagctaaagttccttttttagtattgcatgtgcttccaccaaactttcagtagtcagatcaaacttcaaacctccatcaaccctctgaacaaaatcaaccagggtttgtatcttccttaaccaatggtttatcacttacgagattcccatcattagatcccattttaccttcaaattctctttactacccaagaaaatttctatactttttgcagtatccttcaaacttcaagaaaaatattgttgatgaacactcaaactcacatggtgagtatcaatactctctaatttttaattgcacttgttgtgactcgatattatagtttctgttgcatgataagaactaagggaaatcttttgagaaaaaattcctttagttggttttgatccaacttctattgcaatcttgaagtctttagtagaattagtttgatccatgatatttagcttcctcatcatctaataggaaaacgaattgactgcattttacaacactcacctcctttaat

SEQ ID NO: 53630 - DNA, 963 bp, Cannabis sativa
tttgagcctcacagtgataatctcacaaataaaaaatgaaagcaataaagtaagagatacgaatacaagggatttttttacgtgattttgcagttaaaattcttcatagtccacgagtcaatcttattagatttcttatagttttctcagggcatttcttgtatgctttttttcgtcgccctttggatcttacttgccactatttgtgatcacatagttggcagttaattacaatcttcactgtaatctttttacaacaattatcccctgaaatcatgggttttgattgcatatcacctagtgtaaatgcagttataatttgaaaatcatacaattgtgatttcccctcttttacagggtcaaaatgattgtgtgttttaacacgtctttaattgttacgttcgagggtgtttcgataggagcttggttccagtgaccgtaatggtgagcaggagcctttttccttatccttccaagatcgaaaatgtacgccttgttgcttctttgtttaaaagattatcgcttcatttgggacaatcgcagttctcgttaacagagagtttctcgaggctcatttgaatgttatatttcaactcgtcaggattgtaaatctttctcagaaataggaatgagccttcccatagcgagataggcaccttgcttattgggtctcgagccaatccgattgttatacttagtttgtaagttatatactaagtgtttccgcagtcgatatgtctcgccttcatcttcccagatgtaacgtacttgatgcctcgctatatgcattcaatgacatatggtttctcgttaatatactaagcaacattttgtaaatttttttctcgcataagaccttacagtcaacaggttgcatatatactctgctacttacgcaattaatgagttattccataaaaagcgatttcattgattcatattcactttatcttgacacgtgtc

SEQ ID NO: 53631 - DNA, 532 bp, Cannabis sativa
atggtattttctttgccacatttttgtaaaaataacattgaaagcccatattataagtttgtgcattcaacccatttgtaaagggtaagattggaattttaaagcatttttagtgaacgtttgtttgtgaattttttttcttttttaattttttttttttaaaaataaggcttgtcttttcatctctagcatgtaatgagtaccctattactctgccatttttattttcctcttggttgatattaggtccggttccattcatcctttcatctccttttagggttttcaatctctcttttttttctttgtttcctttcatccctttcatccctttcatcccattcataatgctcataaaataacttcaatcttacctctgttttttgttttttatccttcttcttttttgttctggccatcgattctctacttccaggttgccgacaacccatttcattttggttggtattgtggtttgagtttatccaaggtaagtgtattttcatcatgatcatataatattgatattact

SEQ ID NO: 53632 - DNA, 1233 bp, Cannabis sativa
ctctctaaactgaatctaaagtatgaactttaaagattagagatcagaactctcgctcagacctttgaaataatccctatatatagttgctggtgggtcccctttaagttggtattaaagccaactgttataaattgcagcagctttcttcatattcatctgatgagcaaatagatggacatactgacttgagaggttaagtgagtttaatcctaacatttgacatacccaaaaaaataagggatgtctttcttttttgtcataataatgacattctgttatttgaacttttacaaattaaaggtgcatcgatgtgatgaagaatattacaaaactagtaatttatttggctaaatcccataatgttaggtattgcacatgtggtgctctttggcttttgaatttaccttctatacctttagttgaataagcatgaactctactttccaatttaatgttgcaattgcttaattatttcagaaaatattgtggttgcttaatgttggaatttataatggtatttatttttggtcggaattgttttattttagattttttttctaaaatatttttgcttcagttcaaaaccgaagtaaaaaaacaattagtgttggtgcactattttttttacttcggttatgaactgaagcaaaaacttttcttttttgcttcggttaacaactaactagagtcggttcataactgaagtaaaaaaattaggtgatgtttgctttggtgtaatagaaatgtaatggtaatagtaatagtaatgtaatggaataagaatagtaatggtaattaattacaatgtttggtttgttgttggaatgagtattgtaattaaaattattgtgttttgtttagtatgggaatgtaatggaataaaatgtatattgaccaaaatatccctattacttttattttttataattataaaatatttaaataaaaagtaaaatagacttttgaacttcttttattatatttttattataatattatattaattttgtaatggattgtaattgtaatgaccattacaaaggtttttcattgtaatgaggtttatttcatacaatgtaatggattacaaaatttaaaaatagaaagcaaacaaagtaatagacatgttgattactattacaattcccattcctataaaccaaacatactcttagtatttatgtctacggttataacatcatttacaccaattaaaacaaatactttata

SEQ ID NO: 53633 - DNA, 997 bp, Cannabis sativa
ttgagctatcttgtagttgatgtcatttaactggttcgtttcaattaaactcttcaattttcctttattataaccaacttcctccaatatcagctagcttgggttgtagctttatgattgcacaaatcctcatccctcacaagcacattatgaacctattttaccaacaaattatcttcctttttagcaatagcccgcacatatataaacatttctgcaacattccaatccgaatacatctaaatcccattccaccttaagatttagaatggcataatggtttccaagccactgtagcattactagttaaatataatgaccattccacagaaaaccacgaaaaatagctttcaccatcaaaattgagttgatgagaacacacgaccagcagatgagagattctaagtgctccaagttctaatttgagccaccattttctggacaagcacattacagtcttttaagagattctcttgggacatatgggcacaacaagatattttaatggaagctcatgtctttagaatcttgaagcatctaacaccctttggacatctgcatcattcatgttattacaataaaaagctgatttagaaggattagtcattaaacttgaagtttggggaaatagtttgagatcttgcaccatgaagtagatactcttaaaatctccattacagaacacaaggacatcatctacaaagcgaaggcaatttaattttaagtctccacttctctcatggaatttaaaatctttcagcgagagtacacatggctgtagaacccatgttgactcgggtgtcggacattggcttccatgaatgaagattgaagttgcactagaatcaaaacaacaatttcacactcaagcaccggtgagacatcactgggcgttagacggacttcacgtaatccctgtcttccgggaaggagggttgaagacgcatcgaacccccagtgatctttaacacataaacaaaccacgagcctacgagaa

SEQ ID NO: 53634 - DNA, 1222 bp, Cannabis sativa
cctcacatctgcttcgtttttatcaaaatagagttccgtagaaaacaaacttacttaatattttacaagtattcattctaaataattttagaagaaaattaaaattatttatcatcgaagtttttatatgctcacaaataatcatcaaagtcatgtaataacacaacatgaaacatccaaatcatcaacccaaaattattataaatccatattttatgaaagaaaattattaccatggctatgaggctagttgttggaaatatattttaccagaatctagatttactaacatgtatgttgattatttctataatctaacatcctaagtatgaaattcttaaaacgataaattaaacacataaaggtatagaaaaccttacattaatggcagcagaatgatatgactcattctctttagatctctagcatttgattcttgactagtagtcgagcattatcaagatctgaatctcgatcttctcttcatttgattgtgttcatcacagtcttccacaaaggtctgagtgtcaccttgaataaagtgggctgatactcaaacaactttggaataatatttttttgagagagaaacttagtgaatttcaaaaaaattaagagaagaggaagaagtgacattaggtttttcaattttcttctctttctttatataggtattcacatagggttaggtttagatgagatggagttgaaatatatacttgggctgaatcttactcttagggctgaatatacatatgggctttagagttagattttgccactatatttcaactaatgaaacaaaaatatattttctaattttaccacttatctcttctaattatttaaataccaattctattttaataattatacataaaatataatttaaatatatttattaattagacccacaaagtctaattatgctccaatgcacaaaatataaaataaaaaataattaattatattgatggtcatttaatatttttagtgagaatataaaaaaaaaaattataattttagacatagcctaacagtttcatacttcctttcacaaagataagtaaataaaaagtaacatttattgtgagttaaattttacacaatactataatttgtgcaaaattgacggaatctttagcatgtgccaaatttagcacatttttgataacattattggtttgaagtggtagtctttcttaagtgtgctaaaatatat

SEQ ID NO: 53635 - DNA, 1049 bp, Cannabis sativa
cttgggttcctcaaagacaagatgagaaagaagatcttcaattgggaaagtcggttcttatctaaagctggcaaagaagttctgattcgatcggttgctcaagcattgcccaattatgctatgagtgtgttcttgcttactaaggaaatttgctctgatttagagggacttatggctaagttctggtggaagtcgcaatctagttcttctagtaaaggcgtgagctggatgagttggaaaagactgtctaagcataagcatgagggaggtcttggttttcgggatcttcgtgattataacttgtcttttcttgctaaacagggttggcgcttgttgacaaaagagaactccctggttggaaggatgtataaagctaggtattatcctaatggtaattttttatcagctactttaggctctaatcctagttttatctggcggagtatatttgaagctcaatctgtggtaaggcatggggctcggaagtcgattgggtctggctgtggagttagtattttgaatgatccttggttacctgattccattaacccgtatgttgaaacggttcatcctgctcttattaatcaaaatgttgtctctctattgtgtgtggataaccattcttgggatgttgaggtaatcaatgatttgtttggtgagcgagataaaaatctaattctctctattcagcttagtgatcacagtccgcttgatagatggtcttggaacttggagtcatctggctttttttcagtaaagagcgcctaccgattccttcagtcaacacaaggaaattggactgatatggttgttacttcgagctggaaaaaactctggaaattggaagttcctcccaaagttctgcatttcttatggcgtgcaattactgggtgtttgccgaccaaagtgcaactgaccacaaagcatgttaatgtggatctcttttgtccattctgcaataacttttatgagaccatttcacatgtgctattggagtgttctttctcttattcttgctggaatctttcgagtttgagtgctgttcaagg

SEQ ID NO: 53636 - DNA, 1050 bp, Cannabis sativa
cgtaattaggtgtgccaatcaaccgagttgaaacatagctaaatgattctgaggtcctatgccacattcacataaaacaagtaagtgtctctctaaaacacttttgaggacttaaactgaaaatcaaaagttttcctatcgataaatagcgtgaaaataccctaaatatcaagaaaacctaaaaattagggcaccaaaaaattatctcaaccggttaattggatccccaaacggctcacaaattttgcaagtatagcattgtgtggaattttgcacataataaatatagtttttttaattacaattttaccattgatcaataataataagctttaatatacattttattaattataaatattataattaattattttttaaaatttaacttattaatgatcatgaatcatattttaatttttgtcataatttgtaacataaagtgtcattgtgcattggagcaaaataacaaatattacaacaaatatagtatttgcttatttattttgtcaaatttaacataatatttatatcttacattataaatggtctatataacgttcccgcttcaagcttttattggactttctcctacagacttattattcttatacacgggcacgtcacttttgactgcttcttagactgatgattgattctacaaatcatgaacacgggtatttttgacgttctttgtcctcactcgcaagatttttggaaaaatttatcaagaggtcacccatccgaagattactccccaagtcaagcacgtttaactttgtagttcttaagtgattggccacgagaaaataagatacaccttatttgcataggtagtatcaatcaatgcatttgagctctcttcaactgtgtagtcctatagttacacagtttcagaattattacccctaacttttattaaatcatatgtgattgcacaacttacctgatatttatccttatgaatcatggaactaccgactgtaagggtctaacatacatgtgggtgcaggcccggccctgggcataggcgggctaggcttgtgccta

SEQ ID NO: 53637 - DNA, 900 bp, Cannabis sativa
tttaaaaatattatttataaattgcatttttttgtaagggtccaaattttaaattagaacagggcctccaaaatgtttaagacgaccccgaatattcatataatatttagttgaatattcatataatataatgtattgaatatacataatgtattgaatatttatataatattcatataatataatgtattaatattcaatctcctattatttctcataataatcgagtcaacaaggctgcacaataaattgctgcaaatccagtgtttcacgagagaacaaagcacattgaaatagattgtcatcttgtaagagagaaagttcaaggagggatcatcaaaacggctcacacttgaacagattgcagacatctgcactaaagccctacaacccgctcaatttactgccttgaaagacaaaatgaatctctgcaatatatacactccaccttaagggagagtattaaagattgttaaggtgttgtgtatgttagttagagttagttagtgagctgtcaaaatctgttagaaattagtttgtaacaaccttctctgttctagttttttctctgattttctcgtttatataaacactgtattgctcttcatttgagtcaatgagaattcattcatttcttcctgtcttattgttcattttctgttagtataaaatgtagtagtatattcaataagcaccaattttttttttttttgaattacattattattacactagagttggaagtagccttatccaatcaagaagtgaatgtttttttattagataaattatttcgaattaaaattatggagtttcgataaaaattataggtgtgagacatattgttccattttatgaaatgtctaaaatatatgaatctaattttggactttacagtaa

SEQ ID NO: 53638 - DNA, 1906 bp, Cannabis sativa
ccatatttaaaatattcatacttcacatatttatttgtaatcaaataaagttagagagatgtttaacattatctttatacctagaaaattaatttgaataatttttttacaaatataaaaatattctaatatttttccacttagtcaacatttagatttaccaattaaatacaatatttctcattacataataaacatgtgaattataatgattggtcctcattatatatcgagtattatcttctatgtgttacaatatattcattatataacaatatattttatgtgacaatgtgcttaagcgaacaaaccccaaaccttatatatgtttattctagtcctctaaaattttctcaaatttaaagctaagatgagcataaaatatatgagaaaatatcaaaataagagtttcagtaataataactttatttgtaaaaattatataagggaagcaagtcccatattctctacatgatccttgaatttatgcggtggtaagcctttttcataagattgtcaatcattaattcagtgctagtgtattgaatgatcactttatttttttaaaacacattctctaatagttaagtacttaatgtcgatgtgcttgcttcgacttccacttttgttgttcttagccaagaaaataacaggtgaattgtcacaaaacattcttaatggccttgatatggaatcaacaactctaaggcatgaaataaaactctttagccacacaccacgtgatgtagcctcagaacaagaaacaaactcaacttcaatagtagaagtagcggttagtgtttgtttgttactcctccatgacacagctccacaaccaaacattaacatgtaagtagattttgatttacgtgaataagtacaaccaacaaaatctgaatctgagtagccaactacttttaaattgtccattcctttaaacataagtttgtaatacttagtaccttgaaggtacctcataacattttttgtagctttctagtggtctatccttgggttactctaaaatcttcctaaaacttcaatagaataagcaatgtcgggtcttccgcacgcctgagaatacactaggcttctgacagctgaatcataatgaatgttattcatttcttctctttcaaactcattatttggacactgactcatattcaattttgttagaattttatgccctaaataaaactcaatttcattgtaattttatttactttcaataaacatcagaaatcatatcacgacttagccatatgctttgttcacatgttttatttataattataagtttaatattaggttctactaaatttaaaatatattgttattcacaattacagtgatgtcatcacagtagaaagtaattgtgattatatgcttcaaattatttagtccctcaatttattagtgcaccaaatttacactgacatgttaataagtgatgagatttgcttacacttagataagtggaatgtattttccagggaattagtgaagtaaactaggatcagatgtattggctatagtgaaaaatatgcataaacttactattgtcccaattttcgaccacttgacgtggcatgtccacgtggccaatattagtgccatgtgggagtacatctcgccaacaagaaggccaagccatctactcacttgaactaacgaggggtccgagtacttaagagggacgacgagatgacaagccagccacctcaagggggctggccagccacccctagtcggccctatggccagtataggctagctagcttttggacatcatatggtcggtcaacatgcactccgtaggtgcatggtcggctggtctttggcctggcaggattttagtgcgcaacttttttatgtggacagcaagtcaagccataaattgggc

SEQ ID NO: 53639 - DNA, 1404 bp, Cannabis sativa
  modified_base (1014)..(1030): a, c, t, g, unknown or other
gacccctagctctcaataccaaatcatagaaaacgacatccaaaaccgggtagtcgcatctgatatccaccataaatatcggggctcagatttaattcactccctgtacagggagtcaaagagggtggtgcagcagattggtgggagaccttgtccaggacaatggaaaccttcccaacacttgcattttttcttatcaagatggacaaggaagatgactctaatgagagaagatataaccttccatgtcagtaataattatctaaaggataaaactaaagagcagttgggtagttatttagtattatcccgcatgtgatttaaatgaaacatggggattgtccacatttcattaacagtcatatttgaatcaatcctaaaaagaataactactaacctatactcctataaataggggcagattctatggaaaaaatgacaacaagtttgagagtgaatgatcattattcaaattcaaagattgtattctgtaaacataattatccttaataataagaactcgtagagtatgtagattttaactacaaaaccacgtaaaaatatctagagttgttatatcttttgttacctattaattttttttgagtatttattactgaaaggctgtttaattttggttaataaaaatttgcattaataacttttataaaataaattgttcaaataatcattcaaaaattagttactaaaatttaaaaagaaaaaaaacactaaaatttaaataaaactaatatttacatggctctatacgtaacatccacctagtatatatataaacaaatataaagactttagaatgggagatctcgtggattgcccaaatttaaaaaaaaaatgaaaaaaaaaatattttaaggaaaaaaaaaaacaaaaacaaaaaactgtcactgttagaatttgggataagatgaatggggttccatctcaaaaccaattggcaatgggaggagtagtccattcatcttatgtatcacaatttatttccacacattnnnnnnnnnnnnnnnnntctaatacaccctcctcacgtttgggcctggaaagtgtgagtataacaaacgacctttaagagaccacaggaccaacgtgacatttaaaagaatcccacaaggccgaatattgggaaatttgtaggtgtacaagtcaagaaatttatggattttgaaacaggtcgaaaaccccaacactggaaattagcacacaatggaggttaaaggggagacagaagtatctttttggaccggcaacactttggctcacaacagatcacaaatgactttttttggatcggtaacagatcacaagtggctctaataccatgttagaatatggaataagataaatggggttccatctctaaactaattggcaatgggaggagta

SEQ ID NO: 53640 - DNA, 1585 bp, Cannabis sativa
cattgattacctcaagatgctccttcttcggcttcctaagggattgcattctgaaggtagtgcgcttgagcctcgtagtcctgagtttcctcattggctgggaccagaacctactaccacgatgcatacttgggatatttgtaatcactagtatactcattctcaacgaggtggtccacggaccttaggttaacctcgttcagaaggaactcaattgattggagacagtagtgaagacccaacatgagtctgttttgcccacccatcatggggttaggagtttgtcttttcaagacagctgttgtaaaaagcaaaattaaagtcagtaaagccagaattaaagacatggaataatttaaccaagtctgaggcgaatcctcacatacgaattatacgaaaagtggttgtgccaattggggagacgctagtcgtccagaagaagtcctccttaaaaggagtcttgtttggcaacccaataatgatcttatgcttgttaaagtgagtcccgaggtaataaaaacctcctacaacattcttcctcacggggattgcctttaccgagtaatgatactctatttccagaggagtggggcactcccagttcaaaattttatacagaacctttaaacttgcgaggattgtgtatgaaataggaaccaactagaatggggcgattctgagatgttttaggaagtccttgtagtaatctcgtagggggataagtgctctagccctgatgtttttgaggctccaagcgcctatccctgtcgagccacttgtactggcctcgccactagtctcttcaagtgcttcgcgagtgagtcgttcaggtgggtaacaactaaactcgctagcacctactgatctaacccgacaattttgcttgtattcaataccacaagtccttaaaatggaacctacatagtcatcgatggctcataccttcaactcaataagttcagcctcgaaggttacgttggggtcctggcaagtctttgatttatgaggcttggatgtcatgatttcaaagtccaggtctcctggtgaaaaagcaatcgtgactctgggtaaaaataaaggcctggccaaaggaatagatgataaactgggcggttcaggccaagtagcatctcacaagaaacgcatctgccttctgttatttcttacaagaagcgcctgtggcgactagcaatataatctttgtgggtttttactaagtggtccctaagttttgcatcatttatctctaatttggatttgggttttgaaataatgggtttatacgggatggcaagttcattggagcactctatttctaaactttatggacgataaacttctgaaccagattgggacattattacaaaaagaaagcaatcccgattcatggatgaaatttatcaaaccaaagcttgtaaatttgagaaacccaagagtctacagtctacctaaaccctaaaattacctagaaaaattcaacctaaaattgctaaaatcaaatgagacaacaaagttgtaaattacagaagtagtgatcaaacccagaagtgagaaataaaacatacaatttaataatagaaaataa

SEQ ID NO: 53641 - DNA, 1441 bp, Cannabis sativa
  modified_base (952)..(955): a, c, t, g, unknown or other
ttttaggttaaattttaacaagttttttccttactcttacactcgttaatgttctgttaaaatctcatcctacacatctcgaaaaactatgtaattttacaaagacgaagccatgaccgttgtgcatcaattttctgttagacacgtagagagaaaacatagttttcatgcaccaacaatcattttaatcgtaatagtgaaaatctcacatttctgatactggtacccctttgtgaaatgtggcccggacccatctcgaacattttttgcaactatgcacaatgaattcatactagtcagacatgactatgacgatgggtttcacgttacatttggttaaaatgtccctctaattaaaaattttaaaatattcttctttttagggtaaattttaacaagttttttccttactcttaaactcgtcattgttctcttaaaatcttaccctacaaatcacaaatatccaagattgttgtgcattaattttatatttgacacattgagagaaaacgtagttttcatgcactaacaaacattttaattgaaatagtgaaaatcttaaatttctgatagttgtacctctggcctggacccatctcggtattttttttggcactagtcaaaatgaattcatactactaagatgtgaatatcaagattggtttcgtgttaaatttggtttaaatgccccccttattataaaattgaaaatattcttcttttcagggtaaattttattaagttttttcttactcttatagtcgttaggattatgttaaactctcaccctacacatcttgaaaaattgtggaatttcacagggaaaaagtaaagatcgttgtgcatcacttttctattaaacatgttgagcaaaaatgtagttttcaagcactgacaatcatattaatcgaaatagtgaaaaatatcacaattctgatagtggtaccccttnnnnaaatgtggctcggacccatctcaggtttttttttggcaccagtcacaatgaattcgtactactaagacatgaatatgaagattggttttgcgttaaatttttttaaaatgcctccctaattcaaaaatggaaaatattcttctttttagggtaaattttaacaagttttgtccttactctcacactcgttagtgttctgttaaaatctcaccctacacgtatagaaaaaaattgtgaaattttacaagaacctagacaagaccgttgtgcatcaattttctatttgacacgttgagagaaaacatagttttcatgcaccaacaatcatttaaatcaaaataatgaaaaatatcctaattctgatagtggcacccctttgtgaaatgtggctcagaccctttgtgaatatgaaggttagtttcgcgttaaatttggttaaaatgccccctaattcaaaaattgaaaatattcttcattttaggttaa

SEQ ID NO: 53642 - DNA, 1137 bp, Cannabis sativa
  modified_base (929)..(944): a, c, t, g, unknown or other
aaaaatagtattagatttgagtctacaaatttggtgttaaacatttttttttttgcattctagcgtgtattttaatttactttaataattaatcttacgttttagtgcttaaattaaaatttatcataaaaataatagttaatttaaaacactaacatactagaaagtacaaaataacaataacaaaattataaatattaaataaaataaaaataacataatactaaattgttataaaattaaaaagagcaacataaataaaaataattaataagtaaaataataatttaataaacattaagtttgaatttatttaaggttttttttcttaaattaaatgagtaatgtttaattgacttaattaatattttattttattaagttattttaaaattttaaatttttattagtagtgatgatataattatattagttattttgaattattaatcttaatataaaatgtgagatttttttaagtaaaatataattgttaccaaattttatattaatttgtagatttaaattagtataattattgaagatggtcttaacaatcatgcaaacatagaatttgttcctaaaataaaaggaaaatttatggaatgcacacattctaaattctaaataatatgggtatggtttattgtctgtttttgatacatggaatgggtactgtcatctgtgatcattaacaagtgtttttttatttttgctaaaaagatcaccaataagttattttttaattattattattattattatttgtttttcttttttttttttttttttgaatgggatcaccaacaagttattagtatgaagataagataattaataagatacgaacgagtgtaaactatcgacaaggccttcaaatatatatccatattcaaagaaaaacatatgtaataataataataataatnnnnnnnnnnnnnnnnataataataataataatttgaaaattaaccaacatcatttttctccaaaagaaatacaattaaagtcctcctaactttttaagccaattcgatgaagaccagcttttttggttttagagtcatgttaaatgaataaaggacggttcatcgttcatgtttagacttgagaaaaggaattcattgaacaacttaa

SEQ ID NO: 53643 - DNA, 1446 bp, Cannabis sativa
  modified_base (69)..(74): a, c, t, g, unknown or other
taatttccccacaatcaggctcctgcttgatctcttcaggagtaagaattggatatttgcccttgttcnnnnnngtagacattgctaagagaattatcttctaggggtaaataataagaaaatatgtaacttatgaagtagaaaattacttttatagacacaactagtagttggaaaggtgggataaaaaatgtaaaaattgaattacacaattgtacacgtgtttgtcatgcacaaagcaatctgggcaacattttgcgatatgtcgcgacactaggcgacatgttcacgacatattgaagtagttggttaggcaggataataaatgtcacaaattaactaccattaaatgtggaaacgtcttttgttagcgatatgtagcaacacatttgcgatatgttatcgacttgaaactgaacagtcaaaacatgatttgctatcgatatttaacgacatattagcaatattatatcgacatgagactaaacacttagaaacatgatttgttttcgatatttaacgacatattagcgatgttatatcgacatgtaactaacaatttgaaacttgatcagttttcgatattaatcgacattttagcgaaaattatcgacctaaaaattgtacagatttaaaaacaactatacaactatgtttgtacaattgtaatgaaggagttctaaaaatacaaaaaaaaatacaaccctgtataatttttaccacgtcaagttttggtaaaacaagtctacacaccaccgatctctgaacatcctcacgttatcatcattaatcttctccaatgatcgattcatcatcaggtgttcgatgtactcaatggcatataccccgcaattaccactggaaaaatttaaaacaaatacatttagagactaatggcaaaggaaatattaatatactatattaataattaccttgatttactttggggaaccacctcacttggcatgcgtttagcatgtattgatctgagttggctactctcccttaactccacattgagaatgtaattgttaacgacatgataatagccagttgacctcaacagatgtggaaacagctgagtccaaggtagcatgatggcttcaaaatcttcattggtagtgcacgacatatcattatcgtacacccgaatctgccaaatatcaatgtctacctcaacagcaacccaatatttttgtctttcgaagtgcatgacgaagtataagtagccttgatcctttcaacatggcatgtaacggccctccatacccaaatagtactggttgactgcatctggccattccaatgtacttctgtcaccattctcacagccccaaatgccaatgaggaattgtggaagtgttgtgtccaaaatcacacctggctgagggtacaactctggaaaatgaaggcgtctcctcctcatcaagtgtgatatggcatcta

SEQ ID NO: 53644 - DNA, 962 bp, Cannabis sativa
tgcccaatatcactgtggtactcgtacatcttgttaggatctctcctatgcttgcctcccttgtacatcgaaggaggcttcctgtaatgacccgtattgcaagtagccttatagacattctcacgagtgtcgatcaagttgatgtactacgtatattgggcatcatatgcttttcgtcctttttttgagcttcaccttggctctgactcttttctattctcttactctgcgaccggcttatgcttgattctgaaacttccatttgttgattcgtttgttatgttcaagaatgacgctgcatccagtttgtgtagctccaaaactggaaaaaaaccacatgtgtgggctcgtaccttaaggcagcttgtccgtagacgataggtgcttgtactgggtctcaagtggcacaatcgatggagttggaagctgttgtgaaaaacctgaattactgacattatctaaggttgttggagcttgtgtgttagcatattctaaattaatgaaaccttgagctctggtcaagaaatcggacaaagtgttggacctctttctttgcatttctaaccaaagtagggatctaactgatatccctgaatgtagggtcaccaatttcatgccatcattgatttcggtcttcacgactgctccaatcatccgttcgacgtagttcttgaggctctattcaggttgttgattgatgttggtcaatgaactgacctccatgtaaaaatctttagcattcttaaatttcttctgaaacatggattgtagatccttccagttttggatagagcgaatggcaacttattccacctgtcctctatgaattcggaaaaagttaaagagaagcacaaacacttccaatcatcacttgcttgcgtcacttgcagcaacttgctgtacttgggcaggtgggccctaggatccatcttacccttgtatgattctatttgtggcattct

SEQ ID NO: 53645 - DNA, 947 bp, Cannabis sativa
ttgtagtgtttaattctcatcttaattaagttagagaaaatcaagtgaattagttttagttttttttaatttttatcaataaaattttataatgttgtgggcgtaaaagtgacataccattattgcactattgcatcatctttaataaatggtgtaaaatttatgttaaatttaatttaaaaaaaataattgaatttataattgatttaatttttttttttttttgatgaataattgatttaaattttactattgtgttctaatgcattaggagtaaaattaataaaaaaaataaaaaagtgtaagaaaatgaacaaaagaattaaatttttattgaaattatataaaaaaatctattgaatgtataaataaaatataaaaattaattgattatagtaatgagtgacaaaatagtaaataaaaaaataatacttggtgtatgcagatttaacttaactgcaaaatcacataaaataattggtgtcattattattattatacttatcaattttcttatatatatatatatctgtgtttaatttattacaaaaaatactcattaatcgttaatgaaaatcttcgttaacaagtgggatagctagaagagcagagttcggaaggtagaacggagaaggaagtgcgcaagggaataagaggatagagccatgtggatcaatatgaagataaaatagagaatgtgcgacatcgattctcgctttaaatagaggacctctacattcaaacgggagatggattcttgaccatatcagccctgtgaaaattttgccaaatttcttcttcaagaatacacttatcttgaatatgagattgtctcccgaagagagaaccatcgctgatttgggaaaaattgagcaataaagcatagttataattttttattgggataatcttaatataaaaaattcaagtgcaattataatttattg

SEQ ID NO: 53646 - DNA, 1789 bp, Cannabis sativa
  modified_base (27)..(30): a, c, t, g, unknown or other
  modified_base (57)..(60): a, c, t, g, unknown or other
agattctaaatccctgggtgctcctgnnnntctaaatccctgggtgctcctgaccannnntcggtaatcctagtcacaattttgaaaattcacaaatagggttaatccctaaattcattctcacataattattaaattggcattcaaatccaaataaacatatagagctcagaacgagctctccaatgatactcgaaacattcaaaacggagttcgaatcacaaagttatgaatattcgaataacgcgttcaaaactacccagaaacacaaggcgggccacgacacctgggttggaaacccaagatttagaaggggcagccacgacacccagttagtggggccacggagcctgcgttccaaacctagaaaccctaacatgcagcaacacgaaaccaaacctaactcacacctaattcacctaaaacatgcttacatacaaaaatcaatcaacacataatataactacttcaacagggggatatcaagacattaaacaagctcttccaacacttatatacacatttaagatcaaatttaacaactatcaaagtattctcaaagcttgagctaaaatcaacacaatatcaattcaaaagaatggacaacaaagtcctacatacaacccaatatttcaacatgcaactccaagtaattcagtaaattaaaaccccaatcttcaatctaaaattcacacaaacatacacaaaggcaatacacacaattctaaagctttattcacctacaaatcatcaaaacaccacaatcacacaactatgcacttaagaatacaattcatggaaacacacattttcaacttcaaattacaacaacaaaataaaaagaaaagagatggaaactacatcaagctctaaaccacaatcttcttcaagttccaagcacaatccaaactttaatctttgaaaagaaaatgcaaaatgaagaatggagaaaaagagagagatggtcagtttttgggtaagaaaatcatagatgtgttttttttcttattttgtaaaaattcctcttttatcgataattaattaaatggccaaaaagaccaaaatacccctaaagtcataatatagcatatgcaccattataaatatattcggtcaatagaataatcacgaccaaaagatgaaattccatatctcggaaaaaatatgaaaaatagattaccctgagaatcccatatcttacaagtctaagatatcaacgacccgagataccatatgttatacctgaaattcggctggtactttagaagatggcacatcaaccttaagaaatattaatcgccaaatataatggcaattatatttataaatattaaatggaataactctttaaatgcagaagtcaatagtgtatatttataactcgcagactgcacagtccttagcgaggcacgaatgtatgaactattgactcatgtattgacgagaaactatttcgtgtcagaagacataattgcgaggatgatatcaataatatatagcgaggcatcaaccccgccctgtgtggaaaggtgttgacgaggcgagttagctgttagaacacttagcgtataatacacattgtactaactaagtataacagcttgaaggacatgaatagcgaataacgagacacccatctcgctataggaaggcatactcctgctaccttctctaataagctccagacatctttcaatgagttccactgctccatcgtgccagctctctcaaaaagaagttgacattcaaatgatgctagctgttgaagtttatcttgtcaccaagaact

SEQ ID NO: 53647 - DNA, 1289 bp, Cannabis sativa
tttcagccaattaaaacataccacatgtacacatatgtacacagtggcatcaattggcacttaacatataattttaacagaataattaaatttgcaaacataataaaacaaaagggagtattactacaaaaaaaaaaaaaaagataaagatgttaagtatataacacttgaaacatacggggatttagccgcaaatttctctaatttatatttataatatgtgtattttttttagtatattagtgtcttttttataattatgttttgtataataattagtaaggatattggcggtaatactacttaaactacacttttagttacactaaaccccataaacccaaattttagtggtaaaaccctctaaacttcggttctgttttgctcttcactatttcgttagtgagtaagtgttaaaggccaccttgtagtgctgatgtgtataataacatacacgtggtatatttttattggtacacatcatatatattatttaaaactataaaaataattgagaataaaaaaataataatttaaaaaattaagaaaaataaaaattaaaaaaaaatcatcttcttttccttttcttttcttcttcttcctctttcttctttcgccttagttctttttcttttctcctttgatggcagccactaacacatgctttctaaggactagctccaacggcagctgacgaaacaccagaaccccactaccccgaccgacaagaccctaaaatccttgaaactcagaatgatgagacctcagatcctctccccctctccctatctcagtcactaaaatccctagaatatcggatctctaaaaccccaattgacggagcacatctcaactgtcagagatactctagaacttctctcaagattctcactctcactctctcgctcagatctgatgttaatctccctcactcagatattctatttctctctctctctctcacttgcgctcagatttgtgagaaatcctagagattgagtagtcgagggcgataaggatttcgagttctgaagttaagaattcgggaaaaatatataggagagtttcacaaatgagttttcatcgatggagactgatttgggaggagtcacagatgtagaggggggcgtggtctattagggttttggatgagaggtgacggcgacgacggtgggtcttagggttctttgtgatggcgagaagatggggtatcagggtcttggtcactagcgttggatagctcaagtgaaaatcttgccaccggacggctgagagagagagagagagag

SEQ ID NO: 53648 - DNA, 966 bp, Cannabis sativa
aaatcaccataagatcaaaactaatatagtttggtaaaaaacaaaataccgaaataaggatattatgagttgcaataaaactactcaagaaatccaataacaaaaaactgggatttaaattctatatttggaacaacctatgcatgtttcaaaaaaactgaagaaacgaaagcaaattttgggttccaacgaagaatcaaacattcacaaataaaacagcatccaaacatttttacagagaaaaagactcttgatcagattgatcgaaagagaaaacatatacatgcaaattaaatcacaaattcaaaaggaaatctgactcaaaaagttatgcatcaaaacatttccaaagtaataatagataaacgacattaagaaaaaacctaaccttctcccacatagataatgacctaaaaacatacaacacatcccaattgcttcagagaatcggctgaagaaagagtgaccccatcctaagccgaccccaaacatcccaaatcaagccctaaccttcttggagagtcgtgtgacgacagtaagcagcagctccgatgagttgacagacggtgaagcaagagcaagcaatgaaggatgaggaagcgaaaatatatcgatcaatactcttgatcactccatattgcccttattacaacacacataatatatgcactcaaatactaaacacatagaatcagtaatatcacgtcatgtgcaatatttgaaaatatatttagaattggatgcacatatcaatattattactcttatagagtattattatagtttatattataaaagctttaatttatctagctagttaggccatggaccaaataacgtcaacaacacccaaattagtatcaagtccaagagcatttcacacagcattagaaccatcaacaatattatttctacaaggcggttgaccgacatgttcgtcatcacaaccgttttgggaatcacact

SEQ ID NO: 53649 - DNA, 770 bp, Cannabis sativa
tctaattttgggtcccaggtctaggtgtttgttcggttttcgttcttcgtctgggttcaggtcctagtctgagtaccagatctaaacaccgatgattggtctattctaggccccgttaccccaatcccgagtcaagatctggatcacagacatgggtctcggtctggttctcgttcaggtctcaggtcccatttctgagttttggttcgggatcgagactggggttcggttctaggtcccgaccctggttctgtgtccctagtctggttgcatgtttgggtttgagttcaggttcgggttcgggtcccgagtccatgtttaggtggggatccgggtccgtcacccaattcgggcctaggtctgatttggagtccgggtcctggtctggttacgctgttggatctaggtccaatttcatttaatattcaaagtccaagtcctatttcaagtcctggtccacttcccgttttggttccaattttgggtcgtagggtacgggttcaagttcgtgtcttggtcaggtactagcgctcggttctagttctgtttcctagttccctatcctgattctgggtcaagcattcgattattgtgtgggttttggtcccgatctaggttcgggttcgagtcgtagtctcggttcgggtttagttcgctgtctagcttttgatcttagttcgggtttgggtttaggtcctggtccttgtcctagtcctagttcgattctagttccattggcgattctgagtttgacttttggtttgagttcg

SEQ ID NO: 53650 - DNA, 1654 bp, Cannabis sativa
  modified_base (1568)..(1580): a, c, t, g, unknown or other
atttgaaattaaagaatgggaatgacaatttctccaaatctcaatccttcttaattataaaaatacatttttattcttatttaattattatctttttaaagttctacaacatataaaagtttaatcaagaatatttttgtagtttaaaataatttattccgttttcgaaaaaatgcaaacgcattgctgagaaaattgctaattcggattttgattcttgcaagtaaacaattttttttttattcttattcattaatttgattgatgattaactcgatttttagtaattgtaagtaaatgcaccattaattttttaaaatttcaggaatctccatgtcattggaataaatagtattaaaaggtttttttttttttttttaccaataggataactttgtagtgatagtcatggatgataatttgatttgagaataattatagggagttttgggtgtcaattttgtctgtaaatttgtaggcatttcattagtttttttaacaatattgttccaataaataaataggaattgaagaaaaatgatgaatggcgaacttcataattttttttaaaaaaataaatcaaagtattacttattaaaaaaaaaaggctaaaaagaagaagcaaaagattattgatgaggttgtggaaggcaaggcagaggctcatgctcgtcggtcatctgttgtcgtatgagagaagatgcactgcctcaaactcaaaacaatgcttttgccatcgctacaatgctctttcaacacacttggaccttgttcaaccctcaaaacaaaaatcaagtgcttttcttcctcttcttcttcgttgcagtacacaccgtggtctggtctccaaacctggagagatagcccggttaatgaagatcgtagttggggacccaatggcccccaaccccaaccattgcctttacactcacagccctccgcatctgattcttcctgcgactttcatatactcgcatcctcaacttcgtctcttgcggagctcggtgctctggttctctcaaccagtgaccctctcacgaagtccaggctttctcatctcgcttacaccaggtggcgccatgagaatcttccgattggtgtggccgaaccgccgtctcggccagctcgaccccccaaacccgagttggtttgtctttcgtttcttttgtttatatccattccacccaatttcttgatagaatttagattattaactttaaaagctaacacaaaattctaattgggaatgcaattatcattggtttcattgcttgagtgttcttaatttttattttttttttttaaatttccaaagcagcttttgaggtatcagctaagctcattttcttgatttcagttttatcttttagttgctacgatgatagtgcagtaatgttggtatttacaaaagtaagaaatacttattctacttcaaattttcaggccgggtttcatttcctctttattcatattcatgtgtttcctttcttatttgatacttgagttctaaggaatccgttactggttaaattgagaagaatgagtataaatatatatatatatttatnnnnnnnnnnnnntatatatatatatatctatttaatccttctcatctatttccagtctttttcctttacattcttttctttgcatt

SEQ ID NO: 53651 - DNA, 998 bp, Cannabis sativa
  modified_base (967)..(973): a, c, t, g, unknown or other
taacgtctccaccccttcctgagttcccaaatgaaacgcccataaccttctcctgcgatctgctcgggataaaagtggtgctacacctcgggttcttaggaaggtgtaccctcactacttacttcccaatcttcagaactcgagttagaaagtccatcactcgaggaggacggactagcacaaagacgagattgaatctcgtacaaaagttggagaagatcctggtcgatatggtgttctcctccccaaaactaaccagggttcatctacaaaagatatgacacaagatgagtatttggccgagatatcgaacaaaaacaagcaaaatgtaccaacctaatcaaagattaaaaagacaaaaatttcttgtggtttaggttcataacctagaatttcgaaaccttaaatcaagggttaatcttcactaaaccccaaatgggcaaagtgagaaccaaatatcgtgacgttaaagtcagaattctacaacaatcaagttatatgatctactacagtcaaagtttcatagttctaaacctagattctctacagttttcctagaacaagtcaagactattgaattttctacaatggaaatctagaaaattgaagattcaagcattaaaggagaaaaacatgagatacttactcactgttcgaaggtttgaggttgctcggatgacgatgctcggctctttctgtaaattctacgaaggattcgagagagaaatgtgttttttgctctgaactcactaaacgagaaaaatgataaaaatagtttattacgactttttgccctatttataagcagattagtgaaaatgtgcaatcattttgactctttccagagaatgatcttactttattctataaatagatatgcatatcatttataggggtgcaatcagtgtataaaatatcactgcatatcttacttttccaagatcttactttcagtggatataggcannnnnnntctttgcagagaatgatcttgtcaa

SEQ ID NO: 53652 - DNA, 2480 bp, Cannabis sativa
gttgcaggaattttattctcctttagaattgcaaacttcagcaacttcaacaattcatcaaagatataatttggtatttttcccaaattatttttcaagtgcatcaactttgctataaatttgagggaggatattcaattgcaatcaggatacaactctgcctcaatctcctcaaacatgtcatcataatattgacccctctgcatgtcatcatcaatagctcttttgtcatcatttataggagggaagaaatattcaatgacatcaaccatctcatccgcatcgacattgatgttagcctcgacaggttcatttggctctccatggtaaatccacccctcataactgctttcaaaaccctttgtaaagctgtgtgcctccacagtattcaaaaggatgcaatttggtattcttgcatttaacacaataacaaaaaaattttccgtcacaatctttgtgtttagacacgagtgtcataaagacttggagaccttcccagtaagctggatccttacgatttctcatggtcacccaagtcttatcgattgtcatctctaccaataaatttactctgaatgaatcaaattgagtaatgtgaccaaaattttataattttatgtactaattgaactaacggtaatcttatgtcattttataaaacttttttaacttttactttaaggaaaaaatttatttacaccctaaattttttataaaatttatatctttaattgtactaagtttttttaacttatttcttccaatttatattcttaagaaatatatctatcaaacaaagttaaattatattttaaatattgtgacaaaaaaattaaaatagaaaattatatgaaattttctttaaaaaaaataaaaatatatatacaaaagtttgaaaaaattatgaaagttaaatcaaaataagtattgtaattaacataaaataatgtgaaaaaaaaattaaaaaaaatattaagtgtaatatttacaaattatttaagtttatattttttttatataatatggcgttattattttatgaggtgcaaatagaactccccttattttaaatattgatttaataattctaaaagaaacatttaataaattaaacttataatatgtctatttatttacataatacttaaatataaataatatattcttgtatattaaattaaaaatctatttttttaatttattttttttataaataaaataatataaaactcttttttttttatatatatataaattacttaattttaaaagtaattacatcaaattttaatatgtttataattagataataaattacttaaattatttatttaattatatattaaattattgatgtaattattcattaattttttattgtaaagatttattaattattaaattaattacttatttgttagatttatttattaatcatttaatttttttatttttattttaaaaaaaaatatataaaaaatttattagttaattacttaattttaacattaatttcattaaaattttgaatagctattataaattattaaattaacataactttttttttattatttgaaaattttaacatcataacatttatatttttacttatccaaaaatttaaaacctattctaaacactctaaaaattttcaaaaacatcataaatttatacaaaatacatatttacacatataacattttcataatattaatatatattaaaaagaaaaaaaatcacacataatcacatataacattttaataatattaatatatcaattataaacattatatattttacaaattaattttttttacatataaggaacaagtataagaaaaaaaaaaactaacagtggcagttccgatataaatgggttcgtctgaattgtttgtcgtgactccaatgtaaatatcacactatagctataaaaaattaaataaaaaaaatataaataaaaatacatataaaaatacaaaattatatatataaatattaaagagaaaagtatgagaaatacaataatattacctaaagatggcacgggtggtggtccggcgaagtctcacgcggtggagaggaggcggcagcagtggtagtctgtcgttagagaggatcggacaatgaagaaggtccggcaataaatgttaggttcgggttttatttggatatggaagatgaagaagatggtatagtgatattttttttttagatgaagaggatgaagaaggtgatatggtggtaggttttgttttagaaggatggtttcaaaaatgagaaagtgaaaataagagtgatctgatggggttaagggatcgagcttccttttttatttcagccaatacatattgccagggacaaccattgacgaaaatatcgtcagtggttgtcgctaggaatgtattggagggtaaaatgccgccaaatgcaacagttataatttatatttaactgtgatgacgacactataatca

SEQ ID NO: 53653 - DNA, 1478 bp, Cannabis sativa
gaatacacaactcagtttaatcgattggctaggttggcctcaggaattgtgccaaccaacttaagcaagagagaaaagtatctagatggattgaacccaaaaattaaacttgaccttataattaccactgatgttaacaccacctatgctaatatggggagaaaggcactgcgagctgagggcgcagttgtgtgcacccaagagtccaaagggactcaggtttttggtgggggcactactcttcctacctctggttatggtaggggtggtagtgacttgaccattgatcagaaaagaaaggcaccctttgcacccagtggctcaaatcacaataagaggttttgagggaactagggtcaacacaactggcagggtggttccaaaacctggtatacctatccagaatgtcccaattataagaagcatcatctgggtgagtgtagagggtgaggatatttccagtgtggttttcttggacactataagagagactgtccgtagctcaagaaagaagaatagaaggcagcagtaaagcccgcttcagctagggtgtttgctcttactcaagctgatgcagaagctagcccctcggttgttacaggttagctcttggtcaataactcttacttctctgtattatttgactctgaggccacccatttctatgtggcgtccagaacttttaataaattgggtagaccgtatgatagctatgataaaaggttaagaacactactacttagcggagaattagttatctccaaaaggtgggttaggtctatgccaatcacaattgaggatagagagttgagtattgatttagtggaattgggtttagcagattttgacatcatacttataatggattttttgtccaagtactctgctagtattgattgtaaatggaagatggtgatcttccaacgcgagggcgaggaaccgtttgtcattgtgggactagttcaaggatctcagattccagtgatctcggtattcgaagctagagatttgttacaagaaggattattagggtttctggcagtggtattggataccacacggcttgagacattttggctagaggatattagggtggttcaggaagttttagatatttttcctgatgaacttttgggtttaccatcgcagcaaaaaatagattttgttattgatttagcacctgaagtagaaccagattctaaggcaccatacaaaatggctccagttgagcttaaagaattgaaaatttagcttcaggggatgcttgacctagggttttcacgacctagtgtgtcaccctagggagctgatgtgttatttattaagaagaaagacggatccctacatatgtgcattgactactaggaacttaataaactgactattaaaaataaatatcctttacctaggatcgatcacctgttcgatcagcttcagggaaagatggtcttctctaagattgatctccgatcgagcta

SEQ ID NO: 53654 - DNA, 1328 bp, Cannabis sativa
gaaacaagaggcttttgaagttgtgaaagaaaaagtttggaacaagcttcaagggtggaaagcctatatgttctcacaagcgggtaaggaaatactaatcaaagctgttgtgcaagctatcccgagttacactatgagttgcttccgtcttcccaagaagctcatcaaaactctccactccttggctgcaaagttctggtggggggatacaaaggatcataagaaactccattggagttcgtgggataaattatgtagacctaaggaggagggaggtcttggctttcgtagtctaactgaattcaaccaagcccttttggccaagcaagggtggagactcattcataatccccactctcttctcacccgaatcttaaaaaatagctactatcctaatacatcttttatggaagcgggttgtcctaatggtgcctcttgtgtgtggaaggggatttgttgggggagggaaatcatcaaagaaggggctaaatggagagtgggtaatggaagaacgatcaaagtgtgggaagataaacggctccctagacctcatgaatctactctctctaaatttcctaaccttcctcctcaaaccaaactttataaatttataactgaggagggagagtggaatatggccgagatagctacatactttcatgaagatgacattccttggattcaaggaattcctatagattcatacatggaagacaaattattttggcctttcacccctaatggccattataatgtgaaaagtggatatcgggttagtagagaattaaatcttcatcccacaaggtgctccaacatggatgagattcagaagtggtggagaatgttatggagccttcaaattccccctcggatgaagcttttcagctggcgagtttgcaacaactggctgcctgcaaaaactaatctgaaacacagaggtatggacataaatacttgctatgatatatgtggcaggtatgaggaaacccttacacatgctttatggaactgtgagaaagtgagaggcacttggaaactctgttcttggtacaaaaactgctctagattaggggcaggttccatgtttgatgtgttaatggccataaaacagacgaataccaggaatgatttcgaagacactatcaaagtgatgtgggctatatgggaaaacagaaataggaagtggcagcaacttccttatatgcacggtcagcaattattaaactgggttttttctacctacccaaatgtgcctaaaactgaaagtgaattattgcagcaagaggcagatgtcaccacccatgtgaagaagtggattccccctgcta

SEQ ID NO: 53655 - DNA, 934 bp, Cannabis sativa
  modified_base (40)..(51): a, c, t, g, unknown or other
gacaaaaaatcaattcagggtccaattagtaacttttgtnnnnnnnnnnnnccaaaatagtatttacccataaaataaaagaaaatcaacacaaataagttgttccttatttttagtagaaacatatacaacatttatagtatacctttaatcaaataattatactatgtctaggttatcatattaaaacatacacaaataaactcaacaaatgcaaaacacatcaaaccactaaattaattgggagagttttcaataacaaaaacaaaatataatgtatttttagctagggccaaatttggcacacattacatcacggttagagttaagttttaataaaatattctaaaaatgataatacaccatatttatagctctctattggagatgctctaatatctcaaatttaactaatttgatggaagaccacttttaccactttatatatacatatatatatatatattatatatattagagaatgagctataataactcaaatttagctcatttgattagagtgctctaagagcatttccaatggagagttatatatgtggtgtatttccattttttagaatattttgctaaaatttaactccaatggtgatgtaaaaactcagaaaatatacaccctctattggagatagtctaagatagagattgtaaacctcctcaataaatcaaaagttcaaatagacaagtaaaattcctaaatgtcctaatttaattgatcttcatcagtaaactataggtgttgagagaaatggcaacacgtagcaaaagtgtaggtgattggtaggtctgtacataaatttttgtaaacagcctaatccgaataacccgcccaaactaaaccgagataacccgacaaaaaatgtaaactgaaaaactcgacgaaaatataacccgtccaactaacccaaacaacccg

SEQ ID NO: 53656 - DNA, 2549 bp, Cannabis sativa
agtttcttaagggaaggtgagcaccactggaagcatgggaccaactccatgcagtgaacccatcaacaccaatggatgtagattctccaaggatggaaagcctgtgccacatcagcccatggacattaggagaggccagaaacctctcagtacccttgcaacataccataagattgaaagcaattagctttctagtctatttcccacacagactcaggacggacctgcaccgatgaaggaattttagccccttcacctcttctgctatccacagagagatctctctcactgatgggtttgttttctggaatggtttctaaggcctccacaggctaagacatcgccatgaaggcctcggttaggtcttgtcccacaaaaaacctttccacaattggaataattttgcccttgacacacatggatgtgtttgtgagggggtcttcgttcaaatccatgaaggaaaaggaaaattctttgaaatgacgaatgggtgtgaagatgggctctgtctttcacacacactatcttactatacggcccaagagcagttctagccctaacctaagcaaaaccttcttaccctaaacatgaaatcccaagaaattcagacagaggattagtgcacttacttttcgaatcataagcgataagtggtgtgcccagaaagcctacttgaaaactctgaagccagttgattaggcagtcacagttaacctaaaaatcaaatgtttcccctaaggaataacttcatcggtccagtcagaggggagaaatgcctgggaaaaattccattcagatgacaagtgatcgttgaatctaaccttctaacgcttcttgcatgcaagggatggcagaaaagggaaaaagaagtcgcaaggaaaatatgaagttttgaataaaagaagtaaaaatagcaccaccaaaggtgatttatattttaaaaagaagataggactatgagagatcaacaactcaaaatgtctgtagtaaatccaatgactagggaaatgagaggtcttgtgcattggcccatggcccaccaaaatgtcaaggttccgttctccatgtcattcagccacatatagcactccacctttcttgctaaacatgccttgccacacacaaaaaggggcaaaaataccctcctaacctgtcgcgtagttaccacacaagaggaagcaaatgttgtaaataccctcagtaggatacaactcatctaggggtgtatccatgacccaaatatgcagcacgtgtcaacggtcaatgtcaagaattatagcaagcttctgtgatctatagaatctcaaaatcttgggggtaaatgttatccaagttttcattaatcaaacatgtggcataatcgaaggaaaggatatggtcacagcacaagtaatccgaggtaaccaagaaaaatgactcccagacctacaaggcaaggagaggcaatggcctcagagagagcttctcttattaaggaacccagaacacgataaaggccttagagacgttggccacgtcagcacgttgcctaatatcaccttgtagacggttacacatttttttaacacaggatcaaatttttcccccatgccaaatcatggtagtgcgcgtatgcaccctcgagtatgctttttgcccggttacacatttttttgacataggatcaaattttcttcccatgccaaatcatggtagtgcgcgtatgcaccctcgagtatgctttttgcccaacaacctggttaaagactattttgcaaaggataaacctttacacaacacgtgtccaagatcatacaaaatttctcacaagaagctatacaccacatgagaaagaaggtccctatcagccaatagtcagatcatcctttcacagtatagaccttaatagcgtgtggaatacgaaaccctaggtaggtaaagggtgaaccctttactccatgtgtgcctataaatagtctcatttttcttgaggcaaggggagaacaatcctttacatacaattactctgctaaaattctaagaagcctctctctcaagagaagcaaggcaattttattgtaatatcttgtagtcttgaaaatgttttcccattgaggcgaataatatggacgcgttaaggatcattaatgcttggaccacgtaaaaatctattttgtttattatttgttatccgttaccttctctaagctctcaaaatatttggtattcaaaaaaactcggtaaatagtagggccaccaatttcatgtcattggtttagttttggctactgcttccatcattcgctgaatgaaattctttaggctttctcccacctattgcttgatgttggtgatggagcccatttctaggtcatagtcgtgggcagtaataacctatttctggaaggcaaactgtagttccttccaagagtggcttgatttaggagccaatctcttccaccaatcctcggtagatttggtaagggtcaaggagaagcataaacattttgcatcctcactgactctagacacctgtatcatcttgctgtacttggccaaatgagttttag

SEQ ID NO: 53657 - DNA, 1357 bp, Cannabis sativa
gattttgtaaagcgatctaccacgacccaaactgagtcgtacattcccatggttctaggtaaaccaaccacaaactccaccgtaatgtcttcccatttccattctagaagtgataacggttgaagtaatcctgcaggtcgctgatgctctgctttaatttgttgacaagttaagcacttagtgacataatccaccacatccctcttcatcccataccaccagaaatattgcttcaaatcttgttacattttggtggttcctggatgtaatgagtaaggggtagtatgagcttcatccaaaatttctttcttaagctcggtgttattagagacacacactcgcgttttaaacaatatcattccactgtcagagattgaaaagtccttagctttgcccgctaagacatcttctcgaatcttaaccaattcaggatcttctaattgtaccattttgattctttccaacaagtctggctgaagtgtcagattatacaatttctcaatcaccaattcaatatttgccctattcatttctgaggctaactgaggagaaatcatgatcatattgaatacctgatcaggtccttttcgacttaaggtatctgccacaaaatttacctttcgaggatgatacaggatttcacagtcatagtcctctactagttctaaccatctccgatgtctcatatttaaatccttctgagtgaaaaagtacttgagacttttgtggtcagtatagatctcacacctttcaccatataagtggtgtcgccaaattttcaaggcaaacaccattgctgcaagtcctaggtcgtaagttgggtaacgctgctcataatctttcaattgtcgagaagcataagctatgactttatctgcctgcattaacacacagcccaaaccctaccttgatgcatcgcaatacaccacaaacttttcttgatccgatggcaaggctaatacaggagctgtaatcaatcgttgcttcagctcttgaaaacctttctcacacttatctgaccatataaaccgctggttcttccaagttaactcggtccatggcactgcaatcttggaaaaaccttccacaaaatgccgataataacccgctaaaccgagaaaactttgaactttagtgactgttttaggtgtaggccaattcttcactgcttcaatcttccctggatccaccataattccgtctcttccaacaatatgcctcaggaaagacacttgtgatagccaaaactcaaatttttttttgaacgtcgcataaagtttatgatctctgagtcgttgcagaaccattcgaagatgctgttcgtgttctgcttctgaccgagagtacacaaggatat

SEQ ID NO: 53658 - DNA, 1339 bp, Cannabis sativa
aaaatagattacattgaaatggagttttatttagggcataaaatcttacacgaacaacgggactcaattcggtggtgaattattcactgagttctgtgaaagaaataagataattaagagcttctcgtcagtatccaggcctcaagcgaatggacaagtggaagctgttaagaagaccttgaaggatactatcaagaagaaattagacgctgccaagtgggttgacgagctacctcaagtagtttgggctcatagaacgctgagaagatagcaatgggacatactccattcccgctagcatttggctcggaggcaatgttgcctatataagtaaatatcttgactcacagacgagagttttataatcaagaagaaaaccaagaatttttaaaattgtcctatgatctacttgataaaaaccgcactgagtcgcagattactaatgcagcataccaacatcgagtaacaagatacttcaacaaaagggtgaaaaagaggctattcaatgttggagacttggtggtaaggcgagtatttacaaatacagagacacatctgcaggagtattaaacccaaactgggagggtccttatgttattgaagtgatagtaggaaccgggtttaaaaattggctcggctgagtggctcgctaataaagaactactggaatgtggaacatttgcgaccctactaccagtaaattgatgttgtaactcttagttctaatgtaatattttgaactttagtattaataaagttaatcacatttcaggtaattacaaagtgttactctttaaaattacttgaggggcatatgtgttgattaactagaattatctggaaatacatgatatattgcaaatccaccactttaaaatttttcaaatttttttaaagttcttgttgatcaaacctttttgacgagaaaggaagatcaaaaaattaagaatgactttcgattaaagaacctttctgacgagaaaggaaaatcaaaagttccaaatgagatataacttataaactacatgtggagctgaatactaatggcttgcattgtatatgaaagtattaaacgagacaccaaggtgccttgaaaaaatattgaaacctagtatatgaatagatgacctaattattcatataagcaatcaaaaatgtacaaagtgataaatcattaaaagtatattcaagtttgcttaaaatagatttataactatttatgagaggaagaattggtaactgctcgcaaatcaaaagcatagcagataacaactgctcgcgcatatagtagattcctaactacttaaatattgtcagagaaaaatatgagcaatggaaa

SEQ ID NO: 53659 - DNA, 2349 bp, Cannabis sativa
  modified_base (27)..(55): a, c, t, g, unknown or other
aagttcatatttagggtgttaagcaannnnnnnnnnnnnnnnnnnnnnnnnnnnntaaaataatttccaacaaggtccacatgtgtcaactttcaaatatcgagatttctcaaactgcaattccaagtcctcctccatttttagttctagggtcttcgttaacttgtctgctttttcttttcgcgtagcaaaccactgttggactttggacctcaggaattctacataagtagtgatcgaaaagcctcttccatccgtagttgttttgttgaagctctcagcccagttactcgtcattacattgtaacgtacccatagaaagtaagatcgaatgcatttgtcaaatccaatttccttaagatataatgaaactgcaacattcattgcccaaatcttctcaattgctctacagaactctatttttaaatacgtgtaggcacacgtgtaaatatgattcgtgaagacgttagtcttaaacttgtggttgacgttcatactaatgtggtgatagcatgcatcgtagtgtgcatttgggaacatgagctccaaagcatgaacaatgctttgatgcctttcaaacacgagggctaagttctcaacatcaccaatcgcttctttcaattctcacataaataggtccaagagttatggtttttgttgtcaactaccacgaaagctatcgaaaaaatgtggttttctgaattcagtgccactacacacaacatttcccaccatacctagtcttcatgtaagacccatcaacacatacaaagtgatgcttgacggctatcttttcctccaacgtctagggaatatgtatgtagattttaaaatgtagtcacctcaaacatgttagaaagtacgttgttcttcgttcttacatgtaaagtaccaaacaatagtaccagacttcttaatgaagtagtcgaaccctttcttcattacatacaagcaaaaaactatccttaaaatgctatttgtctctagaaaactttcctagatataactccccacctggtctaccacccatagatatataatgactattatcctttttgtcttctcttttaagccttttctccttgaatttaccgtaacttgtcgaagaagaaaatggatcgctaaatccaacatcattggtccctcttgaatcactaggacctttaccgtcaatggtccctctagcttcactagttcttctagcatcactaagacctctggcattagtggttcctctagcattacgtgttctgtctggatgactactactagtaccaggtatttggtgattttctctgcaaggccttcttttctgtgccgatttcctgagtatttggtacgatagtggagtgaagttcaaagctatagtagcacgtacctctgtgtcttggttatctcttacgtcaccattgccttcaacaaaccatttagggtatagaccattaccaaaaccattatgaaagagcatttgtgatacaatgtcaactgtcgacatcatagtgtttaattcaggtaatacatcaactgccaacacctccatatttgtttttataataaaactctcaacctcactacgagtattcttaacagagggtgtgggactaggatcgatacaagcattcttcttcaccaaagttacaaacaatggagtgagttcatctggcttctttccaagcatagacaaataaccttacatgcttataatttccaataacttcacagtgatacactaagtctttcatgtacttgtaattcacttctaatttcaagtcatactatactttatcaacattgagtttttcgtacaaaagatcaaccaaacgtgagtagcttacgtttgtatcaatctcaaatgtcaaacttttagctcggttataaacctaatctctatcctcaagcttccaaataccattatacataacgaatgaaaaaacacttgaacctgtcatccacagccatttaaacacaattaaaatttagaacaaaaatctaatagaaaagtgattaaaaaatcctcaaaaagccataaatctgtcaagtatctgacacaatcggacccatatcagaccaatatcgaaccccatatgataaattccaacaaaaaactatcgaacacaaccatcagacccatcgaacatgacatcggacagggcatataaaaaaaattcttgatggcatcagacacaatatcgaacagaccatagggacactaatagagcttcggacctatcggactaacccattgggtctatgtagacatcatccctaaccttaaaaactgatctaaccattgagccaccatcagacctctattggacaccatcggtccaaacaaaaaaaaaaaaaaaa

SEQ ID NO: 53660 - DNA, 805 bp, Cannabis sativa
  modified_base (654)..(655): a, c, t, g, unknown or other
tggttcgtgagccacgaggcctgcctcgtggtcttctcactccaggtttaggatgattttgagttttagtcccatgccccgccctaactgcgactgcatcacgctctaactcagcgttccgccgctgggcctcctccaagcagcgtctaaggcggcggtttccttctcccataggcagagtacctccacgattgggctcctcatccttagttcaaggattctggccattcccacgctgagttctcctcgagcgggttgtttgcgtactaggaccaacgtcaggttgggtcctccgggaacgtaaggtccgagtgctagaggcaccctcaggttgagtcctcttggagcgggtggtccgtctggattgttgattggaagaccttctggatcccatgggctctttcccagaacagtgatgagtttcttcatgtggtgtattaacatcttctgggtttggagccatgaaggagatggtttttcttcaaaagaaaggagggtcttttctgagctttttcacaaaggctctcaatgaaagcaccaaactattaacgcagatttttgttagccgaattggagcctaatagtgataatctcacgcagaaaaatgaaaagcagtaaaataagaggtatgaacacaagggattttttacgtgnntttgcagttaaaattctacatagtccacgagttatcttattagatttctgatagcttttcaggaccttctttgtatgattttttcgtcccttttttgatctaacctgccactatttataattacatagtaggcagttaattacagagttg

SEQ ID NO: 53661 - DNA, 1876 bp, Cannabis sativa
  modified_base (785)..(786): a, c, t, g, unknown or other
  modified_base (1074)..(1081): a, c, t, g, unknown or other
tataactaattaattaacagaaaaattttagttagttaaatctttttattttattatatatttttaattaaatagattatctaacgatatatttaattcaataatcaaaagataactaattaatataatttgaattattttaaaaataaaaaattaaacaaaattaatataggcctttatatatcgccctacacgtgtgggtaaacatacaggttgggccatattttaaggtcaaaaattaatatctcaactttacaacaaataagatttattatttatttctgtcaataaataataatctattaattctcattactctcttatttcataaggattaaaacaaatattattttcactaaaaaaatataattctctctttaatattatttaagtataatattatatttaactagttaatatatttttatctgataaaattaaatagttaaatgctatttaattacacaattcataattgtcataattattcacattaataattttaatgaagtactaatttgcccttaaaaaatttatttctcatagaaattaaatctcactcaaatttactcatcaaataaaactttcatgtacaatgttgtatagaggtgacttggggaccatggacctatatttcgaagctctaataaacacataattattattaatctcttcaatagaataattttacttattaattttattattactccactataaatgtaaaattgcaccctttgacaatttagaaatataattatagaattcttacttgtagtccattnntataatcaatataagtagtttgtcctctaattattagttcataattagagttggtcaaaagtatcgtcttacccttctaattatctcttgactcgttatgtaccattaattcaatgtgaacagttaatctttaacttattatatagatttgaatccaactattagcaatcctagaattaactctacaagaaaactaatattcgatcaactaggaaagcttgatttcaattattgtataacatgctcctagccactcatgttattaagctcccaaaacagaagttgtannnnnnnncttctctgagaaactttaacgagttaatcaaagaacttaatgaacacaaacatgagttcatgtatactcaggatttagattgatctactaatgatcatggttatgatatgaataactctttcgtggtaaacatcacgttaatgaaagatgttattacaaatcagtccagtcatgcataatcaaattatacacaacatatttactaacatgtctattcacatgtatatgattcgaatcaaaatcacacatactaaaagtatagtgtatagtaaccgtacttagcagtttcatattaaagattcattttactttaatacaataccgactagttttattcatatcatataatttaaattctcttgtacatccttacaagatgatactttctccacataaataaggaattttcatatacttattaattatacttctataattaatatatttctttatcttataattatatttcatgtattctataatatattatccattaattacttgcttttagggcacaaatctcaataataatattctcatatgactagcaattataatgtaggtaccttcagacaatgtgggagccaactacatgtctcactatttgagctacccatctccaatgacattctttaagggtgtcaaaaaccagaattacttgaaaatataatattttattgaggaatgctaattacaacctcttagtcaatctctacgtcctaaatcacatgccgaaatattttttttcatagcagtattcgttatacttacagtatcatccctgtaaatttttga

SEQ ID NO: 53662 - DNA, 708 bp, Cannabis sativa
tcttcttcatcttcaagaaaaataaggaaatatgtactttcagggaagaaatagaacttcctaggtgccaaaagcaaggcccaacgcccaagttgacacctaggctggcccagcgcccaagataactttttttcaatttaggccaatttcgatgatgttttctgagatctcttccgagcatcttctctattttcagtaaagattaagattcaactatttctagggactaaacgaaacttctgaagggtctcaaaggggacccaactcccaggttgacttattattaacatgggttgtttcttatcaagttctcaaaaaagtgttccggaaagttttttcgtcatcaaaaataatgaagattcaagtaaacttggggagaaaaccacaatcttgaggccatggaaaaagggcccagctcctaggttgacctagtgttgggcccaatgcccaggttgattgtcaacttagtgcactagtttcgttctgtcaaatgtcaaatctaattcgaccattgaatctagaatgctcaaaatggggtaggagacctcatcctcaagttctagatccttggaagtatcaaaacaacatcccggaagctccaaaaatgagtacccaacgcccaagttgacaaatggcctagtgtgttgggttcttcttatctgattctgattttgttttgatttttagtctagtttttcacaataacta

SEQ ID NO: 53663 - DNA, 681 bp, Cannabis sativa
atgcgcaggatgtactgtatgtcaaatgagcttaactccatggcccacttaagaagtctccctaaagtctcaggcttctataagacttgtcgaagtgggtggttcataaataccttgatggagtgagcctggaagtagggcctgagctttcttgatggaatcaagagatagaaatctagcttttcgattagaggatatcaaatttctacccctatcatgcgtttgccaacataatacaccaggtgttgaacttttccttcctcccggagcaaagatgcgctaactacgttttcaaaaacagatagatataaatataagtcttctcagtgaacgggttttgacagcactggtggcttagtcatgtgctctttcaacttcttaaatgcttcctcacattcttaagtccattcaaacttctgacatttcttcaagatgttgaagaataggatgcagttatcgattgagcggtagatgaagcgactcagggcggcaaccttcaatgttaagctttgcacatccttgtgtctctttggggagggcatactcaacaaggcttgtattttttttgggtttccctctatcccgcgttgacttactatgaatccaaaattttttcctgatttgacgccaaaagtatatttctttggattaagtttcatcccgtacctttggagtacttca

SEQ ID NO: 53664 - DNA, 1004 bp, Cannabis sativa
gggttattcaatttgtttcatataaatgggtacatgttaatttagttctcttcagttcttattctctagtttcaatctatgtaatgtaagatggtaattaaagggaaatttgtggtgaaaccctcttaatatttataattgttacacttataaacataattaaaaaaaaagtggcggcaaaatactttatcttatgatcttgttgtagtcgtaccaactcccttaatatttatattgttatacgtatttttgaattgacacttaacgggcttaattggcacttaacaactaaaaaaaggtaccaacaaaatcgtaacatcaggtacttttaccgtcactttttttattaaaggcatatgtgtaacaattgcaaatattaaaggagtttctctgcaagtatcccgtaattaaatgccaatatattatgatactagctttcacaatatttggatatgagaaaagtttcccctacagtatctgagatatgattcaaactattgtgccaaagattaatttgcctcaaatttacttcaggtgattgaacagtcaggagtgactgaggcccctggactgtgctataagaacacacctgctgtcattacaactgcagtaggccaaatggtatgtgtccatagtaaatcttttaggttgtgtttggtgttggttatgggtttttactttctttagtttgccttcacatttaagtaatggatgattggcctttggtttgttgtttggaatcataaatgtcaccaaccttgtatctgtcgtgtccttgtgattattgatgctaggcatctgttcttctacttccttcaatgtgcctcttctgtagggacaaagatgaaaaaacaaaagggcaattgtgttcaaatatatatattttaacattttctttcaagtatccttacataatatatccttttccttttcggatgactgataatggaatggaagagaaatagtgaaacaatgtgctgcttcatgacctgattaatcattat

SEQ ID NO: 53665 - DNA, 1203 bp, Cannabis sativa
aaagcactatacatcattgccagtgattttgtaaatgtaagttgaagctggtattcggtcaaaactcacatcttttccagttattagtaagtaacgtgcattctgctgtttggcagttcccatattatgttctttaatcaaaatgagaaataaaaacaaaactgtattatttaaggcttggtgatttgtaatgctgctcttgttctatttacatatctttatttatttaatatagaaatgatgatgtagcaagaaatatttttagtggtagacattagttgtcaattgatgaagtggctaagttgattattgtcctaagcttttgatgattactcaatttgttataaacgacaactatctatgttatggtttttggtgctatgttagttaaaattgtaagtgattgatttcccagaaatgtcataatagccatgatcgtttgtcttcatgctagccctgtcgtgctagagtaggtagtcaaagcttttagtgggcaaaggtctggtcaagctgttcttgttttcttcttttgtttgttaagaagtggtagaaaaagaaaagagatataaatttaaaaaatgattgtccttgtaaatgatggctgtcaattatacgtaggacaaattatgctgacaccatagttatatctcaaaactatgctacagaggtagtcaaagctttttgtggactgagtttttccaatgggatattaaattttttaaaatagtgaagtttgaacacaaaattgcttcaacagaacaataaaccctaatttttttttttttcattttttaacattaaaataatatgtttgtaattaaatttttatatttatatacatattatagtatgagatatttcaataaaataatataataataaagaatatatttttagtgtaatttttagtgttgtggttagaattggaaaaaaatttagtgttaaaatagtatctttttaatgttaatttaactctaaatttaaatttttcaattggagttgcctatgggcttgtagtctttgcaatgagatcatttgtgtgatatatggtctttatttattgggttttttttttaggaatatactaaattaggtaactttttacgacgtgatacgtcatcgtcttccccacggtaaccttcaatggagcaaaggttatttttctttaatcttagtttttttattttcattttttagtttttt

SEQ ID NO: 53666 - DNA, 1029 bp, Cannabis sativa
ttttaaggtaatttaatttaaggagaatagttgcacatagtttgtttgatatgaatgaatagtttagaaagactcgcgcgcggtttccaaaagtaacttaaatgacttattatcgcccttcagataatgataatgtgacttcattcacggaactagttccggcttgtggttgacgttggcaagtaatgaaggattgtttgggttgaggaagatgtgtttctttgatcaacatggaaaccacatccaccattgttggtctatcacttgcatgatattgtacacataaaagaccaatatgtatgcacctcatggcttctgctgcagagtatgacttggccaatgcatcatcaaccaaatctaatcctctgctttcattccacagttgccaagcctacaaaacaaaacaaacatgtccaaccaatcaagatgaccagttgaaaaatgaactaactatcaatttaggagatgctgctactatcaactcactcacataatcaacaagacttagctctttctcataatagtggaagctagagtttttcttcccactgattatctctaataccatcatcccaaagctaaatacgtcagacttttcagaaaatattccgcccatggcatattctggagacatgtagcctctgaattagatagatggttgaaccaagcagataatgttccattagttaatgaagatcaaccatatctatagtaaagaaataacagtaaatgaagtttgttattcataaaacaatgcttatttagtttcttacttacaatgttccgactaccctttgagtgtttactagatctattgtctcttcgaaaattcgtgccaatccgaagtctgatatttttgggttcatcttttcatctaatagaacattgcttactttcaaatctcgatgtatcactcttaaacatgaatcacgatgaagatatacaagacctctagcaattccatgaattatgttgaagcgtgtagcccaattgagctgtacacttctacttcgatctacataatgcaaa

SEQ ID NO: 53667 - DNA, 2472 bp, Cannabis sativa
gcagtctcccgctattgcccgccgttaataccccgccactattgagtgcgcgggaaaaattctgcctttgatttcaaaattattagcggcgtaccccgctgctaataatcataaaaatataaaaaaaaatatatattttttcttctgttcgtaaagaagaaagttggaactttgcgaatgtgtattgattaccaggagctgaacaagttgactgttaaaaacaagtaccctttgcccagaattgacgatctatttgatcaattacaaaaacagtttctttaagattgacttgcagtctggttatcaccaattgagaattcgggatgaagatataccaaagacagtttttcgaatcggctcagagatcataaaatctatgcaaaattcaaaaagtgtgagtttttgttgtcacaagtgtcttttctgggacatatttttggaaaggacagggttatggtagacccagggaaagttgaagcagtaaagaattggcccagaccgaaaacagttattgaagttcgaagtttcctcagtttagccggttactatcaacgtttcgttgaggggttctctaagattgtaatgccattatcttaattaactagaaagaatcagcaatttgtgtggtcagatcagtgtgagaagagttttcaacaactaaagcaaaggttgattacggctccggtgttcgccttgccaactgatcaagagaagtttgtggtatattgtgatgcatctaagcagggtttaggttgtgtgttaatgcaagcagacaaggtcatagcctatgcctcacgacaactgaaagattacgagcaacgttatccaactcatgacctaaaactagcagcagtagtgttttccttaaagatttggcgacactacttatatggtgaacgatgtgaaatttatactgaccacaaaagtctcaagtacttttttactcagaaagatttgaacatgagataaaggcggtaattagagttagtgaaagactatgattgtgaaattttgtatcaccccggaaaggcaaatgttgttctagatgccctgaatcgaaaagggcctgatcaaacgttcaacatggtaatgatttctccgtagatagcctcggatatgtctagggcaaacattgagtttgtgattggaaaattgcataatttgacgcttcagccagaattgttggagaggattagaatggcacaactagaagaccctggactgatcaaagctcgagaagatgtcttagcaggcaaagctaaggactttttggtttctagtagcgggatgttgttgtttaaaactcaagtgtgtgtttcgagtaattttgaacttaagaaagaaattttggatgaagcacacactaccccttacacactacatccgagaaccaccaagatgtatcaagatctcaagccctatttctagtggtacgggatgaaaagggacgtggtggattatgtgattaaatgcttaacctgctagcaaatcaaagcagaacatcagcgactagcaggattacttcagctgttatcacttccagaatggaagtgggaagatattgtgatagattttgtggttggtttgcccaagaccacaggaatgtatgactcagcttgggtcgtggtggatcgttttacaaagtcagcgcatttcttgcctgtaattgtaacatatacagtggatcagtatgttgacttgtatgtgaaagagatgtaagagattgtttgccttcatggggtaccaaaatctattgtctcggacagagaccctaaatttacatcaaagttctgggtgagtttacaaaaggccatgggtactagtttaatgtttagcacgacctttcatcctcaaacagacaggcagtccaaacaaactattcaaatccttgaagattatttacgagcttgtgtcatggattttggaggttcgtggagcaagtatttgcctctgattaaattctcctacaataacagctatcaaagtaccataggaatggctctctacgagctgctgtatggcagaaaatgtcgctccccatttcatgggaacaaaatggaagaacgaaagtatttaggccccgagttagcccagaagataaatgaggcgatagacaagattaaagctcggatgcttgcttcgcagagcagaccgaaaagttatgtagatcccaagtgtcgggatattacttttcaaccaggagatcatgttttcttacatgtatccccaatgaagggaatcaggcattttgggaagaaaggtaagctaagtcctaaatttattggaccttttgaaatacttgaaaaggttggacatgttgcctaccagttggccttgcctccagaattgtcagttgtgcacaatgtattttatgtctcaatgttgaggaagtacatatctgatccaatgcatatcttgagttatgaggcatttgagttacaaccggacatgtctttgttgggttttatgccc

SEQ ID NO: 53668 - DNA, 686 bp, Cannabis sativa
ctttaattaaatttaaaataaaacattccttcaaatactgttgtaatatggggatcccctgctaataaaatccttttaccactaattataaaactgttattacaaaaatagatttatacatccaatcatagaaaagtagtgatcctacttctcaaaagccaagacaacacggttggattatgtacacttgctgggaagacttctgactcatggccgaacagaactgttattcttcttacctgcaccaagaagcacccgtgagtcacaatgactcagcaagaaaactactaaacaaaaagtacagcaaacactattatttacatcatattatacatatcaatggatcattacatattcaacatgtgtatacatatcaatacttctatgcgaacacattcataatacatcataagaataatcatagcaactcataattaataatttcaccttttcactaagtacacattcattcaatctatagccatataatttcagtgctttgtaaagcattctagtcatacaccattataatcacataatttcagtgcttcattaaacactctacttacataatactataaacacttaaactcagtacttcataaagcacccttaccactcgttatcaacgagctatatatgtcactatcgtttcccgataacgcaaatgataagtaagaaaccta

SEQ ID NO: 53669 - DNA, 1227 bp, Cannabis sativa
  modified_base (1187)..(1187): a, c, t, g, unknown or other
tgaatctgttaagtgcagccattcttcctttcagggcttgtacttccttaggctttgtcggtgtgataaccaaaatattgactattattttatagtacatagtattagtaatctcgttgtggagatagtggattgcttataatttttctcatcaaatagtattttactatgttctaagaaattatgtcatttttagaattttatagatcattatgcgctttagtgtagtccattttgaatgagacttagaacaaacataatttgtttgaaccgcattatatggcatgataattaagtggtcaaggtgaataatgagttgttacataaatatcaatcgtggataaatatttattttaaaatctagtaatctattagttatatattcaagtaatggacacttgaatgatatatgggaattaagttatatgaacaaatatatgatatgatttgtagtatagtaggaattgaatagaaggcttcatatgttcattttgatatataggatagaatgatattatttaagataaatatataaaggtagttattgtaggaggtatcaagtttgaacttagttttatattttgagagatgcaagaagaataattagacttattaagattaggcatatagagtagaacatgcattcaaagtttagaattttaaatcttaagatttagtgaacacaacgtggtagcagtagagagatatgctcactttaataactaaggagaatatcaatttctagcataacattcacttggtttgggaaaggattaaaggagtcttagtttatatttaaatattgtacatgcggtggtggacattgataaaatagtagacttggtcatggtagagtaagataggtgaaagattattagacagtaaaagaattcaaatttgaaattggtattatgcggttgcatgggaggtggggagctttgttatcacctcgactgactttgtgaagattatcagaacagttaggatctaaaatgagtattagcatattattcaaaattaaaatcttagctaagggatacgatataggtaagtggggtggggtatgagaagcctataaataaaaccttaattattcattcatctcaacacttataagacctagactcaaaaatctctctcttcattctgaactgctgtctgttggatttttatgccctaaataaaantccatttcaatgtaatctttattatttaaatatcaataaa

SEQ ID NO: 53670 - DNA, 888 bp, Cannabis sativa
aagaaagagccgagttacctgctgtaggaagagcagatgcagtggtcgaattctaattagctgctggtgtttgtctagcagagtggtaatcctccaagtaagagagcaaaataaaggagaacatcatacggttttggtttcgaaccatgtctctctttgttctctttgttctagctgtagagaagaccaggagggtgaaacatgaagaaaaagttccatcaatttcatatctggtgcgagcagatcagtgatgttgaaggaagaactttgccagactttcttggccagtttgcaaaaaaaaaagagcatgtgagatggtttctttggctttgttacacaaggagcagcagtcagaatccgagatgtgtcgatggtgaaggatgtccgctactgggagacaatcatgaatagcacgccataagaaaattctaatctttgatgtcacagaggactactgtatgttatgtataataatattaaaaacaatttgatctacacttttttcgctatttatccccgaaattatacccatatattgattataaattaaattccaatcataaaccctaaaaaatacgccaatttctcgtccttttttggctgaaaaatgttcagacccgattgacaacgggccttgtcgtgtgggtattgtagcaaggttgaagatgactctacagggacgaagcccacttgcgactgtcggagagtgtggtagttttcagagtccattttttattctttttttcaatattattagaatttgatttctaattcttttggtaatttttaattaatttttgactctgtttaataattattattaatttaatgatagttatgcagttaaaaattattaagaacattttttgatgattttttgaaatctgt

SEQ ID NO: 53671 - DNA, 645 bp, Cannabis sativa
ctcaccatgttgtgagggttgtgctcatgcactataatgcaaacacctcatattgtatatgtcattgcccaagattggtcttaacattggatgaacttttggaaaaaaaaattattagctccttttatttgaaaagaaaaatacggtgtgctatcataccaacgtacaccaaattacaaattacttattgcatctgtatgtcattgctcaagattgtgcatgaaaaattgtgttttagcataaaacaatttattttttaataactgtaatgtaaaacatgactataacgacttatagaaacaagttgaaaatttgttattgtagaacacggacctaacaaaacaaaaacataaatgaattgtacagaagttaaaatttagcacaaataaacaaattctagtcatttatgcagctgttaatggatcatgtgatcgaatgtcattagatagaatttcttagagttgatgtgcaatgcttttgtttcagctaaggaagagtaggttactgtccttaggcctgcaattggatctaaagattagcataagaaatgccattagtatgcaacctatcaatctttctaaatcgaagacaaaaggaagataaatagaagcccttctctcataactagctatctttaatcgtata

SEQ ID NO: 53672 - DNA, 1257 bp, Cannabis sativa
ccaggtaatccttgaacacctgatccataagcttcgcctagctgtgcacatatttatttatttattttcaaaaaatattccgtatatcattcaatttattcaacttttacatagttatgccttttgttataattttttcatcaacttgttaatataattaataagtataaaatataataaaacaaataaagattgaactcattatttttactcttttaatgataatcctcttttattttctttttttttttctaaccatcaactctttcaagattaattactctaatttaagactaatttatttaatattttacacttttactcaatattataattttcatatatatatatatattatgatttttaatagtgaggctattatttgtgtactaagatgatttgaattataactataaaaaaaaagttaatatattaaataattatatatgattacatgtatatgttattattccattgattaaaaaaaaaactattcaaatggaaactaaattgatgttgttttattcttctcatcttattttgattatttttttttataattttaggtagggtctaatttctcctaacatgtatgatgagatgttcttcgttgatttatatgctgagactaaaactaatccaatttactcaaatgaaagaggaaaaaaaatctatatttcgatgcatcttgaaataaaagctaataaaaattataattcctaaaatacctcaaattgatcacactttgaaataaacaaatcatataataagagaaattgtacaattttcgtgcatatagaataattggagtcgattccgtgccaaataaattctcaaagtaaaaggaactatggctgcaatggttaaatatataataaatatgacaatatgaatgctttattcataggtaaggaagtatcacaccatcatcaaataaaagatgtccattttattgaaggattttctataaagtaatgtatatatacatacatatgaaagtatcaaatcaaaagaaaataaaagaaattagatttgagttagagacataataaaattaccttcctcaataaaaaaaaaataaaatgcaatatctatgacatgagaaagaacatgaaatgtgaactttggcataacaaatatatccatcaaaagataggaataaagaaataccaataatatttctatatatgaaaagtctgaaatttatatttggataggaatataaaaagacttatagtatatgaaaagtctcaaatt

SEQ ID NO: 53673 - DNA, 623 bp, Cannabis sativa
atgatatttatcacttattttatttgagcatgaaggttcgattagtttcttttccttaataggaaagtttatgcctattgaaaggtcatttttatttggagttttatgcctatgaatacagatttatgtgaagacacaactgtaaagattaattttaacaacttgacgttgcttccagaaagaggaaataaaatgatcatacgaggagcatgttaaaaagctgcttgagatgactccaccaaaccaaagggtaaagattttcttcataaagttgatcgagcatatactcagaacgtgaaaagaattgggtgagaatgtctcagatgcctcattttctcttgcttagacttttagaaagaaaattgattgttgttatgaagcttaatttatttacgagttatctttttgtgcttattaggaagcgtgatggctgtcccccatttgaaaaacaacctatagagaagaaagttgtccaagatggagctaagaaacggtatgcaagtccacaaatttcagtccttaattatcctataaagcacttgtctatttgttactagctaaggagttttttatttttattttataatataatgtatatacagtacatagtatatatcctatcc

SEQ ID NO: 53674 - DNA, 1251 bp, Cannabis sativa
gagagagagagagagagataagacgactgaggtcgtgatggtgaaatggcagagttcggcgagagtgagaggagggtcgaaacaacacagtttgatgattcgattaatcgcaagcagggacttttaagagaggagtcgatggacatgatttataagagaagttgatgaagaaaagtgtacatacttgtgaacaactatgtttaatctcaaaggtattttctagttagttttcacgagatctactacacaatttgagattattcttgttatccgcgttttcggcattgaacacatggactccagatcagcattcaagacccatcagtgagaccctcattaaaggaaaaatgggccaagcccatctggatgttaccttccaggaatatgttatggttctacactcgcaaagtctttcgccttcagcaaaccgtgcacagaagacatggccgttagcacggagagacaagagagcattttcgcggaagaccttttcagtttcctttacatttttgcacacaaataagcaaactcccgttatctaatcacaacaatgtattgtatcaagatcaaaggagaaattttccataacaaatattgtgcaattaattcagattaattgtccacaattagtgtacgcagtgttagccagatcagtccaaatcttatttgtctagtcagcagattatattctccctggcaggacttcacgagaaagcccatgagtattgtttattgtaaactcaccggtagagggaaataagaagcctaatataattctcatactactataaatatcccactaatcttatggattaaggattgaactctcatgcaaactttgcttaggcaaacttgagaacatacattctgtgcatttcctaaggcatttacaagtaaaagacttatcgaataatattgacttgtggactaaggctagttaactctccaaccacgttaaaaactatttgtcttattttgtactttctcttttgattatttattcttcagttcttattatttttatactgtttacgaaaaatcttggtaaataattctaatttctatgattattaataaaggatttcctacttggatttttactttctcatgaatgtctttaaaaggcttttggaacaaaaataggggagatgttatggaattatagtaagggaacaaatactagctttgctatgatcattcaggttagaataaaatatgattttgattgactatatatatgctctttaaatc

SEQ ID NO: 53675 - DNA, 649 bp, Cannabis sativa
tggggtctgggtccaaagtttgagttcagtccaggtttgggttcgggtcttgagtccaggattgagtttttatttaggtttggatctcgatccgagtctgggtctgggttcgagttcaaatccttgtttggtctgggtcctagttcgggttcaggttttggtcagggttcgggtccgtgtcccagattcagacaccaaatatgggtcgtgtctaagccccaggtctcaagtctcgagtctagatccagatcttactctggttctagttaaggtcctaggtccctgtatgggtccaaagttcgagtttgggtctgttgtcaggtcctaggtcccgggtcttgggtccacgtccgagtttgggtcctctattcaagtaaggttcctaggtcccgattttggtttgggtcccggtctgagtgtgggtcctagtccgtgttcgtgtcttggtcctggtctcagttctcgtcccggtatgggtctaggtccctctggttctagggtcccaggtccgagtcttaagtcccgggtgctaggtcccgatccgagtcttagtcctagtctgggttcgggtcctggtcaaagtctgagtttgggtcccgatcccgatcacagtccgagtctgggccctgggtctgagtgcaggttgagt

SEQ ID NO: 53676 - DNA, 611 bp, Cannabis sativa
ctcaaaaaatactctgattttctctcaaattatgaatatttattaattataatttgtgtgttaattaatatgtatttatatagtagttcatactattttgccgggtagaattgttaaagtctctcataatatatccccttattgtaaataggtcaaatattacttcattctttatacataaaatgtacattaaaatattatattatgtgctatacagcaattataattatttctttttttaaaaaaaaaataaaaataaccccatctgtagcatatatatttttcatatataaaaaaactgtttattatgaatatttttaacttataaaaaaaaaaaatcgatcttcataataatttcatgtgtttaactaaaaaagcctataaataattcatttgctcaaactataaaatatatacatatttataattcatttaaatgatcatgaaggagaaagaaataaaataatatatataatattataaacattttttgtagaatcacaaaataacaagggtgaaaatcacatacccatcaagaaatgatatataataaaaaatcaaacatacgtacatttgaagatatacttgttatgatttaattagttatatat

SEQ ID NO: 53677 - DNA, 1224 bp, Cannabis sativa
tgtcaaatttagcacaaaattaaggacaatattggagagattattttaaagagaaatatttaaaaagggtattagtggtgtctagcaccctcctgcgtgtcaatatcgttattgatgcaattaagtatcggcccacatataatttaatttaataaattttagagagcattgctaaccgttaatttagaattttgttaataataaataggatcttctttatgaaataaaaaaactaacgttaataaagctttaaatgaataataaataataaaataattgacacaagatatttacatggtttttgtagttaaatctacatagtccacgagtcttttttatttctaggtgttttgtgttatagattatagaattcaagaataaaggatgagtttttctcagggtctcctattgatcatcttgtcgtcccttacttagtggtcttttcgcctatttatagaatttctcatatggcagttattttctttagattaatcttaataactgctcatgaatcgtggtcaattctcatgttttaaataattacaacatgtgggaaaatgtgcataactgcccagtaaccgtcatttggcttaatccaatagacagatatcatatcgagaagccttccttcgttgtgttgctcgcaatttactttagcagtgtatgctctaatctataaggacgccacgtgtatgcttttgaaacgtagttttatcatagtagattaactttttaataaaatttgtgataataataaaaacttcactaaaataaatcatagcaatgaacatgatgacattgccaaaaatttatttcaagaatctcctgttataaaaattttacaaaaaaaaaatgttatatacaacaataagtcaagatacacatcagatacaatccaaaacaactcctaacaactcaatcgtacaagtcagataagtcaatatgtacatttgtcggagaagattgtcgtcttatggttgttctagtatctatttgcccttacctgcaacataaagcacccatgagtcgcgagactcagaaagaaaagtaattaatagcataaatcagatagataatcaatccaagttaaaacaagagtaaggcccatactaattatcataagtataacaacaatccataataaacaagtaattgcctcatgagacaaaccataaacatcaatacataggataaacgttctagatgtaatctaataaaacattc

SEQ ID NO: 53678 - DNA, 1280 bp, Cannabis sativa
taatcacttaataatcgacgcaatgtcattggctaaagcgaggtcaacacttattgcttcgttaagagattccgggtaatgaagaactttgggatgggatcttcaattcaaaagaaactgggtcttgatgatcttgaagctggcaaatacagtcggatgaaatatgaagaaaaaaggtgaaagacaatgagggcatgcaaagaaggagttggctgagagattctcaaaaccagaaaaggtttgtgggcagaaatgtgaaaaataagagggggtttgaaatttatacctaaatgatagtaactgttcgatccaaagaaagtttatcaaacggatgggaattgtatgagaaaagaacagtcggagcattaaatgaagaaataattcacctcaaagttttgaactgccaaaatgaaaggatgcaaattttaaatggaaatagcacccttgaaggcatttaaaaagttatttttattaaaaaaaaaacacttttaggggaaaattgttatacctgaattttggctaataatgagacgtcgacacttgtacataattgtattataaactagcccaagctgtgcattactaaatacacaataaataactcgcctcaagaataacagttaatacaaatattcaaactcgtccctgcctaggcaaaagcaagatgtgaataataactataaacaagtaaatttggcgagacaacaagtccatcttggggtgaacaaaatacgtaatgagagttgctctagacgaatgaacaaagagcttgtaacttattgacccacatacatgcaagagcttgaacctaattgacccacatacttgcatgtccaaaggatgatattaacattcattcatctcgctcttaacacgttgaagtaaccatctcgcttatacctcactcaaacagttaagaaaggctgcaagatgcatcataactcaacaattagtatttttctacaaaaatatttaagaaagatatcactggaacgacaagaataattaagtacagtcagcataactgtcaataaataaaaacaaaagagcatttatctaatattatcccatatgcataataatgaaacgtgggggatgttcacgtttcatgagcggttatgaatgaatagatcctaagggaataactatcaccctatgtatctataaatagggacagaatttatggtaacaaggagggcaaatctagagagaataaataagatataattgatggaaattattttacgaggatcttagatatactcacaagtatgttgatt

SEQ ID NO: 53679 - DNA, 1133 bp, Cannabis sativa
  modified_base (33)..(41): a, c, t, g, unknown or other
atcaataaaataacagaagtatttttcattcannnnnnnnngttttggttcatcttatcaattgtttatctatttgatttatagataagcttgtcagtggtttgattcgagataagcttgtttggaaaagggtggcatcgggtagtttttctgtcaaagaggcttattgcttggataatgaagatcggtttgggcctgtgcttccgggatggagcttcatttgctctaataagcttcacccgaggatgggcctttggttatggagaatgtgtagtggagtgcttcccactcgtgataaaattagaagtgggaatgaaaatgaatgtttaatttgtaactgcatgcccgagacccctaaacatctcttctttgaatgccattttgctagaggtgtctggtttggaagccctttaacagtgcggagtgatgagatccaagggaataccatccttgatatggtggttaacctttgcaaagatcgagatggggggagtttagagtaaatccttgtgtgctgctatgttatctgtgatgggatttggaagtatagaaactccctgcttcatggtggtaagaagctggacttaggccgctttatggatgatgtaaatgcaaagtttgaggagtttgttgctgtgcaaaatgaccatgtgagcgatctttcagacctttcgaaaggtatgatggaagggactcccttcaattcaaatttcatagttacggatggtgccttcaaagatggatggtgtggaatggcgatgatggggaatgacccaagggaagagaagtggcacacaagagcgaggagtgaagaaggcaaatctgccttggatgcagcgctgaaggcaatcggctttgccctggagtgggctgctgggatgaattggagaagcctaacaattttctcagattgcaaaatggctgtcgaagctctgcaacaaaggaaacttccggattggagggtggcaaactcgttctttaatgtggtggacaagctgaatttgtttgagttgtgtaatcttaagtttgtcaagaggaattgtattgcttttgtcaatgacctggctgttcaagcgagggtcttgaggctagctgattattgctgtaacggggaaggattgcccctgtcaatc

SEQ ID NO: 53680 - DNA, 1545 bp, Cannabis sativa
tggaggcttgaagcggggacgttacatggtcattataagagattatgtcaatatcaacttaattaggtagaaagtcattataaaacatatatagtgtctttgtgattaatgtgatttttagttacaataaaaaattacttgcaattaaaatatagtatttaaactcaagttgtcaataatttagttttagtcacaataagcagggacggacgtaggctatcatatgaagaggccatgccccctagaatatattacatgtaattggtttcttttgataattagtataatgacatctaaaattataaatatgatatgttctatagattaaattttacttatttacttatttactttttatgaaaatctatttgcttccttttttgtcttttaagatatcaattatcttctttaataatattaatttgtttttgcaagatatgccactttagatttttccaattgtatacaaagtgataatttttattcttattcttttaatttttatagctaccacaaagtcattttttttcaattatgaacatagtgaagactacactctctaacaagataaaataattttttaaataattatttgttagtgtatattaaaagagaaattgccaaaaatttcataaaaattcactcgatgacttttatgatatgcaagaaagacgttttgtattttaattttaactataaatttaataagggatatttacggcaaaatttccttaatatttgtagttttattacacatatgatcctaattaaaaaatggcggcaaaagtatcttattttacaatttgattgcggttgtacccttaactgccaactcaaaaacacatattgatatgttattggataacatattaaaaactattatttatcttattttttaattaaaaatatacaaatttgaatagaaaaatgaaattaatttttttaattagataaataaaagttttttttagagaaaaatataaaggttttttttttttatttaatatatgacccaataatctgttattaagtaattttgagttggtacttaaggagcttagttgatatttaaaagtacgactgcaataaaaattataaaagaaagtacttttgttaacactttttttattagagtcatatgtataacaactacaaatgttaaagaaattttactgcaaatttcttaatttaataaagtatttttgaaatatttatcacttaaatttataatataatttggcccctctaatttttcatcttggctacgcccctgacaacaagtattgtgactaaaaatatatttagttacaataaattaatattatataataaattaataaataaaaaataaaataaataactaaagtgaatccttgttttatataaattaattttgataaaataaatagctccataattaatatatttagcaaattacatgaacaaatatgtatcgttatattgtgaagcaaatactagcaataaattacgtgcgcgagacacgtatactaaaatttatgctaagtattttttactttatttaaa

SEQ ID NO: 53681 - DNA, 1263 bp, Cannabis sativa
caactccaaccaccacagcttcaaccaacctacaagttttctaagtctatcgagtctaataaaactaagggtcaaattttctctggtgttgctgttaaaaccagacctggtgtaaatcagttacatactgataagtctctagtttctaaaggtgatgtgtggcataggagactaggccacccatcaccgaaagtgttgagtcaagtcctaagttcatgtcatgtcaaagtttccaaaaatgaaatgatccatttctatgatgcttgtcaatttggcaaatctcatgcacttccttttaagaattctaatagcaaagcctctaacatccttgaccttatacacagtgatctatggggaccttcacccgtggtatctaataatagtttcagattttatatacacttcatagatgattgcacctattatacttggatttatccactcaaaaccaaggccgaggctagtactgctttcctacaatttaaaaactttactgaaacacaatttgaaaggaaaattaaaagacttaggactgacttgggaggagaataccaagcacttcaagacactgtcacaacccttggaatagactttcatcacccatgtcctcacacctctgctcaatggcagagctgaaagaaaacataggcatattgttgagatgggtctcactcttttgccccaagctcaaatgcctctcaagtattggtgggaggctttccaaacttcagtctatcttatcaatagactaccaacacctatcctcaaccataagtctccatttgagtgtctatattctaagaaacaagattatgcctttttaaaagtgtttggagttgcatgttttccatgcattaggccttatcaaactcataagttttagtttcactctctcaaatgtgtcaatttaggctatagtgaatctcacaaagtttataaatgcctaactctcacgggcaaagtttacatttccagaaatgtggtattcaatgaacttgaattccctttcaaatcttgatttctcaataactatgcctcagaaaaaccagttgttatacaaagctcctcctggtctgtttttcccactttttctctgcccacaggtcatatttcagcagcctctcctccatcctcgagcatacctggaagagaaccttcaacatcaacacactctcaggtacacactactgatcctacattattttttcactcacctggtgccgcttctgcatcctcagttccaggcagtgagaggggaactga

SEQ ID NO: 53682 - DNA, 1679 bp, Cannabis sativa
  modified_base (867)..(871): a, c, t, g, unknown or other
taaaaatgtttaaaatttcgtgaaaccgtatttttgtaatttttttcttgttttaatgtttttgtgaaataatccctaaaatatacgtaatttaaatcttaatttcacgacaaagtttttttttaaaaaaaaaaatgattagtgatattatatatatgcttctaataatttgtaggattcattataattgcactttcctaactacaaattaagaatattatatatatctatcactaacattattttttaaaatatatgtttggaaataatatataaaatatattttgaaagtaattattctctaattaaactcaaatttttgttaaaatattttttaatataatttttatatatagagagattaatataaaatatgtatatcaaaatacatataacaatgaaatttattttttattgtatatataaaatatgtatatatatataatcccatagagcacacaccaatgtagcttttaattttttttttcaaagatcaaaatctcaaattctattttaaaaattaaaaaataaaaatgcattatctaattaaaaaataaaacatacatatattatacttaatattacttaattaaacctaactaaaaaaaataaattatacatacatatatattatgagatgtagttacaaaattgtgttattattattatttttatatttctccatttttattttttagttttacagtttaaaatagtttttttaattttttttttgtatttttacagaattccacacaaaagcccctatagcaactaatggagcaatctaaatcgcaattaaaagtcgtataacaaccgacatagaaactaccggagcaaccccaaccgtaaatttgaaaaaaaaannnnnaaaaataatatatgaggtaattccattaaaaattattagtgtcaaattgaacttttggtttaataaatatcaacaaaagtaatattgatttttatttatttatttgggattattttataaatttacaaaaataacaaaaaattacaaaatatgattatacgaaattttaaatatttttacgatttttctaattgtatttataaaaatacagtcttttaatgtatttttatgttatatattcttgttaagttgttattaattttttcttattgtgttagtgttgtttggatgttattttcttgttacttttatgtaatttttttattattttcgtgttattttacataatatcgtaaaagtatatattaaaaatctttaatcataaaagtataaaattttaccaaaaaaaaaaatatatatatatatattttatgtaattatatatatatatatatatatattttgtgtgtggcccataagagataagagaagatcatgatattaactcatttattattattagtacctaggttgttatatgtgtgtccaaaataattgattgaggtgatgatcggccaataatatatacacttcctataaataccactatatgatcatcaagaaaaagcatagaaaaacacacatatataaatatatatcaatagaaaatgatgaagagtttaataattatactagttgtggttaatagtattggatggtgctatggtactagagtagcacatagtgttactattattccaagtagtaatgatgaatgtaagaaagaaggtcaatattgtagtgcctt

SEQ ID NO: 53683 - DNA, 3094 bp, Cannabis sativa
ctaaaccatgctcccaaactttgatatctaccaaattatgcccttaaaactaaactttgatatgtactaaatcatgtttcatgaactttcatttattttaaattttttttattaaaattagacaaaattctttaaatctaacaaactcaatagttcaatgaaaatttttaacacaaaaaaaatttagagaacataatttggtacatgttaaaattggagaagaaaaattcttaattagctttatttatttattgataggattattattattattattattattttgtattattttaattacgcgcctttcccttattttagttttaacatcaaaaaccctttgcgtcaaaagtccaaaaccctagtaaggactaaaaccacagagcctctcttctctttctttctcaatcacaactcttaccaacttcaatggcggaacatcaactctccaaaaccttccctgtaaaacccaagcttaaacctaagcccagaacccagaaacagactccggaatccaagtactggtcttccttcaagtctcaacaaatcccaaacctcatctcctccattacatctctcaccttctcaaacactccctctcgccctttcgccgctacccactccgcctctctcaccatcttcagctctcaaaccttctctaccaccaccacgattacctccttctctgatgtcgtcacgtcagcctcgtttcgctgcgatggtctcctcatcgccgcctctgatctttcgggtctcgtccaagtctttgacatcaaggggagaactccgcttcgtaagcttcgctcacactctcgcccagttcgattcgttcaatacccattcgccgataagctccaccttgtatcgggcggtgacgacgctctcgttaagtactgggatgttgccggagaaaccccaatttctgaaatgcgaggccacaaggactacgtaaggtgcggcgattgctcgcctgtgaactcggagatgttcgtcacaggctcatacgaccacaccgtcaaactttgggacgtgagagtagccgattcaaaatcggcgatcagtataaatcacggatatccagtggaagacgttatattcttaccttccggtgggttagtggcgaccgcaggcggaaattccgtgaagatttgggatataattggaggtgggaagatgctgtgttcgatggaaagtcacaacaagacagtgacttctctttgtgtgggaaaaatgggtaaagatagtggagaggagtctcagcagtatagaatcatgagtgttggtcttgatgggtatatgaaggtttttgattatgccaagatgaaggttactcattcaatgaggtttccagccccactaatgtccgtggcattttcacctgatagttcaacgagggttatcggaacatcgaacgggataatctacgccgggaagagaaagaccaaggaggaggctgaagagaagaaagatttgggtggtttcatgggttttggaacggtggaagaacctgaggtaagggcgttgaagtcttcttatgtcagatacttccatagagggcaaggagagaagccagcagagggagattacttggttatgaggccaaagaaagttaagttaggaaagcatgataagctattgaagaagttcaggcataaagaagctttggtatctgtattgggtggtaagcatccaggtaatgttgtggcagtaatggaggaattggtgtctagaaagaagttgttaaaatgtgttatgaatttggatacagatgagcttggatctctgttgatgtttttgcataagtattcgactgtaccatcttactcagcattgttaatggggttgactaagaaggttcttgagctgagagttgaggacattaaagcctctgtgactttaaagggtcatattagaaacctcaaacgttctgtggaagaggagattcgaatacaacattctttgctagaaatacagggtattatttctcctctattaaggcttgctggaagaagatgaaaattttgattccattttttcctcttatagccaagggttgttgctcttttttacttgctgcattctttttcggtcagttttctttcacccatttcacaagggaatttcaacaattttgtttaatgggtttaactcatgcaaactttatatcttctttggtaattgttctcgtatggatagggatattggcttttggttcttttacttttcttaatcctgttaacaaccgagaaatattatacatctgtatgtttagttaatttaatccatgaattgatggttactactagaatttcttttgacaagaagacttgtaatttgcgttgttcatgagcaaaataacgagtgtaatttcaattctaataaatgaagaaaaactgtgttaaatttggcaagtcttttaaattagtattgtacattcaattttaacaagaacaattataacattatatgtgagaaggcaatctttaacaaatagtaatattagaatactcgggctaggcccttgaaataacaaattaatctacaagcgaaaacaagaaatgtatatacaagctattcaccccaaaaattctcaaactccattcccattaaaatctacagaatcgcttttcattacgttcttcagtcttcaagctacggtttaaacgttccatctggggagaaatttaagaattctgcaagaacacaaatatttcagcatcagacaatgatatggtataaaaggaataatggtaaatcaatcaaatgtaccaccaaaatataaataaagaaattaattacattatatcttaacaacttcgtaggtatagattactctgaaaacttgttaaagtaaaaataacaaaaaaaaaaaatttaataaacctgttcctgtatatattcatgggtgtaaatgtcatcatagtaaaaatgctggaaaaagaaaaagaaattgcatggatatggtattaacccaatttaaatttaaaatgtaccataattcctgaacagttagaaagaattaataagatcattattcattttaactttttaaggagagaataataattccatttgtcctttttagacttatgca

SEQ ID NO: 53684 - DNA, 1942 bp, Cannabis sativa
ttctcgccacatttctcacgtgtccacctacttcttttctattttccacatgcccacatatttcttctcacctatttcttctccatttcccacaccctaaaacagaaatctttactccccaaaaccccacccacgcctccgcaccatcgccctcctctctcgctgtcttcctccctctctcgatcttcctttcttctcgtctctctcgcccatcgatctccatccacccctcctcccatatgtctccctctcctctctgctgcatacgtcggacaaccaccacctctcgtcggtgtctctctgaactcattctgatacgtcgaaccaccaccacctcccgtccatctccctctctctctttctctctctccgagctcggtataaatatatttatttatttataaagttattttatttattttattaattatatatatttattttgttattgtataaatttcaattgtttaaaagttagttgttattttaataacattaattaattgttttattttaatttaagtaatattataaaactaatgcaggaaaaaaatgtggaaaatcgtcgcctataatagggtataggcgacattttttaaccgtgccctatactataggcaacagttttaaactgtcacccatagtatagggcacgatttaaaaccgttgcctataccctgttataggcgatagttttaaaccgtcgggaagttcacatttgcaacgtcccctattttaccagttttgggacggtcgtataggcgacggttatagaaactgacatgaatactttaaacgactgtttaaaaacgtcgagaaaaaccatttttgtagtagaaataaatgatatattgcaaaccgactccactttaaatatttttccaaataattaaattgtctatggacaatattaggtcaaaaattaaacctttctcgtcaaaaaggaaaatcgaagtagcacttgtaaatgaaatataactcataaacaaaaaacattaagctacatgcatggctgaatacctaacgacttgcattatttaggcatgtattataaaggaggtaccaagattccttgaataagcaatcaagaattatacaaagtaattcataaaatgaattattcaaagtacgtttaagttttcttactaagttataaatggcagattataactactcgtgtaatgtagaactgataaaactactctcgaatataaagcatagtagaatataactactcgcatacatacatagtagattaataactactcttaagcaagctcaaaggaaatacaaaatcaatggaaatgcttacttaaagtatcttaagtttgatcaaaatataattatttaagttgtgaataaaaatgtaaataagcaaacatattaagttcaaacataaggatgcgaggaaataaatgaaagaaataaataaaagcaaagttggccatccaacaatgcaaatttgtctttacaaaaatttccacaaggggcaaattattttttcggccaaaaggccattttcttaaatatataaaaataagttcgaaatctagcctacattgtaggtgacttggacaaaccttcttgctccgcctcgacctcttcctcctcaccaagctcttctttcctgtcttctcgcagaaggcaagcatggcctcagctccttcgtgtaaaaaactgaagcccgtgtcagggtttgccaaccaggcctgataaatgcttctcttggcaatgctattgaccctatttttggtgtcagccttcgtctcttttagctttttgacatgggcagtctagagagatttgataaaatcctcaagctccttgatcttctactggttaggtagacgttgcttttcagcctcttctcttgtgcaaaaaagctcaactttagagtcgtttgacttttttgccatggtgtccctatgctctctggtctggc

SEQ ID NO: 53685 - DNA, 1535 bp, Cannabis sativa
  modified_base (69)..(72): a, c, t, g, unknown or other
  modified_base (1471)..(1476): a, c, t, g, unknown or other
tataatgttaattatatataaaaataaaataattatttattaaagaaatatatttattaattagtaaannnnaaattttattgtattttttattaaataaaatgaacatttctatatattgtatcactatgttatttatttttgttcactatcatttatatatacactatccacataaaattaatgtgtaatatatatatatatgttattgttaataatataaaaataactcagttaatagaaaacaatttcacagactaaatatatatatgtaatattttattataataaatgataatattattggtattaaaatttatttattaattcaaaaatgcaattcaaaaatgctattcaaatgaatataatagaaggtaataattcaatcctacattttttttttcttcaggtatcaacattaccctcctcaagagtagttatattacttgggggaataacattccaagactgaaccctaaaaacaaacaaggtaatatttcacattaattaccattctcttgctaccaattccaaacagctcctaagggtacctcgttacctttatttaattttctcatatttttattttaattttttaaaataatatataagattcatgtactcaatcaaacagtgtaatttaattaataggaatatgattacatactaccctacacagccaaacacagtttccctataatcatattctccttaataatattccctataatcaaattattttgaacacctcgtaagtgtgttgggcgaagtttttactttaacaatacaaccctagtcgtatcttattttttcgacaaatatatgtaagtaattgtgacttttagttttgttatagcgagcctctcatggaatatttttgtaaaagaaaaatatattaatattttatatatataaaaaaaaaacaagatatactaataaataaaattaaatctagtgaactacgttagaggccactaatttattaattattttgttatgacttgtgttataaaaccagttagttagagaagtttcactaagtacactaacagttttgttagttaagttaacaagctagctagattagttagtttagttcgttagtgtcatggcacaaagttctttaggatagactagattagtttatatcctagagacaatgctttttgagtcctatttttatgtaattactgaattgagagagagagagagaagaagggttgttaaggaaagattgtgtttcttatcaagctattcccattggtgaggttttgtaaggagtcaaactccattgtcttgtgcttattaacaacctctctctctagctaccacttccttgtacacattgcataatcaacaaagctaagttttctctcaagttcttggtgcattgaattctgtccaattgctttttcactacaaaaaattaatatttttagtgataaccttttaatcacaacataaatttttnnnnnntaaatgtaacttttagtcataacaaaaagttacttaacgtagtatttagttacaagttg

SEQ ID NO: 53686 - DNA, 2074 bp, Cannabis sativa
attgaaaaaaaaaaatgtgtgtgataatattattgagaccttattggatgatcctgtgaagtctaaggatacagcaaaagcacgaatggacttggaagatcttaaaattcgagaagaactttggttaagaaagcgcaacggtaagtacgataagccatgccaattatacattaactaaagaagaatgcgcaagcttttgtgattttatcaaatctgttagactaccagatgggtatgcttcaaatattagtcgatgtgctaccgactctaatactcttgtaggaatgaaaactcatgattgtcacgtgctacttcaaaagatatttccagtggctattcttccttacttggacaaaaaaatacgtggcacattgattgagttctgtcagttcttccaaaagctatgtgccaagacattatatgccatcgagattgagaaaatgagatcaggaatcattatgatattgtgtaaactagagaaaatatttcctccatcattttttacaataatggttcacctttgtgtgcatttgcctgagcaagctctattaggtgggccagtatgtggaagatggatgtttggtcccgaacgacgaatgggtacatacaagaactatgttcgtaactttgcacgtccagatggttctattacagaagcatatgttgttgatgaggctgtgacttttctatcaagatatatacataatattgaaacaagtttcacacgcccagagcgtaattgggatgtacctacctcaaattattctttagaaatatttaacaataaaattcgaatgatgggggcttctacatttgcaaggcttggggcatatagccagatagtgcattggtacatcctaaataattgtggagaacaactggataaatacctgaggtgagccattttcactttcctaattacttttaataggacatttatttttagtatttaaataattacttttcactcaatatagtgagcacaaagaattattgcgttcaagatatgtaagagaagaagatcttgaagctgctcataaagaggaattcttttcttggtttaagaccaaggtaaattatgtttgatattaagtttattaagtcatcaaatacatttattaaatggtgaaataaatattacagatggcaatgcttaaggttaatggcagtcaagaagcaacagatgatttgtattctttgtcacaaggtgctgatgatcgttacacatcatggaatagttgcattataaatggtgttcgatttcgttgtaaaaaacgtgatgataagttcaacacacaatgtagcggagtttcaacagggggcactgaagagagtggaaatattacttattacggtgttttacttgaaatcttagagttggactttatttatcatcgaaaagtttttgtctttcgatgtaaatggtacaatactgatccaagaagtaaaacaatggcaattgatcataatttgacatcaattgatattacttctaattggtatgttgaagatccatttatcttggctgatcaggctcaacaagttttttatctaagtgatcgaagtaggggtaaaaattggatgattgtccaaaaagttaatcatcgaaacatatttgatgtgcctgagcattcaaatgattcaactgacaatgaattcgttagtgatccagaaattgtgaatcatgggatttttcaagaagaagaatcaagtgagttaccaacttttgaaccaattgaggaagtcattgagacgtcttcactagttcgacgagacgtggcaccaacaactctttctaatgaattgattgctgaattacatattgacaatggacatattgataatcgagaagaggatggtgattttgatgataatggaagaatgtttattaatgatgaaacactgtatgagtatttgagtgaagttgattctgatagagaagatattgatattgatgatgattaggttaattgcttttttataataaattcttttaattaatatcatttaatatattcttattttattcataatacataatatatattagaaatttgattatcataatctgttt

SEQ ID NO: 53687 - DNA, 994 bp, Cannabis sativa
ttttgttgccttgggctagccatttagttctggctcttcgcttccactacgtctcctctttgtagagaaaaaacatcaagcggggattagatatccttgatatttccaatcgtacgatcatcccaagtggtgctatttctagcatgctcaaggtctttttcaagcctattgatgcgatttttgaactggaaatctttattgtggttccaagcatttagctgattagcgcagctggcttgagttgcaaggagacgcggaatgtctccatatgggctaagaggattagcccaagacgattccaagttcgcttccaattcggttccgagagccaaacattttcaaagagaaaacgtttattaggacgatcagaagggggaatggctgtgctggtggtaacaagctcaagatctcggttgtccgacgcgaaaaaaccaagatgagtgagaagagcatcagggaagagatcgatccaagaagagttaacaataccccaatcaatacgctcctggatatttcttggcaaagccacgttgttattccaagtaagcagagggcctttcaggtctagtgaggttagattaaaggaacccaacaagtgcctaaactcagaggaaggacccctgtcagggttaccccctgcttgtcacccgaggttaggaaagcactgaagtccccaatgataagccaaggatctctggggttatcattccctatcctattcaaaatcttccaagtgtggggtcaatgtgactcaataggtgagccatgaaaacaagtgagatggaaaaaaacattattcaaagagagcgacacataacaatcaaaatgactaatagattgagaaagcaaagttaaagttacatcattagtccaaaataacatgaggcccccacctctacctatcctaggaacctccaaaccggagtcaaaatggagcttaactctaagaaaatcaacaacatttttagcaagtcttgattccataataaacaaa

SEQ ID NO: 53688 - DNA, 1497 bp, Cannabis sativa
ttaatattttttattttaattcatatgaatttacattatttttttcttatgtgccttttatggcttttgtaccattttttatggcttgcgcttgtccctatttgtttagggtagttttgtgatatgctcaattggcaagagctagaagtaatttattttgtgctcatgagttctatttcaacgaccttttcactttaaacagataagtatttcaattttatgtccttatatttaatatgaattgatttattattgttctttcacattatcttttttcattatatggtttggtaatagagtttattttttgttattttgtggagggcctataacaggaaatttactcataactttaattttaaatataatttttttgttttttttattttcaacagtttatattagggtgctagtatgttgttactagccaaagggtaatacttttggctagttattcttaataattttgttgttttttatttttagtaatgttgagctagtgatatgagttgcgtgttaatttttaagtttgtatatttattttattttgaagattgtcattctaatataactgtattttgtggtttggtgttgcattattttttcaatttcgctagctctggagacaattatgaataatgggaaggtgttttttaatgtgatgtggtgctgttttgaaggcatagcttgattgtctaaattttcaggggcagttttgtcccatgtagctcggaataagaatttttaagcacatggtttggcaaagcatgcccttcggttaaacgatgagctatcctggttcgaggaggtatctccatcgattgtggattgctgctttgttaatcattatgtgtgatttgatcaccgcatccaaaatatatatatgtgtgtgtgtgtgtgtgtaaccatgacagaccaacgcgcgtgtatactagaggcagttgcccccactcagaaaaaaaaaattctttcaaaattttataattttttaacattttttagtttattttatgttatcttttgcatttacaccccgctttaatataatgaggagtactagggaaactctcttttgcactctcttttacactctcttcttaattgagtgacatgtgtaaccttctaaattatatttaaaaatagttacaattatgccctcatttagtttttattattgataatgctagggaaactatcttttacactctcttcttaattgagtgacatgtgtaattttctaaattatatttaaaaataattacaattattataaaaaagaaagagttagtattttttatgttttataacataaaatagtacatatgtattataaaaaagaatttaaaagaaaaatgcatagtggtatatattatttagtaaaaaaaaaaataggaaattaataaaatagtccaaaaaaaaaaataaacaagtaaatgagatgacacattttaattattaataaaaagtaaaaatagtataattgtaactatacttaaa

SEQ ID NO: 53689 - DNA, 1894 bp, Cannabis sativa
  modified_base (45)..(51): a, c, t, g, unknown or other
  modified_base (762)..(770): a, c, t, g, unknown or other
attgataatatgaaccaaaaaatatacaaatgaatgaaaaatacnnnnnnntctttattgatattgaataatagagattacattaaaatggagttttatttagggcataaaacccaacaaatgagaggttctgtaaaactgacgtattgtctaaaccctaatatttacccagatacatttcgaccctaaaagttactaaaaccaaatgagatgaaaacgatataaataaataaggcagcaattaaactcataaatataatataacaaacatgtgagatattaagaggaaaagccacttactgtttgaggttggggtttgggacgatgaacagctctgcgatctgcaaattcctgaacgtagtgaggatctctccgagtgcgtgaagtcgaaacttaaatcagatgaaactcgtagaaaaaatgttaaggacaaagatggcatgcaagttttcaagcgaatccggtgctggtttttcaataaataagcttgaaaaattctcaaaatttctaaaatggaaaaaataatacaaaggtggttcctttttttctattttatactcttggattaatttctatcaaatcaaggagatacttgatcctacggacagaatttgaaatcgaagtagaaaggatggtcatttaatgttgattacctcgaaacaacaaaaccgccaaaataagaggacatgcattttttcaaaggggattatgacaaatataccctttgtaatcattaaaagcactttttattaaaaagaactnnnnnnnnngcaattgttatacccgaaattcaattatcattttagaagaggacacgtgtcaaactaggaagaatacgaatcaacaaatgtaatgataattatatttgaaaatgaaataactcattaaatacagaattgacagagtatatttacaacttgctgaccgtaaagtcttacgcaagataaagatatacaaactattgccttatgcattaacgagaaaccatacgtcttcagatgtacatggcgaggcatcaacctcgctacacattaagagacgagacacaatgattggtaagacacttagtgtataatacacattgtacaaactaagtataacagtcgagcaaatccaaaacaactaatagcaaggcacccatcttgctataggaaggcacgctcatgatatcttcactaatcagcttttaacacctttcagtggggttcttagccccgtcgagtcagctctctcagacagaagttgacatacaaatgatatcggctgctgaggttcactttgtcaccaagaactgcaattttcagatggagtattatgtcttcaagtgcaagaatgacgaggcttatattatcaatctcgaaaagacatgagaaaagctcttgctcgctaccaaggttattgttactatgttcccagcgagacatcccagagcaatacgatttacaacgtatttaatacacgtttatattgacccggtaaaagcgaacctatcacagatgtgtgattttcaaatattaaccacatttattttacgtggtatgtaatcaaaccccacgatttcaggggataattgctgtaagatatccgtcaaccatgtaattaactgcactcctatgtaattataaatgggagcaggtgatactaaaaaagggacggaaaaatcattagagaaggggcctgagagctatatcagaaatctaataagattgactcgtgaactatgaataattttaactgtaaaaccacgtaaaaacctttgtgttcttattttttctttaccatttttaatttatgtacaagttaaccataactaaggctcaaatatagttaacgaaaaatctgtgttaacacattagatgaatggtttataaatcatctgcttatgatgtcactc

SEQ ID NO: 53690 - DNA, 1051 bp, Cannabis sativa
ccctacttgaaataagtagtaacaaagtgtatattgacaatcggatccatcaaaagatgactaatgtaaaatgcaacaagacattagtaataataagaagaagaaagaaaacataaagaacaaagaaatagtaatataattataataaggaactttttattatttcattgatctaacaaaaaaaaaacaagagaaatatgcaagagagatgcatatatgatcaagagtagtgttgatcaaaatttgggatcaatagtagtactagctactattgactttggccatgaatattgtaactcatacttattaagacgataattaaatagatacaatccactgtttgaaacatcccaataacatttgctatcatggcaatcatatttttgggcatcaaaaacaacaaaatgacctttgagatctcctttacttgtactcatatcacaatagaatagagtagttctaaagaaatttatgttgaaactccaattgaaattatcaccatatgacacaatatgagtcccaagatcatcatctgctgatttgcaatgaacactcactgttgtgtttacatctaagaaattggttatgtaaacagtgtactctgcattcacacatgaatagttgttcatgcacaataataacccaagaattacaccaaaaatactaatgctattattattcatcctcatatatattattattctattttgtaatgtggtgttttttgatgtttaagaagaagatgtactttgtatttatactgtaaaaaaaataaaattttatgtaattatattgagattccgatgcaatatctttattaggaatgatatattaaatgtaataaaagcatatattttgcatactactaattatatcaattcaccataaattatttatttgatatataatatatgagacattattattagtcgtatatatatggtatgatttcgctataaaaacgatagaatataatacatttattatcatatgtgtaaattaccaactatatatatatatatactagtaaaaaattacgtgcgaggcacgt

SEQ ID NO: 53691 - DNA, 845 bp, Cannabis sativa
ctctctctctctctctctcctgacccaaccaatgcccacgaccacagaaccagactcggaccaaatccacgaccaccgcaccacctccggcaaaacttactttgaagatgaaacgtagaacaaaactgaggaggatatcgcaaaactacgaagagaaattctgaaacccaaagccccaaaatctataagttctcaactcgcttcttttatgtatttttttttttctagtttttgacgatgtcgcgaatcatcgcaaaattatgaaacatgctaaatgtctccaattcacaacattgcaaaacacattgctaaatatcacaaatcattgctaaacattgcaaatatcgctaaatttcatccctaatcttaaatttgttctatcattgcaaatacatcgcaaaatattgcaaaaaactggtaaaccagaaggcagatatgcaaaaaacgagagaggtcgtgagagaagatgatgtcgaggccttgcgatttgggttttgggtctgtgtgttcgtcggtagggattctaggttggcgttaacgccagagagagagagaagttttttttaaaatgtaagggtatttttgagaggaaaaaaatattaaaagtatatatatactatttctaatttggtgatatattaaaacaatatattttacatttaagcatactaaatcaaatttcccttatcagtttcttcacattaggtgtttgttccttcacattagtatgaaagaggtcacgataaatttgtgacaactagccaatttttttatatgcaaggtccattgcaaaatttaaataaataaaaaaaggtgatgacattcatgtttgtctaggtcctgta

SEQ ID NO: 53692 - DNA, 766 bp, Cannabis sativa
ctaaaatatttgtattttttttaaaggaaaacatgatattattaaggaactaaatcaactgttacaggagcactcaaaaatctagaacaagcatcagtctgcaacttaactcccaacgaactagtaacaaacttagctagtgcatgggtcatgccattcgcaacacataaaatagcctgacacaaaccaccaccaacaacagttaacagaaaaataatgtcaacaataataggcctaaaagcaatgttactacttggggaattcacccaattacagacatacaatgaatttgattccgccttagaaataataaatcccaaattggacactcatcgcaaccccaaccgaagagccaaaagctctgcaacatcaacccaaaaaattacccacaccaccccattaccatccctaattaccccaccaaacctcgcaaagccctgacctactgtaatcgccacgtctgtagacagagagaaaaattcccattgtggatgaatccactgacataccacctcccgtctccccccacccctctcacacacaccaatagtaactgtctgcatcacccctaccccagcatctcgagctcctccaccagccaaaccaaacctcccaacagctccacccccatagctaccaacacaattcagcccaagaggacgcaccccacctgaataacctccccttttggccacgccagcaaccaaaccatcaatatcagttgcataaccaacaccacaaaaattcataaatactgcagctgcca

SEQ ID NO: 53693 - DNA, 4079 bp, Cannabis sativa
  modified_base (4036)..(4054): a, c, t, g, unknown or other
aagatctttttcttttaataattcgtaaaaattaattcaaatattaaaagataagaaaaaaaagttttgaatgactaaaagaataaaaaaaatactgaaattttaaaattgattaagaaaatttaataaattattttttatttaaaattcatttagacaaggaaaaaaaaaaagctacactaaaattaaatttcacgggaaaaagcttcaatatgttttatcttaaaaaaaattaagtttgtttaagtaaacatatatattgagttattttttttttaattttttttaaataattttatatttttataatatttttaagatactgtaaatataattaaacttgaatctttatattttcttgtgatgaaatatagtttgtttaaaaaatttattagttttttaataattctttttgttgatttttttatcagaatcttttttgttgattttttaagatatgtgtttgtgaatataattgtaatgccctaaacttaggcacaccacagtgtcatactgttgttgtgctaatcctgataacaagagtctaatgagccattgtatttaaaatataaaagactaaataactaaaaacaaacttgtttcataaactttaaaccaaaatgtttacaatgttcgggatactgtaaatttttttacaaaaactagaaaagtctctctaagcaaaaccaagaaacaaaaataacagtagaaaatttctgaaaccacgctcggggggcctaattaagaccatacaaggctctttttagcttgcaaacctctccttacttatgaggcacaccaagaggaggaaccgtgtagaccttttcatgtaagtcaccattcaaaaagacattcttaacatctatttgagatatagtctattggtgaaccgattccattgctataagagtgcgaataatagtcatttttgcaacaggagaaaaagttttctcaaagtctatatcatactgttgtgaaaaatcattagccactaatcgagccttgtactgttcaatagacccatcaaacttggtcttgattttatacacccagcgagaaccaatagcatgtttactaggagacaaaagtaccaaatcccaagtatgagtcttttgcaaagcatagagttcctcattcatagcacgctgccaaaggaggttaataactgcctctctataggacaaaggctcagaaaagacaatgaatagataccaaaaacaaagtaaaagaagcagaataagaagagtatgtaaaatttggttggtcagtagagcttacgaatgcattaaggatagcgacgaggaggatccacaatcttaagatgatctggaataattacaggaggaggggggagcgttttcaagttgtgaagtatcagtatctaatggagaagcaatttcaagttgcaaagtgctagtatctaatttttttttttatgaataaaaaattgtattagcacaaaaaacagtttgcatacacccaaatagcacccaataagggcataaaataatcaactttacattttcacaactatatcttttagttacattttatttacagtgtttgaaaccacctactgtcttcatccgaaacttttttaggccaaaacatctcaattatgagcttcaaatccgattttagctatttgatcatggtgacatggttatgctcttcttttttccagaatagcttatttctcagcagccaaatgttgtagacaaggctgcaactgtgtaaaccagcttcctgaatttgctagctttggctttcccaagccatttgataatatgtgattgtcctccaacctaactagatttttgaaacctatcaaaaggacgcatgcgagagtaatgaagaggaaaaggaactgtagaattagtggatgattcagactcaaactcaaagaatgagtcaatgtgaataaaatctgattttgtcaaattatgagaattactaagaatagaaaaggataattgccaatctatattccacatgtgagttaaatgaaacgtgggaattatccacgtttcatgagcagtcatatttgaatcaatcctaaaaaggataactgctaacctatatttttataaatagggacaaatttgtggagaaaaagagagagcattttggagattgaatgattattcaaaatcagatattgtattatgtactctaaaaatgtcgctaataataagtacttatggagtatgtagattttaactacaaaatcacgtaaaaatatttggagttattttatcatttattatttattaatttatgtaaatgatgtattactaaaaggctatttattttttattaaccaaaatctgcataggattatgactacgatgaccgctactttaacgaggtcgtctatcactaagaatttttccacttagtttggaatcccagtaagaaaagtgaatcttatacttatagttaccattgggtgcctatatgcgatatagttagggatgagcatttgttagagttattactcttagttgtttatatgtgagcataatttatttgataatctcaatcacataacatattcttaaataattagaacttataatttggatataatgatagagcttttcacaaattttctaatggtgtaaaaaacattcaaatttgacattataattataaaaatttatggccaaaatacaaaactacgaaaacgaataattaggagtcaacatcgactcaccaatttctagggatagcgaagctcaaaaattttatttttaaggccacaaaactcaacaatttgacaccaccctacccaaattagattctaacatcctaacacgatgaaatatcaagttttcaacataaaagtatcatttaaataaagagattaattcaattaatcaatttctactattgttagagttttacccaaacttaagcttgtaaagactagtaattattacactaacaatttagttcaaagaatctaacccaagtcaaattacacaagcaaaaattcatcttatgaactcaatttagtttaaagagttataccactcagcttgtttcataaatttagggttcaaaccaagacaaaaattttagcaaacaatattgcaggagatgagttctagaatcttatacacttaaaaaagtataatttagttaatcataaagcatattaatcaaataatcaaattttacaaatgaactcataaatcaaagacatacaaaatgaaaagcttaacaaaatactcacctccactcaaggaaattatagataaaattagaagctcctccttaaaaattatgtcccaaaacttgaaggtttgttatttgaaagaaaagaataaatggaggagatgaggatgagaaccaaaaggtggagaaaatatatgatatattcaaggaatattatttaggctgtgttgataagtaacaatgtaattattatgagggtagtaaataaataatatagtagtacattctatttaaaataaataaacaatatagtagtacatcttatttaaaatttaatgtgtttggatataagatagtaattaattatgaatttttaatatcttatttagtaaaatagttagttacacgtaaaataataattttttttttttagtaattacacagtgtaattatacctaattcatttaggggtatgagaattagaaagtgtaattgaaacctctaaatttttactaattatacaattatagtataattacgtggttagaaaaaacacaaaactatatgggatgaattgaggaatatctcttttttgtatctattaatcaaaaacacatttatattatatttcattaaaatgtactcacttttgtgggtaggttacccaatatattattattcttcacttaaatctagcacataatttatattaatctaagggatataatatggacatcatctataaaagtagatatattttttaaaaaataaaaataaataaaataaaatgaatatctcatataattttcacaaattatggtgtcgtttggtaacttttgttttttaattttttaannnnnnnnnnnnnnnnnnntttttgtttttaaaaattttatttt

SEQ ID NO: 53694 - DNA, 2212 bp, Cannabis sativa
ttctgcacgccatttctgattcgactgattcttttcttttttttctgtttccggcaccacttcgttctttttttcccttcctcaagttaaaaattagagattttgaaagaaaagattagttttttttttttccctgataagttgagactagcaaaaacctgattggacaaacttacccttctattacagtgccgtacatacttttcaagcgaggtcataattgtcttttcgtaaagctgatggattcataaaggggctctattgccagacctttcctcttcacttcaaacgatctctccttcgattttccggcggctaccgtcaatcgccgccgtgttaatcgctccgccgctttcacttgtaagtgtacttgttttcgaatcgacaaatggtttagtgttttgcaatttgtttaacagtagttctgaccgtatattctcctcctttgaagtttaaactatatactatttttctttctattgttaatttattcaaatattcgttattcgatgtatccagtgtggctgaaattccgtgaaggcagtagacgacgcccaaaaatggtacttgataaaccccaattcgatccaaagggacttccttctcctcctcttcaccagagtgatgcagacgaagacgacgacaatgtgaaacaactcaaagactgttcttctctctacttggcattacaggtaatttaaatctatcccccaaaccctaaattgtgtaattgtaatttaaattctagaaccctaaacctagagttttttctttttccttccccattgctttacaggattgtcttgtaaacacaaataggaattggaaatcttgccaaccaggtataattatgtgtaatgtattacattttctttcctttgtttaaatctttgatatatacgtatatgtataatcgcttaacagaagttcaagcgttgaaatcatgtaatgagaagaagaagaaagacaaaggcaagtgaaggcagagagttgagaataaatttagctgaaagatatacgttaggaatatacatatgattgactcatttgagatcattcttttaacatattatgcttcaaagagtttatggccatttccttaatgagcaaatgagctctaaaggagaaaataatggaacaagtcaaatttgcatttgagaatgtttaatgcaacttaatcaatgttttggggcgaaaaactatagaaggaagtgtttattctgtattctaagcttttaatggctgaaatgggtatgtgttctttgagttttaagagatttttagctctaatagatcaatatatcttgaaaaattgaacaaaatccctcgacttacttagagctgcaaatcgaggtagggttgcaatcgggcaggcttgatcggggtttcgagacttgggttttacaaactattacactaaagccacccattttaggactaggtttttggtttgggcatgggtgtggttaagtgtgggtatgggtctaggtgtgagtcgggttggattgattgggtttgactaaggttgggttcgagttttgagttgaggaaaacacttaccaaacatgcctgttacagtgaatggtgagaaggggctttgcttgtgatgacagtgagttgaggagactgcgtgagatagtgaatgggtgaaatctaaggagagattgagacattgagagtgagacggtgagatcgagaggcctagagtgagtagataggtgttgtactcatatttcgagcagtaaatatggttgcgatacgtgtacaagaacccgaaaataagtaggctcgcatgttaagagaattaatgtgttattttaatgcatttcggataatacccacatgacttagaatttaagtctttctttagtccaaaggagtaagtcaaatttactgatcataaagtagtaggcaagcaagacgaaagacttatactatagcctcctcgggatacactgtacatacaaaaaatggcctctagagactcgtattaataaagatgagttcagcgagaagagaaaagctaagctggttgcaagattgaatgttttcatcacgagaagcacaagtgacacaatttgaaagagtttgcttataaggattatacaaaaagcatcaaaaacctcatttaagataaattcctacgagaagaatgttcaaagagccattatattattttttttagagacaattcaatataatgatttgatga

SEQ ID NO: 53695 - DNA, 829 bp, Cannabis sativa
agtcgattccctaatccgacatccatatatgtcactgtcattatctatgaagataactgacaagtagggaacctaacaacagttctggatcactgtcgttatctatggagataactgacaagtagagacttgacaacgatcttgggtcactgtcgttatctatggagatgactagcaagtagggaacctaacaacggttccaagttaatgccattatctatggagataatcggcaagtaggaaacttaacaacggttctaggtcactgtcgttatatatggagataaacggcaagtagggaacctaacaacgattctaggtcactgtcgttatctatggatataaccaacaagtagagaacctaacaatggttctgggtcactgtcgttatctatggagataaccgacaagtagggaacctaacaacaattccaggccattgtcgttatctatggagataattggcaagtagggaacctaacaatgattttgggtcactgtcgttacttatggagataaccgataagtagagaacctaacaacggttatttatattgaagcataataacaaaacatgatataacaatgtcacaaatttgtgccaaatttttgtgcaacaaaacaaaccatatgagaagttctgtcgctaatgttgatggcgatttggattatgaattcaaagtttgagtagtaggattcatcaactaacttcatgtcttcgaaactattaccacaaattgaaagataaaaaaagccaaagtgataactaacaaaagaagaagaaaacatcgatcgaaataactaacacagcctttgttctagtcggagg

SEQ ID NO: 53696 - DNA, 1005 bp, Cannabis sativa
  modified_base (170)..(171): a, c, t, g, unknown or other
aactcataattgtatatgtataaaattatttcaaagaaattatatagataatgagtttagaataatcatgttgttgttctttacaatccttgttttgtgtatttgaattcttcctggtatgaatgtgtttcttgatgctttcttgatgatttctttatgctttctttatnntttcttgattaatctttgctgcagattgtgccttgtttggctctgatacaactgtaagaatttttattccctccttaccctagagaactaatcagaaaaccaaggtcaattttagaccttttacccttcagtcaaacccttcttttgacccctgcttataaaccaaacgacaatccctatattgtttactacacgtcgtttatgacactcaagaaaaccctaaaaatgcattggtcatatataagttgatttatttctaaaatacacattcatcaactaaaagaaaaccctagccgtgagactgcctccttcttctttgttcttctctgaagaacacatgcaacacaaccctgaaaaatcccactgcccagatcgaatcaaccccaaatcgagccttattagtcttcgtggttcttcactaaagaacatgaagacaacaacaacaataaaaaccagaaattaatcccttaaaccgagcctttcccaaactatttaacgacccagaaatcacataaacatacacacataaacacaatagaaattgcagaaaaataaaggaagagataacaccagattttatagaggttcctcgaaaattgttgctaggtacatcctgttgagcttgcctcagattcactatagatctccaaaagatcaagagtagaaagttttggattgcaaaaaaaacaaaggtatgattttggtaaaccctttaattatagaatttgtttccctcttttctctctattttccctctctaagtttaatctctaatcatcttcttctccttgttttgcatgaatcgatctccctggtttggtgttgaacatccga

SEQ ID NO: 53697 - DNA, 1606 bp, Cannabis sativa
  modified_base (154)..(162): a, c, t, g, unknown or other
tgaaacgagttttatttagggcacaaaacccaacagatactagcagaatacttggataacaaatccattctaagtataatgtcaaaattcgctaaacccaatttcactaaattagcactcaactctccttcctcaattctgatcggcatagacnnnnnnnnncttttggagataactaattcctcgccaggtagtagggttccaaaccctttatcatagctatcatacggtctacccaatttatcaagaattttggccgccacataggaatgagtgaccccagagtcaaacaatacagagaaataagatttgttgactgagagatgacctgtaacaactgaggggctaccttctgcatcagcctgagtaagagcaaacacccttgttggagcaggctttgctgctatcttctgttcttctttcttgagctgtgggcaatccctcttgtagtgaccaggcaaaccacactgaaaacatcctcaccctttacactctcccaaatgatgcttattacagttggtacattctaggtaagtatattacggttgccttgaccctggttctctcaaaacctcttgttttgatttgagccaccaggtgtagatggtggctttcttttctaatcagcggtcgagtcactactaaccctaccataactagatgtaggaggagcgtggctccaccaacaacctgattccctcgagactcctgagtgcactcaattgcgccctcagtttgtagtgtctttcccaccatatcagcataggtggtgttgtcatcggtggtaatcataagatcgtgcttaattttgggattcagtccatccaggtacttttctttcttattgaaattgattggcacaattctcgaggccaacctacccaatcgatcaaactaagttgtgtactcagtaacagacatgttctctttctgagtcagctaggtgaattcttttttctttacacttatgactgccttattatagtacttggcaatgaataattcctagaactcttcccaggtaatggtagtaacatcccgagtcagggccactatgtcccaccaaactagagtattttcctggagttagaatgtgtcacaaaccattctgtcgctctcgatgacactcataaaatttagaattcatgtaataattgtcattcactgctcgcttttcatcacatcggggcctcccagaaagactggaggtgcttgcttacaaaatctctcatacaatggtaccatctgattcatagtagcaaccgatcctgccttgacagcaggggcaggggccacctgcatttttgctgcaggcattgcaagggcaccttgctacctcagacatttgatttctttgtcttgttcattgattctggcttgcattgctgtaaacctattttcccaatcctgggcaccttcactgggttaatatctccctgaccgcgtgccctgcctctagggcctctacctcagccacatatattctaaggtatttgaaccccctaactgccactggatccgaccaagttaccctggcttctcgtatttcgcctagcatccattctataaaatagcctgtaaaaccaagaactagcctggttagatc

SEQ ID NO: 53698 - DNA, 1152 bp, Cannabis sativa
  modified_base (980)..(987): a, c, t, g, unknown or other
  modified_base (1090)..(1095): a, c, t, g, unknown or other
agatatttagaatttagtactaattattaatgtgtaatttattataaaaataatgataaaacatattctataattagttatgcatgatattactatatttataattatatattataaatataaatattaattaattttatccttatttattattgaaagttttatcattaaaaatagaataattaataattttatcccctaaactttcgatatatttaattatgtctcctaatatatacagattgttaaaaatttctcatcaacttttacatttacaataatttagtccttttattaggttctgtcacattattatgttaaaatgctaatgtgtcgttgtaaattcgtaactttgtttcctaaactttgacaacaatcaaattgtatccactcaaaataaaaatgagaaaaattcaacagttttttggtaaatcttaaaaaaaatatcattttgaatgattaaaaaaattaagaataaaaatcaaaattttaaaattaattaagcgatttaaaaacaaaaagacgattacctccaggtattttattttatccacatgttgtaaatatgaaatgtggggattgtccacgtttcattaacggttacttaaataagatcaaaagggaataattgtcgttttgagaactcctataaatagggacagatttaggaaaaaagagatcaaacatttttaggaaggagagacctagggagattgagtgaatatttatttcctctataatcaaagtatgtttctagaaatatcaatcaataatcaatatatcaatatatatgtatatatatataaagaaggttttaagagtttatgtggcatgcttaaccttcttcttttttctaatacttatttttttatttttctaattttttttttaaaaaatagtatgtaattaataactaacactaaattaacacctactaattaaaagaaatcaaaccaatgacctatagtattctaaaatannnnnnnngtatactaaattaaaagaaatcattaaaaaaaaatcaaactaaggacttatagtattctaaaataattatcacctattttattatgggatattggcggctaannnnnntgaactttacagtttgtaacacttaaccacaaaaactgaatttttggcggctaaact

SEQ ID NO: 53699 - DNA, 1021 bp, Cannabis sativa
caactaagtcaagtttgagttcttgcataacttttgctacaatcactctttgctacaaccactcaaacctgcataactttttctacaaccactcaaaccacttctaaacagtcctaaataaccttaataagctttttctaaccttcctaaacttcctcaatatgtcatactataaacagcaactgaaaactaacaaaaaccctaaaaaaccataaaaatgagctagggtttaccttggattacatggagatgctaggggtttaataccttgatgaattccaactatgaaggggcttgaaaatggtggaaaatgttgggttttgctctggttttggcaggcacaaaaaagagggagaagagaaggtaaattttgactttttctttcttcctttgaatttacttttgcttttgtttttcctttttgttttctcctcaagctgctggtcaccaataaatggtgagttacagccctaaaaaacttccaaaaaaaaggtgactaatcacttagggcaaaaagactaaaatgtacttacttccccacaaagttatctcgtaaccctaggggtaaaatggtccaattctgttatttcattaaatcttgatattctaagatatctaatattactgtcccgtaaaatacttattgtatccatgtgactaaaattgtcatccgacccatttctactgttaccgggcgtaaaaatataaaaaaataataaaaaaatataaaaattcacatatagcatgcatatcacacctataattcaataaaatctctataattgataataataatcataacacatattttcatgaaaataggatctataaagcataaaatacataaataattacataattagattaattagtgctaaatgtcccattaatctcatgtctaagtataacaatcatcacaccttgtattccagagatcgtcacacaaacaaataccaaaccttgtgaaggcacctctctcagctatgctaggcccccttcagaaatttggatcaagtagcca

SEQ ID NO: 53700 - DNA, 781 bp, Cannabis sativa
aaaacacatagagcttgatgttcactttattaggaacaaagtactagaaaagaaattggagataagatatgtgatcaagtggttgattgcttgacaaaaggcctgattccaacacggttcaagttcttaattgacaaacttcatgtgactcagtcaccatctcgtttgaggggtggtgttaaagaatttgatgatgcagcttatgaatcaacaaaggagtagcagatgagaagtgggaccgagtgaatgagggaatcccaaggtttattctgtaatccttttctgtaacaactttctgttaggcattgtattctgtgccgctttattcaccacgtggtgtatctttattggcttgtaatatttccctgtattcaccaattgcctatataatgaaacttgctacactcactcatattgagttgagttttccaatttcttttctctccaaatttaactcatgtgtcttgcttagttcaaaaatagttaatattaatttggttgttaggtttaccttgaagaagcttgacacaatctatggttttttttataacttttcaagaagaatacaagacaagttctgcttgactgtaatgtgctttgacttagtcaaagcatcggttcacaggggcggaggtacattgcaaccaagggtggccttggcccccccaccccaagtagtatatatgcattatttttctaatctttattatatataatttaattttaagagtttgttactaagtggtctcccttgatcaaagtaaaatattctaaagaattt

SEQ ID NO: 53701 - DNA, 720 bp, Cannabis sativa
tatattcatatataatattaaaaagaactactgtacagttttatatttgagattttctcaaatagaaaatttaaatgaaaaaataaattgttgtcaaaattattttttgatagacatgtggtgtctttttatatttttataattttatcaccattattaattatatatttttattattattaaaatagacatatgtactgtaaatcatgtaaaataaattgccattaaatcattcattattaagggcattttttcattgttatatctcccatcattattattattccaatctcttagtattccaccaatataattcataacttttaattaatacataattaatctcgtgcctataatatatatggttctcagtcttttataattaatttgatcatatctctttccatcttatctagctttaaacattgtataagcttcatattttttttttctatttatttatttttctcttaaatgaaaataaatggattcatacacatagtgtaatattatatatatatatattattagagaaaatgaattttgataattcacatagtgacttatcttttagaagaaataatatatatttttttattagaaaattatatatatttgaaattttgtaatttattatatgtaattgtatattaatattttttttttatttttctatttgatatttaaataacacgtattattggacaattcttaaagata

SEQ ID NO: 53702 - DNA, 1052 bp, Cannabis sativa
  modified_base (716)..(726): a, c, t, g, unknown or other
gagtcgtaggattaatttcaggattacgatttttatcacgatgtgtacataacttatgcgatactgtgataatgagagacatagaggaagctctaacgcaaagcacagtgatagtgtataattagctagggatttttggtaaatctataattatatctatagttttcatttaattccaataaaataaataattgaacaacaatttatatttatatatttaattataaatatttcatcatataaaatattgataaaatatttaattaaatagttatttatttaaaattatttatataaataattaaaacaaatcctataggccttactagggttgttcgcgctgcgggtggtgcgatttttgaccattttttcaaatcaatacgcacatgcggtttttttaattttccaaaccgcacctgcactgcgaaactaaaaacccgcaaaaatcgcaccgcaaaaaatagtgcggtgcggtgcgatttttgtggtttatgcggattggactatcactaattaattaaactatcacaaatacaacaaatattgagcaaaacttgtcaaaataccataaggcttgaatacaaatagaaaaaaaaaatgtcaacaatataataactagtggactttaagttgaacattcacatattggacctaaataaatataaaaattggtgtttttataatgtgcggtgcggtgcagtttgaaccgcatattnnnnnnnnnnnaccgcaaaccgcaccgcaccgcgcagtttaggaaaaattcaaaccgctaccgcaccgtaaagaatttcaaaccgtatttttttggcggtgtggtgcggtacgggcggtttgagcggtttgggcggtttgatgaacatccctaggccttacacaagcacacacttgatcatgtagtcataagcgtgtgacaatataatattatatggagtttttataaaaactagttggttaacacgtgctttgcacgtgtgttaaaccttttaaaattttattaagtttgtaatgtacaattaagattaaaggagaaattaaagaagaattaattt

SEQ ID NO: 53703 - DNA, 992 bp, Cannabis sativa
aaatactaaatggatccccgtcgggacaaggagtgtgatccccattcccgccccgtttaacattcggagacaaaaggtaattcccatctctgccctgctccccatttagacgggaaattcccaccccattaagggcgagtccccgcaggacctatcctcatggaagaaatgtgcatccttatacctatccatatgtgctaaaaacttaaaaataaattgttttgaaatttattttgataacataaaatatctaaatttttacaaaaaattataaagcggggtttaaataactacaatatatataggaatatttgcaaaaatatgagaaaataaattaatgccattaaatatgatatttttataagtatttaaataaaaaaatgccataaaaatattaaaaaagataatcaattttttaaaataggatcatgctctcttcagccacacaatattttttttctctctcccacaattcaaattgcttattttttcatgcgatcaaaatcaatcaccaaagatcctttatcaagaaacttattttttcatcaagaaattggtttctttatcaagaaactggtttcttcatcacgaaactggtttcttcatcaagaaactgatttttggtttcttcatcaaaaaactagtttttttcattaagaactagattttttatcgagaaactaatttggattatataaaagtaaaatttataataaaaaaacctataaatccagttttgaccctataaaaagataatatgacaaacttataataaaaaaaagataaaacacaataaaaaataatgaagcaacccaattacagtaaaacagaggtgctcaaaaaaacacaaaaatcaaactactctctctagccacacaatattttttttctctctcctgcgattcaaattgcttagtttctcatatgatcaaaattaattcctcatatatatattgttatctaagtccggctttaggcataagcgatcaagg

SEQ ID NO: 53704 - DNA, 613 bp, Cannabis sativa
gtaatcccattcctgcagcagttccaacaaacaacatgaggaaaacaacaaaagactaaaaaactaaaatacaaaatacaaacaaaacaagaaacaaaaacagaaatatactataaaaaatagaaaaaatagaaaccttaggaggatttttttggggtatgtcaaagtcttcaaacttctctgagctcttagaatggacctcaaagtggaaataactaaaaaatcataaacaaaaaatttgaacaactaaataaataaattgtaagcaacaagaaaaagacaaaaccaaaactaagcaaccagaaaaaaaccaaaaaataaccaaaaaataacatttaaaaaacagcttgaacatgctcagcccaaaagatgaacaacttccaagcaacatattaacaacactatgcagaaaatgaaattccaatagtaatcaacagtgaaattaaattaaacaacatgaaaacaactgaaaataaatatttaaacaactattgataacaaggcgataaaccactgttgtcctcaaaagtgagtgttttaatatttatactcgcaagtgcacgaatcgtttcggaatatagtgttcatgtaagtgcaaggtcgaacccatggg

SEQ ID NO: 53705 - DNA, 2717 bp, Cannabis sativa
  modified_base (2104)..(2106): a, c, t, g, unknown or other
  modified_base (2158)..(2160): a, c, t, g, unknown or other
gttttttatgcattcattattattttttatttatatactgattagtatatttttaataaatatttcttgtttttgttttcgtaagaaatgctgggttttttttttggacatgatgcacagatgcaggtagcttttttaagtggatattttttaaaataaatattttgtgtgtgatgtttttgttggatcacgctcttttatcttgttgagccgctaacttattttagttctctcattagtatgatattatccgctttgggtttaagttttcacggttttattttgaaaaatttacaaaaatactcgaatttgagttaatttttacaaaaatactatcacactatgttttttcttaaaaaatactgtatttttataaaacaatagtgaaacacaaaacagaacaactaaaaacaataataaaacaactaaaagaacaagttaacaaccatagaattatagtaaaaatttaatatagtacacagtataaaacttacacaatatttttgaaaaaaaacacagtattttgaaaaaaattctgccccacagtaaaaaaataaaaaaaattagaaatttcagtatgtggtgtaataatctcttttatttttgggaaccttttcaaaatggaagaaattacactctatacccattttttatttcttattttaatttttaccttcattttattattctttaatttgcactcagttttataggtcatatccaaattatgtgcattaaaaactctaattttgataagttatgtgcggttattttgggcctaagccctcacagttttattttgggcaccttcccaaattgcctcatactaatggagaaggtgaaatacttatattcaagacaactcttgtctattctttcaatatggaactttggttgataccccaacaattctcctctcaaactaaggactaacctgtgacataccctccagcgaaactaccttgtaccgctgctatcgccaaatggaatacaccgtctaaccttcaacattgccatgaagactttcaacacaagacacgaaacatagatctccatcttgtaccgtcgtaatcaccaacaagacactccacttgactactacaatatcaagtagaatttcgatataaggcagcatagatacttaattgcaaggtcatcacattgagaaattcttgaacttttggacttttggctctaataccacttgttgagccccattctttcaccttgtcgggcccccatctcaatatgactccaacattagtataatattgtctgctttgggcctaagccctcacaattttgttttgagcaccttcctaaaaatgtctcatactagtggagtaggtggaacccttatatttaaggcaactcttgcatattcttttcatgtgggacttgagttgataccccaacaattttaatgcaacctagaagaaaaaaactacctttaatgataagcttttagtcacaacataaaatttttataattaaatgtgacttttaatcacaacataataattttcatgcacaaattgataaggttatatttataagatcttaaaagaaataacccacatatttaattagtatttatttaagtaaattaaaactatttcaaaaaggtaaagtaaataatttgttaaaaaaagtcaattaaaagataataaaaattatatattaaaatacatataatacatactatttttattcttttttttttttaaataaaaaaaaaccataggacaattaattttttatgcattatacatatattctagtaatgatataaaaaaaaggttaagtttttatgcttaatttttcaattagattagaaaaatttttcatttttggattatatgggtaagggttgttccactgaaaagaaaaaattgaaaaaaaaaaaaaaagttttttgacagaaaaaatggaaaaaatgagtttgacttaaatattttatatataaacatatttttgatataatgtaaaaaaagattttttttttattttttttaattaagtagctaaggtaagtaaaaaattcgaatttctcttttagtatttgtcattggatcaaaatctaatggtttaatatttttaaaannnatatttatagttaaatttgtttagtaaccatcaatgggtaatacccattaannngtgttccatatatatataaatatgatacttttaattagttttttttgataatattaaattggggtttttacaccacatactgaaattttctatattttctcttttttagtgtgtggcagaattttttttcaaaaatattatgtattttttatactgtaaattgtgttaagtttttactgttgtttcttaattgttctactattgtttgtaactattttgttttattgttttacggttgttttataaaaagacagtatatttgtaaaaaatttcatgtggcagtaaaattgtaaatttttacctaaagtttaatatttttgtaaaaaccccatttaaatttaattaattaatacatctctttaacattccattatatttgttgtttttattgatttaattagctgaattataatgttttctcttttactatacttaagtgaaatcatacactataaaatagtatttttagttacaacaaaagttgttattaaacgtaataaagttgtgactaattataaatcacaaatctaatattgtgactaaaagatttgtggcta

SEQ ID NO: 53706 - DNA, 938 bp, Cannabis sativa
actactacaaaaatgggtttcaatcacacacattgagtttgcttagcttgtggagcagatggccggagacaagacataaagagaagggttgagcgggtggcagagaagatggccagagaagattaggaggttctgagaccccttgcgaccggtggtagagcccaatctaatggtgtaaggctggatggttggactactggtggaggccaaggctgcccgcgtaagaacttcagagagaatgagagggaggcggaagagaagagatagaggaaaagtgattttgattaggggttttttttccctttcttcttatattcatttattatatttttattatttattataaaattttctaataatcaattataattaatgaatcattttaaatttaagaaacaaaatataaggagctttttccttaaaaaaatacgaagcttttatgtacctgcctttttttttaaaaaaaacaaaatatataattaattcatacacatatacaaagctttatttgttattcttttttaaaaaaaaatagttatgatatagtgacacgcaaagactgttggtaaacatttacccagtcgcgcttggcgcgtcactataagttaatattttttttttaaaaaaaaaaaatagagaaattgaatgatttaccctatagtgacacttcatatctttagtgacttaggttctaggacactaatactaaattttgagtcttttttatgtatgtcactaaaacttacccctaatcttttagtgacctacactttttgtgcatgtcactaaatgatgtcactaaaaggtaagtttgtggtagtgaacggtggcttcatgtctggcaatgccttgatctttctttggattcccttcaatacctcttgagttgataataaatctaagaaacttccctgattggacgtcgaaggcacatttta

SEQ ID NO: 53707 - DNA, 702 bp, Cannabis sativa
attattgatacttttggttatgaagtttgaatagttatattttggattttgggacttttttatatgatccatatggatatggattaaatttggacgttggaactttttgatatgatacatatggatatggattagatttaggatttgagactttttaatatgatccatattgatagattgatactttttgaaatggatatggattagatttagactttgagacttttttggtatgatctatattgtatggattggatatggatatggattagaatttagatttggatgattaatactttttttgatcaatagtattatattttaaattttgagactttttgtgatatgatccataatttcatattgtttagattggatatggagtcgattaagatttggattactaattttttttgattaatagctatattatgtagactttgagacttttgttatatggtctataatattgtagattagattggataatggatatgaattaaactattttttttttcttttatgggtttttgattgagttttggttctagttttttttttttttttccatgtatacgctttcattaataactatagtgtttttttttttttttgaagtaaaatagctatagcctatagtgttgttagtaattgtaattatgaaataatgaatgggtttgaatgagttttggttctagtttt

SEQ ID NO: 53708 - DNA, 531 bp, Cannabis sativa
aaaattttatttacttgttgatgagccatttgacaaactttaaactcgtttatgttctctcataagcatatgttggttattggttttcatatatcataatccgtatctggttaaatcttctggcattactaaataaaataaattcttcaaattacagatggatcctgctgctgggatagaagctgagtatcaccataaaaacaacagggtgcgtaattaacttttgtggtgattagttagtttgtttcagtgttaattatttttattctatattatataggacataggttattcaatactgcattagttctaaagctgattcagtaacatctcatatttacttgtttacattaaaactgagtttgtgccatctaataatggtcactaccggtatgcaggtgtattgctggaaaggtctacggttttcagctagacaggacttggagggattttctaaggtaagactacttttaaaaattgatcacagagacatcatcattgttcgattcatttcccacaagcctgagaaaa

SEQ ID NO: 53709 - DNA, 992 bp, Cannabis sativa
tgtaattattgaacttttgaaaaagtaaaattgaaaaataaaaaatgtaaaaaagtttaaataaccgaaaataaatataaatgtaaaaaaaaggtaaaaaatgacatcaagtgtaaaaatctaaagaaaggggttttttctataataaactaataaaggcagtattttacatttacaccctataaagaaaaaataaacataaataggaaataaaaatttgtatttacaaaaatactagcctaacaaaaaaaaaaggaggaaactcctccttcttcgtgagctagtcaaaacaccccaattcaccaaatctctattgttttatttcaaaaattaaggaaatcagctcaaatcaagatgtagatctcaaggaaaaagcaataaaatctcaaaaaatccacatacaaaaaaggaaaaaataataaaacagaaatatcaatctccattgctgtaaaaaaatgcaacaacaacctacaaataaaaattgaaagcgtacagaggagacgatttgaagagaaggagatcggaaaatttttgaatatatccataatcgaatcagagaaaaaaattcaaggtaaaaaaatatgaaaaaacaaacatcatctaagcttccagaaaaaaaaccataaagcaaccacaaaacaatattttaaaaacacccagacataaacaacctaaaagatgaatagccaggaaaaaacatattaacaataatttgcaaaacatgaaattactaaaaaaattgttcactgtgaaataaaattaaacaacactaaaactattaaaaataaacattaaaacaactgtttagaaaaggccaatagaacactaaaagaacaatcaaataacgaattaaaaacaagaaaaaaatgttatgaaaacacaaaaccttcgtacaaaaataacaataaccctaaaaaaatacatttaaaacttaagaataactaataagaaaacccaaactgacaaaaagaaaaatagtgtagtttggttaa

SEQ ID NO: 53710 - DNA, 2156 bp, Cannabis sativa
aatttctcctttgatggcgtccacttagtttgttcaggctcctccgagtgtaagttcgagggtgtagctaatgcctcggcaggataaggttcataccaggtatgtgcctttcttttcctagtgtttcgcaaaaggaacaaaatcatttcagataagtttggagggttggaaatcaaagattgttgggccttgtaaaggtttataacatcatctccatacaacttaagtaacatttcctgggcctctttatccaaattgggccatcccaaaggagtaggttcagggaatttatggggcttttgggatagacaaatccactcgtgtggaatctccaattattgggaaattgtaggcccaatgttaggaattatatccctattttcagtgtgagcaaagtcaggatttggtagttgcaagaagcttggcctttcaccctcatcttccacgtgattaatatggatagcctcaaccgccatgtcaccagtacgatcaacattgattcttgccgcgcctccactactcgtactaccaaggtacgacatgtcctttgtccctgaggtattctctccctgacgaaaaagccctgccagagcagaggccttcttttccgtcatcccatcctccacgccgttgatcaccaacgtgttctccaccctcgacggctatcatcttttccaagttccccttcgatgcttcccattcaaatcccactcagggacatctccattgtcaactatcaacttggatacacccttacccttcatagtaaaacaatttgatcgcccagtctcagatttaatccaagtaccatacatttggacagcctctccaaccttaggaatcaccatagccaacagagcaaaacattccttgttccagtgtgcaagcttcccacagttgaaggacaaatggggaagtttctcatatttaaattgaatccaagactttggttttccatcagcagtgaggaagaaacccgcaggtatagggttcttgagccacacatcaacataagcacgaagataccctctatgcaccagcccctccttaggtttcccatccgttttcagaaacgatcccaccttcttccccataatggcagcgttctcatccttcagaaatctcgtagggagtccatttaactggacccaaaagcttgccacttcgaattctgccactcggacctctccctccaccggccatggtttaagattcagcagcactccattcacaatccatggtctcttctcaagcacaaaagcacagtaaccttcttcatcaaaaaagaactccatgactccatcttcacattttttcattctccatggacctaacctacgccaaacaccaagaagaatcttcttgacaactgaagcagtcatgtccttgcacccaacaactttcccaacacaggctttgttaacaactacatctttaagagttatatcttcaaatagctctaacatttctatttcaagagcactatccctctgcagaacttgattcatgccttcatctatcacctctacttcaatatccttgctttccccactagccttagccatgcccccgacaactcagagtacacttagcacagcagagaacactaagcacagagccgaagaaaatagagaaaaaaaactcacagtcactagaatagactagactctacacggggagccatttctagatagccatttgatctttttaataatatgttttgatgtactagcagagaacactaagcacagagccgaagaaaatagagaaaaaaaactcacagtcaccagaatttgtaggggtagttttgtttggtctatggattttaggcatgcaaagttcataattgttaaatttgcaggggtatttttttccattgtatttggttcctttttatagtgcaaatttgctcttctaatatagtattttcgtgtaccatttagtgggataaatggtagaaaaagctgagaaaaatgggggacaaaatgtctcgtcctggagtggctactggctgcgcgaattagggggcacatcgtgggtctcttttgttttggtggtctccacgcataaaatgaaaagctggagagatattgtttaagtaaattggatttgacttgggcttggtcttcatttggcccacttcacttcaaatacaa

SEQ ID NO: 53711 - DNA, 1845 bp, Cannabis sativa
ttttttttttttttttatggaatgcgtcattagatatttcattgccgttttttaagattgatttgctaccacgtattaaatggtattatattattaaaatttttattatatatcatattttatgatataattttaatttatatcaaaatattataaacaaaataataccacatatatatagtttaacataaaaatataataaagaaagtagtcaatataatattatacaataacgatatatactataataaattatattatttcacccaaaaaaacatttaattcatcgtgtgttaatgagaagtaataacgaaaattactcagagacactttaacataacataaatatagtggttatgttgctacaatattttcttttagtttgatatttgattttaaagattgctaataatttataaacaaccacattcgagcatctccaatgacctgtagtgctatattttctgaaaaaaaaaagagaatgattctttgatatattatgctaaaaaatataacatcaaattaatttgagatctgttaacaattttatcaaattttgcacataataaatgactaatttttttatttacatttttattattaattattatatttttatatatgattttttattttagcattaattggagatttaatttttaattatttatttatttagtttgttttcattcaaaattaattgaaaactattttcttgtatgtcgaattcaagtaattattaaagcaacatttattatgtatagtttcatcttttattacttaatgagaaatgttttttattcatattaattgataaatttaatatcgaatcttatttattttactttaatacaaattataaaaaattactaaccaattaaaatatcatctcataataatactaaacacattagtgctctatatggaccatatcaatgttcttacttaatttggcattctcattaattattgtattttggagtacaattatacaataccaaccaaatatatttttaatttaattttagtgctaaatattgtacgattgtgatattttatttgtttatatatacttggactagcttacaacttttaatgaatatagtaatatattattaacaatttgataattaattcgatcagaataaaaaatatttaactactcttaattattaattgaaaaatataaaataacggcttattggtttttttttttcttcacatgttttgttttgttatacctttcacatatattgtttttttgagatatcctttcacatatattgttagtcagctaattaataaaatatagtactatgttttaggtttttgattagttaagattaattaaaaaattattattaaattgaatatataattttgaaaactatattaataattccttaatgcgcattacatattttatataattaaataaggtatcttaattcaggtttgaggaaatttatgaatgattattttttgacgtgtgaatttaggaatgaaattaggtttttttttacgtgaatttatgaatgaaattagttaaggataggtaagaccggaaattatattggttaataggagaagttttagaatttgaatatatcagcattcttatttttttatccgatgaatcttataataatagtattatgatttccaaatcttgtagtttatttaaaaattttaagtaaatttaagtcaaatgtttccaagtttttagattaattaaatcttatgtaccttaaaaaaattaaatattatgtggatttatttttcaaatttaaagaaattttggttgtattgagtatatattatatttatattagaccttggttatat

SEQ ID NO: 53712 - DNA, 1440 bp, Cannabis sativa
ttttgttaaattttgtcacgtgtgtggcaaataaaatgatataactccttaatcaattgtcacattaacgttgcgtgtataattttacatttaaaaataaaaattattaaactaaaaattaattaatgatcaggaaaattaagtaaaattaaactaaaaaaattaattattttttcaaattaattacaggcgtcatgttgatatgatactgacgtggcaactggttaaatagtcatgtcatcactttgtttgtcacgtgtgacaaaatttgacaaaacgactaatttataatactatgaataatttagggattacttttaatagtctgaaaaattaagggagacaataatccataaattatagttcgatgggtaaaactcataaatagcttaacaaaaaataaagaagcactatgaaactctcctttattggctaagtgtatgttaacagagaattctgcttttttaaatttattatctattctgattgtttcgtttaatgaagatgaatttgtttaaaaaaaattgtaagaatataaatattttattttaagagaatatgtattttttcataataatctcgaactttattaatcaagttgcctcatcaaatctctaaaataaagttttgctaatgtgtaagccaacatcttttcctccagaaaaaaaaaaaaattgacaaaaattaacattttttttaagaaaagcgtacttatcataaaacaaaaatcagttagacctcacggtcattacataataggtttttcaaaattgtagaaattgagataacaccaaatctcaggtcaacgctcacttagccacactatgggctgcaaaattacaagttctactgatattaaaaaaaaatcaactaataaacgaaggagaaaacctataacaaaaagagaaatagttctcaagtgcctaataaaactcattcccatgaagagcattgataactaccctcgagtcgttctccacaataacaaacttggcactgatgtccagtgccaccgtaacaaccaaataataggtcgccgcttctccacataacgcatctgaaaaatctaaccgagcaccgtatgaactcaaatcaccctgccaagatgagccctagctacaactgtagtacacatgctatctaaacccactttgacatcacaattcatcttaatccagtcttgaggaggaggactccaggcctccattaagcgtggggcaggtggagggaaaatagaagcatgtaaatcttcaatagaagtacaaatatagtcaatacacttcttcacatcaactggactattattatgtaccttatcattgcgagtccgcgagatgttgtcaacaacaatcgaagcataaagaaaaatatcctcagcacggttacccttgtgtttaagatcccaaatgaatttcacattgtcccataaacgaatacctg

SEQ ID NO: 53713 - DNA, 570 bp, Cannabis sativa
  modified_base (342)..(346): a, c, t, g, unknown or other
aggtgattcatcactgttgtgtaatacgaggtgatttatcactggtgtgtaatatgaggtaattcatcactgctgtgtaataagaggtaattcatcattgtctatgtattacgaggtgattcatcactactgtgtaatacgaggtgattcataactattgtgtaatacgaaggtgattcatcattgactgtgtattacgaggtgatgcatcactattgtgtaatgcaaggtgattcatcactgttgtgtaatacgaggtaatgcatcactgactgtgtaatacgaaggtgattcaacactgttgtgtaatacgaggtgatgcatcactgactgtatattacnnnnngattcatcattgactgtgtattacgaggtgattcatcattgttgtataatacgaggtgattcaagatcattgtattacgatcaactacaagatctttgtactacgagatgttgaatattttatcaaaatggcatcccgacaacgtagaaatacctctcttcataaatcttgtgatcattatttagatgaggtcacctcataagttgagtcctaagtttattcga

SEQ ID NO: 53714 - DNA, 1242 bp, Cannabis sativa
ctccaaccccaatttcctttttttgacaaactttaatctctgcctcttgctttttctctttattaaggcctctaacattccaacacaatatattgcaacaattcataaaagatgaaccagtgacccatctccctatgtcccattctccttattttgcaacatctcaaaagtattcttttctttgtgatgctccccatgctccctaaccacttgcttagccttgagaagatgagctctttttggtgtttcccaattttccttagcctctcccactccttcagctccagtcaacttagccccatgacatgattctctatcaacctctcggcctctcaagtcccctgccttctgatgggaaatagctccatccttccccccttctttacccaatcttacctctactttattcttgccatcacctcccattactgtagcctccttagttttagtttgtgcatcattttcacctttcttctcctcatcagcccctactcctttcacatcttttttaacccattgcttagcctcaccttccctacactcggccatgatatgcccaaaacccccacaacttttgcacttaagttattttttgttctttcaaatattgtaaaaaatattatggtcactgattaatatttgaactcaagagttatgtctcactaagcctaaccatcacaatctacttttcaaggtgattctttttacatgtacgaactatgaagaatatattttttcactgttattaaaaaagataatcgaaataaaaggtgacgttttaattttatatatatatatataaatattttgctgtagaaaacataatcaaattttaaacttaaacaaaatataccaaccaatttcacaagttaccaaaacatactttattattttatattcaaaagtaactaaataatattctgcataaccttaactaacaaagtaatttcgataagatgttcaaaataacttatataaagaaactagatagtattttagatattgcaaaaataagaaaatagtaatgtaagtgactctatgacttttttattattattattggaggagagaggactaaaagtcctctttgtaggagatgtgtgaaagtattagattatacttatgacttaagatgttatttagtttttttataagtacttttgttttgttaataacttacgaagttgctctataatatattttttttgaataattttaaattataaaataactaaatacttt

SEQ ID NO: 53715 - DNA, 2218 bp, Cannabis sativa
agggggccattagtagtgggtacgacatattgaacccagtcatctttcgcatgaataatcccaattgtgaaggcccatttattttatttgaataattataataggctaattatactagtttaacctaatagaattgattagcaacatatttaatttttcgaaataaatggtatctatttttcatcagattattttgaattaaattaaaaaaaatacacttagtttaataaaattaatttaagataaactatatgtatttttatatatttaattaaatagagaagttataactaattagattttcctagatacctaattatttgaattttcttataaaatatatttcagttgaaaataaacttttcaaattgattttggatcaacttaaattagaatattttttttttaaaaaaaaattattaattaagtagatttttctaagaaattagttattaaaatattctttaaaaatatatttaagttgaaaatttgttatatttaggtcaactcaaattagaatattttttaaaattaaggtgattagttcaagatacttaatttgttatttaattaaattttgaaaattatttaagttgaattttttttcattttagaacaacttaaattcgatattttctagtatttattttattatattttaattaatttagaaattatattatatgtatatagattttcgaattaaattaaagttcaaaattaactttcagaccaacttaaattaagtaattttcattattaaaatatatagattaaaattaatgattaactaaaaatacattattttaaataatgagctttattcaaaagcacatttgatctccattgttggttctacatagttcttggtttagtgagatttatccttaatagatgttcattcattaacaatttaacgtcgtagaatctcgaaagataagtattattgtaagtcttttattcttaataacgaccaccccaatagtggttgtggctgctaagcttacaaagtatgaaacaatggtagaagctcatgaaatagtaatgaccttaactctcgcctaaatgggataacatcgaattctcttttcgatcgaataaaagattgctagaatggtgtctattttagatgagctgactactctattcaataaatgatatattttactctcacataagcaggacactttatcagtttgttggaaaccttggaaaataattgaatatgtttcaattttttgtatttttgcaaacttattttctgtacttgttattttctgaatttgtgtatgaatttttttgaactaagtaatttatttctatttatatttgtagcgtcaaaaatgaacaaccctcaccccaatcatcatttattatatgtctttgcaaatgaactctatagtgtgaagataccttctagtcagagtgtcacatcacacttactttcggtgaacttaaaattccagaaagcagatcttctgggaattattctatcaaaagaggaatgggttcagttcattctcagtagcctttcacgtgagtataataaatttgttgtaccatacatgatcaacaactttagctcgttcgacatgcataagctactagaagttgatgcttatgaacggacattatcacttgcaaggagggctcgctccagagttacagataaggagaaaaggaaagttgaagatattgatgatgattcctcccacaatgctacgtcttcgagttcaattttgagagctagaattgaaattgaaccgataatggagacaattaaagaacaatatactttcaccaaaatgaagatgaaccttgtgtttaccaactgaaggataataaagcagtagtattttctggtccctttagatgacattttgattattggtaaaaatatcaagaaaataactgacattaaggaatgacttaatactcaatttgaaattaaagatttgggtgaagctagttatgttcttggtattaaaatcattagaaagaggaagaacagatcacttgctctcttcgccaagcaacttacattgataagtttgagagtgatttttcatgagtgacaccagaggggcagttatgccttctagacctggtatccgtctatctaaagaacagtgtcccactaatccccaagagatagaagacatgaaaaaggttccttatgctccagtacttggaagtttaatgtatgctatgttgtgca

SEQ ID NO: 53716 - DNA, 1338 bp, Cannabis sativa
gaaatgacttcccaccagccatatacaatattatatattttcaactaaaataataacacattttctttttattttgtagaattttaatttcttaaaattgttaacctaatttcctggtcccaaatattgtagggttaggcagggatcctaatttaaaagaaaattgttaacctaattttatgggtcttatactaaatgtattggtgaggaaagaaaagtagaacctttagaaaaatattctctgtgaattgatcatcaataaataaaaattgttgctttaaggttcctaacctggcacgtggagccatcccacttgcttttccaaattcatgaccatgcattcgaacaggaattccattattcccagcagcaatagccgcagtatgactgatacagaaaaatgtatgagataaagatttgcagctgtacgtctgacatatgaaataatgagagaaaaagataaataggtttatatgagtgtgtgtgtgtgttacatatctatttagataaaagtttcaacaaacaccatgagtaagcactaaaaataaaagattcttcttgtttaatggcaagaagttaacaaaagaaaactaatgctgtcaactactgtggtaaaaaacagcattgctgttagcaaagctaaaaatgaatgacttggttatcacacattttcctgtatgaaaaacatgtgcattagtgggatgataggaacatatatgcaatgcttagaaaaaaacatagaaaagacaacaattaagaggaagtatcttgatgatgcaattcatatgcagaaccaattgtaattgttagatatttaagaatatgcaagggccttcatagtaataggccagactctttgcagtttttcactagaggggatatcaataaataccgttataattaacagaggtagaccacaaattctaattccttctgttaaataaagatttcatagctacaaaaagtgagtatccacaaaacagaaaactgtagatgtgctttatctataacatgtaacctaatttgacatctgtaatttctgcttctccagatgttatttcccaggttcttaattgattaatggtgtgattaatcaaaagacaataaaacaggtatatcacattaaacaggtatgcttgtatcatcattcagatatccctgaaggactaaacacaaaattaaggcctttgagagcttgatacctttaatatttgtataacctcaagcctctccagggaaacaaatcttacacactatgaaagcaaccataaacctgacactgatcaacgactcagttatattattactcttgatgtattcatgagattctacaaacta

SEQ ID NO: 53717 - DNA, 1009 bp, Cannabis sativa
  modified_base (26)..(59): a, c, t, g, unknown or other
ataaatcacttcaaatttcttatatnnnnnnnnnnnnnnnnnnnnnnnnnnnnnnnnnngggcacaaaacccaacagtaaccctacaggtcactgatgttcagccttaacttgctgacacgtaaggcaccttgcaacatactcagcaatgtcattcttcatgcctagccaccaaaacctggttttcaggtcttgatacatcttcgttgaccatggatgaactgagtaaggagccgtatgagactcattcatgatctctattttgatactctaatccataggcatacaaacacgattcccaaatcgtaacattcccgtttcatccactgaaaaatcactagcttttccagccgaaaccctatttcaggtttttaccaactctggatcttgcatttgtacttctttaattcaatcaaaaagagtggatttcacggtaatattagccaactgccccacaatcaactcaatcttagctcgggtcatctcatttgcttgttgttgggagatttgcttctcagtacttaactcactctaacccttcctactcaaggcatcaacaactacgttggccttaccagggtgataaaggatctcataatcataatccttcaccaactctagccaacgtctctgtctcatattcagatctctctgggtaaagaagtatttcagactcctgtgatcagtgtaaatctcacatttctcgccatataggtaatgccgccaaatctttagcgcaaaaaccactgctacgagttctagatcgtgagtagggtacctctgcttgtactcctttaactgccgagaagcataggctattacctttctagcttacataggcatacagctgagaccctatctcgaggcatcacaataaaccacaaacttttccttacctgaacgaagagttagtcttggagcggtaatcaagcgctgctttaactccaggaaacttttctcacaccgatcagtccaaacaaacttcaggttctttcgagtcagctccgtta

SEQ ID NO: 53718 - DNA, 870 bp, Cannabis sativa
aaaacacatttactaatttaatttacagatttagagctattttttatggtgttatattgaaatttctaacctttttaacattttactgtggggtgaattttttttccaaaaatactgtgtaagtttaatactatgtactgtattaagttttcacagttgttctatggttgtttaactgttattttaattgttctgttttaatgttttacggttgttttataaaaagacggtatttttgtgaaaagaaattgtgtaatagcaaaattgtaaacttttacctaaaattcaatatttttgtaaaaattccattttctatctccaaccctttcaaaaacccacgagtgtaatttctaagggatttttttagttttatacgacaattgtaaaataattatataaatagtatcagtgaaaataatacacaattataaaggcattcataccgaaccataaaaataaaacccaccgaatcatgaaaatagaccctgcctttttcgtttgaattttttttttctttttgtgctcaaatcttttttcttttgttgtctttttgtttattatatatatattctcttttctatttatctttctaagaaaaatattagttacactaaataaaaaaaatactaattattttattttaattttaaaaaatactatcgcatcttacttttcaaggcaatcattttaatatatgaaaaacataaataatttttatcataaaaaaatgatccaaataaaaagtataattttttttatatatatatctatatattttagcattgacattaggcactagtaataccaataccaccgtgagtaacttttttttattaatgatgagtgatattttgcaaaaattattaaatt

SEQ ID NO: 53719 - DNA, 790 bp, Cannabis sativa
tgtgatcatctatttactgctttccattttaggcagtatacgagcatctagaatatatatgtgttatgtgatgccatgctttaaatgatatttgattaagtgcttatttatatggggtaaatagctaagttgaggcaagttactgtttaaaggcaataagtgcgtaagtgtggtattagtgtctgactcgctagggttgttgattattgggttatttgtagaatggaccctctttaatcatctagaacacagggcgagctagtagagcctggtgtagaccaaaccaatccaccggcaccgcctgcgcctctgctgaatccgggggataacgccggggtcggtaatgctaatccgcctgctgattggcagtagatgttccaagaaatgcgaggtattatacttcgtcaagaagaagagttgcgacgattaaggcaaccgacaccgattgcccctgttgaacaagtgttaccaccagcacctgtgcaagtggtagtaaccaggggtttatattgtcgcatagagattccgtgtttgaacgggttgtgaagctgcaacctccgacttttctgggaggtactgatataattaaagccgaacagtggatgcgtacaatcactcgtatcctcgataatatgggggtgacgggaacagagagaggaaactgtgcaactttcatgttgcaagatcatgacctcgtctggtgggatattgtggaacagactcgagacgtcagtgtaatgacttggaaagagttcaagagtctatttgaggaaaaatttataacatcgct

SEQ ID NO: 53720 - DNA, 747 bp, Cannabis sativa
ttttaaaataaaataatataattttctttaaaaagaaatatataattaacttgctataaggagaaagtgattccttttcaaaaaaaaaaaaaaaaaaaaaggagaaagtgattttgactttgaatacaaaagcaagtagtgaatcttctccaccaatcggttaattaaagagtgggacccaatttaaaataaagagcagcgtagatgtgatctggaccgtccattgtgatagcgttgaataatattatgtataggagtaaaaatcagccaataacatgtacttcattaaaaacccataaatctcataatcatactctctatttttggcgcgtccaccccactacctctgttttgtaaaagttacaaattggacctgtgttgttaaatgacaaaatagaccctgtattttttttatttttttttttttactaaactctctcaattatcccctaaaattttgattatcaaaatttttcaaattactcaactattagtaaatttaaagtatcatttatttttcacaattaactgtcaatataagctgcttatatgtacatttttatacacgcaatatgtttacaccaatattattatttaaaaattataaaataatatttcaaattttttaatattttattaattttaaatgataatattaggtgtaccagtataaacgtatcatgtgtacatgagtgtatacagtgacagacctaatacttttaatttgtggaggtttatttattatta

SEQ ID NO: 53721 - DNA, 937 bp, Cannabis sativa
aatggacataaccagcccaatttgcctactaatccaagcaaccagggattacaacctcctcttgttgagggagaggatatcctagttatctcgggagggccacatattgtaggagaaagcaataatgcccaaaaaaggtacgttacagaagtgaagaacgagcagcgtgcctttgctttagaaccttccaagaaagtaaggactgaagaacctctgattatattttcggaggaagatgaaaaagatgggaggtacccgcacgtcgacccattggtaatcaccattccagcttgctaagaagaggataatagggtgctggtggacaacagaagtttagtgaacatcctttacagggaaacactgaagaagatagggcttgaaaaagctaaattaagaccttgcatggtaaatctttgcagatttactggcgatagttttgccagtcaaggaataatttagctcgcatcaaatttgggcgaagcaccttgatccaccacaataatgcaagactttttggtttttgacctgccatcgacttataatatactatcgggtcgtccagcattaatcggactagagacagttagttcaattaaacacttgtccctgaagtttcagacaccagttggtgtgggagtagtgcgaggtgatcaaatgctggctcgcaaatgctatagcatacagttgcaacacggaaacgatcaccagctaatggcagtcttgaattaagaaggcgagaagaaggatgaagatcttgattcaagatgaaagaaacttattgaaaccaattgaagagttggaagaggttgttctggaccagggaaatcccacaaagtgtttttacattgggaagaacctagatgaacaattgaaatagcagctaataagctttttaagggcgaaccaggatcagttcgcctggagccatggagatatg

SEQ ID NO: 53722 - DNA, 1562 bp, Cannabis sativa
tcgcccagttagaaaaaattgatgaaacatcaaacgaaccaaatctcctacaatgtcccaatactttcgaaagaaaatacatggaaattcgtcaggtgtcggagctttgaggggatgcaacttaaacaccacatccttgatctcaccttcatcagggacacgacagatttcttcattttcactttctgtgactttttcagtgaaaagggactccaaatcagcgtctatgtgagggttcgaaaagcagaacatggcctgaaaacagtcctgaaagtacttcccaatatcgccccttcctcttatccactgcccctcgccgtccctgaccgcaccaatgtagtttcgccttctcctggtcagagtgcacgcgtggaagaatttcgaatttccatcaccaaactgaagccagttctcacgagacttttgtcgccaaatcctacccattttttcctccatgtcaaggatttccatttggatttctgcttccttagccaccgtagaatgagtgatagacatcttttgcacactctccaattggtttcgaaggtgtctcagatttttatcacagaattcgaaaacgttctggttccatagcttcaactctttcttagttctccagagttttctaggaagccccatttccctctgattaacaaactcaaccttccaggcactgtgaatgacccttctgcaatcttcacttgaattccagacctcaagaaatcggaaggggtaatttagtttcaaagtgtcaccccaattgtccaataaaataggagcatatgatccgagcgaataatatgatagttctgcacccgggaatttgagaaagcaatgcaccaaactccatcaacaataaatctatcaagtcttttccgaatagggttaggtgccagcctcgaattctgccaagtgaaaatgccaccatcactacccaggtcaatcccaccacacttaaacaaaaaatttctcaaaaattccccttccctagcatcatagtctctgcctcctatcttttctgtatgatcaagagtaacattaagatcacccacaagagcccaaggatcattacactcactcactatctctgtgagccaactccagaatccccttttagaggcaccgtagggggtgccataaacacaaaacattttccattccgcgaatcccatattagcttgtaaagacactaagaaaacaatttcatacgtatcaacaacattacacatcacccctattctccaggcaatacaaaatccctctgcaaagccattggtcgggatgcaccaatgattcacgaaccccgagcgattcatcacagtacccatagcctctatagtaactttagtctcggaaagaaaaagaaaattcgaatttgaatcgtagataagaccccagagggtcctctctgccgtggatcgtcttaatccacggtagttccaagttaggaacctcatgaggacagtgggggcatgcttccggccgcctcctcgctgcttccaaaatattgaatgctgctataatatcccagaaaataaataatatttaaatagacatatttt

SEQ ID NO: 53723 - DNA, 911 bp, Cannabis sativa
taatttttaattacaaataattaaatagataagcttaatttttaatggttaataatatttatattatatttatggaacttttataggtaatcgactgataaatatcatattattgtacatgtggtattttttagaggtttttttattttaacacttgaaaatatttttgttttataatttgacagtatttgaaatagaaactcctattacaactagcggtgcaacctaaatcgcaacaaaaaatcgtataacaacctacatagaaatcatcagagaaaccaatttaaaaacccaaaccgtacatttgaaaaaaaaaaaaaataaaaaaacagtatatgagataagtcttagtatattaaaatgattttttaaataagaaataaaaatttaattacttggactaattagaaattatcagtaggtggtaatttacatgacacttaacagtttggtaccttcttcagtttaaaaattataatttaggtattattaccgtcaaaaattaaacttaaatatttatttacaatcgaaagttaaacttaagtatttatgtcacaaattactctaaatatacaaaattaatattacgtgcaattatacttagttatattcttaatatttttttgattacctatatttttagttgtaattttttttttgtatgttattaaattaacaatattattttttaataataaatatataatttaaatgttccttataaaaagaaattataataatattcacgaagtgtggttaattataattttagtttgaccatattatttataattttataagcaaaaatatttttttagtaactacaatagttaacgacatcacaataataattatttaagaaatataaatacctttctattttactatttaaaaagaaaacaacaatgaaa

SEQ ID NO: 53724 - DNA, 1006 bp, Cannabis sativa
tctatttttattagggttaatttagcatcttatgcttttttttattcaaaaattgtattattatagaagttgtgggctagtaaaaacataatatagagttgtcgtattttgtaaaacaaagagcccaagaaaaagattgttaaataacttgggcctttttcaaccgaacaaattttttatcaagatataccatcattttgaatgtaaaaaagatttatatccactataatacatatattttttttaattttgtaccacttttacacatacccaaaagatacctaatatgattaccttttttctctttttcacttcttcagtattttcatttaggaaaaaacttccttttttcttttttttttttttcaaaagggggagaagttcatttttatggctttttttacaaatataatataggcatttaacgtttctctaattgtatgtttttcttcttttttgattgaagaccctgaaaacaggggaacaaaaggaaacaacaaacaaccaacaacagaacatcctagcataagctgaagacgagaaaaccagagctaacagcaaagaaaacaaataaaatccagaactagctactaaaccattacaaacgaaactagaaactatgagcagggagattttgaggacaatccgcccctgcagacgcagaggtaagaatgccaatctctgaaggcaaatcaatccaaccaaaacgattattttgattcgcccatttagccacggaatgggccacaccattgcaattcctcggtatccaggaggcttcccacatagtgaactgtgtcacgatcaatctaaatttggccacgtgatcttgaacactataatggagagttccaacttcccgaacatcagtcttcaaagcgtcaattgcatttaaggagtcattctgaaaaatgatcttttcataccctttcttcaccgcttcttcggcacccttacaaaggactaaaacttctccaatgagggggtcatttaccgtgagccgaaa

SEQ ID NO: 53725 - DNA, 3124 bp, Cannabis sativa
tttagttagtaaaaaataatgggtaactcaataatagagagggagagtttggaaacactcctataatgggtaaaactcaataaaaaagtttttttttaaatggttggattatgtttgaaaatttaattttgattataagagaaagatataagaaaaaaatatattgataattaaaaaaaaaaaatcaacttgaatcaattttttttcatcgttaattttttattacaattatttagttaatttttatatcttaaagcacatatcataatagtttataatgtcgaaaataggtttaaatttttttaaacatgtatgataaactggaaataagaaattttattttcggtactatgaactatttgaaatttttaaaatatatctacgggaataatattataattataataaatataactattaaaaaaaattagaaaacaaatattgatacatgtgatttagagtgtaaaaattgactaagaatattgttataaaatgttataattaacactcttttcttctctattcaattctttctatatcaaacataaaaaaaataattttttttatcttttagatactttttttatatattttccctcttttctttacaccaaaatttaagctaacatagcctaaatttttctatttttttttttttataatttatactgttaaaaataatatttaaacacttaattataataattcatattaaaatcgtcacaaatgtaataaaaaaagttatgagtgtcctaactaactagaactgtaaaaagaaaatggagtaaaaaagtaattttttaggggtgtacactatactatatatatttatatatactttaatttttattttttttgtatttttacggaattctacattaaaatttctattgcactagcgctgcaacctaaattgtaacaaaaaaaattgtatagaaaccattattgcaactagcgttgcaaccactttagaaactcaaatcataaatttaaaaaaaaaataatatttaaggtaatttttctaaaaaaaataataattatttagattttgttaaaatgtttaataatatataaatttcttattggctttggagaaatctgggtgtgatttggtccaaatctggaagagagacaatacagacaaatatttacaataattattattattattattaactaatactattatttggtcaaaattttaaccctattttttgggattgatgttttcttgtttttttatcttttttgtttttttataacagtaaaaattatgtatataaaaacataaaaataaaaatcattcacatgttgaaattgattttggatatttattcataaatatttttgatatagtaattaaaataatgtgacattgtcacatgtgttgctattttctatacataaaattattattgctgtaatttcaaaatggaccacattatatatgatgatggaaaataatgtcaactaaatttagtatattggaaaataatacaatatgcaagtcttaattatataattattatcccttcaaaaatttatataattattattattatttatttttaatgtcatcaatgtgcatgtgtagactttcaattattatcacccattcctcataaattcactaatacttaaattttataaattaattgcaaaatttattacaattacaaatatcaatataaaatactattaagatgtattccaaaattttaaacaataatctaaacctaatcactagacaaaagtctcctttttagggatctttctttttaagtaaagggttaataccaaaaaaaaatagatttctttgttaagattttatagtaggtatgtatgggattatattaaaatatatataataaaaaatgtaattttacttttcacaattttaataaaattgtgagacagtttgtaacagactatactctaattaagtgtaaaaaaatataaggaaactatgtgaaatagtataacggaaactaattaatagaatagtataagggaaactaaataatagatatttaataataatatgtaaatatacctcgtgttgtgtggtctagtgataaggaagtttttattagccttctctctttgtttaggccaaagattcgactctcactcggctcttcaattgtgagggattatgttagacccttgaagattgacttactgtgtggtggactatctttgagataggaatccttatgtaaagtataagtaccgatgatctaagtaaagtaggatgataagtaaactggtttgcatgtgattctctatttttctaataaaaaaaaattacatataaatatatttttatatataaaaaaaatataaatataactagactgaattgagtaattaaataactaaatttttgattaatttagatattgcccataaaaaatatcctatacattatagttttacccttgaatttatattaaaccctaactacacattgaaacaaaatattaagcttaagtattatttttcacacaatagtaataagcatcatacattaataaatgcaattttgtgtaaactcacaccatagtatttttttgatgttagtataataaattataataaaatgaataataattgtgatacctttaaattgcatacattgtatatacaaaatgatatgtaattaattttaatcacacaatcaaaaataatgtgatactatatataattatccataataaaaatgaaactattaagtgtaaaaagtgtgtacaattttaatgcatctccaccattattatcatatttataaagttacaattctataaataaataatcaattattaattgaggtgtcttcattagaaaagagtgaagaaaaggttaagaagaatcaatatcaaataataataattaaaaaaaaaatgtataagtgaacacccttaacaaaatcacttaaatatatatatatagagatttatatttatatatttgtatatattatataattatggcatatattttcaactagattcatgaatgctttaattagctctgacccaaagaagaccattgtcttagatttaaatgaggaaaaattaaggtgtcataaactcaattgagaagtaaaaaaattaaattaaaa

SEQ ID NO: 53726 - DNA, 977 bp, Cannabis sativa
caaaacaccaaaatattgtggagtacgtgatctcctggaaacaaaaacaaatatcaaaaacggtctgacaaagaagagttaattcaaagaagtcaagttaaggtgatctggtcaaacctggagattcacaagaaatcctgaatgaccagaagatttcaatccaacagctaatgtgaaccatgcagatgcattcactggactttttgctgtagttaatcccacaagagcaacttccgtaccaaaaaaaccaatttactgcagagaaagcaattggatcctttgattattctatgcatgattaaaatattttaagattaatgtttttatgactaagaaagatatggtagtgtgctagtgctaaggttttaccttaattgcttactaatgcacatgcaccaaaggaataggaagaaaaatatcccctgatggggtttttctacttttggttttttagataaaagaaccacaattaattctatatggtctagaaaatttaacataattttctttctttggtattttttaagggtgtagtgtactatagtgaaaactaattgtttagtcaaaaactaaggaaacaaaacagctcatgaataaaacgttcttgcacaaaacatggctgttaatgaacaagaactccatgcctgcatgatcttccgcgttaaagtgatagatgtaccactacagactaacaggtccgaccataaaccagtaagatatcccatgactgtcatcccactccatggaacagcactaaaccaagctgcatgcctgaggttaacttgaaacacctgtagtatgaagtaccttgcttgagtttcaaaatacttctagatacggctaacaaatgacacaaaataaggataagttttagttctgacaaagttaaagcaaacaggcattcaggagagaacaacgaagaaaccctgcaaaagaagaatagtgagttttcataaatagaaagtatcaagaatcta

SEQ ID NO: 53727 - DNA, 1791 bp, Cannabis sativa
caagtttgtggttttctccctgatcttagatcttattttttatgacaaaaaaatgctcaaaacactttttacttaacttgatcagaaacagtctacgttgacaaaatgtcaacctgggcactgggcccagccctaagtgtcaaccttggtgctaggacccatttttcccattcaaaaattttgtttggtctccaaaaatagttgaacctcaatattttctgaagacagaggagatgctttgcttgaaataattcctaaaaaaaactccattttaaatggcctaggttgacaaaatgttaacctaggcactgggacttgttatttatgccaaggaattgttttttatcctccagaaggacctatttccccattttttatgaaagagaatttgatgcaaaagtcagatctctgatcggacacttggaaggccgccaaattgacagattttcaacctgggcacaaggtgctttgtaatgaccgcattttaggatatggattagtaaagacagttagcgttaattattaatattttttagaattatttatgattttatttaattgtgggtcccattattaaaagtgggcactagagttataatttctaaattctggagattttattaaactctagaggtattatttgtattatatatggattatgctatttttatgatatttgctcggtgacaatagaaaatacgatggatgtctattttaatcacatgggtaagtctagaacatttttcttagaggggaaaatataaaaaatagatagaataccgagtttgagcggggttatggtttttaactattttacccctaggctttaattggctttagtttaagcaccaagggtatttttggaattaacctcatgggattaggtgtcctgttctttgaatggcagctggccattattagttagtaaaagcaattattctttttcccatcaattaagaaaagtaaaagaaaaaaacaaaatagagaaagatcatctttctttctctcttggttcggctccctcacaactagaagaacccagccttaaatttctattgttttgcttgaattcagcaagaatttaaggtgttgaaagtgaaggtaaccctagaaacctttatctcatgaatttacaagttttaaagttgagttttagtctatgaaatggtgatttgttgttgtggaagttaggtttgtgttgtatttggtttatgatgtttagtaaagatattttaggtctgaatttactggtttggaagcttaattcttaggttgagcaagtttgagtttgagttttaagaagtcaaacttggctcaataatgacatgttttgattttgtgtgaatttttgaactctgttgcttggaatatgttgtgggaggtcaatataggtgttctggaagttttggtgaagtttggacatggtttgagtaggttttggattgtttggggaaacctggtgcaaatcagttaactagtttgtcaagtcctgtaaaaccagttaatcggttctgggactggtttcccgaacaatccctttcttcgattcatgtccatttcagagccatggttgggtgattccttgttgcttagggtattgtggctttagttatcattaccaaaaccttcagttggaggtttggatttcctagattagggttttggcatgtatttacccgattatgttaagtgattagggcatccatctagcatgaggttttctgttcaggtcggccaactcacttgaattcggaaactaggtaagaatagcatagaaaatattgtatatat

SEQ ID NO: 53728 - DNA, 1166 bp, Cannabis sativa
aaaaaataaaaaagtgtcattaaaatatttaattagatggtgcaagaggagagggaattataaaaaacaataccgagagctttggatctaaaaaagcctaaactttaggggcatgccttaaagtatcttatataataatgcagtacatgattggtacaacaaaacatcatagtccaataatgtttttgcaacgaaattgcacaaacctagaatgttgtaatgacttggaagccgccttaacaattaacaatttctttttccaaagttgggaaaagagaagattttgctttttaggatttatttaaatattttttaattaaattgttataaatgtaattaagttcgaacccaaagtgatctttcttagattagatgtagatatatggtaaaacagaaaaaatttaaaagataaatatggtaaagtggtacaccaaattagatattcataacctataccattattttgatcctatgtttgaaggttttaattcttttttccttaattgtagagaaattttcaattatttgacttctacatctatagattgcaaaaacataggaattatatttttctcaaatttaatagaaaaaattataatatattttcaaaattattggcctcaaaacataattaattgtaaaactatgaattaaaccatattgtatagatatagaaatttaatatatatatatatatatgagtgtacttttaatggtattactcattaaaagtattattaggaaaatttaaatttttatacttaatttttctatctaattaacaaatatattttatttttacattatatggctacggttgttgcatcgactgaaaaatgttaaaatttggggtaaggtgaatgggagtttcatctcaaaatcaattggcaatgggaggaatagcccatgcatcttatatattctattatctttccacacgatagcaatgtgagactctttaacatctcccctcaagatggtagctattttatttgctcaccatcttggacaactcgatcataagcggctttttttttgctcactatccctgatcacaagtcttcctatagatatcaagttaaggcgaatgtctggaacatgcctaacatctttgagaatcaatttgctaccaacactagtttccaagcaaatatctccaataccca

SEQ ID NO: 53729 - DNA, 1506 bp, Cannabis sativa
tatgttgatatgaagaaatttcggtcaatattattggaaaatgctttattagatatgtatgtatgctaagtgtggttgtttagaagaagcaagtgaagtatttaattaacagtatgaagttttaggatgatttcagcgtcttgaatgcaagatttgggtatgagtccggattctgttgcttttgtatcagttctatgggcttgcagccatgttggattgctcgaggagaggaagtactactttaagttgatgatttacaagtatcaaatagttccagggctaaaactattcgtgcatggttgattcgaagagatgccaacagagcacaacaaaagagtttgggggctttgttgagtgcttgcagtgtttgcaaccaacatttatgcgaaacctgagaggtggcaagaggtgaccacagttagattaattatgaattgaactcacaccattgcgtaatgtgtcatacactccaaccaactaagttatgaatattttctttcaatatacttaattttacttaaaataaaactaaagttcaaggagttgatgaagagttggatgtatttgtaagaaaaatgaacgagattgattcaactctccatgatgtagaggaggaagacaaggagtgtcaactagctattcatagtgaaaagcttgcaattgtttgtgaaattatgaattcagaactcagaattacaaagaatcttcgcatttgtggggactatcatactgtagcgaaactgataaccgaaatgaaattgttgtaagagacactcatcctttccaccatgtcaccaatgggtatttgctcttttggagattactggtaaatttcatcatcatatagagtagtattttcaattggattacattagttgattggaaacttgaacatgttttactcacactaatttgttgatgtggaaattatttatttatttattttgtaaaaatttagatcttttcatctgtttaattgaggaacattgatcattgaacacctgcgattggttatttttttctctcaccaatttattatttgcttaataacaatttgagatattcaaactattaggatttaggcttcacttgttagttactggtttgtactgttttataggaagtagttaattctgttaattaactccttatcctttcttttctgtcagtagttagttaaatataactaactttagctgaatattatttgggtagttgggtgtccctgcagtatatatattgtcctatttttcatttctgtatcatctgaatcttgcaattcaataaaatgatttctctttcttttcttaataaaaactacaaggagttgaaaaaaaaaagtatgaatccaaaggcacatagttaatgagtgagaagactagcatcttatattttgagccacttgcctagatgaaaagagaagttcaattatgtttcagtcttaacatttttctgctttattatttattaatttgaattgaaataaattgcaggtaaaaggcatat

SEQ ID NO: 53730 - DNA, 2107 bp, Cannabis sativa
ttcgcgacaaggtaggttcttcttcttcattatcatattggctcaccctctcttagtttctttcatgggtgcttctaagttcttagatcggttcaatactttttctcttgttgttctttaaaccttaaaatctgaccttattttattattccttggtgattttgtgatttggtgatttcgtgatcttgggcaagattagaaattagaataagagaatgataataaggtatacatgtgaagaatacaaaggtagtgggtttttgaccttgtaatattgactatcatttattataattaaattatggattaatatcataaacttgttgaaatactacataccaaagagttttatgtattttatataccaaaaacttgctgaatatattctaattagtttatgtttaaactcagttttttctacaggttttgaaagataaggataactggataagcatcgacaatatcgtaagatgggatatatgactcatctaaatgaatatatatatatacatgttatttattgatattttttgttcatttgcttttttttttttttttttggcttaaatactttgattgagttgaatctagtaatagatgctagattgttttgaccttatttgaatggcagatttttatattttttctttagtatttcttgactgcatggctgattttaaaatgtccactaatcataataattttgttcgaaaagtactatgaaattatgactcactttcaaagttcctattctttttgtcatctcatatagtaaattttaccattaagtagtgtttatgttctataattatgttatatgggtttggggatcgcatgtctgacttactgattcattttatcttttaatcttgttaaattgggattattgaagccacaaaatacaagttaaagtcatgttcaaaatggtgtggcagaactaaactataagctcatggtggcataactaaagctaacttttggctagtttggttaaggctcaagagagttagttgttagtttagatataaaatttttgttacctctttcttagttttagattggtctttaaattgtgttgatcaattcattattgatattagaaaatttattagtctcattctcatatctcatatgtacagtatatgttctagctttcttatgcaatatcatttaaaaggccaataatacatagtcaacatcccgaggtattgtgtaagtctactattcttagttataatatgtgaatgtgatttttctctttcaatatcttaaattggaggagtgaagattaggttctaattagggctttgagaactaatcaatgaacagtttaacttgattgcttctacaataaccatttttttacccttggaatttagaagtaacatattgtaggtgaatctcacttataagagctatacttttttttttgagagtgatatatctcactcagcttgattgttattactgaatgcctactcaagtgtcatcttttttgaaatttcttgcttataattgtatgtcagttagcattatgggtctgtatagtaagtaatgaatgaatcatggaattttcttccaagtagcaaaggatagtttacacttgatcttgtagaatagtgtgcaattgttttgttcatttgtttttttttttttcattaaaatacatttgagttttgattgagctaaaaaatatatcaactaattttttattttctctgtttcagcgacaagtcttctatagcataaggcattactttgctaaaaaattggctgaacagtgagtgagtgtaatactcttgttgtagcatggacaaagttgaaaatttgtattttgtagaattgtcaagattgcatattggatttgtattgtattactgtaatagttttttttttttttttgtatttggactttggactgttttgttattttttttatttggactggtttgtatttacaatttggacggttatgttcttagaagttagaactatgaagtggtttattttgatttgatttatagttaaattttaaaatatgtttatctagttgatttaaacatttctttagctacaactggtttaatatgttttcctcattaagcaa

SEQ ID NO: 53731 - DNA, 2000 bp, Cannabis sativa
ttttttttttttttcttttttacacttttattatatcaagttttcaaaaatactgtattaaagttttaaattacaaaatactatgtttcagtaaaataaaaagacaactaaaaaaacaactttaaaaaaagcttaacaaacaacatggaaataacaaaaggataactacaaagtaacataaaaagagaaaattgcgacaaaagtccttaaaagtttactttgatacagacaagttcctaacttagaaaaatagcggtaatagtcctcaaactcaaaatttttgtaagtctattggtcttctttttaatagatccgttaatttctctttaaaatatcacatgttaatattaaattgtggcataagtccttaaaaagttcattttaatgaaggtaagttcccaatcttaaaaaattgtgacagcaaccccaagctcaaaattcttgttagtctgtaggtacttaatttaactgctccattattgttctaaaaaatgccatatattaattatttattgatcaaaattataattttaattaaaattaatttaaaatataacaaataaataaattaattattttaaaaactaatttattaaccttttctttttatcttttctattttttttatcattcttcttcttctatttattcttagccctacatcccagctctggtctactttactaaaactctccaatttatattagcaagagcggacgctctaaaagaaatctaagtaaagtttgaaccagagaagctaaaataaaaaaaatagccatcaaaacccaccacccaccatagatggggactggcagaatagattcagggagaggatagccatcaaaacccatctaatgcaactatttagggttttttttgcttattgctgttctaggttttctgcatgggatcgtgggatgggacgatgaagaaagtagagatgaaggatgacacttgtgggcggcaagcctccaccatcgagaagggtcgaagacgaatcgtaaaaggtttttttctttatatatatatcatgatttttaatctaaaaaaaataaaaaaaaaatattaaagtttttaataattttttattatttaaataatttttacgttgtgaagaaccaatacattttttacaacacgtgtgaaaattttaagaactacaaataaagttattaaattgggtacctacggactataaccacaatttttcgagattatgacttatatgcatcaaagtaaactttttgagaacttatctgtatcaaagtaaattttttagagacttatgccacaatttaatatcaacacattatattttagggaggaattaacaaatctgttagaaagaggagcaacagacttacaaaaatctcgagcttagggactattgctgctattttttaaggttgggaacttatcctgcatcaaagtaaactttttaggttcttttgccacaattttcccaacagaaaaataacaaaatattgacctaattgcaatatacaaaacaatatcaacttaatatgtttttgtattacgatttctttacttagttttgacaacttgattagaatttgttgttacaacttcatacttttaatttttttctttaattctttttgagatagtgacagttaaaatgatattttttttaaaaaaaaaaataaataaataattacattaataataaaaataataaaattttatgatttcaaagttgagtatataatataatgagtaatatataataaatatgttactaccgcacattgtgtcaattaaaaaaataaaaaaaaaatcttatcattgtattttaataaaatgtgtcaaaaaataaattaaatatatgtatctaaactacaaagcaacacacatacaaccaaaaaattgtcaggaagaaattaaaaatatacaccatacaaaatacatatgaataaaaaataactattggaacaaaaaattattctgaaaactacataaaaaataattaaaaaataaca

SEQ ID NO: 53732 - DNA, 1039 bp, Cannabis sativa
  modified_base (210)..(220): a, c, t, g, unknown or other
  modified_base (412)..(414): a, c, t, g, unknown or other
  modified_base (645)..(659): a, c, t, g, unknown or other
  modified_base (792)..(801): a, c, t, g, unknown or other
gtttgggtctgagttcaggttcgggttcaggtcctgaatccaggttagggttgggatctgggtccggctcccgattcgggtctaggtctgatttggagtctgggtcctggtcccgttacggttctggatctaggtccaatttcagttatgattccatgtctaagtcctagttccagtcccggtcaacttccaattttgggtcacagggtnnnnnnnnnnntccacttttaggtttgggactgggtttaggtcctcgtgtgggttcgcgtcctcgtcaaggttgaggtcaagggctgggttccaaatcaagacaccgactatgggttttgtccaagccctgggtcgagatccatatccaatctcgggtcccagggttgttcgatttctagtgccgggtcacgagctaggtccnnngttcaagttcgggtctgggtcgcgtactaggttccggtccagatttcagtctaggtctagactaagctccgtgtgtgggttcgcgtcctgattcttggtctatgctgggtccgagtccaaagttccaatcccgatctgagtttggatttagttctcggtctaagtcgttggttctgaacctggtttgggttcgagtttgggtccggctccgggtctagctttgggtctgannnnnnnnnnnnnnntgagttcgggtctgagtctgtgtgggtttatgtccaggtctagaccccgatctgggtctggattcgggtccatgtccaagtgggggtccaagttttggtttgggtcacgatctcggtcaagatctaggtccannnnnnnnnncccagtctaggtcttggtccgagtccaggttattatccggatccctatctaggtccaagtctctgtttgggatcgggtccaagatttaggtcctggtcaaggtctaatttccgatctaggtatactaccgtgtccgggcacgagttcgattctcagtttgggtattaggctaggtctgtgttcggtttttatgtctgggtccgggtcctggtcacggtcctagtcttgttctagggtc

SEQ ID NO: 53733 - DNA, 1062 bp, Cannabis sativa
tacaaacgcactttgaacttcggatatggcttgatgaagactatgtttcatacgccccgctaaacactttgctactatcttatagaccacattacataagctaatgggtctaaattctgacatttggattggttttggtagtttcgggataaggcaaataagggtatcattaatagcttcaacactctttccctcattgagaattcccaagcaaactgtagtgacttcttctccaatgatcggccagaatttcctataaaataggcctggcattccatcattacccggggctttgtgtggatgaatatctctcatagcttgtactacatcgtcctttgtaaaaggagcaataaggtactcattggtttctcgggaaattttgtttggtaccatgctttgaaactcttttaactcatctgcagaagccggttgtgccgtaaacaactgttggaagtagttacatgccacccgtcccaccattctatttccataaacccattgagcattttgatcaagcaagcccgtaattgagttcttcttcttccttgagttcgctttcctgtgaaaaactttgtatttcggtccccttccttcaaccataaagctcgacttctttgtttccaaaatttctcctctttgtccaaatacacattgtaggattgttccaattccttcaattgattccagcccgtgttgtgtattcgattagataaggtagcaattttatcttcatattcctttatcctcatatgcatttcctttttgcgagccttattccaattattaagagctgctccacatttatccaattggtctttgagctccctagccgtggtgcttacagtgccagccccccatgatttcgtgaccaactccacacaagtttcttcctcagcccatgcatgttcaaaatgaaatcgagagtgccatcgaacccccttaacactatccagttgttgttgagcacaagtaagtaatagcgggcaatgatcggagttgattcgttcaagatgaaaaacttttgcagcaggaaacatgtcaaaccagtcagaatttccacaa

SEQ ID NO: 53734 - DNA, 1792 bp, Cannabis sativa
ttttctttaagttaaagttacattgttttaaaaaaataaaatagctatgctctattgttattgttataagcaagccacatttgtccagcaatgtcatctctgacattttccatctgagccatataagcttgactaaaattaatctccggtgtctgataaatttctggttcatctcctccttgttggttttgagtgccttcaatatcttctaatggtgtggcgtcaatagagtattggtcaaacattctatcatcaatagagtgcattttaatccacttgtggatagcacaacatgctattggtattctacgttgctttccaagcaaatatggaggcattgacttcaaaattgggaatatagctttaagaagtccaaaacaacgttcaatcacattacgcaatgatgagtgcctataattgaataactccattgcacctctggggtgattccctcttcctctaaaacgacgcaagtgataacgttcaccacgatatggtgctagaaaccccggcatattcggatagccagaatcaacaacatagtattttcctatattaaaatcaattattagtaagaacattctatagaaaaatattactaacatagaaaattatttcttttctaattgtatcaagattaattaattttaataccttgtggtggcataggaaagctatcatcttttctaattgcatcttgaagcactcgagaatcattggctgttccttcccacccagcgtacacataagtaaacatcatattaaaagagcatgcagccattacattttgtgttacatctactttccttcctctatatgcaagttgttttagagctggtgcaactgcacttacatgcgtaccatcaattgctccaacacaatcctacaaaacaaaatatagaaaatcaatactatcctcaactaaaatcatatcaattataactagtattgcacttaattaatgaataaaagttaccttaaaccatgagaaatactttgaattattttgaatttctggttgcacagtgttaaagtcaataggctttataacttcatttcctaaataacacaatgcgtctagcactctactaaattgacgacaaacagtttctactgaatgttgatatctttcagctacagttctaactctttggttatgtgttacaatccacaaaaacatgacaacagcttcttcaacactaattaacttatcattgtttctattacttccatttctactaattgacgacataaagatctaaaagtgttattatccattctaattgtgtaaaataatctatcaggatgaccatttagtagctcaattaaatattcacgtccagacatatttgaagtgcgcaatggtcttctaatttgttgagattgatgcattttatgtaattgattaaccaatagaacttgaccaactacttcctcacttgatgaagaagaagtatcaccaaataatatttgaaactcctcgtcagaatcatccatcttaggcacctaattatcaataaaagttaataaattaaaatttcacaaatattgtcaaacaaagaaagaaatacattaaacaattcaatcattaaaacaaacaccaacccaagttcattacacatagactaaaagaaagcacataaaatttgttcagtagttcataaaacacaaagtcaaaggaaataaatgatattttaattcactccaacaatgagtcaagatatgcacgacgacgttgttcactcattctcaggaatattccatgccattctgggtttgcaacaaactcacg

SEQ ID NO: 53735 - DNA, 1781 bp, Cannabis sativa
tggtgtagcgaagctgctactggaattcggtgcggatccagaggcggaagacgataagcggcggacgccgttggatttggcgagggagattctgaaggtgacgccaaaagggaatccgatgcattttgggagaaggatagggttagaaggagtgattggagctttggaaggagcagtattcgagtacgcggaggtgcaggagattatggagaagagaggcaaaggtgatgacgtggagtatctggtgaggtggaaagatgatgaagtcaacgaatgggtcaaagccaagtacgtggctgaggatctggtgatggattacgaggctgggttagagtacgctgtggctgagggtgtaatggggaagagacttggggacgatgggaagaatgagtatttgattaaatggacggatattgatgaagccacgtgggagcctgaggagaatgttgatcctgatttgatccaggagtttgaaaatagtcaaagtggtcaaaatggtaaattaaagatgattgatggacaatgatctttgtaatttttgtattggctaattttcatgtatattgattaattatcatgataacagagttcttattgattaaataattaattaatgagttccttttccttccttgattgttgcactgattgatattggatttagaattagaatgagttattattctcctcaattttcaatttggtttaggaaggaagccatctagtattaattactaactttgacattttgaacaaaagaaatttggaaagaatagattttggggaccatatagaaaatttagacaccgtgaggttacagtgagtcttgtagacgtagtggatggagtaaaatattaaggagaaatgaattagggtaagtagaaatggtatggaagaatgatgattgtatttgttgtaggatcatagatttgaatgaataggcaggacttgaattgacaatcacgtggtatgatctgagtgtgttagctagtcagtgttacccatcacgcaataattttagtttaggtagttgcatataaataggtagctgcaattgggtttaagctcactgttttttaacgccataccaggtgtttagaaagtgaaaggctcggatcaatgggcccagcccataatcatcactgtaccttgaaaaggaaaatataatagttgtttcatttagttcatcaaaataaataataataaaaaaaatagttgtttcatatatttatattatgatatatttaaaaaaattaccctacaatttttatgtatcttttttaatgaattttatgtcaaatccttttggaccttaatactactaacggttgaagttatagtacactccgtgtttaggtagattttttttatgtattttggtgttctcaatagttttttaatttaatattttattataattatctatattatagttatttaaagttgtttttaaatttttaaaacaatttaaaaatttttattgtaccaaaataaagtttaaatatattattacataccataaataacagtttaaaaattatttttattactataaattgtttaagttattttgaaaaatttaaatgtggtcctaactatttaatcataattactattgtctttcagaaaatgtataattgtgtcatgttcaatctaaccctcatttattgccaaaaaagatacgattttattctctaattataattacaatatttagaatacattgcacatatttactctttttttttggaaagtattccacttcttcacacccttctttc

SEQ ID NO: 53736 - DNA, 1594 bp, Cannabis sativa
agagtaaatcttttattctctgatgaataattatacaagggagaggttcatatatatacctcttcaggagtgaaaacacttaaccaatcctaacaaccaaatacaacagacaatgtaacagacttaacagaatgtaacagaccttaactaactctcaatcattggtattgcttgtatcctcaacatgccccctcaagctacacgggaaggaatccagtgatagcttgttacataaaaagttaaatttaggaaaagttaaggccttagtaaggatgtctgctggttgttcttctgtagggatgtaggaaacatcaactttgttttgtaagaccaaatcacgaacatagtgtacatccacttcgatatgcttagtacgagagtgaaatacaggattggaagcaagcatttgagctccttggttatcacaccatatgattggtttggaaggaagaatgacaccaagttcattcaagactgaagcaatccaaactacttcagttgctgtagttgacagggatcggtattcgctttctgtgcttgatctggacacagccttttgtttgcgagaaccccacgatatcaaattatcaccaagcttgacacagaatccagtaacagatttcctgtcaacaatatcgcaagcccagtcggcatcagagaacccttctaaaactagtcgagatgcagacttaaagacaaggcctttattgatagtgcctttaatataccgtagtacacgcttgcatgcacaccagtgagccactgtaggggattgcatgaactggctaagcttattaacagcaaaggagaggtctggccgagttaaagtaaggtattgtagagccccaattgtacttcggtaaagtgtaggatcggagaactcttcactggtgttgttataaagcttgtaacctggacagattggtgtagtgcaagattttgcatctagcatatctgttttgtgaagaatatctaaggcatacttagactgacataggtgtatagcagtctcagtccgatgtgcttgaaaaccaagaaagtatgtcacctggccgagagcttttagagcaaatttgctgttgagtttggatataacttggtgaatgtcgactgagttttctccagtaattaaaatatcgtcgacataaaccaaaattagtaaagaatggcctggttgtttggtaaaaaacagagaattgtctgagactgaattctgaaaaccccatgatagtaaagcttgtttgagtttgtcataccaggctctaggagcttgtttgagaccatagagagccttgttgagtttgcaaacatggttgggataattcgaatcttcaaagcctttaggttgtcgcatgtaaacagtttccttgaggtccccattgaggaatgtgttgttgacatcgacttgttgaatatcccatccataagtaatggcaagagtgaacatgattcggatcgttgatgcttttacaacagggctaaaggtgtcaaagtagtctataccagctgtttgttggaacccctttgcaactaaacgagctttaagccgatcaacactgccatccatatttaatttcaccttatatacccattt

SEQ ID NO: 53737 - DNA, 6100 bp, Cannabis sativa
gttgaatactcgcacttgttcatcgtattgttcttcttattattattatcattcatttttggtgttgcgaaattttctcaacaacaagtctaatccccataatacccttataattcaaaaaaaaaagaacatttcttctctcttcctttcacccatctcttatctcttctcttttctctcaatcttactcactcacaaatctcattctcttcactaatttcatcaccaaataacacaatttttcttttttatataacctatactacaagctcggtgctttgatggttaatttttttttgataaagcatcatacatgaattcaataggtaatgatttttttttgtttaatcttattgttggttgttatatttagtttataatgttgtttcgatagtcgatctgttagctgttgttgttttatgttgttttttgtgcaaaaatagttctttaagtattctgtaatttttctagtttttggttttttttttcatctggcctgatgatttccgaaagaggtctaatggtggcccgatggttagatctgattcgagattagggatgatgtttacataggcccaatgggatagttcaatgccctattagtgtcccgatggtctatccgatattgtgttcgatgccacttagaattttgttttatatgccttgtctgatgggtccgatagttatgtccaatagttttttgttggaattatcatacggggtccaatattggttcgatgtgagtttgatgcttgatagaattaaggcttgttgaggattttttttatcacttttctgttagatttttgttctaaattttattctatttaaatgtttgtggataacaggttcaactatttttgcattcgttatgtagaatagtgtttggtgtaaacgacaatgaaggagaagagagaagagagagaagaaagaagatagagaaagaattaaaaattgtattgattactaaaaaatagagtgttacatgcttttatacactaaactaagaaaggaaagaagctcaattagttgcaatagaaagcataacaaccataacagaaatactaactaattggacaactcagcttcagtttccttaatagtccccttcaaactaagtgtgcttgagcacaagacatttagtttgtcatgaaacagaggaaagagattgttagaaattagctttgttaggcagtttgctatttggtgttctacagggacatgagaaacttgaatttctttattgagaactttatctcgaacaaagtagaggtcaatctcaatatgttttttttgcgagcatgtaatacagggttagctgctagcattatggaactccaattatcacaccaaatagagggtgtaatagttgccttcatatggagctaagacaacaaagattgcagctaggaaatctcagtgacaacaatagccaaactttaaaattcaactttggttgatgatctcgagatggtggtttgtttcttagatttccatgcaactaagctttctcccaaaaacacacggtaaccagttgtcgatcttcgatcatttggatatgtagcccaatttgcatcacaatatgcttgtatatgaagagaagaatcctttggtatttgaagaccataatctaaggtacttaccaaatacctcataattcattttacagcaatccaatgagattgaagaggttgtgcataaaataacaaaccttattgacagtaaaggaaaattttggtctggtgatgcaagcatattgtagagccccaacaatggacttgtagagagtggggtcttcaacatgatcacttccaaaatgtgataaccttcataggagagctttaagtctactccttgcatttgaactttgcaaagaagatcttgaatgcacttttgttgagataatagaatcccattttcaattggaatgacttgaatgcctaggaagtatgacatgttgccaagatcttttagagaaaatgtattggtcaaagcttttatgagatgggagacaacattgttgtcatttcttgtgatgagtatatcatcaacatatacaagaacatatagtgtgagtgtagtggttgctttgacaaacaatgattgatctgattttgcagaggaaaaaccaaaattgaccacaacagttgatagtttttcaaaccaagctctcagagcttgctttaaaccatacagagctttgttgagtttgcccaccttctcaagacaactttgatcaataaagcctggtggttggaccatatatatgtcttcttgtaagtcaccattcaagaaggcattgtcaatatcaagttgtcgaattggccaattgttagtgacaccaatattaagcaccacctgaatagttactggtttaatcatagggctaaaagtttcaataaaatcagaaccagcttgttaatggtatccttttgctaccaaccgagccttaaacttggaaactgagccatcaacattttcttttattctatatacccacttgcaatcaattagtgtcacaccatcagggtgtagaacaagtgtccaagttttgtttcttatcaaagcttttattttagttcccatcgcagcaaaccatttgctatgaaggagaaaagttttgatggatgtaggatacaagaatgccatgagaacttttggcttggttatgcctgacttggacctggttcgcatgggatgagagtttgagttagcttttgggggaacaatagaactgttatcctaagagtttgtgttaattgttggtaattgtgtttgtgggtcaggttgaggtacaagttgtaatgtttgagtattttaagatggagtagggatggtaggagcaaccatacgtgatttaatgggtggttgtggtatagacgaggtggggggcaaggcttctatggtgacaaccacttgtggttcagctgtgaaactagtaactggaatctcacgatgaacctgcataggttgtgaccaagtgtttgaaacacaaggagctgggacagattggtttgtgtgagacatgttggttatgttggtaggcacaagtgtgtgagctaatgtcatactagatccaggttgagccaaaaaggtagcttaactgacgggaaatacattctcatcaaggagaacatccctcgaaatgtaaagcttgccatctttggataagcatttgtatcctttatgtgatatgatataaccaagaaagacacatggtacagatctatatcggagtttaacacgattatagggtctaagatttggatagcataagcaaccaaagaccctaagagtagaataatcatgttgtgtgttaaataaaatcttaagaggagacttgaaatgtaattatggagtaggcattctatttattcgaaagacatcagccatataggcttcaccccaatacttaagtggaaaataagcatgagctagaagagctaaactacttttaacaatgtgcctatgtttcctctcagccactctattttgttcatgggtgtgaggacatgagactctatgaattataccatgatcttgtaaaagattggtgaaagcttggtattctcaatcaaattggatctgtgtaattttgaaacaaaactgaagctcaacctatgttttgaaggtaataaaggttggtaagcctcacacttggttctaagcatgtagatccaagggtgccttaagaaggcatcaacataggttaacattggtcaagtatgccatcatccttggtcctttttcttggtattctcccctcacttagaacaccaccaactgcgagtcgctgaaaatccacaaccatgtgacctttaattccttagcaagtctcaattaggctaacattgcttcatactcagccttgttgttggaggccttaaagccaaacctttttgcacaatgcattttggtttctctaggggctgtcattacaaccccatcccctgctccagtgtcattccaggctccatctacatgcaattttcaaatggactctccttctccattctcttatgactctttgtcagcttctcgctcttggtctccctcgtctggacaataggtgaactctaccatgaaatctaccataacccgcccattgatcgacactcttggggtgtaagatatgttgaattgacttagctctatcgaccatttgagtaggcattttgaggttttgggtttgtgcagcacttacctcaaagggtggttggttaacaccatgattgcatgtgtgtgaaagtattgcttaaacttctgcgatgctacaatgagattgtaagacaacttatcaatctctaagtaacaagtcttatcatccacaaaatgctgactaatgtagtatataggctgttgctgctttccttcccctcttacaagggcagtgctgatcagggcatgtttagagactcccagatatatgctccttcaagcttgtgaggcctcttgcaattctcgtcccaaacaaatttcttttttttagggtgtcaaagaatgggagacatttgtcagtggacctcaaaataaaccaatttagagcggctactctcccagttaggcattgcacctccctcatgttctttggtgactccatgtctattaatgcttttatttttttgggttttgcttctatacccctctcgttgaccacgaatcccaagaacattttgaaggacacaccaaatacacaatttagcggattcaacttcatccgatatttgtagagggtagtgaacattttgtccatatccttgactatatcccctgctctcatgatcttaacccacacgtcgttgacatatacctccatgttacgaccgatttggttagcaaacatcttgttgacaagtcattggtatgtcgccctagcatttttgagtccaaaaggcatgacccggtgtaatataagcctcaatctgttatgaataaagtatgctcctcatatgcaggattcatgggtatttggttgtaccctgagtatgcatccataaagcaaatcaattcgtgcccctctgttacatccactagctgatctatccatggcagtgggaagctatctttttggtaagccttgttcaaatgagtgaagtccatgcacactctccacttcccatttggaatgggaaccaaaacaaggtttgatacccacacacaataatatgcttctcagatgaatttgatgatgtcaagttggtcaacttcagcgttcaaagccttgtacttctcaaaatttagagccctccacttctaccttactggctttgcgtttggatctatgttgagatggtggcacattatggttggccctattccttccatgtcttcatgcgccaagcgaacacgtttggattattttccaaaaacttccttaattttcttttaagggtttcgaggagcccttttctgattttgaggaccttgagcgagctttccaagattactatttcttccaactcttctactatccctactcgcacttactcacaaactcgagggtctagttttgatgaaacttcatctcctttgctaggccccctatggaccatcatcgtcattggtcctcaaggcttagaggcgattctaaatgattctgttctgctttcaaagtggtgacgcccctgggggttaggaatttcatagccagatggtacatcgagatgattgccttcaaccagttgtgtgatggtcttcctagcacagcattgtaggtcattggacaatccactaccaagaaggtggtcatcaccgtggaatgtaggggactccccccactgttagtgctagctctattgtcccccgtggttgaatcaagtcttcggtgaactcatatatcggtgatacgtagggtttgagatccctaagacccaatcccatctcccccaaggcagtgaagaataggatatctactaaacttccattatcaaccaatgtctggtgtacccttgtgttagccatatgaaccataggcactagtggatcattgtgtgggaaatgtactcctctcatatcttcctttataaaggtgaccgagatgttttccccttcaaagttctttggaggtcttcactccaagctcgaggagtaaggttctagc

SEQ ID NO: 53738 - DNA, 1425 bp, Cannabis sativa
agttgccactttgttcaaagttgtgtttcatcactgtatctcacttgtagttgccactttgttcaaagttgttttcatcaccgtatcttacttgtagttgtcactacattcaaagctataatcatcaataccgcatctcacttatagtcaccactatcaaacctgttgtaattacttcatctcacttgtagttgccactatgttcaaagtcgttgtcattactgtatttcacttgtagttgtcactacattaaaatcataattctcagtaccacatctcacttatattcgttactacatttaatatcgatgttattagcaaagaacattatcaaaatcaatagaagaaaaaaattaataaaatcgtttgaattaattttttgataatacatataaatattaaaataaatgagatatatattttactttcattatatattcaggactcacatttatttatttaaacaaatatataatttaacaaaatacataaataaaaaataaattaaaaacaaacgttaaaactaaaagtatttaaaaaaacatacatatatcaaaaaactatagttaaatttaaattcaaattatacaaattgttaagataaaaaaatttaaatataaaaatccttagtattacacactataggactctaaaatctctatgttaagattgaaaacatacattgcatttcaattgcgctaaattaaaaatcttaattgattacaggaccctatattattaattcagttacacacactacagctagtctccaattaatttaagacgatcgacttatcaaattaaaaaaaaaaaaaagatgatatagtatatactacgaatcatcattaaaaaacccaaatgccccataagcccatcgagctacgaatggagcggttacgtacttaactgtatcatcaacgttttcagagtgaacatcaatgaaaggctgcatgttccgctttagccacgacacacgtaccacgacgatttcgattagtctcttattctagggactcatctattagattttttgctttaaataaaactcatttcaatataaccagatttattaattaattaaagatcaaaaattattttatgatgcatgatttacacgatttatttcatgattatgtttaatgtataaattatattacattcagaacatatatatttattaataattatatatcatatatatttttaattattatatgttattattgtgttctaaattatatatataaattttatattttgaattattttaattttttaacaataaacacccatgatacatagataaatgagttaattattaatgtatgtagtaaaatgatttaatctccaataagtatattaaaagtagagatttttacactaagtactaaatttaattacttttttacatttttaatgcttatc

SEQ ID NO: 53739 - DNA, 1920 bp, Cannabis sativa
aatcatttgcacaccttaatcacctctatatatatactatccaattctcacttcatactactcaactcaatacaatgagtcagagtcgtacaccctttttttcctatactccaccacactctactaatatggggtctaacattggatgaagacaaatgtgtagataagtgaaaagagacaaataatgatatcacaactacatagatacaatgcagcccaagttttcacataacaaaatccactcaaacataacaaaaacggttttatgaaaaaataaatatgatgcagcagattctgtgtaatatgatgatattacctcgtaagaaccattgccatagtttatagagtagtaatggatcagttctgacccatcaagtttcaccaaaattttctgatagacaattgacaatggactctgagtaccatcttgagcaacgatccatttcctctcagacaattatttctttattgccttcacaatccgatcatttgctcagacagtccagcagcacataaaatcaaacacaaatgctatagttaaataatttctacacataaaaattcataagaaaactaaattggacaacaaacttgatcatcatagttacacagaccaaatgatatactaaacatgtaagcatttaaggttttcgaaatctggtttagagttccaaaatcatgttttgtaatatattttgcaatgaatatatgtagaggacataaacatcaaataacacaattagatatatccaaatcacctgaaaagtatatgataattgaccaataagaatcccaaatatagtaacacaatagaaggtgcatgatataacatttttgctgctaagttctgatcaaaatataatgaaaactctatttgtatatattacctttacttaaaaagcaggtccataaactgtactcttaatacgtttacaaacaaaaattatgctagctagataggtatgaacattgaacacccacttatatacttcttcatttaccccaaaaaacttgtatacaaacttatgcttggaattataggccgctttgattcttctcttttacttgttctatctctgccttggtgtcctctgcctccttgttctgctgcttggaataaagctactatgatcaagtgacttgtgatggttctccgcatatacatcagcacaaattttattcaaacgaacacgacattctgcatactcttgttgttttttattcaagcgatttaatataataggcaaggcataagaagtattcttcctgatctcacccacaacatcaaccccatgctcaccatacaaccgttcaatacatctaagattcatagctgttaagtgatcttcaatgcagaaaggacgatttccctttactgttaatgtgttgttattgatcttttctaagagttccaccacactcttggttgttgcgttcacagactctaacaacatgtctaattcaaacatgtcatcttcacaccgaaacaaacaatattcgtatttgtttttcggtctgtgcttaaatgattgatactcctgatcacttgctgaactgaataaaacccaattgtcatttaatacttcagcacccaactctgacctatggctaacagaaggcattggataaccttttggtagaagacgatagctgggggtgcaactcttcacctctttgggaaaatgcccttcattccacaaagatattttactcatatggaacccattcttctcattcagatgatcttctgatgtgtccttaatgggtaaaaaatgtgtaaactcaacaagcaggtcagggtgctctttaaacaatgtttcaacctcttgttggacatgtgcgataggcttgtttgcctttctgtagctgttcaaaatgtgtaaaaatgatctatacacacgatcatcatcgccttgaaac

SEQ ID NO: 53740 - DNA, 2843 bp, Cannabis sativa
aattctcgatatttggcttgtgggattatttcaaatgtcacgtttggccctgtggtctcttaaaggttgttcgttatacttacactttctaggtctaaacgtgaagagggtgtattagagttagtctcacattgttaatgtgtgaaaataaattgtcatatataagatgaatggagtactcctcccattgccaattggttttgagatggaacctcattcatcttatcccaaattctaacactacttgctggatgtgtttggttgttataattagtgtcttgacaacattgcagtagaaggcctgtgttagatatgtcgctcactttttttttattctccttattgcaaattagctctatgacacctttttttttcatttgcttaatggttttgtctggaaacaggtgagtggcagcctcttgcctgcatctgtcatctctgtatattgtgcttatgtttgctacacggggctttccagtgaacctcatggctatgcgtgcaatggtctgaacaaatccaaagcagtaacggcaagtacacttattcttgggatgctcacaactgttctctcagttttatattctgcagttcgtgcgggatcttcaacaacatttttatcacctccgtcttctcccaagtcaggtactcaaaactaatttagatgttacttgtaaacattatcaactgggttcattactcaaaattattattctcaaaatttcatggcaatttgatcatgtcccacaatttcaaataccgtcttgtaaactgattcctgtgaatctagtagcttcacattgctcagttattaaacatgacattgtccactaattatgaagtaccgttgcgtaggtgccaagaaaccttttcttgaaggtgaagatgttgaagaaggaaaagaaaagaaggaaaaagaagcacggcctgttagttattcctatacattttttcacctgatatttgctctggctagcatgtatgctgcaatgcttctttcagggtggaccaacacatctgagagctcagacctcatagatgttggctggacaacagtttgggttcgaatctgtacagagtgggttactgccggactctatgtatggtctctcattgctcctttactcttgcctgatcgcgaattctattaggttgttcataacctatcttgcactcactttctctgaatatatatacaattggtggactgtgctctgatgtgttgaatatgttagtaccccttttttttccttgggtttctggttctgttattgttgtcatgaattgtctttttactcagcttagttaggcttggtatgtatgtatgtaactatatatgtatgtatactaatatattacagtatattatttataattataatattattactgcagtataattcatttatgtgtacctcttactcttattgtagttaaagcaccaattaatctaaaattagtccatttccaagttttattttaaaattgaagctctcattatataaagtatgattgattacttctcttcttcttccaaatgtttattaatcattgctactatttgtttggagcaatgtatgggacctgaaaccatgaacaatttattatggtagcttaggcataaggattaaggactacatacatacacaatcattacttttcatacctaaattggttcatcttgtttgtgacaactcattaccaatatcaggcaaattttagttgattagtaagtatcaagctttttcgtttttcctttttcttatttaaaactagtggattagatttgatttgatagcacataatcagtgtaaacaaatcttgattgaattttgggtcccaaagattatgccccactatcttgtgttgcacatgaggctgctctatttaatatttatttctccactaattttctttttcttctcgaaactacatttcataaatgcttaccacttcttaactagccaaaattaagtaaagaatccgaatagctaggtggaagggtagaattttccaacaagttaaaatttaaaggcttgtttagcatctcctagtctattatatatcttcaaattttgtgaggaatacaaatatatactagagattatatatttatatactacaaatttatatattatctgtatacaatctaattgatgtgtttaatatataggtttttatatatatatatatatatttttacagttttacaaaattaaatttttaacactctttctctttcttacaaataaataaataaataatagcactattcttatatctttatctcttttacatgattaataaaagtagtattttttagatattttgcagtttattcggagttcatttatgaatgatttgcatattttaacttgatgtcttgttacttttttttatggatttatacctgtttttttgttattttataattattttatattattgtttaagagttttatagttattttatagttttttttgttatttttatgtgtttatttttgtacagttgtgctttagttatgtatattttttatggtgtatattctgagtttattctacataagtttttttttgttgtatatatatacatttgttttgttatttttatgttatttttttagttgtttttaagtgatttttagaatatttttttgttcaacagttatttttaaattatttttttattcatgtgtattttttatagtgtatatttttagtttttttctgacaattttttctgttggtgtatgtgtgttgctttgtagtttagattcttatatttagtttattttatttacacattttattaaaatacaataataagatttttttttattttt

SEQ ID NO: 53741 - DNA, 1162 bp, Cannabis sativa
acatcattgtaattgtaattgtgaacaacattatatgtgctggatttagatttatcagaaaagaaatagtatattaaaccataaacataaaaataacatgttaattaacttaaatgtcatattattctgctgtcaccaatgtaatattttttaactttatatgtgtttaatacttgttagtaaatctagatcctggtaaaatatttccaataattataactatccataaattttgtctcgctaattctaagatactaaaccgtatctaggtgacactgttggccaaaacgttgattttactattactgggcataaaacataaaaatgccaaaattaaaaaatgacttgcatggcccacctagaatctaataaaatctccataattaaaaaattatttctctaatgtctaattttgacaatagattttatttcttttactaatgcacatataattataaataattattaaattactaagactctactaattttcatgcctaattatgcattcattacaaaaaaaaaaaaaataattatcttgtgaatttataggcttcttcaatcccaacttaaatttcctgttcaaaatacctcaatcatgaatggataattaagaaacaaagaattcaaaaatgattcccacatattttaaagagtccctcatatgaataatgtatgaaaatttaataccatatatataatgcatatataaattgtttcttttatttttaatgcatctagcaactgtttatccttaaggacatacaaaaattgggatagaatgtaacgatgaccgtgcctgcattgagtgttgcttccaaagtgcctatggaggtatgttggaactttctcattcttgtgtcaagcaatgttattcttgcacagactagtaagccttttcttttgtgatgggttagggcaagtctgactgccccgaaatggatatgagttagacctcggtccatttgtgtgtaatagatatgagtgaaatgcaggagaaagagatataacgctaatccatatagtcggaatcaaactcaagctttccggccctaacgctggcttttcctcttagcctttgtaggttatgctttttagatttacacctactatatagaatttgcttttatatatctttgtgaaatgcaggagaaagagatat

SEQ ID NO: 53742 - DNA, 890 bp, Cannabis sativa
ttttttcacaacaatattattttttgattgttgttacatttatactatgttatttttcggttaatttttcgtaaaatctgtaatgaaaaataaatccataaaaatgttatttagaccttatggtcattgtataataagttatttggtacggagtacagatcaaccatatcagttatattactggcgaaagcctacttagccacattatgggctgcgaaattatacagtctagaaatatataagcaaaaaattacaactaatcaaaagatttgagagatttttacaagcacatagttaccaatacccaaacagaacaagtccccttcaccttgttgatcaccgtctcagaatcactctcaattatcacaaaagaatgcttctaaacgatcactgactccagggctaacaaacaggtcgcagcttctccaatgagtgggtcagagaagttgagcatgttgatagccacccacaaaactgactccttgtggtctctagctaaagccatcatgcacattgagtcactagcaactttaacatcataattgttcttgacccaatctttcagtggggagaccaaacaggaggcgcaactgtcaccggcgaaggaaatagacaagaagcaaaatttgcataacatataaaaatatatagagtcaatacagtgcttactgttacatatagaattattgtaaatcttatcatttcgggtttttcatatcgaatccactacaattgaagcatacagaaacaattcttggacctcctctactcttttttccttcaggctccataagaatttgacccaatcccacactcaggcctcagaatcttgctttggcatcacaccccatggggaggacctccagaggtgaaatacaaggttgcaatag

SEQ ID NO: 53743 - DNA, 773 bp, Cannabis sativa
agcagtttcatcaatgccctgagaatttaaaattaacatcacctcatatttagaaagatactgtaaaggttgtagcttttgaaactctagatgtcatcattaaaggaattagggattcaatattttctattttagttgatgaatctcgtgatgtttctattaaagagcaaatggttgttgtattatggtatgtagataaagacggacatgttattgaatgttttgtggggattgaacatgtggccaataccacagttgtgtcacttaaaggtgttattgataaattattttctagatatggattgagcatatctaaattgcggggacaaagctatgatggggcaagtaatatgtgttatacccgaaatttgaccatcgtttcaaaggaggacacatgtcaaattaagaaaaatatggatcaatgcatgaaacggtttttatatttgcaaatggagaaactcattaaatggagaagcgacagagtatatttataacttgctgactataacgtcttacgcgagatatagatatacaaaccgttgcctcgtgtattaatgagaaaccatacggcattggatgcgcaaggcgagacctcaatctcgttacgtatgagtagacgtaagcgattacacttagcgtataatatataatatacaaactaagtataacagtcgggtgaacccaagaaactaatagggaggagctgtgacagtcaatagtaccgtgatccgtaaggggaaataccgggtaagctgtgcaatcccacatcgcct

SEQ ID NO: 53744 - DNA, 1107 bp, Cannabis sativa
agacaaaataaacatactatataataatatagtccataaacacaatataccctaaaattacgattttcacccttctcagatcaaaattacaaaaatacccctaacacaccaacggggtcttaaaatttaataaacacaataattccacatattaaaacatataataatataatttctcattaatacttaattaacttagttatactttctaatctaattactaaattttagggtattacaattatttatagttgagtccaatatcctaatcctaaagcaacttggagtcttttaaatttaaagttttctaaggaagaggtaaatgaaaagaaaaagatataattatatcttttcccttctcctttttaagtttatttcaaaattcctatacgactaggaataggaatacaaatttaaaaggtaacaacaattcctaatgctattgagtttgagaaaaattagagaaatcataggaaaagataagataaatgataagcaaaaggccaaaaagtcttttctcttcttcctttctctctctaatttctaatgacatgttcaactttgattaagattccatccaattaatcctaatgtcataacaaaaataagaaaatctcaaattttcaaagaaagagataaaagataagcgaaaaaaagataaacttttttcttttttctctttgttaattggttttcaaaattcccaaagactaattaacagtgttcaaagtcctaattaagctgggaatgcttacaaaactgatacaagtgcctaagattgtaaaaattgatgcccatctagtattttcgagcgaaacgggcttggttcacatcatcaagtcaactccacacaagtgtgaaattgacttgggggaaaatgttaatccaaaaactttccctggtgatgtggacatcaatgtttgacacatgacattaaggatgacatcacagagttgagtagactcgagtcatagtagtcaacttgggaaggaactctagccttatgcccaggttgactttgggatcttcaggatggaagttcaaactttaataacttgaatccaacccactatctttcaataatctgtaccataaagacatggagca

SEQ ID NO: 53745 - DNA, 1199 bp, Cannabis sativa
ctttcgtgacaagatcaccaacaatggaccagtttttttggtaaaacatggctgacatgccatcaattcctgggcttttatccggccccatagcttgtagagcgttgtaaacttcggcactagtgaaaggtcttaccaaagagtcattatggtcatcagtaaccatggtaggaatgcagtccaaggtggaagcaagagcatcactgtcaatatgtgaagtggaaaaaatttcagcaaaataatcctgcacaacagccgcaatatcagatggagaatccactttttgacccatatcattgtaaagaaattttattttattgttggacttcctcgatgatgctttggcatgaaaaaatttcgtatttcggtctccggaggcaagccaatcaactctagaacgttgttgccaatacacttcttcttgctctaatagatcttccaaaatttgctcagccgattgtaattcagtgagctgattgctggtgcgaactacgacattgttcaaatcagccacttgcgcttgcatggttttgatgttcttcttcattttcccatacttgttgatatgccatgattgcagttttttagcacacacgaatccaggttagtaatcacaacacagtaatcgggtcaattgagagggaatctaaccagttttgagaaataatttcagcgctttcaggatcagctaaccatagtttctcaaagcggaatcggcacttacttctagcagtattatcagcagtggggccaaaagaaaaggatgcaacaatcgcacggtggtccgagtggtaataatcgagatgttcaaccgtagacgagtggaaaaaagactcccaatgattattaataaaacaccagtccaaagctctttgattgtgtctaaggccgtacggttcttaatccaagtgtaatgatcacctatataaggaacctcatgcaaagaacatttatccaaagttgttcggaatgcttccatttgagattcttgtcgaagagcaccacccaacttgtcattgtttgagagaatttcgttgaagtcgccaatagcaagccaaggttgaagtggagcaacatcaccaaatcttttaaaaagggtccaagaagaagaccgattagcaacatctggagccccgtaaaaacccgtgaaatgaaaacttggacagcctttgaacaccatatagcaatcaaaaaaagta

SEQ ID NO: 53746 - DNA, 668 bp, Cannabis sativa
atatatatattcagtcctatgagaaaaattcaactcaactctttattttaagctcatctcatccaaacctaaccctgtgtgaatgtctatataaaaattgagaagagaattggaaaagctaatgtcacgtctacctcttcttttaattttcgaaattcactatgttttctccttcaaaatatgttccaaaggtatttgagtatcaatccaccctattcaagttgatatactcagacctttgtgaaaaactgtaatgaacacaattaaaggaggagaagatttaggttcagatcttgataatactctgctgcagataggaatcaaggattagaaatttaaacgaaaggaggcatattctgcagcaatcattataaggtttctttaatccatgtatgtgtttatttattgtattagaaaattatatatttagaatgttaaattataattaatccaccatacatgagttatttttactcctgaactttttacgttaccaagttgtgtcccccaggatcggtcctgaattgaaatggaccataggcaaaaaataaattttagtcccttcatataaagataaatgatatttttaaaagttattaaaaaaatatgtatattttttaaaaaataattttttttatttggctcctaaaatgagtgtatcctaagcg

SEQ ID NO: 53747 - DNA, 2440 bp, Cannabis sativa
gggcataaaacccaacatctagatcctggtaaaatagttccaacaaaggatgtattaaaaaaatacaaaaaatatgaaaaaaaaaatcattttaggctgatcatagccattaatgatgatgcatgatgatccaatgggaaaaattaactcttagtgaaaaattgtcaatttttagactttgaatctcgtcaatcgaatcgttttcaggttatttgttagaaaaattgcaattttgctgacgacaaattttggatttaaaaatcttcaaggaattggtttttagtatagtcattttgggaaccgattttttatttagttaattcaaggaacaagtttttgatttatttatttttatttaactgatttttgtgtgtaagtttttatcttagttgttttacgaaactagtttttttgtttcaaatttttaactagttgataaatataaccagatttttatattatattttgagttattgtgtgttattttttgtttgtatttattttattatggaaccggttccatttgtatttatgccttagtatttttggaactgatccccacgtttttttttaaattataaccggtttataaggtattatatgttattcgtttttacttattttattgtggaactaattttatttttaattatttttcagtgctttaagaactgattttctctttattttttaattataaccggattgagttattatgtgttatttgtttttattcattatattatagaatcaattctattttaattataactagtttgagttatttcgtgttatttatttttattcattataacactgttatgaacaggttttattttaattataactaatttgagttatttgtttttatttattatgttataaaactagttttattttaattataaccgatttgggttactctgtgttatttgtttattcattattttatagaatcgattttattttaatttatatctgagacatctaaattcagtgatttttctgacgacgatgacttttttagtactaatgactttcccggtgattttttttagcgacaatgattttttcgacgacttttcagtatcgatgattttttttggcaactttttcggcaccgatgacttttccggtaacttttccgacaccgatatttgctcctgtgactttttcgacgatttttttttttattattattattataaattttactaactttatttatggtcttttgttaagtttcttatattttaattattatttattttttcctcccatattttcttgcattatttttttcatcatgtaaatgtaaagtccattacttttttctatatttattagagtaatttgcgacataaatacttaagtttaactcttagttacaagtaaatacataagtttaatttttggcggtaataataccgtataattttagaaatttttaggtatttaatcgttaaatgttaagtcattattcgcgtgttatttttttattagtacatttaaattaatttttttaaaaaataaaaatttaatgacttgaactaattaggaatgaccatgtggcaatttacttaaaacttaacatgtacctacaaaagttttaaaattataatttcggtattattactgtcaaaaattaaacttaaatatttatttactgaaagttaaacttaaatatttatgctaaaaattactaaataaaacctgatagcctaggcgaggcccaattaatcgaacccacttctgttttaaatagcctgagtgtctacactttttgcttgagaatccaacagttatattttttaatttttcctctcctcactcaaagtggactgaaagagaagagaagagaaaagtagggtgtttggcagaagagaaaatcagatagaaaataatgtggatggtttacgtttgcgaagaggagaagaaggagctgggacgacaacaggctcctggatcgtgccctaaatgcggtggaaaggtggaagccattgatgttgaaagcaagaggagattctgttttcttccaatgtgcttcaacatcaagaggaagtatttttgcactgtgtgttccagacgattagtcttgtactactagccaagccaagccaaaccactcccagatctccatacccatatcatgcatctttctcttaattcaaatttcattctcatccctcatcccatggtcatctttctttttcaattttcatatcaaaataatttagaatcagtgaatgtgaatatttggggtatttattttattttatttattcagttctaattaataaattccatttagaactagatcatcttttttatttttacaatttaataaaagagaactacatcaattgagccatttcaatgggcagaaaaactgaaaaaagagggttaaaatgaaaaatgaacctgtttgtttggttttatt

SEQ ID NO: 53748 - DNA, 1132 bp, Cannabis sativa
ggatgggacttaaattcccttagtcttttgctcattgatggtaacctatcttaacactagtaaaaatctagtcttaagttctataggtaataacaagtcaatacagtaaatgtggtactcaaatgtcccatctatggatgagtacatatggtgaaaattgagggttaaaaccaaaaagttttttaatggtgcttaagcttaagaaaactcacttaagcttaagaagtgtctaaagagtggtgagacactaaaactctaattatatgaattagaggtggtgccgcctcttatgaaaattgagagttattctctagagagttcatgaattggaatttttcacatggccattaacggtgcaagagcaagacaagcagtctcaagtgagcattagcaagggtgtgtgtgttatcaccggtaagtactaaaggaataatggttcaatgttacgacaaccaaaatttcatcaaactttgtggtaattacactaaggtaaaatttaagtcgaaagacattttacctaatgcacgtaagcaaaagttctttgaaaatgtgtatttattcaatcaaagtgggggagtgttatagtttaatattttgattgattaaataaatgttacaagtgtgtcacatattttaatctagtggggaattatcatattgttcaatataataatatgtagattcaaatgtggtaatatatgttattatgtgaataaaatatattaagtgtggtaaataaattgtgtaatatatgatttatttaacctaaaattgtaacctacactttgtaacatggagacgagttacaaagttcattgcttttgtaacttcttttggctgatcatatttttgtgtaataaattaaatattacacaaaattgatgataggattcaaatatgtattatatagttgttgcaattatattaatactcatttatatgaaagaaaatgaggtgttgtgtattttgaattctaagtgtgatcacctaaacattataaaagaaggtctttagtgttcatttgagaaaaaccaagttttctatcaagaaagcactttgctagaaaactataaaaggcttgataattcccaaagttatttccatgagggttcccttagtgcttagagatagg

SEQ ID NO: 53749 - DNA, 1280 bp, Cannabis sativa
  modified_base (31)..(44): a, c, t, g, unknown or other
  modified_base (1018)..(1019): a, c, t, g, unknown or other
ttcatgtgtaatacccattaagaagtgttcnnnnnnnnnnnnnntatatatatatatatttagtttatctttttgaaatactttttaaaaatacaatgataagtttttttatttttttaattaacacaatgtaaactagtagatatttgacatattaaaattatattgttatctatttaattttatttttttgttgttttaattatatgttacccattatattatataccccattttgaaattataaaattttattatatctattattaatgtaactatttatttatcttttaaaaaataaattgagtttttttatttttacacttcaaattttttttttctgtatttttatggaattccacacaaaaacccctatagcaactaacagagcaacctaaatcgcaactaaaatccgtataacaacccacataaaaatcactggagaaaccaccgaagcaacccaaaccgtaaatttgaaagaaaaaaattaaaaaataattagggtaattcccccaaataaattgtcattttaactgttagagcatgaccaaggacacgacaaatcctttgtttggtgatgatttgttatccaaggaggctgtatatatttgttgaatttggagtggatgctacagtccacggtatatatgtcgtgtactgtagcatacagcatctacttctttttttttatatatattatttaattaatgtatatattgatattattaattgtatttataaaattataaagtattgtttcaaagtggtgtattcatatactcttacgtatttcagcattcaagagacttttttagtctattttttttttatgatcgtgtacattataattatataagacatcttgaaaaatttcaaaaaatttagaaaaatttaataggtctaaaataaagttcaaactatttgttaatggtgtgaccttttatttagaggggtgcattttagttaattgtagtggttttagttaattaatataatatatttttttttattttattannaaattaatataataataaggaatatttttttactataatttttggtgatgtggttggagtgaagatatttttttaacatcaaattttgtgatagtgtaacaccaaatttgatgtggtccttggagatgctcttactaactcaaaaagaaaaaacaaataaagagttgaaagtatgaagttgcaataataaatttcataaaaaataattaaataaataatatatatttcatatagtagtataaaatgataaatcaaattatc

SEQ ID NO: 53750 - DNA, 2528 bp, Cannabis sativa
  modified_base (2419)..(2437): a, c, t, g, unknown or other
gcacaacatgtctagacatataagtagggcaagtcagcaacaggcaatctgaaggctggcctccatctctgaagtttagcctctgccttgaaggttggtctccatcttcgaagtctggcgtctgcctctaaaggttggccttcatctccgaggactggcctccatctttgagggctggcctccatctccgaggactggcctccatatccgagggttggcctccatcatcgaaggttggtctccatctttggccaagtgtacaggaagctaccaccaaccctgctaaaacctccaatggtaggacactcaggggtcgtcattgacggaccccatattgcaggtgagaccaacaaagccagagagcgctatgctcggacacttcgtcacgagctcaaaagtgacttcctggcaggcgaagaatgaggctctaagcaaccaaagcttggagagcccacgatctctttctcaaaaaggagatcctatccaagacagtttcctgcataacaacaccctggtcgttaccacataaatcgggaatataactgaagcaagatacatggtggacaatggagcctcactcaacattcttttcaaaatcaacacatgaaaagatgaggctccaattcgctgacttggtgccctgcaatcaagtgatatatggcctctcttgccgaagcatcatgcacatcgggtatatcagattacccctatctgttggagaaaatccaaccaccagaactctaatggcacagttcatcgtaattgacgttgcctcggctttcaatgccatgatagactgaccagacctgtgcatcctaaaggcaataacatccatctatgacattcgcttgaaattcccagcaaggcatgaggtaggatgccgagaggagattagcaatttgcctatcactattacaacttggccttatccaaagccaagaaatagaagatgcatccatcagatcaagagcacacaagcttcatgatgttcaatgatcctattagccgcaacatgaaggtatgcatggacgatgtgctcatcaagtccaaaaaggctaggggcatttggaggacctagagaaaaaatttcaaaatcctccacatctacaacatgaagaagctcaaatccagacaagatccaagcccttttgaacatgaggtcgcccacaacaatcaaggagataaaaagccaaataggatgcattgctgaactaagcagacttgtgtccaagtatacaaacaaatgtgtacccttcttcaacaggaagcataagcaacaacaaattcgagtagacaaaggaatgtaaaattgcattctgggagctgaagaaatagattggctcagccacatgtgttgcctaaattccaagacaaagaagagctaggcgcgaacctagcagtcacagaacatgctgtgagtgttgcccttataagagaagaagatgtgtacaacaccctgtatactacaccagcaagagactgattgacactaaaagtcagttcccactcataaagaagctaacccacaactttcccttgccttccaaaaatctaaggctatacttccaaatacacccccataaaatgtgtacaccgatcaacagttgcgacaggttcttcaaaaacctggagcatcaggccaactactcaagtgaactattgagactcaaccaacataaaatcacctcacaataaagcatggccaccacatgccaagctctcatcagcttcatggctaatcataaaagcatgtctccccaaacctctcagagtttgagagaaaagtaggagctagagaagaagcgagaataagaacccaagaggtgcattgaccacctgctcattacaagaatggcccccaaggcacatgggggcaactgatgcatgaggtaacaaggtaaatttcaaagcttctaataaggaggctgaacatgaagctctgaatgctggccccaggctagcacacgaagtgcgggctaactacctagacatgcaccacgactctcaaatagtcgtgggttatgtcgtaggtgaatatacaactcaatacaagaagatgatggcctactgaagctgttaagacagctcaaaggctatactagaaggcaagcccccaaagacggcacaatagccgacgcagtcgctcaactagccagctgcgccttgacaacaaaggcaaacttggtacctacgcagttcttcaatgaactaagtcattctgtttcaaaagtaacatacatggtagacagccaacatgaatacacctacatcaatatacctccaaataaagaccttgccaaagagtagggactaggaggacggctacaaggtgtccaatcctacacagcatgaaacacagtagtggtatcccaacaccaccaaggagcattttcaagaaaaaagtgttggaaatattttnnnnnnnnnnnnnnnnnnnaccaagtatgttttattaacatcctaatatgaattataaaacaatgaaataaacacataagagtttaagaaaactttacattgggtgtagc

SEQ ID NO: 53751 - DNA, 1940 bp, Cannabis sativa
  modified_base (1004)..(1004): a, c, t, g, unknown or other
aacatgaatgactactataaagcctttgcatgttaccaatcataaattgggcatttatagtattaattgggtgatttagatgaattttagactgttagaaggactcccaaactttcaaaaacatacacacttgttgctaaaaaaaacaataactagttataacttaccattttttcaaatttagccaattcttctctaaagtgttccaaatcacttccacttaattttgaactatttatacaccttataaatgaataaatcaagtctccgacaactacattttcaataactatcattcattcacattcataaacagttagtaatatcttttataattaatttaagaattaaaaagatttgagaattacgtattcaagtaatcatcaaattaaaagatttgcaactcctagttttctatcactctacatacatttgtaactccataatgtatgttataatttgtcacactgaattatttgtaacttaattatttaatctaaatattatattatataaaataatataacattccctcactagattaaataaaatctcatttgtagcaaataattttttaacacaacatgttatttaatcaatcaaacattatattataaagtaatataatattctcccacttgatttaataactccactctaatagaaatcattatatttgtgcatagtgtaaaatatctttcgacttgaattttaccttagtgtaattactacaaaatttgtcgaaattttagttgtcgtagcattgaaccactattccttgataacaactcggtgataacacacacacctttgctatgttcactcaagaaccttatggatttcttttgtaccgttaatggccacgtacacaaatctaatttatggactttctagagaataatgtccaattctcataagaggcggcacgacacctagtccatataggtagaattttagtgtctcacaattctttagacactttcttaagcttaagtgagttttcntaagcttaagctccattaaaaaaatcttttagttttaaccctccaattttcactacaagtactgatccatagatggcacaattgagtaccacattcactctattgacttgttattatctattgaacttaagaattaattcttactagtgataggttaccatcaatgagtaaaacactaaggaaattttggtcccatccctcaaaattcatgcttcagtcatgtatgaagattaagcaatttgttaacttcacacttttgattccaagcgaatcatgctagccaaatatagtgtccacctttaaggtgaccattgttctccttaagtacttaagctttgaaaattcagtcataaaagattaattttcacacaattcaaattctcaataattttgataccaaacatatcaaaattaaacactaatttagacaccaaacatgtctaaattacacacttaactttagataccaaatatgtgaaagttacactttatttaagacaccaagcatgtctcaaatatacatatttttagttttagacaccaaacatgtctaaacctctcatattggagatgcacccccacactttcacattttattgacaaggcgatatttgtatcttgatttaaaaatatataagaccattttgtctcataaccattttagatttaattttcttctcgaaattattactaccaaattttgacactaaatatgtcaaaatttcacatatgcacatagcacaatattaatttagaatatcaaatttaaaatcacatataatcaataatttctcaataaatttgattaaactcaaatctcaccttcatattttaccataaagtgaaaatacaatatcactttaatataaaatctctttattttattttgttctctacacgttatctttcaagataatatgcactcaaaattatcat

SEQ ID NO: 53752 - DNA, 818 bp, Cannabis sativa
caatacatttatgggcaacctctgcaactcactactaggtggtcgtgcctaccccatggttggatatataggcacccttgcccgaaagctagtgtagaggtggggtcctccttgatggaggattaataatcatcagctgaccagtcggtgcaggcctcaaaggaggaggaggtagtgaagaccctgcaacatcaccaaatttggtggtccaggcaaccttggccctgagatgaccagaagccacgcccgagggctatcaagtaagatctcttagcccgaaagccatatctgtaagaagaaagtaacaaagtcagaatacaagttacaaatattaaatacaagaaaaaattacaaaagttactacaatcaactatcaactaccatcatcctttgaagaggaagttggggattattttacgaggatctagatttactaccatgtattttgtttaacatcctaaatatgaatttctaaaataatgaaatttaagcacatatagagttcaagaaaccttacattgattgcggcaaaattaaatatctccttccactcagatctctaacccttgttcctttttatgacaaagtattatcaagatctgagcccgattctccttcaagtgttggattcttcacagtcctacacactatgattgagtactagacttgtaatgtatgggcatgtaatatatcactatgaggctaaaaaattggagagaaagagagagagagaaggattcaaaaatagagagcaagagagaaggctctatcttaatctgacaaggttgactaaaaagttgatgttatgcttatgttat

SEQ ID NO: 53753 - DNA, 2362 bp, Cannabis sativa
  modified_base (272)..(276): a, c, t, g, unknown or other
gatttacttggttcaggttagagtcagtataactagtcctacactctaaattgatcaggtttagaggtatgtatagagtaaggaatataaatgagatctccggtggcgtttggttagaggtaatgaaatgtaatggaaagaaaataaaacaatcttcattcaattcatttgtttggttgctggaatgtcattctaatggaatggtctttctaccattttggttccatctcaaaatcaattagcaataagaagagtagctcattcatcttatnnnnnacaatttatttccacacattaataatgtggaactaactcttaataattcttgattcttcaaattatttcactcatttatctaactaagcttgagacaataagaacaatccaagtgaattgatctgatagtccaaaggaataggatccattactcccatacatagtaatatcacttctgcttttagttttccatatgaaattcttccagaaaattctactataattagtttctgttaaaacaatattttaaagagaaatattaatactcacaagttaagaagtatttttagaattttaaaagctcaaaaataacttttaaaagtccaaccaaccatagctatagacgccttacatatctatagtagctttaattctttaactatatcattaaatattaatttgattatatggtatcatattactcatgatcaactcatagtgcaattattttaagagagaaaagataaaaactcaaggtacgattattaatcaatcaatctcttgcttgctccccaaactttttggaaataaaaggtaattaattaattgtttttttctttttttttatcatttggatattttctttcgaaaatttggatatgcctaataaactaacattttccaattaattattatatatataggctatatggaccggaaaataattgatgcagtataagactaattaataatgctgtagaaaaaatctcgatgaatgatgataacctagcttatttggattggatctcccactactataatttggctatgatttttagtcatatacataattaaattctaacctttggtattagcctctactaaaaatatatacctccactaaaaatatagaggataaattctcttatttttattaatttaaaaattactggcttgcgccatgtgccattagataaatgtgttctggtccaacccacttaaaacgtatagtttttttttttttttttttttaaaaaaaacagctgtaataattatttaaaatataaaaaaaattaactttatattaacaattttaataaaaggacatttatagtccagtgaagagactagtgaacagtcccttgtttcgtaattaatcttcatgtctcttcttactccacattatgacattaaactacactaaatttattcctttaggggcatttggtgcgggaattaagttcaaaataatttattgattaattagattgttaaagtgaatgtttaaccttgtaccaaacataagaatgtgaaagattgctactatgaaactattacaccataccataccatttctaaaaaataaatgtatcgaaaccttcattttatatttaagttatcgataattttaattttaattttatttatatatatgacaatatatattatagttagtgaataatattataattttttagaaaaattaaaataatttaaaagtacagaaattataatttgaatattctttacgagtgtataaaactaaataaataaacatgcaacaaactgttcaaattttattttaaacacattagagtatattaaatttttttaaaaattttacaaaatattttaaatatctactcattttagggaatgctaaaagatatcaatggtgctaagcaccctcctacgtgtcaatattgttatttgtgtaatttagtatgaggtcccatatagtttaatataataaattttagggagtatcgctagccaatcgtaaggtgacacgtcttaagggtgctaggcaccactggtgcccaatagcagtgctctttctaatatatacttttactttttaaacattgcattttcattaaagcattgttgtaaggtatcattggctagcaccacttaaagatgacactttataaatgattagggatattgttttataatagttattaaattatatgactcaatacttaattatactaacaataatataatacttcaaatgtgaagtaatgatactaggcctagacattatttgtgcctaatttttagtttttctctaacaataattaactttctttttcacttttggtagctgctattacaacattatatcttctatattatttgg

SEQ ID NO: 53754 - DNA, 3603 bp, Cannabis sativa
aaaataatgagaacaaattgatgcctccaccaatggacatgcatttggaggttattattgggggtccacatcttgctggagactaaggcaaagctagggaaaagtatgcccgagctttgcagtatgaacaaaatgaagcaatcttggtcgtagaagaaaggaaacctataataccacgtatgggggagccaacaataacatttactaaagctgatgccaaccacgtcatcttctcgcacaatgaccccctggtcgtagaagtgcaaattacaaataagatgtggcacggactatgatagacaatggagcttccttgaatattctgttcaaaacaacttatgagaagacgggactccaacttaaagacttaatcccttgcactcaaattgtatatggtttctccagccagattgttgcaccccttggacaaatccgcctactgcttactgttggataagctccgaggagcataactgtaatggcgcaatttctgataattggtgtcccttcaactttcaatgtcatgttaggctgactggccctatatgacttaaaagctatcacatcagtttttcatctatgcgtcaagtttccaacaaaaagtggagtgggatgtctcaaaggaaatcaaagaattgcacgggaatgctataaccttgttctagctaaggttaagaaggaaaatacctttggctagagtttacataaggggaaaggcattgcccaataagaaatcgcccaaggcggggacgaagacatggatctccgacttggggaaacaaatacaaatgttgggggcgccaaaatagaagaactagaagaagtggaaatcaatccagatatcccgaccagaaaactcaaaatcaataaaggcttgctgctcaaaataaaattagttttaataaaatttttgagagaaaacctggacgtttttgcctggtcacatgaggatatggtcagtattgaccccactgttatatctcaaaccctaaacattaacccatacttttgtctcgtccagtagaaaagaagactactcgataaagaactggcacaagaactgaaagaagaggtagagagactacccataaacaagttcatcattgaagctttctacccggcttgggtggctagccccgtactagtgcccaagccaaacaaaaaatggaaagtatgtattgaatttatcgatctcaacaaggcatgtcccaaggactattttccatttccaagaatttatcaactcatggatgcaacaaccagacatgaaatcttgacttcatggatgcttattcggggtataaccaaatcaaaatgcatccaccagaccaagaacatataagtttccaaacagatatgggtctatactgttataaagtaatggagttcgatctgaagaatgctggagctacttatcagaggctagtaaacaaaatgtttaaaaatctattcaaacggaatatggaaatatatgtggatgacatgctcatcaaatttaggaagactgggggaatatagaggatctagatgaacgcttcaaaatcctcaaaatatacaacatgaaactcaatcccttaaagtgttccttcagggtcaactcgggtaattttcttggatttattgtcaatgctcgacgaatagaagccaatccagaaaaaatacaaccctttaagataggaagtcgccaacaaaaagaaaggaagtttagagcttaactagttggatagccgcactcactagattcgtttcaaaattagcggacaagtgtattcccttcttcaacatcctttgaggtaataaaaagttttaatggacagaggaatgcgagaatgctttccaagaaataacaagacaactcgcaaagcctcctgtactctcaaaacccctagcggagaagaattgggaatatatttggctatcaccaaatacgatgtaagtttcgtgttaataagagaagaaaataatgtccaacatctagtttactatatcagcaaacaacttgttgaagccgaaggatggtaccctctaatcaaaaaactcacttactgcctaatcttagccacaaggaagtttaggcctatttccaagctcatcctattcgggtatataccaaccaacctttacgctaagtgttgcaaaagcgagatgcctctagatagttactcaagtgggcgatagagttgggacagtacaaaataatcttccaaccccatatagtagttgaagcacaggccttagcagacttcgtgggggagtgtatacgaaaagaagagagcaatacaaggatacccaaagctagtacaaggctccctactagaaaagaacaaagacaaacctacctaaaaattacatgtggacgaatcagctactgaccagctttctagtgtaggaatttccctcatcacatctgggggtaacacctgcacggagcaataaaattttggttcaaggcctccaacaatgaagcagaatatgaaggactcatagtttggctaaaacttgctcgataggtacacgccgaatacattgaggtctgtagtgattcacaattggtagtaaatcaagtctcaggagagtacatggcccgtggagaaaaaatgaaggcctatctaagttagatccaagacctggtcgcactatttaagggttacaccctcaagcaaattccaagggaagaaaatacaactgctgatgccttggcatggcatgcgagaagcacaataacatgtaatgccaatttagtccccatacaattcctagaagaacccagcatcaactgtgcaaaagaagttgaaatgatagatacaacaccaaattggatgacacccatagtagcctatctcaacactggagaacttccaaacaataggaacaaagcttagaaaatgatgagaaaagctgcgtggtatatcatagttgaaggtgtaatgtatatgagaggtttctcaatgccattacttatgtgtaacaaaagaggaggctgcacgactcttgttcgaggtacatgaaggattatgcggtaaccacgcggtgggataaagtttatcaaagaaaattctaaggcaaggatatttttgggcgaccatgatggaagattcaaaggcctatgtaaagaaatgcgataaatgccaaagattttcaaagatcccccatgcaccccccaatgagctaatacagatgcaaagtccttggccttttgccatatggggaacagacctaatcagataattgccaaaaggtaagggcagagtacaatatgtaattgtcacgggggactatttcatgaagtggacaaaggccgagcccttggcaatgataacatatctaagaaagtgcttgattttgtagttaaaaacatcatatgttagttcagacttccacccaagattgtctctgacaatggcaaacagtttgatagctagatgttcacaaatttttgtgcggcacatggaatcataaaaagtttcttcacagtggcacaccctcaaacataatgggcaggtcgaagcagtaatcaagacactcaaagacaccatgaaaaaatggctagaagaagctaaagggaattggctggaggaactacctgaggtattgtggtcgtac

SEQ ID NO: 53755 - DNA, 1033 bp, Cannabis sativa
ttcagtttggattctgttccaactgttttgttacctgttttggtgactgatatggttatctaataaaagatgaatttccattcaaaaaaaaatgtaaccattgaaacctcctccaaaactaatattatttagtaattaacatttaaaataaaaaaatttagtaacaacacaaataattacaataattttttttgtaatatatattattaattaattaatcaatatcttcttctgttatttaaaaaagaaaggaatcatgtgtaaaagttttagatcattttgtattgaacctacaagataagacttatcatttctattaaaaaatagttaatatcattttagactctgtgttttacaaaagttaccgactgaactatctgttttgtaaaatgacaaattgaactctgtattattttctaaaatcgtacactgatcaattattttcgataatttttttttttatatatatataataaacttgaagaaaaaaattctagcacaaataaatgcagaaaatgtattcaataatttgtcataataactctagatcaggttattattaacttttatattgacaaaaaaaattagttcagggtactattttggaaaataaaatgtctaatttatcaattaacaaaacagagagtcccatcgataatttttgcaaaacacaaagtccaaaatgatatttaccattaaataaaatatattacttaaatgacccattttttatttaaaaattacaaagtaccattattcattattatatcttttcatctataagatcattattataatcatagtatttatttttataaatataatataacatatatcttataatagtaaccttataattaaattaatgaatactaataatttatagtttctttaattttacctacatatattactaatactgcaatttaatgaaaaggtgagggggcaaggccactaaagtcatagaatatctctgcccctgcatctaatggtcatcaaattatatttatatatttttaaaatacatttataa

SEQ ID NO: 53756 - DNA, 984 bp, Cannabis sativa
ataaattgtttggatgggaatgtttgccaagttttatgcataaaagtttaaccttctcgagtaatttatgttccattcttctatattttgtaacatagattagcttaagcctttttcattcttctgtacatttttgtagctttccaactgctaaaatgttggcatgagcttctgaatgaatctatttcaaaggtcatattttagtcttatgtttaattttctgtcttgtgacaagaaacaaaaaatctgaacagattttagtccaaaataagccacatttcaatactgacttgttattcttaagaattaagagggctttcggagaacatctgaaagtataggatttcttgttctttatcccattcaaacaatgatttgattgacttttttcttctcagagtaattggtcttttggcattttcttttaatgaattcattttatgtcatatgggactaggctgctagagtacattggagatttctaatatgtattctgttcaacaagactgtatcttgtaaatggtcaaaacattaagctactgggtttactgtaatggtttgatttttcaactttcaattcatgacaatggacgacattcaactactgatgtacttgtaggctcacaccgtactggaaatgaactacaccgagcaacagcttactgcagctgtagtgtccgatggtctacgaccaattcttgctggtcctgagtctggtgcgccatctactttgttgtccttgatacaaagatgttgggatccaaatcctcaaaatagaccttctttcaatgatatagttgctgaactcgattcaatctcgcaacacagagagaaaacacaggaagaagtagttcgtcttcctacttctgttggtgatgatcatactgttgacggtaccagcaaggtccaatattttcaagaggatattaactggactactcagggtgaacacttatccaaaagagctgcttctgaagttgattc

SEQ ID NO: 53757 - DNA, 2029 bp, Cannabis sativa
cctgtttcgaagtaccaaagtcttggtaaacgattgaaaatgcagaacagaacagagaagaacctttttgcaagttaaagtttatatatatatatataataagaaatggatgcagaggggtgtttgcttgtataaattattcttatgtatatatataagaggccaaactcaaaatgctcaacttggtactaactgatatgccaagtcaatgcttgacttattagttagccgcgtcttaagttcacactcttaaatttaattaaaattaaccgaagacgtactattaaccatgttgtaattaaatttcgtaaacactttgtacgtacgtgtagtcatataacaaaaattaatattttttaattagtaaatttaaagcatgtaacctgtattgagagtgagccaacaacatgacctggaaccaactcccacaactgagcttgagaaacttcagatacatgggcagaaatctacaccaggatatttgacaacatcattggaagaagtatatatatttagaaaacaaaaaggactgcagaacaaatttagagcacctgtctcaagcatttacttaatgcagaagatggaatgcttagtagtgccatttgaagcaaaataccacagctgctttgaaaagcggcaatacaagcataaaaactgtaaatgagatgtaatgcaatacaattaacaaataaataaactatacttaaggattcctattataatataaataatgttattgaaattaagttaaaaataaaaatgatattaataatcttattatgcattttacagtgctatagcatatgttgaacttgatgacaatataaagaacctatctgctgtcatgttcgcgaatattgtggaaaaaatattttcatatattgctgcccaactaatggattatactgcagaggtgtaattttaaataaataaaataattttatttgtctatcataagtagatttttttaattaaatgaattatgcacatcatgtttaatcatcttaaatgaaaataaataactatttgcaggaacactgccgctttatcaactctaccatattcaatttatcaacgaaaaaatagacaattgaattatatgcggacccaattagaataaaaagtacaaaatacaaaaattacactattgtctttgtcaaagcaaaagaaaattaaaatctacccaagagtattattatttttcttatctacaatttttggacaaatgttatctttgattatcaataattaagagattgacttttaattttcttttttatcttacacgcatttaagttgtgttttcttaagtatttgaacatcaattattagtttatttttgaattaacttaagaagatatttcaattattaagtttttttaaacactaatatattgcatccggtatttaattttaattgtcaaaattataaattatattatttaaatatacataataataatctcacctaataactaataatattttctctttaatttttaattgtatcacttttaaataaagtagaaaatacctaaataggcacctaattttttactagtatatatataagaggccaaactcaaaatgctcaacttggtaccaactgctaagccaagtcaatgcttgacttattagttagccgcgtttaagttcacactcttaaatttaattaaaattaacggaagacaaagacgtactattaaccatcgcaaagactgttgtaattaaatttcgtaaacactttgtacgtacgtgtagtcatataacaaaaattaatattttttaattagtaaattttacatgatttttcacattattgactaaatagtaaatagtcataccacgtacgtaccttcactagaaattaataataataaatgatgttgttgatatatcagtaccaaagtcaattatgatgaaagctgtcatgtacttcttcataaatgtacattttgttaggaaattgatgagaaaatcgatcgttagtttgaaacaaacacatgtccatcttatatttgtagactcg

SEQ ID NO: 53758 - DNA, 1301 bp, Cannabis sativa
tttgatgccaagaggttgattgggcgaaggttctctgatgcttcggttcaggccgacatgaggcactggccttttaaggtcattcccggccctggagacaagccaatgattgtcgttaactataaaggcgaagagaagcaattcgcagctgaggagatttcttcaatggtgttggtgaagatgaaggaaattgctgaagcttttctgggtcagactattaagaacgctgtcgttactgttccggcttatttcaacgattcacagaggcaagccaccaaggacgccggtgccatttctgggcttaatgtgatgagaattatcaacgagccaacggcggctgccattgcttatgggcttgacaagaaggcatctcggtccggtgaacagaacgttctgattttcgatcttggtgggggaacattcgatgtttctcttctgacaattgaagaaggaatctttgaagttaaggctactgctggagatactcatcttggtggtgaagattttgataacaggcttgtgaatcactttgttgcagagtttaagagaaagcacaagaaagatgttagtggcaatgctagagctttgaggagattgagaacggcatgtgagagagcaaagaggactctttcttccacaactcaaaccacaatcgaaattgactcactttatgaaggtattgatttctactcaactattactagagcaaggtttgaggaattgaacatggacttgtttagaaaatgtatggaacctgttgagaaatgtttgagagactccaaaatcgacaagagtcatgttcatgaggtcgttctcgttggtgggtccacaaggattcccaaagttcagcaacttttacaagatttcttcaatggcaaggaactctgcaaaagcataaaccctgatgaggcagtggcttatggggctgcagttcaagctgcaattctcagtggtgaagggaatgagaaagtccaagacttgcttctcctcgatgtcacaccactcagccttggattagaaacagctggtggagtaatgacagtgttgattccgaggaacacaacgattccaaccaagaaagagcaaatcttttcgacttattcggataaccaacctggagttttgattcaggtctacgaaggtgagagagccagaaccaaagacaacaaccttcttggcaagtttgagctcactggcattcctcctgctccaaggggtgttcctcaaatcaatgtctgttttgatatcgatgctaatggtattttaaatgtgtctgctgaggataagactgctggtgtgaa

SEQ ID NO: 53759 - DNA, 1125 bp, Cannabis sativa
actcacaaagtgctaataagttgttaacttggtcaaaaagcgatactttatattttaaaaaggaaacatgagatatttaggtttcaaagtaataaatatgagagtttccgcataggctcaataaaattgactcgataacaaacctaaggcggtgataatttgatgcaggctaggatgatctattgacttacaaagaagcaatagatgaccctgacttagacaagtagaacaatgtcatggattcacaaatggattctatgtgcaccaacaaagtctgggagtatgatactccacctgaggatattacaccctttgggtgtaagtgaattttcaagaagaagaaaaatactgaagggaaggtaaagacctttaaatctacgcttgtgaaaggctacacacagtgagaaggcgtcaattatgacaaaactttctctcctatggtaatgcttaaattcattcgcattcttctttccatagctatagcatatgattatgagatatggcaaatggacgttaagacttcttttctaaatggcaatcttgataaagtgatttatatagaacaaccagaagggtatgtattaccaggaaaaaatcaaaaggtgcgcaagtatcttaaatctatttatggattgaagtaagcctctattcacctttaataatactattaaagagtatgggtttgaacaaaacaaagaagaatcatgtgtatacaaatacattaaaagtaatgtagtgttattcctagctctttatattgatgacattctacttattggaaacaatgtagaaatattatcatatgtaaagaagtggttacccgacaaattccaaatgaaggattcgagagaagcaagttatgtttttgggatcaaaatctatagagaaagaaagaggagaacattatctctttctcaagcaacttatattgataaggtgctagaatgattctcaatggagaattccaagaaaagacagttactgtctagacatggaattactctatgcaagaatcaatgtctaaagactccgcaagaggaagaggacatgaggaaagtacccttatgcatcaatagttgggagcctaatgtatgcaatgttgtgtacaaggcctgacatatgcta

SEQ ID NO: 53760 - DNA, 764 bp, Cannabis sativa
gtaagtaatgactatcaatggcgacatgttgtcactaaaaaaattgtcagtgataactcgttgctgaaagtaagtatcaatgatggcattcaaagtcgttattaaaaataaacatcagtgacgataatgtcatcattgataatatgcattttattcaagttgggctatcaatgacaattatcaataacgagtaagtcgtcactgatacgtgtaaggtttttttttttcaaacataataattatcatctgcagaaatatcatcttttgataaagatggttcccctatatatgccttcaaatcatcttcagggcacatatactgggacatttgcaactgcccagattgtacaacacctaatgaacaagaagaagcacccaaaaggaaaagcgctggaaagaagttaaaaaaaaaattggaaaaacgaccaaagggatattgacccactcgttgaaccctcaagaaaatttgactacctagtcaaacattcctccaaatcggtaattcacgaggacattcagccaacaagatgggaatgtgaagatgatgagcacaagccattactcccgtgctataaaccaaagaagtccaaaccacatctcttcatgctaaaaggtagcaacgacaaattcccacttccatggagctttacggatgaaactggaaaaatcactcactaggcaaaagttcttaacccaaacatccgagaagctgatggtaccctaaagaaaataaccccagctgaagcagtcctcaactggcaaac

SEQ ID NO: 53761 - DNA, 853 bp, Cannabis sativa
aattcccatccccaacccgccatcggtagccctttaagattagtttcttaccccacatcaaactccgccaaacaaacgaggcatgtgtaccacactttgcttccaaaaccgatgtagaagggaaataggaagccttgagaacacggctgcaaagagcattcgggaatcttatacactgccatatttgctttgccaacaaagcctgattgaacattcccaaatctctaaaacccatgcctcctttgtctttaggcttacataaatgatcccatttgcaccaatgaattttcttatctttttcagaagacccccaccaaaaccttgctgccattcaatgcaaattagagattgtccccttcgttagtctaaagcagctcattctttggttgcatttaaagtattggaatgacttttttattattttacttttcttaatttgtgtgcattgtcatttggtggaattttatttaggttgcaggaaccattaatgaaattcaatcttgcaacatagcaaaaatttcgcaatgtaccacgttactttagaaaagaggataaaaagtaaaaatataaaaatacatgttacttttcaatatgaataggttacttttgcattaaacacagaaaaaatatagcacattagccaaatttatattctaggtactaagttactttagaaagcaagataaaagacaaaaaaacaaaaataaaaaaacatgttacttttgcattaaaaccagttaaaatataacacactaaaccaaatttaatatttcaggtaataggttactttagcaaacatcaggttacttttgatttgtcaataggttacatgtgtaagaaatataacacatca

SEQ ID NO: 53762 - DNA, 1327 bp, Cannabis sativa
ggtttgagttttggtgggtcccatgttcggtcctgggtcccaagtttagatcgagttcgggtcttgggtatgggctgggtttgggtcaatgtttgggtctggttttgggtatcgggtctaggtctcgggtctgggtccaagtcccagatccttgtccaagtcctgagtgcgggtgcgggtcctggatctcgagtcctagttttgagtttgggtctcagttttgagttcaggtcctaggtctgatcaagatttggtctggtctaggttcgtgtcctttttgagtatagagatggtgaaatcatgaggtcaaacccacaaaaactgtgtgaaattcaagaaaacttatctaacctaaattaatttgattttaacctagtttaaataatttaatttgttttttatagtaacaactaagggcacatttggtataccgtaatgtattgtgttagattgcattgtatagtattatattgtattagtattatttaatacaattctacgtttggtattgacttgtattaatacgttgtgtaaagttataatatattttcaataaactcaaccttaacactaactacgggctgggaccgacgtccaacttttggtttgagtttgtgttcgggtctcgagtctaggttcaggatcagcctgcttcttctagtctatgtcctggtccagggtcaagtcccaattcgaggtctgggtctatgtttggggtttgggtcagagtcccactgggtcccaggtctcgagtccaggtcccgtgccctaggtttgggtccagtccggctccgggtcttcaagttttaggtctaggtctggggtctcaagtataagtccagctccaatttgggttaggggtctggtccgggtcctatttttggtcgtgagtcccaattttaggtccaagttcgggtcctatgtttagtctcaggtcttgggtctaggtccagggctaggtgtagtccgggtctggtgttcgatctaggtcgcaagtcctgattctgggtctacttctgggtttaggtcctgggtttgagtccaagtctggtctggtctggggtccctggtctgatcttcgggtttgggttcgggtctcgggtcctaggtgcgagtcttgagtctggatttgagtttgggtgggtcccatgtttggtcctgggccccaagtttgggtcgggttcgggtcttgggtctgggctgggtcttggtagatgtttgggtctggttctaggtatcaggtttaggtctcgggtctgggtccaagtcccagatccttgtccaggtcctgagtgcgggtgcgggtcctggatctcgagtcctagtt

SEQ ID NO: 53763 - DNA, 1514 bp, Cannabis sativa
atgcgcgcacagggagtatgcgttgcatactgccctgttttacctatttttccaatttttcaactttttgaaatcattcttcaatgaaataaaatttaaattttggtagaattttgtgtagactcttattttttttaaaataaaaatctaattatcaggttaaaattaattttattattatttaaaattagttttagatattagtaagctttaaatttaaaaaattgatttctcaataaacttgctattttggttattttgaaatttgattattttttatttaatttattaattttaattataaaattacatatttacatatttaattaataaaatataaaattgacttattttgacattaaaattttaataaatttaaaagataatctaaataattttaaattgctaaccataaatttagtttattaaaatttgttatttttaaactatattttattttattaatttaaaatataagattagataaatgtcaattatttgacattttatcatattagaaatttattttattaaaatttaaatttttgttaaagtaacatgaaattgttgaatagttggttatattgtttaaattgacattttaggattttctaaacctaaaattttcaaaaagaatgaaaagaatgatgttttttttttttttgaataaaatgataatattgtaatcatcattatcttatttttcaaatttttaaattaagatattatattatattatcttattagttatttaatatatttaaattatttaaataaatcaaattttttaaaaattagttggatattggaattggaattttgaattaagatattttaggaatttattatatttaatattataaatattttctaaccacctaatttgaattcaaattaagatatttttaaatatattattttaaatagaaatatcttcaccaattttccaaatcttgttacttgtttatttttatttaaattttttaaatttaatttttttaacaaacttattatttatttgaattaaattgatatgattaacttgttgatagatctaatgatctaaattaatcatagtccaattgacaatagatcaaataaataatttgtaacaggtaattttgtaatttctttcatctgtgataaacctagtagcatgatagggtccatccaaatcatttgtctatgtaagtctatatgtttacaattgggcttagatgaatatagaaagcccatttatcttagatatttaaatggagtaggtcgctataaataaaatatcaccttgatagttttagttattcccaagcagtatgggacttattcaattaataacaattatttaattaaatgttaaattctcctcttttgggctttgtgtgagagttagggggtcatactaataggtacgacatactgaattcagtcctctgtcacatgaaccaccccaactgtgacggcccatttaccttacttaaataattgtattaggctaattatattagtttaaccta

SEQ ID NO: 53764 - DNA, 1752 bp, Cannabis sativa
  modified_base (350)..(353): a, c, t, g, unknown or other
taagttgtaattttacttttatttctagacaatataattttgtggctcataatgtggctaagtgggctttcgttaggaatgtaattggtatggtcgatcatgtcgatatactagataatattcgattttcggtctggattggtgcgattcgaaaatcgattggccattatagaacctgtcttaaaaccgaccgtttgaacctcagtttggtcgatttaaactgcccaaactttttttttttttaaatgattcaatttattctataagcacattattctacattctgtacaactacaaccatacaaactaattgtttaaaaaataaattgtcttattcttttaactttaannnnaataaaataataatatattattatatattatgagtaactacaatacatagagtaaaaataagcctaataaattattatatatgtataacagttgattttgattttttcggtcagtttattaccaaaaaaaaaaaaaaaccgaccgttcaacggtggttttaaactagcaatttttttttaatttttggttttgccagttttagttctagcgatgttcggtaggtcggttttaacaattttttttattttctaaatttcatgctgagccctaattgaagcttattgaaattttttgacaatttgctcacttagcgatcaaatgaacgagaagttaccttatgtgtaaatatgacatggttaaaaaaaaagagagttaattagaatttttgcttcttgaatattgatagttattaaattatagttcttgaattttttagactgttaaaaatttctccaaaattattaagattgttggagttaataattttttttgtccaattttactaacggaagtctgacatagatgaaagtttaggggtgcatgattttgattatttatttaaggagtgctaattacaacctctatgcccgaaatcatatgttagtatattttttttcataacggtattcactatagttataatattatcctgttaatttttgaaaaatttcgaatactttacagtaccgaaaacacagttcttaatattctagtttaccacatgtatttaaaaaacttcaaacctatttttggcactgtaaactatttgatttttttttttaaaaaaaaattatagggatgatgatgtaactataccaaatattaccatgaaaaaaattgaaaaaaaatatttcaacatatacttttaagtacagagattgacggtaacacttctatttatttataatattggttacgagatgaagaaactgactagagtgagaataagaatgaaaatacatgaatagaatagagaatgaaaataagaatatgaataaaaatagaatgaaatgaaatttaaaatgcataaaaaaaaattaaaaattttatcttgcattgtaatggtctttctttctattttgaaacggaatagttatttgaccaaaatagtaaaagattcattcagataatttaaaatgtaaccaaacaaagaaaatagaaataaaattattttctttcatttcacttcggaatccatcaccatatcgatgcaacgtcttataattagttagcagtttctcatattatttattaaattaaattatatgagactgatattgaaatgtactaattacgatatactacctcttatgctgcttatgaaatcccttacagtggttgtggtttgtattttttgcattagaatttttttcccctaaactttgacatatactaaat

SEQ ID NO: 53765 - DNA, 1202 bp, Cannabis sativa
gaccacattgcgttactagttgtcaaaactttgccttgtctttgtggggaattaattgtcaattacattgttttcttattaagtgggatatgatcttgcatccgaggttataggaatgtaatctatgattttgtgcgatttggtagaaaatagaaaactatattggggcttttggaccacgttaaacgcttcttccagttacacagttatatgccttttggatgttgaccatgttggatggaatctcatttggacgggttgtttattatttactcagaaggactgatgactcttagatcacttatgttaattgggcatgttgttgggacatagatatataagttgtatttattgttggaatgccacgagtttctattcgtactagttctcgagagtattaaagttttgatttggtgtggagagttctaagatttaaaaaatatacattatgattttttgcagaaaaaagaagtgtaatattcattttatttatcccactcagccctcacttatctaatcaaaaaatagaaaataaaaaactagatctaatatgatgtttagttgaatgtaatgaaattaaatgggtgcaaaaagaagaagatttgaagagggacagtagatgaggaggcgccttacaatgagaaagaagaagaaagaagtctggcaattgtgtagtttaggttattatagataaggataattaccataaaagtctttaatctcaaaaaataacaataatatctgttcatacccaatttaatagcaccttttaatgctaacaaaaataccacatattgggagttcattgaacacatataattatgattaaaaattataaaacacataatcatttaaaataaaatgagtttatggtttagagtttggaagacaaataagagggagaaagagaggcttttttgtttttgttttatttaataaatcaattctttattattattttaaatttaaaagaagtaaattttttgaagacttttgttgtaatttttctatataggtataatattaaataaaaatattgtaccgggtgatatgggcaatttttgaaacctggaattaaaaaaattggttactgatacctgctcgaactgcacaaagataacactcgaactcgatcttttcaaacaagttttttcgattttcgggtgcaccaagtttgtaccgaacaagtgcatcgggccttt

SEQ ID NO: 53766 - DNA, 1353 bp, Cannabis sativa
ctaacctaaagagagagaaaggactattcaaatactgtgtcgaatacatttacttttgttcacatatatgggatatacttgaaagaaaaaataatgtaaggaggagaaaggtctgaaataataggccacgtgtctatggccaaagaaaaggagcaggagactcaaaataaacaaagcatgattgctttcgtcacctacttttgcacttcgtatataattatataattaaattcaacttcaaaagaccttctatcattgggcttctagcattcaaaatatcattttacaaatcaaggcccacaagtttttagtaacctaaggtcataccatgtatacttttcaaactaagatattagacatatacattatatgtttcgagtacatatatatatgcatataaaaaaatcaaaatcaacataaaaatatatatgtacatccttattattattattattatcacaacaattactgccattattatttttaccacatactatttatctctctctcacacacacacatatataaatgtgtatacatatactactcgtttaaattatttctaatataaactcaatatttatacattctccaagtcaatcaatacgcaaaaaaataaaagttattattgatacatatatttcaattttttgtcggtcagcgcaactacattttaagtcaacgacacttgactcaaagagtaagagacaaactatagtggccaaaaattgcaccagatccaaatgcctcttacattctaaatcagaatcacaatccttcaagaccaagtcagtaaatataacccactcatctaaaatgcattgggctttgcctaaaatacaaggcccaaacgagcccagtagctacaagaccaatcaaatataaaagataggaacgagtctataactgatctacaagaatcaatccttcctcctagaaaaggaaaagaccacttcccaagttggttcttcaaaacaaatgagtttgtccatcagaggctctataaaagaagaacctagaagtcttgagggatcatctcatcttcactcattgaacactcattcagcatacatgcaatatattaatattattattaccagtccttctccatcacttcacagtggaaatatttattttatattttctttatttacattcgtctattctttattcgaattatttactgacttgatcgtcggagttccttcggctggcaccatcctagtgtcccaaggtcttaacggtcatttttctttgttctataggttgtcagtgcttgcgatctttccattcagatcattatagatttttccctctacagtcgttcagagcaaatttaaggtcttttatcaa

SEQ ID NO: 53767 - DNA, 823 bp, Cannabis sativa
gattagtaatattgtgatcatatagaaatgaggattgttatttggcatctcaaggtgcttaacaccacaccgatgtagcaccctataattagttagcggtttttcatatcatttattaatttaaaatgtgtgggacctgatattaaaatataccaataacagtatgccacgtcttgtggtgcttggcaccttaaggtgcctattagcatttctctatataaatatggctataagggaaaaaacaatctacattagcatcacaattgtgaaaatcatttatcaagatgcatgtgcgtctgtgtgtgagccattcataagcataaaagccaccatgatatgcacctgagcttgcattggaagttgaagaagatagaggggcagtgctagtgttcgcaggagcatgtgaagtttgatcagacggtttacccttgagagtcaacgaactcatagcccatctgcatggtcaataagagctccagaccattactgactccacataataagaactcaataaaacatgttcatgataaacctcttaacaatttcagttcaaaaacagatatggaacatagaattaagcactccggcacagtatacactatgagaaagtaggaaataaactaatgagggtctgtcataaaatatcaaaggcaaacttaattatcagttagtgaatgacagattcctccatagaaacgaagttattcacaaacaaattatactatcatcagcacaaccaccaaaacatagaagtaataatatctggatccaaaataatttcccattcaaccaatgcttcataaaagcagatagcattgaacta

SEQ ID NO: 53768 - DNA, 1091 bp, Cannabis sativa
accgagtttgtttgtgatattgaaatggtttgtagcagctaaaacactattcaattcaaaaatacacagctcggatggatcttgttgtttggcaccttgcagattgtgtaatggagtttcccttctcttggccaaaccaagtttctttaggatctccttaacggaccatgctcttccagctttgaaatttggagttagaaccgtcagataacaacttaacacttaaacagactaactaactctaataaaaactgaattgaaaatttacactcaagatttatcattttacttacatctgtgactagttctccatctatgaaatacgaagacagcagcaagaagaagggcacaagcagaaacaactgtgaggatgatgacaatcttcctggttttctgtcctctcgctaaataataaatgaatatatggatcatataagtgttggaataaagaagaagataaatacctttaatgcaacaattctcaccaagttcagctggtgcaaggcgaataaaaagatctgcaccgccatagggaaagacctgaatgtcaataagatcttctgaccagaccaaacatccaattccatttacataagcataagcaacgcaagaacaattgtttagacaccacgtgtagcaatcattggcttcattaatattgttcacaaacgttacaagtctggaaggtttaacatattcatcatgtgaaatccatctgttttttctccatttgatggttggctactatagtttttctgacaaagtaagttggttcttcttttgcaccctccgctccaaataccattcctccactcttgatctgattttggtacaaacccttttaaacacttgcaaattggaaactcagatgctttgcataccccaaaggctccgcaagttccatatacgtcgcatcgagtttttggtaataacttgacttcgtcgttgccagtaagtcttagacgaccttgagatgaaacaaacagacttctgccaaagaaattatcgaatgaatttaaatagagaaaagttgttcctttctcaaagtcttgttggagatcaattatatttagatatgatccacccatccc

SEQ ID NO: 53769 - DNA, 758 bp, Cannabis sativa
tcttttaattagtaccatttaaacccatgcaataattttaaaatttattacattaatttataacattcaaagaatacaaatagttttctttgtttttttaacttactaagacactcaaaatttattactatctctatttaacacattgtaaccattaataattgtaacagttttttaataaagattaatagttgtaaccgtcgtcccgattttattacaatactacttcttattatctactcaaatatattattacacttattattattattatataaataagaaaaaaaataaacactatgcctttcttcatactatattacaattattttctctctctctcaaacattttcacttctcttattatatatatatatatatttatatttatatagacaacgttatatattctcaagtgacattaataaacctattatattacgtataattctaattcataatgagttataggtaagtaatatcataatttgttaataatattgttgaaaaaggaaacttataatttagttaatacattattaaattatagatagaaaacccatataaaatggaatcactgaattcaaatagttacataataattgttaagcaaaaaaacattataattattttttattttatatactagctaattaatactaacttaaaagaaataaaagactaatgacctatagtattctaaaataccatttatatgataattaattttaaaaacgtaacattcacactaatactaa

SEQ ID NO: 53770 - DNA, 850 bp, Cannabis sativa
ttcttttcgtacttacacttaattatttaattaaaattgctaaaattattattcgtacttaatatttttttttagtatcatgctattattagtataattaaatatagggtctaatataattttaaaaaataatttttaaaaaatattactaataagtataagacgatatctataaaaaatgttgaagacggctattacctaatagcaatgctcttatttaataaattttgtaaaactttgagaatttcaaaaaaaaattaacatgaccaaaacatagttctgttgcacactattttattttacacgcgtgtaaaataaaatttttgaaccttattttcgacgtattaaaatttttataagatgttttgagtaactacaatataggcttaaaaaaaaaatagagtaaaattttttccaaaagagataaaaatatattaatatgcattcctaaagttaatatatatttatatatatatatatatttcctacttaaaccatgaataaaacttaaaaatatatatatatatatattataatctgtattgcaggaataaaaaaataaaggtatatgctgtaaatctacaactatgaattcaacatcaaatatgacaaacacaaacacaagaaatcataaaagaaacgattcaaagcataccaacatcaaaatcccgtaggaattagtgagccaattttaaggcccgaaacatcaaaattgtggcaagaatgtgagatatgcttagatccgttttgaaaagagttttcatatactacttgaaaagcattatttggataaaaattaactaatttatggccattttacttaggggtgtgcagtgttgaaagtgactat

SEQ ID NO: 53771 - DNA, 2700 bp, Cannabis sativa
atttttacttatatttttattattagtcgagtttgatagctaagaatgtttggaaaaatatcaacgctgttaatatatgacaatggtttttagtgtttgaagctcttctttatgctatgtttacaaattgtaaaagaaatttttataatttgaaaagtttggtttttggtttttggtttttgtcaagttaatattatctaaatttaacttaattttaactggaaaaaaaaaataactaaaaaaagtttggaattatgatgctcataatccatactgtatgtattatctttttcttaattgatggtaatttttacaatttcattgtctcaatgttgacaaaatattgagatcaaagtttgaaatttggaatcttaaataaaattgagcaagggataatattaaggtcttttctaaaaaatttctttctcttatatttataataatcttcgttaaaatattaatttaggtcataaaattttacattatttaattaatatgagatgagagataatattaaagtcttttctctcaaattttcttttatattcttatattgataattatattgaggaaaatattattttggatcataaattttttgattatttaataatatgagatagtgatatctgtgtattacaagtatatacttgatccaaatacgactcatttaataattgtataaaaaaaaaaaaaaaaacatctaaacatcgtgtaactcgttaattaatgaatatcgtttaaaaaagttgatatgcatctcaagcccgatccacgtgacagatgcgggttggttgattgtttaaatgcataaactcttaatctacttaacatttaacattttttatttataacctatttatgacttgttgaaattttataggctaattttgtaccatggtaagctcaatatgaaccgtttatcaaacaaattagacaaaagctactaaggctagccagcttagtaatgagggaggagtagaaaaaaggaaaggacatggttcgaatccaaaccctagtggtgatggaggagtaagaaaaataaacataagttcgaacccaaaacactattaattgatatgcaaacccttaaattattaattgaaaaaatacactcaaaaataatccaaattcggatttcgagtaatgttatcagtaatattaattataagctaatgaattagagtattgacacattaattacactttaaataccattacgctaaaaaaatacacattacactctaattttcaatacttttaggttgggacctcacattttaatttgttgttatcattactctaattatcattatcaatctatcacagtttcacatatcttgaaatatcatatcagagggaaacttgggatgattcttaatgaaattttgagccatgaatgatacaatttcttcttctagagaaagcttccaagaactaagtcaatggctaccgaaaatggtgaaaacagtagtcacccaaaaactctggtattcaatacttgaacaaaatgtacaaatcaagaagatgccatacaaactaactacaaggatggcaaccagccctttcaagacactttcagaacaagatctatggtcttaaagtcattaatgaaaattagtaaccatacgcagggcggctaagttcaaaaacaagttatccacctcacttgggattcctaagcactatgataaccgagtccccgcgtaaaaacattttgctgatgaatctgtctttgtttactggctgcgccttcttcttgcctttcccagtcttcggtacctggacaataaaaaagagtcgtttgagggaattggaacttaatgagatgataaatgaacaatgatgaaacaacaattacctcggtccacatttctttaacattttcgagaaccatgttgcagtgcctgtcaaaagctcttacccgtccgagaagctttttgttgtttcgacaattaatgagcacctatatttgacagagaaaatattatatttaatttaataaacaatttactaggcacagagcacagaaatgaaacaacaatatctaatcatgagagagcattacttgggtgttgtttttgacactcatcatcagaacagaaagtggtccggtattaaattcctcatcctcagtcttgacaacctgcaccgatcgacttccattagcattaacatttaagcattacaaactattaaagatactttttaaacatacttaataagcaacacagtagagtatgaacttacatcttcttccattggccgactgaagaagcaaaaccacaaatccaatccaaggaaagacacattagtatctacagaaacagtggaataatgaaaaagtaaatgtgcaagtaactaaaaacaaagaaatacctcattgtgaaatcttaatgctgtctctaagatccaaaactttgctttgatctgaaaaccacacacaaacaaagaaaagatatcgtgttaaaagacttccgacatcataaaatatacataatttcaaagaaaaagtggaacacttgctgacacaaaaaaagaatatcaaatagtcacaaacacattttcataatgttgcctcttcagttcaggtctccaatagttttccgcatggaatatctcagaagaacgaaagttattagtttgatcatcatcagaggcaagacaaaatttaaaaacataggtacaaaagcagtaaca

SEQ ID NO: 53772 - DNA, 1179 bp, Cannabis sativa
aaggaccaagaaccaaagcacacgctgaagggtattctaagataaatatagagacagttggagtcaactatccgagaatcccttccaagagggaatagctagccatccatattcttttcaggaggaagactagctttcctgaagactccttccaggtgaacataatagacatccgggaatgctcttccggatgacatctatcattctacaagactttttttggatggtcaaattagactttcgagaacaccattctggaagacaactaacttttcataacaagaacaactatatgagatattttcatttagagaaactataccacacctcacacctttcgtttacgttgtaaacttttttatttttttaatgtgctttataatggaatggttcactagtcatcacaaaaataatcgttctggtaaattttctatttgttttaacattcaagagagttttttagtcaatttttttttttcatgatagcatgcattgtagctatttaagattacttataaattttttaaaaaattctaattataaatttttttataaaattctacttataaatttttttaaaaaattctaaatagtttatagtaccgagaataaggtttgaacaataccacacgtataaaaaaagcaatcttgtatacaagaaattatatgcatcttattttcaacattttaacttacttagaattttttaaaattttacaaataattctaaataactataacgtacacgattataaaaaactaaatcttttattattgaaatatataagtccactgaaaatacccatttaagagtgcactataaacatacctaaaaatatatatatctaaatctaaagaaacatgcaactacatatagtatgatctcggatcacttttttggttagtttaatggattttgaataattaaaggatggtatttttgaaagtaaatctaatataattaatgatggttttaggtttaatttgtaatataatgatatcctccattatgtacgttaacttgaataaacctaacactctagatcatattaatttgtaattagtctagtttaatccttaattaacggcttgttaattatcaaaggattacatacgtagggaatagattttgtccccttacattaagctttgttttatatattttgattaaggttatat

SEQ ID NO: 53773 - DNA, 1711 bp, Cannabis sativa
agatcagttcgtgagttgaagtccctgattcagtcgcgctctccagattttatttttatgaccgagctcaaagttgatgctacttctttggtatgtactcttcactcccttcatttttattttcatattattgttctagctgttggtattgcgggtggtattatcttagcttggaaaattgggtttgagtttgagtgtattgcttgctcccaaaaccacatctctggtattgtgttttcggatccccagtcgcatccttggctcctgtcctgtgtttatggtcccccgtattttcatgctaaaaaaactttttgggagaagatcatgaagataggggataggtttggtagcccgtggcttgtcttgggtgacaccgactttgtactaagtgattctgaacgagtagggtccaaaggcagagaccagtttattccaatcatctcaagtttggttaatgccaggggtcttattactatgcccatccagggagacatgttgacctgggataaccatcgttctgggtccaaccatgttaagtctgcgctggacaaaggtctaattaatggtgcttgggttagacatttcccgaaggctgtcctctgctctttccagacctccaacttggatcactgtccgttgtgtctattttctgatggtctgggggagaaaatgagaagaagctttatgtttgaggaagcctggactagggatgagcatagcagattagtggttgattctgcgtggaagtcggttagtttcccctgggccccggctaggatcttcaagaagattggagctactggggttgctcttatgcattggaataggtcacagtttggaaaacttgatacattaatccgtgatctggaatgaagactagatctcattcagagtttgctagtgggatctagagagtgggcgactgaaagagccttgcgaaattctctaaatgaggcccgggtgaggaaagaggtgtattagaaacaaagggctagggtttcttggctgaaggaaggggacaaatgttctaaattcttcttcctttccgcctgtatcaaaggtagaagaaatgccattgagagcatcctcaataaagacaatatgtggatcaccaaaagggagcttattgggaatgaattcatggagttcttccaaggaattttctctggtacggagaatggaatcgatcttaattgtaacgatttagtccgggattgtttgtcaacggacgaccaagctgagcttattagaaggccctcccttgaggaaattagggctactctttttgccatgagtagtaccaaagctccgagaccagatggaatgtctgttcttttctgtaaacactattgggaatcagttgagagtgacttctgcgaagcggttttagacttcttccaaactgggcgtattcataaaggagtcaatgctactaatattgtcctaattcccaaagtccagaactcgaagagacctaatcactttcgtccgatctctctttgcaatgtggtgtataaggttatctccaagatcattgctaacaggatcaaaccactgttaccaaagcttatctgtcccacccaagccgcctttgtgcccaggaggaatatataggataataatgtgatcgctcaggaaatagtccactcgttcaataggaaaaaaggcagagaaggtttgtttgcaataaagatcgatctaatgaaagctt

SEQ ID NO: 53774 - DNA, 1975 bp, Cannabis sativa
ggctgcccaagaatgggaaaatagctttgcagaaatgcaagccaaaattaatgagcaagctgaagaaatcaagcacttaagataatagggtgctcctgtgatccctgctccagaaatgcaggtagctcttgcccctgatgtgcagacaaaaccagttattgcagtgaaccgtatggaaccactgtatgaaaggttccgcaagcaagcacctccagtttttttgggaggtttcgatgtaatgaaagtcgagcagtggctgactgttattataagacttttgaattcatgggcgtcaatgacaatgatagagtggcctatgccacaaacctgtttcaagaagatttgtttagtgggacatggtgtctctaacttgtgatgttaccaatgacctgagaaaagttcgaggagctgtttaatgtgaagtactataatgaatcagtgagaagtgtaaaaagaaaggaatttactcggttgacccaaaaagaaaataggagtggtactgaatacacaactcagtttgatcgattggcaagattggcctcaggaatagtgccaactaattttattaagaaagagaaattcctagatggattaaattcgaagataagacatgatcttatgattaccactaatgataacaccacctatgctgatatggtaggaaaggcactacgagcggagggtgtagtggagtgcactcaggagtctcgagggactcaggtcgttgtaggggctcctactcctcctaccattggttatagtaggggtggtagtggctcaacaactaattaggaaagaagggcacaaactgcatctagtggctcaagtcagaataagaggttctgagggaaccatggtcgaggcaaccgtcaaggtagttctgaaacccgatacacttacccgaaatgccctaattgtaaaaagcatcatctgggtgagtgtagagggcaagggtgttttcagtgtggattgctagggcactaaaaaagagattgtccaaaacttaacaaagaagaacagaagactggaacaaaacctgctccggcaagggtgtttgctctaactcaggcagatgtagaggctagccccttagttgtaacaggtcagctctcagtcaataactcttatttctctgtgctatttggctctagggccactcactcttatgtggcagctagaatttttagtaagtttaatagaccgcgtgatagttatggtaaagggtttcgaaccctattgcctgacggagaattagtcatctccaaaaggtggattagggctatgccgatcagaattgaggatatgagttgagtgctgacttaatagaaatgagtttagcagattttgatattatacttgggatggatttcttatccaagtactcacctagcattaattgtagacggaagatggtgatcttccaaacagaggatgaggaaccatttgtttttgttggatcagttcagggatcccagctcctagtgatttcagtattaacaactagaaaattgttacaagagggatgtctagggtttttggccgtggtattggatacaatatgtctagggtttaccaccacaaagagaaattgattttattattaatttggcacccagagcagaaccagtttctaagacacgatatagaatggctccagcagaagttaaagaattgaaaatttagcttcaggggttgcttgacctagggattttgcgacctagtgtgtcaccctggggagcttcgatattatttttcaagaagaaagatggatctttgcgtatgtgcattaactaccgagaactgaataaaatgactgtcaagaacaagtatcctttacttaggatcgatgatcttttcgatcaacttcaggggaagacggtcttctcaaagattgatctctgatcaagctataatcagttgagaatttgagaggacattccaaagacagctttctgcactaggtatgggcattatg

SEQ ID NO: 53775 - DNA, 1187 bp, Cannabis sativa
gaggcattttgtagaacacttggaaggcaaagaaccaagtgttggttttgaaaatgccaaggctctttggagaggaccctgagaagatcaccttggcaaccaaacgtaaccatacaaacatcagaatcataagtagaagtttccactggaaatctacctgaccaattcccggtgacaaagttgaaaaattgcttcgggttatggccccttttggagaaaattttgtagaagactctgctacttttggttcgaggaagtggagcagagatgttggagaagttgactactgctctttccttttcagtgagctcttgagacatatctgtatgaaaagaatccataagtttcaggtagagtgtagtagggaaggaatggaaatcaattgaaagacaaaggagatgtaaaactgtagaaaaaactgaagagaagaagttaaaaagaaaaaactatcacaactgccacagaccaaaccttaagggcaaacaatgctcaatccattttcaagtcttacaagttcctttttataaaggtggttaaagttgaacttatatattttagtcattttgtataaggttaaacatataaattattttttattgaaaaatagggtgtatttatacttatagggggtgtaaatataacttccctaagatttatcaaggaaaattttatttgcatcccaataagtacacccacatatttaagaaaaaatacgcttgaaataatttttaaaaatctttcatactagttttaattttttttaatattattttgcgttaattttaacacttattttaattttattttcataatttttttaatcatgtataattttttttctaataaaatttaacataatttttgttttaattttttttgttcaaatatttgtaatataatttatttttatttgataggtatactttttaggaatatgaatcgaaagaaaaaaattaaaacaattgaagacataattaatttttaaaataaatgaaatcgctttgtattttaaaattaatttaaaaaaaagtaaacatagtttaatgaaatatattcaagataaataatatttttatttttcttatttatttaaataaagaaattaacaaaaatagcaatgttaaggtataagttggatgtttcttgttatccttatgatgagcaagttaaatttataagtttatttt

SEQ ID NO: 53776 - DNA, 878 bp, Cannabis sativa
agaggtgggtgtgattactgtggtgttctctattttccttaatggtacgacttggacgggcctctttgtttacggtcctccattttagaattgaaaggaaattgttttgggaagctaggactttggagatcttgactttggcccacccttgggttcttgttggagtcttggagagatcttaatactatcctttgtcaggataaaaagtttaggggtagatcagttgatcatggagatggtcaaaatcttagtgagctattgaatatcactcatggagtggatttgggttgcactggcaattatttaactttgtcaaatggtcgatgtctccctgagctgattaaggaaaggttggattgggccatttgtgatccggattagcttctcaattaccccaaggtaggggttcgttccctaggtattaaagattctaaccatgccctaattatccttgatcttttgttggattgggagaggttcagaaccccattctggaacttagatgcttggacaagggacgagagttgtaaggttgttatcaaggaagctttggctattgtagttcacgatatcaagagcttccggctagtgactagattgaagaatatccgtagatgtcttattaagtggaataaaacacacttcaggatgtgtaaggaaaaactgcaggtgcttaaccatcttcttgtcgaagttcaaagatgcaccccttcgaacgaaaatctcaagctcgaggcagatttcattttaaaaattgaggaagtggagaattgttaggctgagatttggaaatagaaatcccaagaattgtgataaaaggatggggatagaaacactagattctttcacgctgggactgtgatcaaaagaaagcaaaa

SEQ ID NO: 53777 - DNA, 1359 bp, Cannabis sativa
taaatcacaatagatgtacggttgactgtaaggaacgttaatcctcaacttaccaagctttgtccgtacaaaaacagaaaaccctacaacaatattgtaagtcccatctctcatctcatcaccgaaacgacaaaggaagttctcacaattggagccaaacgacaacatgtggctcccttgaaaaactacacccaaggtggttgtcgttttgtgttttaggtagaacggcgttaagaccactttggtcaactgatattggccctgaacaaaggccgtggcttcaatgtcgtcgcaataaatgtccacaaaggcgttggggtttgtaactgcaatgttgagtgacatgtcgtatgagatgaaaaaggtgtcgtttgtgttgtttttgagagataagttggtgaggaaagcgtcgtttatgtaaacttccagtttgggggtatttagccataggacaaagccaactatgaggataatacatagtagagaagtaagtgtgttgtagaaaaattcagagagccgaaagaataagaattttatttgcagagccattgataagggattgagagagataaatgtttttgtattgaatggtaataattaatgacagttatgattaaatcccaataagatatgtcaattagaattgtctctaatataaaggaactagatttgggaaacaaatcttaatatatcaagtaatgattattacatactaaattaaattaaaatatttacattttatactaattttgaaaattttacatttatacttttttttttatatatctttttctgtttttctcattaatttctttttttttttcttacatgacttctttttttcttatataagtttgggttaacgatttgcgaatcgtgtaactcatcaatttgtaagagcttccagttctttagctgattgtacgtacagggaatctacagcccctactacgcttatggatgtaattcaacgtgatattcaataaagtttacaaattttattcaaaaaaatgtaagtttaggttatttatttattttttcttctctctctatttatttttttttcttttccaattctctacctctttctctattttttttcacactaattttttttatctttatggatgatttctcaataggtaataaaaagattgataaggtgacaatttggtgacttggtataacaggtcaccaacaagattttttttttttgaaaacaaagctatatttattttcttaattatggtaattctaaccaattagaaattatttttagaaataaatttactttgcttaaattactatattatctttacactaaatataaaaatatattaaatatgaaagatttatttg

SEQ ID NO: 53778 - DNA, 1199 bp, Cannabis sativa
tatttattaattgtggaaattttatcgaattatgtgggtattgtaaatgctatttttgaaataaaatattttcaagttcagcagccatggaaacttgacagattggtcataaatctcacagcaatacaagttgagatatattggaattatatcggactagtttagaaagttgagttgttaattcattcgggaaaaattagaattgaccaaaataccctaggtttaattttaggctttagttttttaaaagatgggtaaaatagtcatttcattaggttgtatattagttgtcttatattgaattatctagactgaaatagggttttgatgttagatttattattattaattttgatatttagttagaaaattgaagataaacttaactaaggaatatcaccttctcctttcttcttcttcttcccttcgacagccctagaacccagctaaaccaagcaattttcttcttcaaatcaatccaattcaaggtgaattaactaaccctgggtgttattcaagcttggaggtaagtattttatcttttttctttgaatatctaaggtttaggttgagtttggttaagggattttgtgattttggggttgtggtgttggattaagttcatagtatgtttctaggattaagttaggtttgtttatgtatgtattgggtggattcttgtttgctaaggtgtgaatttggaaagattgagtttaagaacttaattttcattccttgatggtgaatctgaatttttgaggaattacttagtttttatagcttgagtacattttaattatggtttagaactgttctgaaaagtttgagtaggttcaatggagttttggttcgattttgaggcaaaaaactagatttttcccaagctgccaaaaccagtcgaccggttctacaggccactaaggaactggctttgatggccagcaagggaagttctagggttttttctcgaacctggttttgccttggggtgttttctagagcctagtttagggtattttcagatgtttaagctatttctaagtcagtggggattagggtttgtcctgttgcgaaattagggtttattctagaatttgattaaattgttcagcaagtttcgttatcgtgacataggaccctggatcgtcgagcataattccactcaggtcggcctgcacacctgatattggattgaggta

SEQ ID NO: 53779 - DNA, 785 bp, Cannabis sativa
aatccattccttatcatatcatctaataatcctaaagcataacacacgcggctttaaaagtaggatatttgatcccatttactgttctaatatttctatacgaagtgcatcatttgacaaaattaagcaacattctcatatagaagcgttcgccagttgaaggatgtgcgaagtaaattcttccaatagccacgccattttttctcctagtccatattttttcttttgaattccaaacccagtatgaaagaaaatccaaataagttagttctcgtgtatcatcatttttcttattttttttccaaccattcagtgaactttgtttgtcttattccaggcttggaaagaacatcgttaacataatctttttctccgaatattattgtatgctcttcaagcaaatggaatggtagtctttcaactgatggttgtctataatgtatgtcaaattgaaagattttccaacaagcttcagttgctgatatatacctacattcttaatatgttttgatttcatctattttttcggaagtatcaatagattttattcttgcagttgctctatcagaacctttatgaacatatttgaatagatatttgactgatctagagtaattacaaatctcgatattaatatgtgcatcaaacttgacaatcaaatttctattataagggacgacatatcgattatctaaaatgacacatttcttttcaatgtaaatacctttatttcttcttttgtagactggaaagccatctgcgtctattgtcgtccgatcattaaa

SEQ ID NO: 53780 - DNA, 1293 bp, Cannabis sativa
aacttggcaactcattgaaactttagctggttcttctcaccttccatggtgcattattggtgatctcaacaacattggtgaccagtctgagaagcgagggggtagaccttacccactgtctcttattcacggctttcaaggtctccttggtagatgcaatcttgttgacttaaagcttcatggccatccttacacttgggagagaggcaaaggcatggctaactgggttgaaatcaggttggacaaagctttggtgtctcaactttggcttgattctttcccataagctgttttaaccgattgtgatgtttctgcttctgatcatacacccatatatcttcagcctgagccgactgctgtaacccattttgtgtaccattttaagtttgaaaatgcatggacacgtgagcctctctatagccaaattgttcaatcttcttgggagaatttttcacatgtttcatttcaggaaaaagtaaagcaatgcagtttcttgttagccgaatggggaagaagtcttacatgcaactttaagcataaaatcaaaaaaaatcaaggccactctttctgctctaaaaggtaaaaccgatcccaactctgtacatgatttttgtcaggagcaaactaattatttcgagatccttgcccaacaagaattatattggaagcagcgatcaaagcaattctggcttcatagtggtgataaaaattccaagttttttcatgccatggctagttcaaggaaaagaaccaacaatatccatcaactacaacaagctgacaggttatgggctacttgggatagtggtttgcaagatattattgttcagtattttcaagacatttttactgctgggaatcctaactttgattatgttacagctggtataaggtgctctatcactgacttacacaacgatatgcttttgcaaccgattgttgatgatgaggttcggcttgctctctttcaaatgcatcctgacaaagcaccggggcctaatggtatgggacgtggcttctttcagaaacaatggcatatagtgggttcggatgtcatttatcttgtgagggacttttttgaaacaggctcttttgccgaaagcctcaatgacactaatttggttctcattcctaagaagaagactccaacgactatgggtgatcttcgtcccattgccttgtgtaacgttgtttacaaaattgctgcaaaagtgcttgctaacagaattaaacctctggttgatcaggtaatctcccctactcagagtgcatttatgttggaatttattttac

SEQ ID NO: 53781 - DNA, 911 bp, Cannabis sativa
tctacgtcggagtctgcaactcctgtcttcatgtcctatgaggacacatttaaaaataggtaaatgacaagttttcatatttaaaataacaccaccatccgcactccttgttcaggttctgatgaaggcctactaggagggggtgccttacctaaatctcaatttaaaattagctgtattccggggttgggaaactattcttccacattctttcaatgcttaaaacaacaccaatacgttcacccacatattagcatttcgggtagagaggaagtaggtaggaatgtcgtacacgaggacccagataggagttgaatccatacttactgagcgtcaattatcatccgtcggtattggttttaccagaagcgacccatcacacacattccatggttcattgttaacaacgtagtccgcttcaatctttttttaaaattgtgaaacgaacaagttcatatccttctttttgataaactaacttgaagaaaatctacattttctagtaagcaccgagcgaagaagcccatcaaagataatccctcgtgataaaattctaccaaccacagtcttggcaatcacatctgcaccaagcgtcgcttctagctgtaagtcaattgagaaatcaacctgttcatagtcttccaaatcttgcacaatttggttagggtccatctttgctagagaaaaattgttcaaaaaacgagagagctaagcaacaataaggattgttaagggaatatctcaccttaaaccttaaaccctaaatcttaaaccctaaactaagaaagggttaaaatcaacaaatttgattgtatggagagaaaacctagagccatttttcctcgagacttactaactgcatatgaagtagtttttcacttattcacccgctaaacaatttgattcaacaa

SEQ ID NO: 53782 - DNA, 936 bp, Cannabis sativa
agagagagagagagagaggaagtggtgatgtgagagtgtggcttgaccaaatgagccttaaataggttttgataagcccttctcttcatacatgcaacaagcaattatacagcctgtaagatatctatgcagaggattaatagttccctatttgggaacatgagcaaccaaagaaaaagaaaaaaaaagtttataactaaagttgttacataaaagctgcccggttaagacttcaacagtcagaagtggagtggaaagtccctatctatacagacgcccaaatagggactcgggggcaaattttatcacaatttttactcacgtgacgtggcgtgtctacataggcaagattgatgccacgtggagtacaaatactcaagctggacaaatagacaacaaactggccaactagggaggtctagccggaccacccctggccgaccgtagtgcaacataggctggccagcctctagcaaagggtaggtcggccaacttctcttctagcaaacacttttggtgtctctgcatctttcaactcggacatgaactcttagttacaaattggcttcaacaacccacaaaaataggggtttaacgttagttatttacctattctttatgaataattagtaagttatttacttatttatttaatatgtaagaagtgaatttagatatcaacctactatcttctataagctccctcctatataaagagcactaggctaaccctataagctcttgagttcaagcactcaaagccctagctctctctcctacacgccacttgcagtgtagtagagactaagtctccctcatctcattaccttgagaagtgtcttacattctcaccattgtactacatagagagccactctagaactcataacacttgtgatctgagtggtattatctctcatatcaatacaactaaaa

SEQ ID NO: 53783 - DNA, 984 bp, Cannabis sativa
gaacccatttccaattgtgttcctgatctctttatcatactaattagtttgaagtgttcgatactatgaatgccagtattaattatctaacccaatagtgttaattttttatatctaaaagcataaacaaaatacagccatcttttcaattgctaaaagggttttacaaaatctacactatacattcttcaccacacaaatcatccaagtacataaaacaaacagataaatcttattgagaaacacaatgatctaacttccaaataaagggaagaaaaaacaacagtcatcaagcaaaatatggcaagtacatccgtatgataaaatttaaataaatttataaggaaaaaaaaaacaaagatcaaccgaaatattcttactgaatcgttgctacaacccaagtaataatggggacaataaacaattaaaaaagaaagaacaagaaatggatccagattcggaaaggataaagaaaggcaaggaatgaaaaattgaagaagaattacctgaaaaaatggaaaggtttgaagaaggaagaggagaaagtattgtgttaagagaaccgacagatctgtgttgatactcttcttcactataagcagctcactcataaagaaagctgtgtgaaattacttaattaaaagcttttaaaaatctttatttattttctttatttgaaattaaataatctagttcgggtgtgtactgatgctattattttcaacagcggtttaatataaaattatacatacggtggatacagtattttgttggttggaggaaattccacctccacctccactaatgactattatggagtttgtttttaaattaatataataatctttttttaaaaaaaaaaatccaaattatacatattttttatgttatttgatttgaattttgggaaaaaaacagaaaaatacaaaaaaaggaaaaaaaattacaaaaatactatgggccggcccattaaacatttataca

SEQ ID NO: 53784 - DNA, 584 bp, Cannabis sativa
atacttctacatttaaaaaatatttaaaattcttaactatatataataaataatttaaagttgatttatttattcacaataatttataaatatctatttatatttttatcaaagagatgtgtgacatttgaaagaactccagtatctagtgtacttttttatgtgggaatgtggtaggtcccacaaactttaagcgtgtaatatgaatacctttataaatttgagtttcatattttccaacaagtgattttcttgctcacatttctatacaaatcaaaacttataaaaatacataaaataaacaaacaccctaagatttagactgatctactaatgatcaaacaaggggttctcttcaaatacatgcatatcccaacacttccctctcataacaaataccttaggagtttatgtgacatcagggtcgtcttaaggtgttgagaggcctaagacgaaatttaaaacgtggcttttttttttcttttataaaaaactaaaataaatatatttttttatttttgctctgagatattatttattattaaaattttgatataatataattaactcttttatctccatat

SEQ ID NO: 53785 - DNA, 1007 bp, Cannabis sativa
atcaattatttttatgcattttaaattttattccattcctattcccattctcattcccattcctatttctatattttcattcctcccaaccaaacgcttcaatgtcatctcatcctattgtgtattaggcatcagtcgtgtctagtaccttctcgatatgtcacgttgttattggttagcgatattatttaaaatttattatattaaactatgtgagacctgatatatacttagttggaccactgaaaagtgttaggcagtattagtgccatttagcatttctcatattagtagtagttaaatttttaattgactttttttttctactctgattatatattaactttgtttaattttgctataattgttaaatcttatcagaacatcaacctgctggttcatcgcctggtggtacgtatgcatataatatatatatttatgcataaaataatatgaccttattatttattggttaatctacatgtatgcatgcagaggcagctaaaataatttggcgtagttaccgaagatgcagtggaatgcatcttactcttgatggtatgtatatattatgtttttaatgtatattattaattttagattaatgtcatgcacatctgatctcagtattttcatagatatttttattgacgaaagcattgagttggacgaaaactatgaggagaaaaatgataaggtattattacattacatctataattgaaatctattaaggatttattttcacatatatatataatgttttgtgtcatcttaattttgttgtttaaattcatgatatagggatttttccctgcggagtatggaactcgatttgtgcctcgtccatttctagcaatggcaatatttgtaatgaaagagcatagcaagagaatggtaggttcgtaatatatatgatgtatacacacattacacatatatgtttggctactttatgaatgatacatatgatgtaattgatatattgtttgatgatgatgatgttc

SEQ ID NO: 53786 - DNA, 4514 bp, Cannabis sativa
gttaaaccaagaaatgccgttagataagcacttttaatatataaagatatattgattgatattgattattattactaatatgttaaattatataattattttcaactacacacaaatgtaaaaaaaaaaaaataaataataaataaatacaataacagacaccaaaaaaaaaaaaaaaatcatataaatagttgacacttaaactcagttaattcatctcatctctctcgctgacactctcattcagccccaaatcctattggaacttcaacgcgcagccgcattcctcccaaacccaaccctctcggcgaccgtcgtcccaaacccaaaccctaaacccaacctccattgccggagatttggaggtcctgccttccgtttcacccctattgaggtattttacgttctccttttctttaaatattgttatttatccacttcaagttccaatgttgttaatgagttttcatagttttctcattttctgtgagctttatattgcgattatggatttcattttcgcaaatgtttaatcctaaatttggcagttggttttctaaaaatttgtttgcattgacttatattttgcattgacttatataattgacttatatatatatatatatatatatatatattcattgtcgttgattttgatttgtctgttagattagggttctgattttttatttattttaaaataattgggactccatttgtgggtttaagagtattggagcttgttattcattgtaagtgattcacattagttttttaaaattttcccctgattcttaacattatctggttagaaatttggtactgataatataggtttaattttaatagcaattggattgattaacttatagtgttctgttctgttctctttgaagtttcgttcattatacattattctctatgttgaactggtattcactagccaaagaaaaaaccaaaaatggctatcgggttttcattacaatagctgtaaatttggggttattgcatttttttctgtgttttagaatttggtctagccaaacatatacaagccaaacatatacatatatacgggtatatatttatatatatatatatataagtttaagcatgtcactttaattgaattggaccactcacaaggatcatttaggtgtttaagattagttgtgcttaagtatcaaacagaaaaaaatttctgaaacgtaatagaagaaaaattataagccatttttactttcaaccatttttgcttctacataattttctgttccaattaacagtgtgtactttggttattatttactgttatttttaacaagaataataaatgaatatataaaattgtgagtttagaaatttggtagtatgcaatatgcattatctctctattatatatttcttcttaactttattatagtagtgttcttgacatgtaatttaagtctcttgattattcataatttatgcttcaagagttttctttgttaatcgaatttttttaatctttggtaaaacatgttgatggtgcttttgattgtgagatagtgacaatgtttgaaacttataatatagttggtgcattagcaaaaacaagagacttttgcaaactatcggttgtttttagtgtaaaaacttgctttatcgaattgagattctctatttggtgtgcgtgtattttgttgttccaagtaatttaattttggataattcatgtatgtagtaaatataactggcatggaatacaaaccaaatagatcttgatacagagacttagttagttatgccatttgtgtaatttttacaatatgcagttaattactttgaataatttgatatgaattcttagttgttacttactctgttcaagaaatttcggctagtttataacctttttttcaggtttgagcaacacaggtggaaatttgaatgctttaattctaataatggcaaaatgattaggtattaatcattatacttttgctttctttaggtaacaatgcaactcgatgtggatcctttggatgatttgctttctgagaccaagacaaacaacagtaagtataacatcagttcactactaccgttatgatgagttgattatgctttaagggcgagtataacttctttaatttggcaggtcataagttccgacctaagatgaaggctcagcctcgaaaaggtggaactagaggagttgcctcagatcttccaaatttaatggacagaccagttttatgctctattgaggaggatcctttgcagtctgctgtccaggactctttgcaatctgttgagtctctaggtgtgacagggaaatcacatgacacaaatcctttacattcagaagatgtggttccagatggaaatagagattggcaatctaacctggggagatctttaggagaggtaaagtaaaaaaattgaatattgttgttttttccctccgcttttagaactttatgttgataattgctgtcacgttcagaatgcagacatattttctgtgttggaatgtcttgatgattttattactcaaactacaagcgatccaggtgagttgtgagaaaaaattagaatcctttgtggagtacctctttatttttggataagtaaagctttattatgtttagtgttttactagcagggagtgaggcaagcaagtcacagtctaaggttcatacggacaagcagcaaagtgacaaatttttgacgtcatatggtgttaatagtaatatggagggtcctatttccacttctcacatggaaacaggctcggaggaaaatttgagtgttccagcccattcatcttacgactcttcatcatttacaatatgtgatgttgcaccatctcaaattagttctgattatcattcaacacaggatccgctgtccctcagtaatactgctgtttctgacgaacaagaggaagctcagattaatgacggaaggtcaaaaacaatggtaaagattagtatgattaagaagatattggtattattctgaagttatgaaatattatgttttgatggacttatgtatgttagtaaatgaatttcagggtgctgaggacttgtttgatttcgaaatgtatgagggaactgttgtatccggtatgtaataaagtagctgcagctgcctgctatatttttactgtggtgaattctactttggtttttgttagtctcatttatttcttctattaaaatgtggatgttcaggtcaacgcgttggcaaatttcaacccaagcccaagttggggaaagggaaaaagaaacctagcacaagcgaacctcaagctgaagttagatctggtgtgcctttaccggctgttcatactgttcctcttgaccaaggatatgggcaagagagctctatgttggaatttccaagtgaaggtattcttgattattcatctgttagatttgatgattctatttctttggatccaatctccgatattcaaggggacacagaaccaaccaatcttgcaaaagctacccactcagaagtggtagaagatgaccctgtagtggaagaagtggtaaaccttttgaaccaaattttgatttacaattactttttggcttgtaatatgctttgtttagtcttcagcttacatttaattgttcaggatgggaagagtaaaataggagaaagttctacagagccaaatgatcttagaagaagcaaaagatcttctgcttctatgcaggatattgaaggtaggaaatcgtcaaagcagcagcagcaggaagatttaggacaactttctgatgatccagtgggtgaagttcatgatattagtggctctgtttgtgatcctccctctacttctaatagagatgaaggggataatgatgaggaatttagagtggaaaatacatctaaaaagaaaaaggctacaagaaaggtaaaagaacctgtatctggaaaagagaaacctgttagaaagcgcaagagctcgaagcaagtatcagaggagaaaactgaagaacctcccaaaaagttctctcattcaactcgtcgtaaaaaaaggattggtaattacataattttatttttgatattattttttgatacctttaatatatgaggcatgatgttgttctactttctcttttctagtggaccaggcattacttgacatgccagaagatgaaattgatcctcagaggttacctatcaaggatcttattcttcttgccgagcatagagagcgaatggcggtatacatgcttttctaatttatctttatgggaggacatgataatctttgttttttcactttagtgtacttctatttctgtatgcatagaagttgtaagtttgatttatatgtaccttttcccccctggtttggaatctacgtgtgaagattaaagatgcagcaaagctgaagacagaacagacaaatcaaaggtgcttgacatttcttagctgagtctgtttctttttgctgcctgcttcaaacaatttgatacaatatagaatattggaatgctattttt

SEQ ID NO: 53787 - DNA, 590 bp, Cannabis sativa
attcaataatcgaattgtcaccctaagtatctcaaaagatcaacaattgcattataattaagattatttgtgctgagtcaaactatcaaaatgatccaatcagtttagaaattgttgtcgatcaaactcatatgtagtagcttttagtaatgatagttggtaaaagattttaattagtgtgtggtataattatttttcttttcctatttatacttaattttaaattttgacacggggtcccaccatgtcaagggtttttcctttgtttcaaactcatggagtgtgtgtatcaccaaaagaaaactatctttttgttaacaacactcatatattaatttatctgatgattaattataatttttatttaattatttttcttacttatttacttgatgaatatttataaatttcaattaattaacttttaatgtcaaatttatctattaatttttaattcattttattttccactcaacaataatttcaactagaaaagtacagtatattcaagttatttaatcctacaataatcagtacaaccaacaatataatcatagtgtaagtggtaaagttatcttacatcaagtaca

SEQ ID NO: 53788 - DNA, 734 bp, Cannabis sativa
tcccgccccgagataatcgggtctctattcgggtctttgccccgccccgccccgcctcggttatgtttgtttcgggtcagggctgccccgattcggtaatatcattaacttaaaaaaaaaatccaattgcaattcttttatccgtaaatctctatattgaaaaatcaaagaagtcgtttcacttgacatggcattagattcttcctttcattttcattttaatgttcaaatatatatatatgttagtactactcttgatttcatacagtatgtatatatatccctggcagtatagcagttatatatatatatgcacacgtacaaagacaattgatatatatactttgagacttcatgaatcttgaaataattgatgcatattattacatctatatatatactcgcagtatgatttgtattcaaagtatgatcgatagttactgcactcaatttgaggtatagtatacagagacccaaatatttcccaaatatttgagtgtttttgaaaaaaaaaaaattaggtcagacccgattaagcttgtgaggtgatcggggcggggtaatgccttgtcgggtcgggggcaaacccgctccgtttgctattcctagttaggtttagaataaaataatggcttaattaaacccttgttggttgaacctattgtgggccctacaggtttcaattttgcaattttatttaaaaacttatcttttcttttacaaatgtcatattt

SEQ ID NO: 53789 - DNA, 904 bp, Cannabis sativa
  modified_base (69)..(74): a, c, t, g, unknown or other
gaaggctgcttctgtaacaaacttatcacggtcgcaatttgatccatgataagattcttcatctctttnnnnnntctcttgaagtcagccttcatcttagtctgggaagtgagaattgcaagttgttgcgcttctaccttgtccaatctcttagccaacaagaggtactcaaactcattggctgcagcagcggttggcggtacaaaggcaagggttgggggcacagttgtagatgtggaggggtctggtgcagttttgggtgaggatggtggaataatttttgcactttccacatactccgccacccgtcttgctcgggtctcgaatgcagtcgaatcttgctccccagcttgtgtttcttcgacttcatctaagcccatttccactgtggggatctcaccctcacaattggtcttccaataatcaacctcccaattccgaggatataaaatttgaagaacaaccatctgcaaaaagttaatatcacgtcaaatcgcaaatatgtcgcacaaaaatctcaaattaatcgcataataataaaacgaatcgcagacaaatcgcacaataatcgcactatatcgccaaaaatctattacataaacatagaaaagtatataagctactgtcatcgcaaatcgcacaaaatcgcacagtaatcgcatacagtcgccaaaaaatataaaacaatacaagtgaaaaataatgagacttccaacaaaatcgcacaacaatcgcacaagaatcgcataaagtcgcaaaacaaataaaacaatacaagtgaaaatttataaagagagtgcaagcaaaatcgcacaaaatcgctcaatgatcgcataaagtcgccaaaaaaacatattaaacactgaacatttataatgccctgtaaagtaaatcgcacaaatat

SEQ ID NO: 53790 - DNA, 1146 bp, Cannabis sativa
  modified_base (34)..(57): a, c, t, g, unknown or other
aactttgatacgtactaaatcatgccccctgaannnnnnnnnnnnnnnnnnnnnnnntactaaaattagacaaaaatctttaaatttaacaatcttaattgattatggggatttttaactgccaaaaaagttcaggggcataatttagtacatgtcgaaattcgggagaaaaaaattactaattagcctaattcaaattcaaatagaaattgaattataatattatatatattttaaataatcttttaaattttaattgaccaacttaaatttaaatttaagatagtgtatgataaaagataaattattattccccaaattttagaataaataataaaaatatcagtcaaataatctttttatttctaaagataataaaaagatcgctaatctcatttttatcacaaaaaagtgataaaattctaaatccatacaaaatggcacaaaatttgaaatgagctcgctacaatcaatcttgaaatattaaagaggtcattcacctcacaaaatttcaaagagatcattaacctcacaaaaatctcaaaaatggtaattttaattacctaaaaatttaaaagtgcactaaaattcaaagccataacaaattaaatggcatcccaaaaagaggtcattcacctcttaattatcaaagcataataaaatatgctcggaactacgtttgactttattcctataaaatgatacgtaggcaacttagttgctaagactaagtgcagtcgtcgttactgcaaaatggtataaaatataaatctcaaaattccataaaaggtacacctaggaattttttccaaagtttcaaatagcaaaggattcctgaaagtggtcatctaccggaatccttatattcaatttctgtaatactgtattctgaactacaagtggcttgatccttcacaaagaagctatgtaggcagctcggttaattaaattgactgagttcagctgcaattccaaacttaccccaaatttcccctaaattaattcaaatttttaatatcatcgtaattggaatcaaaatgtgttttctttaaacgaaaagtctgtaattaagagattattttaataatctttgatggttcgaacttaaattaataaactcttatgctataaattcagcataggtga

SEQ ID NO: 53791 - DNA, 1370 bp, Cannabis sativa
tttcatgctggctccgcccctgcatatataaaaaataaataataaatatacatattttatttataaatttgtatttaactttttaataaacacattatattaacatatcatcataaacttggtcaaaaaaaaaacatatgatcacaaacattatcataacaaatatattagattaataataaataaacattatcaataataactaaacatagtgtttatacataagggtcacatttaattacaatttcgttaattattttaaacacatttttcaataactaataagcataagtgttatattttaaattgtttatgaccttttaataaacaaaaaaaaagtgtttattcaaataaataaataaacttatagtgttttatttttaaaattgctatgactttttaataaacaaattataataataaacatattagattaataatagcattataaacattaataatactaataaaatatttactaaacatatatattgtttataaaatatgtacaaaatttgtaaatgtgtttgtatatttttttttaatttcgtaataaattttagtaaacatattattttagtaatacatcaaaatttaaatattaactttcacatttacatatttagctttatgtgttttttttagaacaattgaaagtgatcaacaagttaaaattgtaaatatatatgtttatttataaatattcataaaaatctatagaattatgtaattatatttgtttttacacatcttttgtaatattgtacatttacttatatgtaaatgaaaattccctttttataaaacctttttcgaattatttaattcgagcaatttttagaaactataaatcacctaatctcaaaattttctgagcacaaattttttttccctatgtcttatgcactaagtgtttgttcactactacaaatttggattttagatgcggtttttaaggtctttcaacgtcgattttagcaaaattcgctaccgacgctgatccaggcgatgttatagagttgaaaataaccgacgctaaagtgtaccttattatcaaataactgacctcatatatacactatggcgttagttatatacaaataaccgacggcatatgcacatataactgacgttaaaggtttaaaaactcgatgccaaatcattaataattaatttttttcagttaaaaacctatcataaataaggaaatttaatttatttaaattaatatttattaatttataataaatattatttgacagaaagaatgctttgtattgtcagatttattaggagaaaaggagattaccgattcatcctcattaaagagttgtccagaagcacgatgatagatatccaaagcccgtttg

SEQ ID NO: 53792 - DNA, 1158 bp, Cannabis sativa
aatgaacacatgatttatagaggttcggcccccttgtatgtgagtaatgacctactcccctttaattgtattacttgtgagattataccgggcaaatcactaaggaagacaaagtgatttctagcttcgacactcaaagtgtttacaaaaaaaatatttcagcaaagtgctctcagatatgcaagtacgagtatagctcttagtttttcggtcccctctccttgtgaatgcattcactatttataggagagaattgatatatatggctccgtaaaaggagtaaataaagaatagatatccctattttctaaggagcagttacaatctattgaatcttttttattctcggatagatttgctggatctgaatttaaaggattcaattgtagatatttgaggaagattgtttaagacaaaatcaaggatcgcgtatctctgtccagtattcctagcagtggaagatttgacaagtatgttggtcattcggtaaaatctctctatacttgcctcatttgtgaggttagcttgtagagtcattcttgcaggatgtttctcccatcttaattggtcggcatccgaccagatgcttcatgggacatcaacatcctatggttgttacttcttatatagacctaccaagcatatttatgcatgaagattctctactaggccaaagagatggttgtaacatgacacatggaaggactacgtcaattgtgcaagttttaggataatattttccctccaagttttcatacgaacatttgtataaatggagacttttgatacatatatggatattggcagacatgtgggcttcacgtgcttagtaccttgacagttgtaccgtgcagaaataaactatcacacttctatctcttcaactgactattaattgccagctctcataatggtactttaaaagcatattgggaaaatgtgataacggctgctcttcccattattacccattttttctctttccacttccccataataaatttattgagaatcaatttcccatttaattgattttcgagggaaataaaattgaagcttatgtaaaggtcattcctcattgtttcaagctttcactttcatttttatttcttttaaaaaaatcccttggtagagaaaaccaaaaagcttgaagaaagc

SEQ ID NO: 53793 - DNA, 1419 bp, Cannabis sativa
  modified_base (825)..(827): a, c, t, g, unknown or other
aacgcttgcgcttagtcttcttagcccttttggcttctttgatgcattcgttccacaactccgcaactctaataatgtctttgtgtggcttacgcccactagcacttttacaagctaacacatctaactcaactatctcgacgcttcccatattgaccaaataatagttacttgcaaattcctccaagtacaatcatcctttgatgattgcggcatctaccctcttggtctctatgtgtgtccctcttgacaaacacatgtagcaactgaagcattccatgtctatcccaatttgaaccatctcagtcatcaactcttgaccactatcgtgactaacaagaatatgatgaccctgcaatacttccacacccctgccaacaagcttccttttcaataaaagcaccttttgcggcttatgatgtcactcaggcaaactcagcctagtgtaccaagcatacagtatagactacccaatcaaccttgtactatgccaatgagtttcaaacattttgttgcacctttctacaattgcacatggtagttatttttctagcatccctaaacttaactcgaagcaaccatcatcgtctcctcgctaggatgttcagtattcccaccaagaaaagcaacccagtctcaattacatctcaatctgatccactttagaagactaattggcttaacgatatcttgttccagcattcagaccatctcgatccttccacacgcctacatcccctctaggataggctaaccgggttcacctcccactcaaataaacttggctctaataccaactgtcacgggctcaccttttccggcagnnnaacacccgtgcagcaccttgacttctctaagccaaggttagccttctaaccatctgagtaacaatgatctcatttttcacgcgaccttctgcctcatgcacacttccatctctcgaaaaatcccgccgagtcatgctcataagcatccatggatcaaggctctctagccaagatactcgcactgtccataggttctcactatgataaggcaaatcccaacactgtcactcacctagtcactcgtgaccaaggtagcatgtgtggcaagatgtcaacactaagctgacgtgtcgacgcttctaatcatgccccatttgatattgtttgaaccgtctcccttatcgcccaaggactcccatacgtccatggaccaatcctcaaggcaccatgcctccacgcatgttggcaggccctcaagacaagccaccaaactagtagcatacgttaaacctctgtctctaccagcatgctgaatttatcccatgcgcgtatgcaaaccagcccacgaatgactacccgtgtcatctcgtgtgagactcacggccaaggcacaccacaacgtatcttggaggtttagcccacgtccagtgca

SEQ ID NO: 53794 - DNA, 739 bp, Cannabis sativa
  modified_base (337)..(346): a, c, t, g, unknown or other
tacatgttgtttatgcctgttaggatacattgatagcagtaatagtatacgtagagttgtactgattactaataaaggtatgtaggctgaaatattgatcgatgctgtcacatcaatatggctagattatgaataccgtattgagtataggctgacattatggtcgatagtattgggggacacggggatagggttatgatcgggtgtatgggcgcaaggttataactcgggatattattatgttatgcttttctcactgagtctgttgactcatagtgcgatttcaatgtgtaggtaagggcaaggctaaagctaaggaaccgtgagagcgagccgnnnnnnnnnntacatgtcggggcggttaggtctggagcgtacgatctttgggacatcagtgcttttggtgtatagtcgcttggcgagagaacttttgtatatgaatagcgaacttttgtaaatgtgttttgtaacaggatccagtattttataaatgtattactttatatttctaattaaataagaaaattttaatttatctcatttttcgtgaatctctttgattagcaacgagctgcatagtatgttaaaaattacgctaacatgcctaaatttgttagggtgttacattttaatattagagccgtcaggttgtctactgttgaccgaggttttcgacaactaataaaatattataagtttatagagctgtaagaaatttagagaaggatttttacgtggt

SEQ ID NO: 53795 - DNA, 676 bp, Cannabis sativa
acacgagatggaggcaaaagctctgtgtcatggccttcaatgggctcgaaatttgcagcttcaaatcagttttgtggaaactgattctgtgatggttgtgaattctattactggtttagcatctaagaatttagcctttaaagatttaattttttatgttaaaagtcaattatcctttttccctaatgtttgcgtatctcatgttcgtcgagatgcaaatcaagccgctcatggcttggctaagtaagctttagcgttggataatgattgtatgtggtctgagggtttttctcctgccattcactctgttattgtaaatgactctttgaatgtataataccagactttttctcaaaaaaaaaaaaacaaaattatatataccaataataaaatatgaatacatacaaaaaaatttatatataataaaatagaaactaaatagcatcttaagtaactgacatactatagacaacaaaaatcatataccatataagaaaacgtatatacctacaataaaaaataatataatattattaaaaaaattatatatatcatattaacaaaatttatatatcagatttatgtacaataaaataaaaactaaacacgcattatctaaaataaaatgatatactataataaaacttatataccatataacagaaaatatatacct

SEQ ID NO: 53796 - DNA, 706 bp, Cannabis sativa
gatcaatttcgtgaaattgttttttttttttcctttcttgtaccgacaaaattttgattttaaattgtttaattagtttaattattaatggttaagtatatatggtttaagttttacatgatgattaaacatattaatttatttgccttaaaaaaatttaatttgtttattactattatatgatggatataaatatattaatatattcaaaaaatctgttttaaaaaatatatatagttaattagtttaaaatggtaaagatgtatatagaaaatctgaaaaaaaaagataatatatatataaaattttaaattaaataaagaaatatattattattaaatacatacaattaacttactttaaataaactccaacaaaattaacaaaaatataaataaaaatcgaaaaatagttaagattttgtacataaaagccaaatattaatatatatgtggtagtattataataatattacatattattatcatagaaaacataattacccaaaaatgaattcatcaaactataagtttggcaaatttccccttttctttaagataagatttgataatcatattaattaatacatacgtacatgtacagtatgtaaaaatatatgacacgtcaatgctgatatgttagaacgaatgttaattacagaggttattactttttatcaatatttttttgacacaaatcaatatct

SEQ ID NO: 53797 - DNA, 1812 bp, Cannabis sativa
taataatataaatatatttttttgggtaaaaagaattaataataaaaagatatttttttaaatgtgcgcatttaattttgaattgtaatattaaaaagaaaattatgttatattgacacatttaatgtaagataaaagataagagaaatatgtgtagtgagtttaaatttgaattgtaatgtttaaaaaaaatataacacttttattatgcacatttaatataaaataaaaataaatattattagtaaactcgttataaatgtatataatatataccatataaataattagaagctaatgaacatcgatcacaggtaacataattggacaagttgatacaatgagcaatatttgcaaagatgcaatgacagaatcacacccaatgaacggtggaaatggaacatatagctacaccaagaactcctatatccaggtctctttattaaattttcatatttatataaatctagcaagattatcaaaatcggtcagcggggcaagtttgttctataaaaaatcgaacgggtcaaattttgccccgggttagggcaagtttgaatgacctgctgtataatttatattattgtgtcttctagtggttgatgaaattgaatacaagtattcttaaagtaaacggtaatgttgtaatatatatttttttttttgtcaaacaatctaagagttaggtaactgattaattcattcgtttttctaattctaatcttctatgagggagatgtactgaatggaatgcataatattatttaagctgattacaattaataaaattgaataatttattttttaaaaaacctaacaataaatgataaattaaaaaatagaataaaaaataagaaaatatctaacccaataattattagaattcaaatttaaaactaattaaaagttgtaaaaaaaataataaacttaattaataatgagaaaatagataaaaataaaaaaaaatatatatatatatggtgaaattgaaatttaaatttgaatctacaaaatcacagtaaaagttttaaacttaattaactaattattaatttattataaattatttagatataataaaacgtaagaaaaataaataaatttttatatataaaatatggctatctaatgatttttgttggtttaacagatatttcaagaatgtaaaaatattttgtaaaatttaatagtgttagtaggattagttttataaatatatataaatattaatattatttattgtaagttaattgaacttatactaattttagattgatttaaatatatataaatattaatatattatttgtaacattattattttgttattgttatttttaatattgagaatatagtcaattttaatattcttaaactttatatttatttttctcaaaattttaaaactttaaatattgttttttcaaaaaaaaaattaaaaaattaataagtggtttctcttaattaataaaattagaaatatacataacaaaaattataactaaatataaatgcaatgcatgtaaaaatagcctgatagaataatagtttgttgaagttttcattaagtttcaaataataattgaattaagaatgaaatgctagctttttttttaaaaaaaaaaaaagaaggaaacactagctctaaaatttatcataattgtcaactggatatagaactgctaataaattgtcacaatgtaccttagcagtctttcaattccttacacatcctgcagcctagtgaccaaattttgcatccatattacattgttggttgcccataacaagctatgaattatgttgccatga

SEQ ID NO: 53798 - DNA, 1149 bp, Cannabis sativa
gtcgatgctccttcaagtgtttaattcgtatttgcaaaaacttgaacttagagcaaaacgatgtgatcctcaatgctggatttggatcatttattagagaggatggcccatacattgacacccaactagtgagttggttaatcaaacatgttgacccaaccactagcatactagatttgtatggtagaaagattcacttgtctgccaccatgtttggagatgttatgggtgtggaggatggaggtgatcctgtaatcaccgagggtgatagcgacattttgtatatggagaagattttgaacattgtggactacaccgtgttcttaacaacattagagaaatcattgttagaatgtgttgaagcagatagcctatttttgattaagttttgtttggttgtgatagggaaagtcctagtgcctaaaaccggctgcgatgtgatttcagggtatctacattccctattaattacaagggacattcgccataagaactaggcaactaccgggttcgggtatttgatgaactccattttttagatttcgaaataagtatactaagaatgtgtctggctgcaccaccttcttgcaggtactttgattttttctttctcttgaatttatgtcaatgtgtttattaacttgatattttatgtttttgatttattatttgaatctcttactgaatacattgtgtgtttgtcatagttgctttacttgactcacgttgagtggaactttggttatgttgaccgaactatgctccccattgatttttggtgtaataaacaatgaaagtctgtttacaaatggatcaaaaacaacgggggtcccaacaatcaacatttggttatattgtgttcatttgattttttatatatatattatttcgacattcaatatttacttttttttaaacttgttatgtttaacagataaagctgacttcaactcctgtaatactgcccaactactattctaactcggaagggacaaagagtactgaacactttttcagcgcaaccactgagttgaaggtgcacttttcgaaggggttaaaatctcactttagaacattttctttgaaacttttggagaaaggagaaggtgaaggtcgtagtgagaaagatttggaggaggatattgtaga

SEQ ID NO: 53799 - DNA, 1734 bp, Cannabis sativa
  modified_base (636)..(639): a, c, t, g, unknown or other
atatatatatatacataaatgatggaattggaacttaatgtaaaagacaatatgttgaatttcttagaagacgtacgtggagagcattaatttcaagactcaaaatataaccaaaaaataacaataacaatattattattattaatattatatattaacaatgtcacatgcaaaccacacaattttgttttgagaatttaatcttcaagtttgaacaatgaggtcgagaatgagtgcatgtgtgttctttgtgtgtagatatgatcatatataatatggacgtgtgtgtgtgtcatgttataacttagaatttatattgttgtgtatatgtgtctatgataaacccttttaatatacattcttatccaaatagatgaatctaaagaataatgatgatgtggattcgggaaagaaaagagcaaaagctcttcatttttgaatttatatgttactttatagagaattactaaaatatattatgtccttaatataatttttagtgtcatagtactattgatgtaattaagtagggagttttaaataatttaagaaaataatttttaaaaaatatcactaattaattataaagtgtcacttatagaaggtgctcgacactataataataataataataannnnaataataataataataatgctcttctttatattaagacaattgttgtctaattagttatatgtttttcatccttccttttcattttcaatataataagttaaaatttggtaaagaaaatacagctagggatctaggattcttatattcatcatattatatatttattataaaaggaattgattaaaatgctactattataaaattacatatatatttcccatgagggggtcctagtgttttatccatatacaaccaattaataaaaagattaattgtttttatttttattattagtcaatttttggatgccttgtctttttgatgtggttttattatgagtgtccaagtggatttgatggtggggtatattaagaagggtaagactaatttagaggtatccctttgtgacaaaggtgtttccttttgttggtgacgccataactagttagacccaccaattaagaatagacgaactttcttctaatcactacttttctctctctctactcaaacaacaaaactattttattttttttgtaaagaaatattatatatacatatgtatatttattgtcactcccatatggaagaactaagatggtatttggttggaagtaatcatatggaatagaatggaatggaaaagaaacaatttttatttaattcttttgtttggttgcattttaaagtattggaataacatttcaatagaatgctctttctaccattttggtggaatgactattctattttaaaagaaatgaatgaccattccaatgtaacaaaaaaaaaaattaatgattttttatcaattttttttatgtattttaaattttattctattccatttctattcccattcctcccaaccaaatgcatcctaatagttattaattagcaatgtcttttttttttttgtgtatagtgtgtatagctaataataattcaatatatatatatacaaaaaaaaaaaaaaacaattaatttcattagtaaatatacacctatatatacatatgtattatgctttaattaagtattattacgaatctacatgcatatttaatttcaagacagcttttaggtgtgtgata

SEQ ID NO: 53800 - DNA, 1328 bp, Cannabis sativa
ttccaaggattgggattgctttctccttgcagcaatgttccaatctggttcagaaatttatcgtccagaagatttagaacttgaatttcctacaaaatcaactgtcccttataaacccaatccttcaaaacccacatccaaattagagttaaacgatgttagggttagggaacacttagtgagagcctattaggaagataatgctagttgccacaggcgcttcttgcaataaatcattgaaggcaaacgccgtttcttgcgagatgcagcttggccagaacctcccagtgtgtcctttattactttggctaagcctttgtttttacccaaagtcacgattgcttttgaaccaggtgacttggactttgaaataatgtctcccaagccacgtacatcaaagactccccaggatcccagagtcacttttgaagttgagttaatttaattgaaggtgcgatctatctcaggctacacaggtgatatattgaagacctgtggaatcaaacttgggcgatcatgcctagttaggtcagtgcgagagggtgagtttagtttttacccccttgtgcgtttttcaagcagtaccctaggggccagatgtgagaccagtttcagcggctcgactggcatgggcgcctggagccttgagcatatcaatgcaggggccatactccctctccaagactacttcaaggattacataaactatcttgggattgttccattccagctgactcctatctcttacagaattctcgctagtttgaaggtcttgtataaaattctaaagtgggagtgccctacaccagtagaaattgagtatctctattcggttaaggttgttcctgcgaggaagaatgccgcagtggacttctattatttgtgctcattctagcaagcctaaaattattgtggacctgctaaaaaaagtgtctttcaaagatgacttcttttggacaactggcctttccgcaatcggcacaaccatctttcacaaaatttgtaagtgattgttttcatcatgcccagttgaattaatcctttttgttttttttagttttctgaccaatgtgttgtttgtttttttacagccctctcgaaaagacccgtccccactcttgagatggtcagtcggcacaggcacctgttgactcttcctcatggccttaggtcatgcgacttcctcttgaacgaggccaatctgagatcggtggccttcttactgacaaaaagcatacttgtgattgtaagttttccaagtattcttcttagcatcaggttcccattccaaaggaggataaggcctgggatcgcgtggctcgagcaca

SEQ ID NO: 53801 - DNA, 1341 bp, Cannabis sativa
ttgattattattttctattacgttagtctagttatctcgatgtggaaataataactagaagaaattatttcttaaaataattagaaagtagtaaatttccaagaatagtactaacttgtgatggtccaacataaaagattatgaaaactaataataaaaacgatatattgaaaatttaatagtaatggaacatattatatatggtggtattagttgactatatagttaaatagcagtaataatagtagcagtgtcgtatgataagaaataggttttgtttgaaatagcattaggcatgtgataaatagattttatagctaagtcaaaggtaattttggtgggttttatgtgataaaatggatatgtaacacctatcatatagtagtagaattagtagcaatgaaatagtaaaatggtagtagcaatagtatatttagatgtgtgattatagctatagatgtataaaatgacaatggtggtattagcttgaacgagtggacttagaggatgtggaaggcaattcaaaatttgaattatttgttgatataagggacacatggctgccattgaggaatagtagctcacattgatcaacaattgaagactagggataagtctttttcggttacacttaagaaaaaaaaaatgttatctttgttagcctagttgaccgaatcatgtggtgaattataaattttagttgttcatttgaatagttcataagttaacaataaccacggcatatggttagtaggaggggtttagttagtgttagactatataaatacaagtgtcatgactctcacatttattcactcactcaaaaaccagaattagattttattctctctctcactcaagcattcttctacgtaccaaagtcagcctctctaatttctttatttccaaattctctttgtttcattaagacccaacactattattcaccatcaaggtcttacatgtatatatttatatatatatatatatttatataaatattctctctcccttaacgccatcctactgtcatctcctccaagcttacttgttatttcaagggccaagagtattatctcttatacatttatagatatctttcatcttatcaatgtcaccaccaccattttcacatttaaattttagtggtctgccagattttcttttgaagctaaggtatcattttacaattttgagtgtgtagattcaaggttaaaatttcatatattacatatttatcattatgacaaatcctaattaataagtatgcaatttaggtttctcataagtaattattgtttctcaaggataactctcattccaatcaaggctaggactcca

SEQ ID NO: 53802 - DNA, 1365 bp, Cannabis sativa
atatatatatatagtaattgtatatttatcaagaataaaacacgtgcacgcgtcatgacccatgcatattatttaattcagttaattattatgcatcattatatccaattaagaaagtttggcttataaatagaagagattatgagtccccaaacatatatctctaattatcttctctgctatatattataatctcgtatagctgcaattccaaactatacataaatatatattaattctagttacttattcgactcatacacttgaggaagaaaatattatcgattcttcaaaagggttagttaatatatacactggtataaattagctgtttttcttcatttatattgttatatatttattagtactgcaactataacacaaaggggtctatgtaattaatatatatatatatatatatatatcatatatacactcagctgaatctgaatctatgtgtaataataacaaacgcttaattgcctgaattggcagaaaggatttatacaaacagattgaaaacaatggccgaagaacagtattcccaattggccaactatgaatgcgccgtcaagaagaatctagtgatcataaggtaggtacctaattaattactatagctagattagatattaagtatatatatatttatacagtaattgatttacattatagtaactaattattaaaaaattgattgaatagtgagaaggtggaaagcgagagcgagagtgaagaggatgaaagctttgacaaagtacgacctgagcacgatctcattgttgatcctcttaagagaattgctcatggatttaagcactttctttccaacaaatataagtaagagttaataaattatatataacttttttttatgtttatataatatcactaacatttataatataaatatatgcatttatttttcgaaaaaaagacaacatgcctaatgaattatcttatttcggtgggatgattttgcagcaagtatccacgtttgtttgatgaacttgccgtaactcaacatccaaaggtacgaatgcaaaccttaattaataattaacacaaatgttacacgtacatatttatttttgttgatctatctctgtatatttacttaatctgaattgattgcataacagtttttggtgtttgcatgctctgattctcgagtgagtccttcgcatatcttaaattttcaacctggagaagctttcatggctcgcaatattggcaatttgattcccacttttgacaaagtaattaattaatagttaatcaaaatatacattataaaatctaaattatttcactaattaattaaataagaatgttattaacttattatataattaattatttttg

SEQ ID NO: 53803 - DNA, 946 bp, Cannabis sativa
ttcacatatactcggctcgtttaatagttccatcggttccaagttcaattcatcatgttcgttctgtgaggccagttttgctaaggcgtgggcattagagttttgttctcttgaaattcgttagattttaagataatcaaacttttccaagttctttcgaacttttctagatatttttatatttttaagcccttagtttgatattcgcctagaacttgattcataattaattgcgaatcactatggcatataagattttgtacctttagcacttcagctatctttaaactaccgatcaaggcttcatactcggcctcgttgtttgaagtgtcgaattgaaatcttaaggcatagtaaaacttaaagccttctagcgaaattagtatgacccctacacctgagccatgttcattggatgctccatccacgtacaacttccaagtattcgtgatggatgttcttgggtgataagttatgtcaaatttccccagttcaattgaccattttatcaatcttccagaagtatctggttttgacaaaacttgtctcaggggttgatcaattaacacctttattggatgtgtctggaagtaaggccttaatttgcgagatgcatgaatatagggaaagtttttcaagaggtggatacctcgattctgctcccagtatccttttaccaacatagtaaattggttgctaatgttttccctcttctcgcactattgctgcactaattgcattttttgagacagcgaaatagaggagtaaagtttctccagttattggttttgccagaactagaggtgttgacaagtgcctctttatgcttttaaaggcctcctcgcactcatccgtctactcgaactttttgttgcctcgtaatacattgaagaatggtaggcacttatcagttgatttcgatatgaatctgttaagagctgccatt

SEQ ID NO: 53804 - DNA, 1156 bp, Cannabis sativa
aaaaaaattaagaataatttataaatattatttaagtttatattttttttcaataatagagtgtatttatcattttatgaggtgcaaataaaactctccttaataaaatttctaccatgcatatttaaaaacatttttatcctcttgtaaaatgattaaaattgacaaaattatgttattttataaattatttttaataaatataccccaactcgctaaaatacaactgttcttcaaaccttaacaaagataaatttcttattaaaataaataaagataatggtaaatttcatcaataaaataaaatattacatgttgagattttatagatgatataaaaaatgaatttgtatataagtatattattgttttgatattggattttgtcggggactgtaatctttatttttttatttttttttttaaatgagaagaactataatttgacgttgccttttttattaaaaaaaaaaatagttgtaggccttttttccatgtaatgaatccatgtccactcaaaaaataaataaataaataaataattactgtgtttattggtgagagtcacttaaaaaaaaatgttggtaatgatgtttaatgatggaagagatgcatggagatagagaggaaagtggggtgtactaaaagaagatcattgtaaatataaagtgcccactcaaaaaaaaaaaaaaaagataaaagtgcttttatcaaaaataatattctaaaatggacagtcatgaatatatataaatgagaaattatgataatgggaaatattttgttaaaaaaattcttacataattggaaattacaaaagtagataaaatgcacgcgttcatatatccatgtttttcaaatgggattattattatttttattactagtaaataaagaaataataataaactattaacatttaattattttgttgaaaaaaataagtccaacctaattacaaagtatttttttttataaatatataaatttattaatacataaataacagtaataatatgagtttccctttatattattataaattattatttatacgaaaattacattattaatcttgatttataaatatatttaattataattttaaaaaaatgtatctgagaagctgagaagctgagaagctggtgccatggct

SEQ ID NO: 53805 - DNA, 1513 bp, Cannabis sativa
  modified_base (868)..(883): a, c, t, g, unknown or other
acttaatcttgcataacttgttataaattttgcctatgcgaataatttctacagcttggtgtgatgaaaattttctaagtataaatatgcaaaaaatttcaaaaatttcaaaaactagggaattcattagatattcaatagtacaatatatggttacaccccctatacttaggaaatttaagattatctaataacctgttgtatcttactgttacaatattactatgtttaatgttaataatgtgcatgtattcattttttttaaagaaagttgtaacttcattagatcacatacaagttctcttacaacattacatttctaaaatgttacattgcagattctctctttatcaaccctactacattcttagatacatcatgtatcatattatttacattcttatttacataataaagagaagcattagggaaaaataataaagtaaacttaatacattcaataatatcagaaagaggtgaataattcttacaatctatattaattctatttgccacaccttttgtgtctgtttcaacataagcaattggcacatttacaccagtccaaagaatgcttcaacgtcaatgctccagcaatgtaggaattatagacatcaggaatatgaatagcatagttagcaataatgtttccttgataatattaaccacaactcctactctaatttttttatttcctttcaacaatagagatctgtcaatgttataagttaggtaaacgtgcatgtggggattacttagttattttttggtttttaataacctattaggtggtgtttggttgggaggaataaaaatataggaataggaatgagaatgggaattagaataggaatggaatagaataaannnnnnnnnnnnnnnnaaaattgataaaaaaattattaaattttttcaaatcttacattggaatggtctttccttcaaattcaaaatgaaataatcattctaccaaaatggtagaaaggccattccattagaatgatattcaaatactttgaaatgtaaacaaacaaaggaatagaatgaaaattgtttcctttccattccattttattacctccaaccaaacgccatcttaatttctagaggtactttaaatatctcaataatggatggttatagtttgagttgtggttgttaggatactaaagcccttgtaatgggtattatatggagttgaattgtgtctgaacatatgatcaggttacaatatttgttgtaatgtgtaaatggaactatcttttatgggcttggtagttgcatacatcttggccctttcgctgttacgaaaaagtaatttgacaacactggtcggccaacccttctacgaagatgccaaggctggtcagccccttaaagacacatcattggccgaccaacttcatgcaacagtcactatggtcggccaacctgtaataattccagaaaaatgagcaaaattaagtttgcaactcaccgtgaataaatcatgaaggccagaagaatagagcct

SEQ ID NO: 53806 - DNA, 1029 bp, Cannabis sativa
tcccagtctcttgcacacctggcgtgatcccaaccatagaggaagtcacaccatggcccacagtaagtggttgtgtaattgcatgttcagggtttgtccctagtggtactctcgtgttcccatgggtctgcacgttaagatctgttaacatcgggtcgccctgatcatccaagccgctacgagtttgcaccaccatcctgtacgcctgttaaaacttaagaaaagcagaaagcttgggtttttgctctcaataaaagcatcaaaatattgacctcgctttcagccaatgacagtgagtcaattaataagtgattaagaatatgattaaaatagagcaaaaatgataaagtaataaaaacaccatatttcaaagaggtgcggccccgagtgtggtgatagcctactccccttggaatgtattaactcaagagaaagaacgtagtgtttttctctctaaaagctcttacaatgaatctctgagtaattctcttagatctctctttctgaagcaattctttcgatcccctttcacagtgaaggtaagtcactatttatagggccttcatgcatgagggaagatttcccttttgcttacaatgtaaaaataaaaaattacatttattacataattatgatacacgaaataggaaattagaacaggttactatattcctctgattcgatctcacgtacgattgtagggattgccttcatgtctagacttcaaaatataattatgaagtaattaactcctaataagtagttcaaaaaaccaaatttattcctgcacggatgatctatctttcatcctgcttgggtaatcaaaagttatgcatgcagatgtataatatagagtctgttcggggcgtttagctctgtccaggtaccaacaatgcaggacacgtgtcacttaatccttctgtcacgtcattgtgcaaaaagttgaataactattactattttggcaaaaagtcaaatcaaatatagtgttatttcactatttgaaagtgatagtgagtcaagtatctc

SEQ ID NO: 53807 - DNA, 1145 bp, Cannabis sativa
  modified_base (40)..(55): a, c, t, g, unknown or other
cctttcttcacaaaatatattcagccattagtgattgagnnnnnnnnnnnnnnnnacaagttggtcctcaatcatagttgataattataattttatttgaatattgaagttgaaatatagaatttacatatgagtatactatttttattgtattttttgaaaaatgttttttttaatactttaatgtttattcaatttatattttttttaacattaatttaaactataactattttaatcttgaaaggcatatactatacatttattttttttaaagcaattatatgaacaccaaaaactaacaacaatgaaaaaaattaaaaataaagatcagtttaaacgagttaacccgaccaaaccgataaaaatcattggccgggttacacttttttattttttcattggacaagttacaattagatatttgtaactcgacatttatattgggttggtaaaaaatatactatatactgaccaaactgatcgatgtacacccgtagttattaatatttggtctaacgtttgtcattgagcaacacaatgacaagtgtgtagtcttatcaatggtactacatccttattaataatcaaataagcaaaaaacaaataataataaataaaataaagacaacaaaaaagacaaaagagttaggtatgtaataatcatcaatctccatatatatatatatatatatctcaccactcaataaattaagattaccatttaccaaacttatctcacctcctaactctaactcaatccttattttttcaataccctctactggttcactataacttgcatatttattgcgaatggaaaatcatgaagcaataccctctacaggttcacttaataaatcttctcatgaaaatagcgattctggattcatacacaatttgtcactacctccatctcctttacgctatcttaatcatattgagaagaggctatgggatgccgagcaaaaaatattgctagccgatgaaccaaaaaaccttttggtatcacaagtttcttattacaaaacaaagatctccgatctaaagcatgaagtaaaaatctgtcgacagatatcttctagggatgcgattgacgttgatagactaaaaagggccttggcacatatgaagcacgaagcatg

SEQ ID NO: 53808 - DNA, 2036 bp, Cannabis sativa
ttatgagttttaaattttttaaacccattaatacttatacggtggtattctaactaccctaaaagggtgtaatactcactccttaaaaaaaggtggaacccaaatattccatcagctccattaatgtaagaataggattttcattaaataaaaagtcaaataaaaaactaaaatgaacttaaaaacaaattatatagctccttagtctactgccattattatttattatcttcttcttctctttattccttcacacaataaataattatcacagcttctcttttgaaattcgtcatcgacgttgtaactttggccactggttgtagcttgggttctactcattacttggaataagttagtgagctctaaaatcatatctaatctcctaattattttgagtttgctcacttcaaaacaagcctgagagtaatgtattttatatatatatatatgaatgatcgtgagtatatataaaaattaagacttattttttttttctttcacttctaacgatttgggtgtgtatatatatattaccatagttaatacattaaagctgctcatatatacgtatatatataaagtttttttttggtgaaaggtgatcgtgtatatgtatatatatatatatattctaatcaaaaaataaaagaaatatatatgtatatattgtttttgaaatgaatgagggttcgtctgagtagggaatctggtagtgttttatatatgtatatattgttacatatataattgaataattttaattttttcttttaaaatctttcctgttttaaaaattgatgtttaaatttgtgagaattaaagtggtaaacaactagcatgccactacttaagaaaattcttcttaatttttaaccttaatattaattctatgtcatatacaattaatatatacaatatagaattgaatctaaataataattatttatgtatggcatcagtaagatcactctgttagtaagatcactcttacaattaaaattaatatagatactttgtccaaaaaataattactaatatagatgtgatttgtttacaggtatgactcaactttctctagtcataaaaaaaaaaaattattgcgaatttaggacaattgatagagattttaaatgacataaagttattgttcatattttacatttttatgatcatttatagggaccgagtaaaatgaaaaaaatatatgagtggaacttctttatgtaggcatcaaattcgtcaattaaattattatagaatgatttatgaaagtgacttagcatgcatagagagtattcgtatggatagaagaacatttttcattttatgtcatcacctcaaaatcactggaggattgaaggggagtataaatgtggatgttgaagaaatggtagcaattttcttacatataatagctcatgatgttaaaaatagaattgtgagacgccaatttgcacgatctggtgaaactgttagtagacacttcaatatggtgttaaatgctttgttacatcttcatgacttattactaaaaaacctgtggcaattcgagatgattgtatcgatgaaaggtggaaatggtttaagaattgcttaggagcactagatgggacatatattaaagtgaatgtcttagcttcaaataggtctagatatcgaaccagaaagaacgaaattgctactaatgtattaggagtggtttcacaagatatgcaatttatttatgttttgcctggatgggagggttcagctgccgactctagagttttacgagacgctatacataggaacggatttaaagttccacaaggtgaaattattttctcgttttttaatagtatataagattcctgtactcaaaaccaaacactataatctaattaacagtaatctaattaaatatttccatgtataaaccaaacacagtattaagtttacatataatcatattctgcttcataatattccccttaatcatattattttgaaccccctataccaaacgccccctaaaagaaatgtaaagacttagg

SEQ ID NO: 53809 - DNA, 1006 bp, Cannabis sativa
agattgtgtcgcaataagagatgttccagtactccaactcaaaaaaaatagatctcttcttccaacaagcatcttcaatcttgttcttagcttttgaaactcttttgacttttacaactttcttctttttgcctttgcctttgcctttgcctttccctttatttccttttcctttttgtttcactttttctttatcttttgtatttgggggaatcttcccaaatcgattcaccaacactgactaactttgtcaaaaacttctataccagtcatgggagtgggagcaattctatcttcaattgtaccatcaaattcctttgagtacctacgaaatggatgagtaggttgtagaaatcgtctatggcccatgtacacaacttttttacagtgtgttaatctaacaccatatgtctgttctgagcaaataggacatgctttatatcccttgacacaatgcccagacagattaccatatgctggaaaatcattgattgtccacaataaaactcctcgcaaagtaaaagtttcatcttttcttacatcatagcattcaattccttcccataattgttttaaatcatccaccagtggtgccaaatacacgtcaatatcatttccaggttgcttaggcccagaaattaataatgacaacatgacaaatttacgtttcatgcataaccaaggaggaagattataaataacaagattgactggccaacaactgtagttgctactcatggaactatgaggattgataccatccgcagaaaggcctagtcgaagatttctagggtctgaagctattttgggatacatgtcatcaatatttttccaagatggagaatcagccggatgacgcatttttccatccttaattctcttctcgtcatgccataccaaactttttgcatgttcaggattgcgaaataaacgcttaaacctaggaattggtggtatataccacaataatttagcaggaatcccctccttctccttgccattatca

SEQ ID NO: 53810 - DNA, 1138 bp, Cannabis sativa
tagccattctctctctgtaaaactcaatgaccacaattttctactctggaagcaacaagtactagctgcaatccgtggacatcagcttcaaaggttcattcaagaaattgctcctccaccacagtttctctcagatgctgatcaagcagctcaaaaatacaatccggagttcttgagctgggaaactcaagatcagttattggtgtcttggctcctatcatccatgaacgagaacctcctcattcgaatggttgggtgtaacactgctcgacaaatatggcgtacactggagaagcatttcactctacaagtctcctctaaaattcttgagttcaggactaaacttcagaatctcaagaaaggttctctgtcattggatgagtatttgctaaaggttaagcaacatgttgatctcttagcttctgtgggtgaaaatctgtcctctcgagatcacattgcagcaattttcaaaggattacccagcgattatgataccttcattatttcctcaaacactcgaattgaggaatattcagtgggtgaaattgaagctctactcttggcttcagaatcaagaatcgagaagtctgaaaaagatgtggagccgactcttaatctcgccattgctgactcaacatcacgatcctctgaaaatttgctgcaacttgaagcaaatcttgctcaattcaacaggaatttcagaaatcctatgccacaaagaggtcagtattatcctccatactcaaattttcaccctcccaattttcctaacttctcttctaatcgagctccctattctggtaattcctttcgaggatcaccttccttttacaactttgggagaggctctattcctggcactagaggaggcaaaccatctcagcatcacaacagaattcaatgccagctatgccataaaattggtcatactgttattgactgcttttatcgctttgataaaagctttacaggtgctgttacaccagctgagtctactccaatgcaagccaatattgctcaatcgactcctattgatgacaatcattggtatcccgattctggtgctacaagtcactgcacaccagatctgcaaaacatagtgactccagctgactacaatggccaggatcagatattt

SEQ ID NO: 53811 - DNA, 1030 bp, Cannabis sativa
aatactactctcatttctcttatccctaagaagcaacatgaccacactctttaaggattttaggccaattagcctttgttctactttttataaggttacttctaaggttttagctaatcgtttaaaggttgttttggataaaattatctctccttttcaaagtgcttttgtttctggtagagtaatttttgacaatattcttattgcccaagaagttgttcatgctattaattctcggaaaaatgggaagataggttgggctgctcttaaattagacacggctaaagcttttgatcgtgttaattggcactatttggagagtatcatgtttcattttaattttccctttaaatttgtttctctaattatgaaatgcattactactacttctctttcttttctgatcaatggctcggtttatggctctattcagccttccaggggtcttagactgggtgatcctctttctccttatctttttattctttgtgctgaaggcctctctgctcttcttagggcaaaacaagatgttggtttgcttaagggtattactatttctaggactgctccttctctctcccatctgttttttgcggatgatagtcttattttttgtactgctaatcgtacttactgtttagctcttcaggatatttttgatgtttattctacggcttcgtgccaggctattaatttttccaagtcttttattctcttctccccaaatactcagtctgatattcgcactgcttttttcactacctttaatcttgaagatagcccttttatctgtaaatatttgggtcttcctcaatgcttagctcgatctaaatatcattcttttgcttttttaaaagataaggttaattctgttcttaggggttggtctactaaatgtttctcaagagctggtaaggaggttttgctaaaggctatcattcaagctattccagcctatgccatggcttgttttcgtttgcctgtcaaattgtgtaaaggtattgaggctgtgatggccagattctggtgg

SEQ ID NO: 53812 - DNA, 757 bp, Cannabis sativa
  modified_base (294)..(298): a, c, t, g, unknown or other
ccggtggtacgtcccggatgtcgcatgcttgatgccggccaccaccacaatgtgctccagctgatgagggcaagttagggtagagtgaagctcgggtgcttcccaccctgtggcacgaggcttaaacccctcctgggcaacgggacctctcatcacctcttccagggtggcgaggcgctttcctcctttcttggaagatttggaaccggatgtagacattttggttctgaaaaagatttaaaattccagctgtcaggccccataccaatccctaagtcaaaaaagggaatgggnnnnncctaaccgctggaaagaggccccatccggatgtttgtcaacaagaaagccttagaaggttttcctgaacaaaattcgggtgcaagaatctcacagatggtggcattacgaataagcaaagaaaagaaaaggaaaaaagggtaaaaatcgagaaagacaaagtcctctctgaacccttgaaggtcatcacgtaaagaaaagatgggccttggaaaaaaatatatagtacgcaaaataaaagtaacgcaaaaaccagaagagaggagtctaacgtattgtacagaaactcaaggcaaaaaattccccgaaacttcaaacattaaacccagaaaaagcagatgaacagtaaagcatgcaatgaacacaaacaagaaagtacggaatgcgaaaaacttacataaagttttagaactgggtgttgttgttgatcgacggtgaatcgttgactgacaatagcgaa

SEQ ID NO: 53813 - DNA, 1552 bp, Cannabis sativa
tggagcaacaagcacaactcagagaaggtatagtttcatcaaaaagcctttaatggaaaatgaatatttttattttttattggttctagctattaacaatttcagaccaaattctcttctatggttttgatttttctaaggaatgaaatccatgttgctcttttctatttctcatttacagctctgcacgaaaaattgagggaagaagttcagtgccttaagatagcaaccaccgccaatacggaatcagagaatattgggtcggggccatagcagtccaaaacactctaaactcgacactcgacacaataagtgcggtgaccgttgtggccgaaacaagttgagagaaaatgaaacggtggtatgagatttagtgtaagctgcttatgagattatccacacccagttgttagttgtggtcatcatctgtatgtggagttgttaagtcatttcaggtcaggtttcctagactggtcccttgtttgatttgaagcaaatttgaatctgtaatgtatgaattggctttaactctctctactgttttagttctgaaatcctcttaaaacattctgaattggtgtgttcatcttgacaaatttgtttcaattataggattgttgtaaggaactgtcggtaattccatagacccacaattaacatttgctcttatttttgtacccttatttaagcaattcttatctcctgtagaaaaacctttgtcttttcagtctgtatgttctttgggttcttgacactgtgataattcttctttctttctttatttagatagtttaaattgtacttgtgttgcctttttataatgttgaagcattttttccttctttcttgtaattaatgggtaatgcaagcttattagtaattggtgtatgctatgaatttattcacccgattgatagctttttacaatgcttgttttgtgtaaaggtttcttcttccaagaagactgaaaaaggtggtaaaaataggagaccagttgggcattcctctacaatggactatttaagtagctcaacgccatatgattactcaaggaactatgatatgattaccagactgccgaatagctccatatcttatgatagttttgctgatgccacttcagagaaggaatccgtaagagatttacttttcttttattacaaaaaatcttttaaaaattttctctgttagtcaatgtagatagtgagttttgtgttggtgtcttaattatcagggtaatgagtattttaagcaaaagaagtttaaggaagctattgactgttatctagaactagaagcattgcattatctcaaacaacacttatgcaaacagggctatgacgaatctgaaggtcaaaaggcaagtttattacaagcactgctgtattgtttggcacagttagattattaaaagatttttgaaccaaatgttgtataagcattttaattcagaaagtgatttagttgtttgtgtagcagttatcgtgcttacttattacccaacaaaaatgtgacattttgccaattgcttttggagtaagtttcctttgtc

SEQ ID NO: 53814 - DNA, 2838 bp, Cannabis sativa
ctctctctctctctctcaatacatctccctctctttattcatcaattttgaacctctatagtgataaagtaccttgcccactcatatcaagtcagtactcaatcgtagtgtggaagattatgaagaattccaacagttgaaggagatccatactcagatcgtgtaattactctgcgatagaaaggaagaagacttagaaatctgagcggaaggacctatattattccgctgctatgtaaggttttctataactttatatgtgtataattcattgattgagaagattcatatttagggtgttagattataaaatgtaatctaacatgtttgttagtgaatctagatcctagtaaaataacatccaataacttgcctcagaagcatggtaatgatttaatttcatgaaatatggatttaaaacgatgactttgataatttggatgtcttcatgttagtttatgtttatataataaccagatcaagatcaccattggaatcaccaatcataagtacacaagattacaaataagctcataattagagaagtcacttcaagagtgaataatctctttttacaaccctcaatccacttaaagaactaactaagaattggagaaataatcatggtgattcactttgttttctctagtttctctctttactatagaagactctatctcaatcttggacactaccaacttagtcttgtagtcgtagttgttctctacctcattgtctagatcgagttagggagtaggtatttatagttgtgacagttatggacaagcataattacatgctgagttgttaaaaaaaaacagttaatacatttggttgttcaaagtggtcaaaacaccaacaattccaccttgttttgatcactttgaaaagtgggagaagatataactcagcagtggtaatgacttgatagaacgggtgttcagcagccattgacattcaacagtttagacagtgtctaaacttggcctaagtgacacacatggttagcatgtcagctgggttgtgggcagtgttgattttcttcatgatcacttcttctcttgtgataacatatctaataaagtggagcttgatgtctatgtgcttggatctctcatggaacatgagatttctcattaggtgcagggccctttggttgtcacaatatactgtgacatcatctgagttaaatcccaggtctttggtgagtcccttgagccaaatggcttccttgacagcctcagttgctgccatgtatgcagtctcagtcgatgagagagccacaaccttttgaaggttggatttccaacttacaaaactccctagaactgtgaatgcatatcttgtgagtgattttctggtgtcaatgttgccagcataatctgagtctacaaaaccctgatacttcttcttaagtgtgtgactcatttccaaaagtgagtcctatgtcaattgagcctttgacataccttagaatccatttcaaagctggccaatgttcttatctaggatctgcaataaatctgctaactacacttagtgaataggccaagtcaagcctagtacacaccatggcatacattagactataaacccctttagcatagggtatagtgtccatgaatgctctttcttcatcagtggtgggagactgatctttggtcagtttgaattgtggagcaattggtgtctacactggtttggaatcactaattccatacttctcaattaccttttcgaggtattttttctgagatagggtgattgtatttggcctttgtctttgtaaattaatgcctaggatctttttgacttccctaaggtccttcatgtcaaattcagcattgagttttgcctttaatttgttgatctctattctgtcttggccaacaatcagtatgtcatcaacataaaacaacaggtacaggttttcatatgtgtagacacactgatcatagttgcttctagtgtaccctagtttctccatggtttcattaaacctcaagttccattgccctggagcttgtttcaaaccatatagagatttttgtagcaagcataattcttcaaggtcattgctttcaaaaccctcaggaatagtcatgtagatgtcttcttctaagctaccatgaaggaaggttgttttcacatccatttgatccacctcaagatcaaattttgcagccttggccattatgattcttatgggtgcttgtttcactacatgtgagaatatgtcagtataatcaatcccttccttttgagtgaagccctttgctaccaatctggccttgaacctaacctgttcaaaccctggaaagccatctttgaccctgaaagatccatttgcatctgaataacctttatccaagtggtcttctaactatcttccatgtcttattcttaattagtgattgtttttcctcttcaatggcctgcagccattttttaacatccttgttattcacttcttcttgatatgatttgggcactgtgttgtcaacttcatctatgacagacaaggcatatgctgaaaaatcggcatcgccaaacttcttaggtgccctgatttctctccttgttctgtccctagcaagttgatagtcatctaagttgcctgctgtctcagtttctttctctgacttgaagtaggagtttggttttgagactctgttccttgttcaagttccatttgaacacttctaggcataacatctgtgctagtggggatcttgttggattttgtgctctaaataaaacccaattcaatataatcagatttactaattaataaagatcaaaaactgcattttctatttcatggttcacatgatttat

SEQ ID NO: 53815 - DNA, 1351 bp, Cannabis sativa
ccctttccctttcttgtgtttgatcgtatgcagcacttcttgggcaactatggaacactcggtaatgcttcggctagggaggaaggaaaattgaaatggggacaccaagggtttaataactcctttgaggcgattcgtaataatacgggagatgatcttataaccaaagttacagagacagataggtcggaaaagctcgaactttgtagcaattggacctttgggaataaggcaaatgaagtaagattcacctctttgtctagaatcccagtagaaaaaaaattcctcaccattgcaatgacatcctccccaataatattctagtattttcgaaagaaaatacctggatagccatctggccctggggccttgagaggatgcatcttgaacaccgtatctcgaactttatcgtctgaaggaactcgaccaatttcatcattatccagcgcagacactttttccaaaaacaaagaatcaagctcctgtcccgccagatcacccgtggtttcgaaaagggcttagaacttatccaggaaatacttcccaataccagcacggtcacgaacccactccccagtatcatcattcacacaaccgatgtagttacgtcttctacgaatgagagtcaacttgtgaaagaattttgtattggcatctctgaaacggagccacccttcccgagacttttgcttccaaattctattcatattttcttccgtgctcaggatctccactgaatctcagcctccctcgtgatattattgtcgtttataggctcattttgaatccgtcccagttgcttctgcagctcaattaattttctatcacaaaaaccaaacacattttggttcctcagtttcaactccttagcagtacctttgagttttttctcaagcagagaggtgcttagcataccctgccaagcctgactcaccacatccccacaatccggtcttgttgtccaaacctccaagaagcgaaacggatacttgagtttagcttgatctccccaaacattcagaacaatgggagcgtggtccgatccaaggatagggaagcttgaaacacgagccctcaaaaattccatacaccaattcgcatccgctatggcacggtccagcctcttgcgactctattacaagccacacgagagttttgccaagtaaaactccctctgtcacacccgagatccacccctcctgtttcaaacaaaacgtttttgagtaattccccttccttcctgttgtagcgcctaccaccagccttctcaaagtcatttaagataacatttaggtctcccatcacaacccatggagaattgcaatccgccaccttctccgttagtcattgc

SEQ ID NO: 53816 - DNA, 1089 bp, Cannabis sativa
aatatctaggttatttaaatattttaaacattatttataaatctttgagaagaaaaatgatataaaatatcaattttctaacttataatatacaaataattaaatttttaacaaaataactaatttatgaatttacaaatattataattagaatacctatataaatatctaaattaatttaaaatttataattatttaatttatcgtataagataattttaatataatatttcaaattaaaaggataatgatatcttttaattgaaaatacacccaatattacaatatctaatcttataattaaataatatataaatattaaaaaaaataattttttttttaaaatctgacaataatttaaaaaaacaaaataatcaatttttaaatttaaacgtcaaaatatcaaaatcaataataatctattaaatattattaatttgtaaatttgatatttaattttaattattaaaaacaatattttattaagaaatttgtggtttggaattggaaaaatttgaaattgggtgaaaaatccccaaaaaatcggatttttgggttgaaaccatggaagctgtccaggagaggttacaaggaacgttagatgcgcgtgcaggaggccatcagtgagctgatccgtgcgcagaagaccttactagcagggttatttgaacgcatcatcgtgtctgaattggggtggcacaccaagttcaaacaaaaaaatatctggtgcatctgcgcacgtctagcttccttatccgagatgctggtgcaagcaatgcaccatcttgacacttgcatgcacctgattttcaaatagccaaatcttcttagttttttatcaaaatcgagttctgtaatgacaaaagttgcgtaattattcataaggaatccaaataaattattttcaaaataaaaattattttttttcatggaaaaatttcgtaattcacataaattcttcaaataacacataaagaaacatgaacacatccaaatcaataaatgtaacatattcatcattttaaatccatattagatgaaagtaaatcattaccatgactctgggactagttgttgagaatattttac

SEQ ID NO: 53817 - DNA, 1046 bp, Cannabis sativa
attaaaaaatctaatgacaaatatggatgaaaaagtcgacagagcaaacactggcaccaaaaaagttgacagcactaaaaagtcttgaaaaaattattgtcgtcaaaaaagacatcacagttacctaaaaagtcatcagaaaaatcaatggagttgtcattgtcgtcgaaaaagttattaaaatttatattgtcaccgaagttagatgtctcatacataaactaaaataaaaccagttccacaataaaatgagtaaaaacaaataatacacaataactcagaaaccgtttataattaaaaaataagaagaaatcaattccaaaaatactgaaacataaaagaaaaacagaactagttccataaaaaatgagtaaaaacgaataacacataatgcttcagaaaccgattataattaaaaaaaaaaaaaaattgagaatcagttccaaaattactgagacataaattaaaatagaattggttctataacaaaataagtaaacaaaaaaaatacataataacttagaaaacggttataaagagagaatcagttcaaaaaatattaaaacatatcatattaacaaaattggttttacaacaaaacaaacaacacacaataactcaaaaatcggttattattaaaaaaaaaaaaaatatatatatatatataaatataatataaacaacaccaaatcacatcacaacaatagtgtgtttcttaggagattcctttgaaataggacttttatactttaactaaataaaaaaaccatgagaaacaacataaataaatgcaacatgatcttttttttttttttttttgaaggaaatgcaacatgatctcttaaaatatgttggttagaaaaaataataaaacaatataaaaaaaattaagaacaggttaaaattaataaaagcaaaataaaaaaatatatacaaagaagagagaatcaattctaaaaaatactgaaaacagaattgatttcataacaacattaataaaaacaaataacatacagtaactcggaaccgtaattaattaagaaata

SEQ ID NO: 53818 - DNA, 1538 bp, Cannabis sativa
ttcttacaaatcctagacctaacagctagttttcaattataaattgtttccttcttatttcaatctgaccattacattattgatattgttttttttcttttgtgtctcgatctcatggccatgggtggattgaatcccaagtacacttttattgcttcaaccgctcctctcaacagctatatttttcaaagggtcccaccaaactgcaaaccattctgtcttcttctaagattgttaatgacaattttgtccttaatatgtgaacattaaaaaattagagttaatacgaggtttaaaaagtgacgtgtgagtttcattagattaaataaaaaaacaaaagaaacaacgtactttgtttgatatttacattgttgatgatgatgatgatgagatgtgaagttctttcttttagtcttattttttgagaaagaaaatacgaaaagtgacagtaaataaggaaaaagaagggttagcttggcagttggatcctattttaattaaaaagtttgggttaaagaggttgggattgtggccaatggtataagcttaagttcaatcagagtagaaaagggtcccaatcataatcacccacttcatgagagtgtgtgacctggtttgtgagtgtggtccgcaaagaggcacttaattcttggctccactttaaagatacaaataggtgagcatattcattttagtgtcgggtaaggctggctaataatccaataaaagttttaaagtcgagagtaaacactaaacattatagtggttgttattaaataaactacagcgaaaatttgaagaatgcataagtaacaatttatatccattactacctttgttattattattaatattttttaaaacgtaatatcttgtatgttaaaccaaagagcacgaaggaatgatcatttgcattatcttttaaacaaatgtgaaacttgtgcttgtttcttatgtttaggcaatcaacttaactttttagaataaaatccaaaacagaggtatatcgtgaagaacattaagagctgaatggatcaatgatttaaattattttgtatttattttgttttaaattttctataagagcattgttcctaagacgtcagaatgctttaggaataattagtaattttcttaaaaattaattatatgtgatttaatactcaattacatcaacaaattaattataatatctcttacaattctataatcctatcaactaagaaatcaaaatgtatggggttattagctttgacaattctaaacatacggctatttttatttataaactcctttagaatattcatatatttgatattctctattattgtcaaacatatatacatatattaacatattatgagagtgagaatcaaaattattatcatcgtcctcctgttatttctcactcaaatcaatgccatactcagatcattgaattttatgaaagtcttattatgagaattggatctttagggcatgagaaaatctgctttactgtacacaaagaacaagggatgatctccttcgagcttgac

SEQ ID NO: 53819 - DNA, 1260 bp, Cannabis sativa
aatattataaaaaattactaagtaattatagagcgacacttcatcatagtgctaggcaccataggtgcttcataacaatactctataaatcaataaagagaaatgttaataggtattactggtacctaatacttttctcattgtcatatcgctattggtacaaataagtatcgggttccataaaacttaatataataatatttagtgaatatcgctaactaatagtagagcaccaccactagaagatgctaggcaccattggtgcctaataacaacactcaaaaataaaagtggtgcatagaatgcgagctagaaatataacactgatacttgcctatgtaacaattaggttgaacgggttggccatgttggttttatggtactaaatcaagtacgttgtagaataaaagtttttgattatcaccataccatatccccaagatcaccatatgtacatatattaagggagcattaatcgtgtgacacgctttggcttttggaatccccaatcgttagatggaatttgtgtttctggagacacgatcgtggatcgtccattccttctcacgtggattgccactttgagaataaatactctctatgatttcttgttgccacttttccctaatttttaatttttgacctttcaaaacttcaagttttctctgcattcttcgaggattagaactgaactcaaagccaagcaacttaaataaatctggaacgtgttgtcgatctttgtattcaactattgctaaggattagggttcgagagtttccaaaccatccacccccagtgattgagagcttcacgctagaggaaactgcgactctgaatttcaatacaaaaatcgatttgttgattgccttcgcatcttgtcttctcgaaaggtgtactcgacttccccaaccaaatccagcaacgatcagcttagcaccttcattttcactattaggtttgtatcaattaactttctcattttttgattgcgttttttgaatttatccccacacattgcatctgcatgttcttctttgaatgaaattaggattttttgcctgtgtgattgttattgttggtagatttaggcattataagacattttttctttaggttccagtgctgtggaagattactgtgtgaattcttcagcaaaactcttagattggatgatcgtaattatactaaaagatagcgataatcccctgataggctacaataggtattgtctctctttttattagtctagatttaatcta

SEQ ID NO: 53820 - DNA, 794 bp, Cannabis sativa
tcgactgaacccagaaatcaccattcgaaccactcacaaccagtcgcgcaccaccacttccagtcgaccttcaacttgcatcaccatcaccaaccactaccccagctcccaaacaaacccgtagccaccattttcagtcgactttcaccagaaaccacacatttgacctaatcagaactcccacctgaactcgatctcacaagcatcactccgtccccgaaccaacccgaaccaacccgtgcaccatcaaaacattcacagcgatccccaactcgaaccaccatctccagctcgcacgattcaacatcaaccctcgccaattcagcaacccacaatttcaccagcgacccaccttcaactcgaaccaaccatttccgtcccacttcagctcaagccgaagtcactcaagccaccacgaatcacgtgttgaaactccacgaaccaacattcaagctgccatcattacaaatactttccattttttctagaaaccaacgaagccagctgactacattcatcactccacactccctgatttgtcaagattgagcttttaatttttaattttgtatttggacaatatcttggttgccgcatagtgagtggttatgtgtggatgtttgttttggataaaattgaatttggatttgttgaagtagttcaattggtggtgtaatgctttaatttggaattgatattttgaaatggtatagttgataattggtggtgtggcttgcaatttttctagagtgacagtagaattttgtgtgaatttgaaccaggggctgtttgtt
